United States Patent Application Publication US 2006/0134663 A1 - sequence listing, part 58

SEQ ID NO: 139475 - DNA, 935 bp, Homo Sapiens
gcggccgcgctcgtcactgcagaccgcgatcggcatccatcatccgcgcatcgcacaacgttcccagggtttgatgggtggctccttcaacacccgcgaattcttccatcacaagacgctgcacttcctccgctcggtgaagtggaccttcctgctgctggccttcgtgctgcctgttctgctgctcagcgcaggtgctgcgaccgctttgcccccccttctttggctggccttcgcggtccagtacgtcggtctgctggccgaacgctggtatttcttcgcacaggccaatcatccgcagaacctgtactaccagaccatctcctgacccgcggttgcgggctgcggcccgcaaccggcggcgtccggttctgccctctcatcgcagcgcagtcgaccgcccgcaggcattccaggtcaaagctgttcggcgccgcgcaacgacagcgcgcgtcgccgccagtcatcactcaccgtcctgcagcacatacggccaccgcagttgccgcagtgcgccgtcactcgccagcacgcgcagcgccgccacgagggcgcaacacgaatcgggattgcctgcaccgaggccggtgtcgagtgggaggagcgcgacgcgcccacgcgttctagtatccgccgacagccttgaccagcagcccgccaccgaccgccaggcaaagcacgccaacccagaagcgcagacgctgcgcgttgatggcgtgcacgatgcgcgcgcctatcagcacacccgccagttcgaacagcaccagcgcgcccgcgaggccgaaatcgatgacgccgaagcgcagattgccaagcgtgcctgacgcacccgccaggatctgtatcacctgactggtgcctatcgtcgtcaagggggcgaagcctgcgagcaccatcatcggtactgacaatgccggcccaccgacacccgtcag

SEQ ID NO: 139476 - DNA, 790 bp, Homo Sapiens
gcggccgcggtgatggtgtttatcagtgccgtgctgatgctgactatccccaagcgccaacccgaccacagcgccagttacggccaactgctgggctcgctgggcaccttgctgcgcaagcaaccgctactgcgtcagcgcgccttctaccaaggctgcatgttcgccactttcagcctgttctggaccgctgcaccgttggagctggcgcgtaaccacggcctgagccaaagcgaaatcgccctgtttgccctggtcggcgccctgggcgccatcgccgcgcctatcgccgggcgcctggccgatgccgggcacacgcaccgcgcttcactgctggccatgctgtttgccgcgttgagttttctgccagcctttgtgcacccgttgtacagcgtgatcggcctggcggtgaccggcgtggtcctggacttctgcgtgcagatgaacatggtcctcggccaacgcaccatctacgccctcgacgccaacagccgcagccgcctgaacgcgctgtacatgaccagcatcttcatcggcggcgccttcggctcggcgattgccagcagcgtgtatgaacacggcggctggctgggcgtgatgctggtgggcagtgcgttcccgctggtggcgttgttgcggttcctgggtgcttcgcgccagggctcacccgcgattgcctcataatcctggcggccatcagcggctcaacgcctctcagcgaaaatgctgcatggccaagaggaagcgctgaacatcctccgaagacgtgtactgagcaaagctgattcgg

SEQ ID NO: 139477 - DNA, 676 bp, Homo Sapiens
  misc_feature (181)..(215): n is a, c, g, or t
tgtcttttaaaataacattttatttttcgttgtcaatgattaacttttaagtctattagaagagtatcatgattatagtgaataaaaaaatatagatgagagaatacaaatattaggttatacaaagttagttttttaaaaatcattgtccaccaaaattttcaggactttggagttctgnnnnnnnnnnnnnnnnnnnnnnnnnnnnnnnnnnntttaacacttccagcagttaaaaattaagaacacatatggataatcattggtggacgcctattataataaacagaaggaccacaaaaattaaaacaagttctaagaaccatcatatatacaaatttctgtacagaatgaggacaaaaacaattcacccaattaaaaccagctcttgtggtacacatactctttttcagaaaagaacgaacacttatcttcctgtattcatttgtttttccatttgattcagtattcttaatgctgtttccaccccataaattagtaactgttcaatagctgagaaatatcctattttcaattatgcaggggaaatcaggagcttccctggaggggttgaacttcatggtctgatgtaggttggggacacacctcacccaacgatgtcacaccaccgggtgggacagggaggggctggatacaacatcccatgacagtgagg

SEQ ID NO: 139478 - DNA, 1058 bp, Homo Sapiens
gcgcgggacacggttgagttggtcaagcaaggctaccggctaaaacgtgccgggatcctcgacatgtttccgcaaacagcgcatgtcgaggccatggcgttatttgaagcgggctaggatgcccgtttaatccgactggcctgtcgtctcctgggccgtgacctgtcagggagtggtacctagcctaatggttgcaccgctagggttacgcagcaggtcagcgatgatttttggcgcatccaaggtgcgtcgtagggaaggtaagcaagatggtacaggtgagagcacaccagccgatcaacaccgacggcagtatcaatctcgaggcatggctggatcatgccgtcagtgtcgacccggcactggaccgtgaagccttgaaagcagcctgcgagttcgctcgtgagtctgaacagcaagacaatgcggccaagaacctgtgggccgaaggcacttcaagctttcgcaccgggttggaaatcgccgagatcctcgccgatctcaagctggaccaggattcgctgatcgccgccgtgctttatcgtggcgtgcgtgaagggcatatcccgttgccgacggtcagccagcgtttcggcgcggtggtggccaagctgatcgacggcgtgctgcgcatggccgccatcagcgccagcctcagcccgcgtcagtccatggtgctgggcacccagggccaggtcgaaaacctgcgcaaaatgctggtggccatggtcgacgacgtgcgcgtcgcgctgatcaagctggccgaacgtacctgcgcgatccgtgcggtgaagaccgccgacgacgaaaagcgcaaccgcgtggcccgcgaggtgttcgacatctacgcgccgctggcgcaccgcttgggcatcggccatatcaagtgggagctggaggatttgtccttccgctacctcgaacccgaccaatacaaacaaattgccacgctgttgcacgagcggcggctcgaccgtgagcgctttatcaccgacgtgatgggccagctgcgttccgagttgcaagccaccggcgtcgacgccgacatcagcggccgc

SEQ ID NO: 139479 - DNA, 1197 bp, Homo Sapiens
ctttttccagtcacccaacctcaaggcgatcatgaccagcgcgccgttggcccgcagcggtggggccagtggcatcgtcgcgatttcacgtttgctggggcaaacgctgggggcgtcgttggtggcgttctgctttcacctctccctgggcagcggcccgcaatacgcgctgtggctgggctgtgggtttgcgctggtgggcagtgtggccagtgggttgcgcttgttgccgtataaacacaaggtttagcccttgtaaaacacgcggcggcaacgctaacgtggcggcctgaatatttcgggatgtttcagatttatgtccagcctggctctacgcactgctgataccacctcccgacgtgccgcactgaccctcgcgttatgcctgcccagtgatgtgttgctctacttgctgctgcccatggaatcccaggcctttggcatcaccctggcccaggccggggtattgcttgcagccaaccgcctggtgcggattttcggctaccgccatgtgttgaatttctacgcccgtaatggcgaccggctgacctgcatgatcgccgccggtgccgccacggtgtgcgccttgggcaactcgatgctgtcaggttttgccgctttgttggggctgcggctgatctggggcctgtgttttgccgcgctgaacctgtcgacccaagtgttggccacctctgagcctgcgggcgcggcgcgcagggcagggcgctccagggcggtgatcgccctcgggccgatgctggcgctgccgctggggggctggctgaccctgtgggccgggccgcgacctatcttcctgattctggccggctgctgcctggcgggcgtgtgggtggcacgtggtttgccgaccgccgggcatgatttgcacagcaccgggcgccgcttcaagtggccggacagcgtggcggtgtggtcgtttatcgaaggcgtggcgttggacgggctgtttatctttggcctgtcgatccaggcgcagaagattcttggcggcgatgcggtactgatcgccggcggcctgatggcactgcgctatgcctcggagatgctcctgagcccgctgggtgggcgtgcggcgcagcgttttggtgccacctcgatgctgctgttgttttcgttcttgagtgccttggcgctgacggcatttggcagttattgggtgatcgtcggcgcggccgc

SEQ ID NO: 139480 - DNA, 600 bp, Homo Sapiens
gcggccgccagggctatcagcgcttggtgttggaacggatgttccagccaaacttgatcgcgccgccgtctttggtgccgtcggctttctgcggctggtagtcgaccatcacctgggcgaagttcagggtgacgttttcggtcaggcgatcatcggtgcccgagccgccggtgctcagggacgtgaccagcacttcttccaggttgatcaccatgtactcgacctggctttcgccgccagccttgcgcacggtcagcttgaccttgtcgatgtgcttaccgctggcgcagtgcatcatcaggttgggcgaagccttgtcgacgtacttggtcagcgacaggtcctggatattcaccttgcccgcgccgccaccgccgcccacatgcatgttgccggactgggccatgccccagctccagttcagcacgtcgatttcgtccttgtgggccttgtccatggactcgcccttgatgtcgccgatcttgatgaaaatatcaacagccatgttttctccctgtgtggcacgggccactgaatttggtgatgcccaaaggggcaatgctgttctgtgggagctggcttgcctgcgattgcatcacc

SEQ ID NO: 139481 - DNA, 603 bp, Homo Sapiens
ggcacgagggccagtcgtccttgccgccttcggtggtcatgaaggttcgcacgccgggcagacctgctgcgatggcgccgatctgcgcgatgcattcggggccgacaaagaccgccgcggcccggctgtcattgatgatgaaggcgatctcgggaccggcgagccgccagttgaccggcgccatcacgatcccggccttcatcgcgcccagcagcagctcgaaatagctgtcgctgttcttgccgagatagcagacccgctcgtccggccggatgccgagcgccgcgaggccattggcgatacggctggtgtgttcgtcgaggtcggcgaagctggtttcgcggccttcgaaatgaaaggcgaccgcctcgccgcgcgcctgcgcctgcaggcggaccatgtcgacgagtgttgccggctcatggctgtcgatcatgatgcctcccgcgtcaaaggccgagcatcagcttggcgatgatgtcgcgctggatctccgaagtgccgccgaagatcgtataggcgcggccgttcagatgttccggcacgatcggcaaggcggcttccgggatggccggcgcctggttgatggcatagagcggccgc

SEQ ID NO: 139482 - DNA, 722 bp, Homo Sapiens
cgagggcggcggacacgcttcgcttgctctattgacacagttgtcagtatctcatatctgatcgcgtaccgaccatagccgtattggacctgcttgccatggcctcgctcgcgacccccgccgatctcgccatcgtcccgcgcaacatccgctttggccgcaacgagcgccgcgagcgctggtggctcggcggcgatccgttcgcgaccgccttcaacaatgcgatgtcgatcaccttcccgcagggcgaggccttcttcatcgagaccgtgcgccgctttcgcgacgccgtgccggcccagctggcggagcagatcgacctgttcgtgaagcaggagattcaccacacgcgcgagcatgtcgccttcaatcggcaggtcgccgacgcgggctatgaaaccaaggcgatggaggaatgggtgcgcgagcggctcgccgaatcgcgggcgcagcaccccgtcgcgcagctgtgcgtcaccgtcgcgctcgagcatttcaccgcgatcttcgcgcatcagatgctgaccaatccgcacatgttcgagggcgcttccgaggaagcgaagcggatgtggacgtggcatgcgatcgaggaggtcgagcacaaggccgtcgccttcgacacctatatgcacgtcacgcgcgagctgaagccggtgaagcgctgggcgatccgcagcctcgtcttctggcgcgtgtcgaagaatttcgtgcgcggccgc

SEQ ID NO: 139483 - DNA, 609 bp, Homo Sapiens
  misc_feature (586)..(586): n is a, c, g, or t
aaatgaagatgggacctcaaagcagatcccaaaaccaaatatgaagagttaagatattgtgcgtattcaggtatattgaggactttggtggaagcctaacatacttgtgtgttaggcgttaacaacttgcagctttttctttgtcttagaacatatctattagactcaggtctagtttggtttttgtaaaagatgtccaattgcagataataatttagcaaagcgatggctctcccgttgtacatccgataaccctgagtgatcctcaatgttcacagctcacaagggatgctcaagcaggctgagatatcagtatctgaagcaaaaggatgagtgtctatagcccggtgtctgtttcccatcaatcattcttttcttctggcaccaacacccttcgcctccgcccccggggggagcctcctgcaagtcgccccctctcagagcccgcacccagagggggaattccttcccgttgacgtcctcttccgaaatgcacaagatcagtgactttgacaggtagatgagggggagggagtaagggtgggcggagaggaagagaggatgagaaaggtgcctctctctccanaaatatagtgatattaataatga

SEQ ID NO: 139484 - DNA, 467 bp, Homo Sapiens
aaatgaagatgggacctcaaagcagatcccaaaaccaaatatgaagagttaagatattgtgcgtattcaggtatattgaggactttggtggaagcctaacatacttgtgtgttaggcgttaacaacttgcagctttttctttgtcttagaacatatctattagactcaggtctagtttggtttttgtaaaagatgtccaattgcagataataatttagcaaagcgatggctctcccgttgtacatccgataaccctgagtgatcctcaatgttcacagctcacaagggatgctcaagcaggctgagatatcagtatctgaagcaaaaggatgagtgtctatagcccggtgtctgtttcccatcaatcattcttttcttctggcaccaacacccgtgtggctcgtttgcccttgcgccgggcgggagccgagccgacggcgcggggcggcggccctgcgcagccagcc

SEQ ID NO: 139485 - DNA, 712 bp, Homo Sapiens
gcggccgcgcaacgcagcgcgcaattgctcctccagttgcagctcgaggaaggcgcgggttttaaggttggagctgaagaagttcaagctgttgcgaccggcatccttggactggtacagcgccaggtcagcggttttaagcaactcttcgcaggtcagtccgtcatcggggaacaggctgatgccaatgctggtggtcatcaccatgcgccggccggccagttcgattggttctttcatcttatgcatgatgcgctgggccaggtgccgcgcttcgtcgcgatggtgaatgttgatcaggatgcagaactcgtcgccgccaaaccgcgcgaccacatcgctatggctgcgcaccgaccccttgatatgcccggccagtacggtgagcagttggtcgccggcatcgtggccaaggctgtcattgatgcgcttgaagtggtcgatatcgaggaagatcaccgccatcatgccgtggccggcggttttttcggcgaccttctcggcaaagatctggttgaagccgcgacggttgagcaggctggtcagcgcatcgaagtgcgccacttgttgcagcgaggcacgggcttggtccagctcactgagcagggcgttgacccggcgcaggtcacgctccttgtgctgcagttttttgtcggcgagggcggcgctgacgctgctgccaatcaccagcagggtgatcacggccaccgac

SEQ ID NO: 139486 - DNA, 740 bp, Homo Sapiens
  misc_feature (224)..(224): n is a, c, g, or t
tatgcccgcgtcgcacgcgcggaagccaatgtccgccgcaacgccggcttcgtgcaggcggcgcggctgtccggcaatggcgaataccgcatcgtgctcgggcacatcgtgcccaacatcatgccgatcatgatcgtgcagatgtcgctgacccatggggctatgcgatcctcaacgccgcggggctctctttcatcggtctcggtgtccgcccgccgaccgcnggagtggggcatcatggtcgccgagggcgcgggcttcatggtgtccggcgaatggtggatcgcgctattcccgggcctggcgctgatgatcgcggtgttctgcttcaacgtgctcggcgacggcctgcgcgacatcgtcgacccgcagcggaggacgtgatgactgtgtcgccgcggtgtcatgctaccgtaacactgctttgcatggggttgttttcgatattttgtgggaggcgcgcatgactgcgcagccactgctcgacgtcagcgacctgaccgtcgagttcaccacgcgtcgcggcatcgtgaaagccgtgcagcacgtcaacatctcggtcggcaagggcgagaccgtcggcatcgtcggcgagtccggctccggcaagtcggtgacatcttacgccgtgatgcgcatcctcgatcgtgcgggccggatcgccgagggctcggtgatgttctctcggcatcgacgtcaaggcggcgaccgagagccagatgcgcgatctgcgcggccgc

SEQ ID NO: 139487 - DNA, 1289 bp, Homo Sapiens
gcggccgctacgatatttgcatctgctccatgaccccgagcaaagcccgcgccgaggtgtttgatttcccggtggagtactacgcctcgcctgcggtgatcgttgtgaatgccaaggatgagcgcatccatggcgccaaagacctcagcggcaagaaagtcggcctcaccagcgcgtccagctatgaaagctacctgaacaagaacctggtgatcgaaggcgccgaagatacgcaacttcagtacccgttcgaggatgtgcagatcgccccgtacgacaccgataacgtcgccttccaggacctgggcctgggcgccggtgtccgcctggatgcgatcctcaccaacctggtcactgcccaaccgcgcctgaatcaggacaagcgcttcaagctcgccggtgagtcgctgtatgccgagcccaattcggtggccatcgagaaaggtgacccgcagtgggatgccaaggtgcgtgaagtgttcgcgcagttgaaacaggacggcaccttgagcaagctgtcgcaaaaatggatcggcgccgatatcagcaaatgaccgccttcccgacacctcccaagccgccggtgaacgcatcgcggctacagcgactctttggctttcgtacgcggttgtacctgacgtggggcggcgctgttttgcctgttcgccagcttcttcgtgagctttgacctgaattctcgatcatcctcgacaagctgcccaacctggtcggtgtgcacttggcgccgaacggtttttttgcaaggcgcagcgctgacgctgtttctgtgcctttgctcgatagtcgcgtcgtcggtgctgggttttatcaccgcgctggggcgcctgtcgaaaagcgccgtggcctttggcattgcgagtttttacgcctcgttctttcgcggcacgccgttgttgatccagatcctgctgatttatctgggcctgccccaactgggcctggtaccaggcgccatcgtcgccgggatcatcgcgctctcactgaattacggcgcctacctgagcgaaatcttccgcgccggcatcctcggtgttccccacggccaacgagaagccgccctggccctgggcatgcgtgacagcgcgatcttctggcacgtcaccctgccccaggccatgcgcaccatcgtgccgcccgccaccaaccagttcatctccatgctcaaagactcgtccctgatctcggtaatgggcgtgtgggaagtcatgttcctggcgcagtcgtacgggcgatcaagctatcgatacatcgaaatgctcacgaccgcc

SEQ ID NO: 139488 - DNA, 534 bp, Homo Sapiens
  misc_feature (463)..(489): n is a, c, g, or t
cagtcatttacatcttctcatgaatgaaatgcagtgtagggagaggagatggcaggacacagcaaacaggacacatttgcctgcttctctcttgcctaattcttcctgacctgtatttagtgatgcttaataatacttgtaagactctaggggttcatttcccatttcagcggaaagtacttcactcaacaacaatattctcaagagtcttctactggaagctagaaagaaataggaatttaagtccatagaatgaaggtagttattcctgcctgtgttgcccacctgttcacaaaaagtacctttatgcttgaaaacattaggttctttggttactgcactgtagtttcaaatggatcctccagatggcattcatgtcttactcaggaagggcactgccattgtccccaaggcttctgtctactaattctattggtcttgtgttttgcttgattgcttggcnnnnnnnnnnnnnnnnnnnnnnnnnnntggagctattttctgtcgtatataaatctcgttatatgaatacgc

SEQ ID NO: 139489 - DNA, 648 bp, Homo Sapiens
gcggccgcgccttgcaggacgtcgcgtctcgaaagtctccgtcctttcatcacgtcctccttttcttcttcttgttatttcaccggctcagcgcgcggcagcggtcgggcggcaaggtcagccagacctcgctgcctctgccgacattgacgtcggtcggcgtggtgacgcgcagcgcggtgccgtcggcgacctcgaccatgtagtctctgttggcaccgagatagacctgacgggtgacgacggccttgatcacgttgtccggcgaggccggcgcctgcgtcgacagcgcgatatcgtgctggcggatcgccaccgcagcactttggcctgcggtcagcggcgcgccgatcacgcgcaaggtattgcctgcgaacgcgacatggttgccatcgcgcgcggtgcccttgaacacattgctggcgccgatgaagcgcgcgacgaattcggactccggccgcgcatagatatcttcgggcgagccgagctggtcgatcctgccgccgttcatgaccgcgatcagatcggcggtggtcatcgcttcggactggtcgtgggtgacgtaaacggtggtgtagcgatattcgtcgtgcagccgcctgatctcgacccgcatttcctcgcgcaggttggcatcgaggttcgaca

SEQ ID NO: 139490 - DNA, 703 bp, Homo Sapiens
ccaacggctccttgcgtggccgaccgcccttcttgccattggctcgggcggcggcggttttggcggcgctgctcttgcgaccgttgcgcgacgctaccaggcttgtcgccaggtccatcaagggctggctggtggcgatgagcccggtgatcgaaacgtccagatcctgcgcctcacagcacagcgccttgccgccaaagccgacctccagttgctgaaagtcctccagggaaaacccttcgaactccggcaacccggctacaggcaacatgacgcggctgccgtcgctgaaaccgatggaaatgcactcgtgttcatagcgcacattgctggcatttgcgtacagacgtttgagcttgcgcccacgggcgatggccttgtcgacatcggcgtcagtgagcggcttatagggtacgactttggcttttacgattttcataaattaatccccacgcaatctggcgctctgaccagattcaaaattgttctttgctctacgacatcgtgccgggcgcttgcgatgacatagacaccacgtcgaataaccaacccttgaaccaattcaccagcgtcccaatcccaggaatggttctccaggcaaaccgtttgcagtttctcccaccagatccggcgtgcacgcgccaggtagtgccgctgcatgatcgcctcgcgtaattccttcaggagcgcagtaggcggccgc

SEQ ID NO: 139491 - DNA, 1248 bp, Homo Sapiens
  misc_feature (1097)..(1106): n is a, c, g, or t
aaatcattatgtttgtatgtttggaaggccacgccatctatcctcccacccagggcaggaatttctgctcccacttttgctttcctggaggtgaaataggaagaacaaggacccatgctcaagtccccaaagaatggcaggatgccctcagtggaggcagactgtatttaaatgcaattcacctctttggggtctaggaaaagccacccgtaggttcatttgctgggaaacacggtctgcgtgcctgaggcagtggacaccagggttgtggccttggcaagagctgactttctccggaggtctgtctgctgtccggagtggcagccacttcggtgggcaaataggacggtcatctctgggcccaaggacgctgcttcaggctgggacgccttgagggtggctggctgttcaggctttccggaggtgggatgggaggtgtaatgtttggtgggaggagggctgtaattctgaaatctcacggttttgacttgcttttcgatgccatttcttgagttttctggtttcaccaggatggatggtggggcagatgcgggcggttttggcagaggctcactcttgatggggatttctttgtcttccataatgagggagctggccgcggagtggatccgggcctcactgcccctgctgatgcacgtgagggcgggttcccccgtgagggcaggcttggaccccatctccaccaccacggctgagggggaggaggggatcccctgtggctggtagaattggaactgctgagaccgaaggaccatggtggggctgcgtctgagggagcctaccacgagagtggggatcccggactggaggggtctctgcagggatccattctttctcatgctgctccgccctttccgaagagacccttgtcctaaagtcccagggccggctgtgcttctcacggggttgactatggcagtgggcacaaagacggatttgaagggacggctttgccgtggatcaccttctgaaatgctgccttgggaggacacagaggaggtggataacgtccatgtggtgtagagaccagggctccgggagtctggaaaactagaggtctttctggttttggaaannnnnnnnnnaagagaagaaatagagaaagaaaatgttcagtcaagagtcctatttaaaaacctatcagctcccaaccacataccaaatgtgctacttctctccttcttcccacccatacacacccattttgtgaactacaggcgcgaccgc

SEQ ID NO: 139492 - DNA, 561 bp, Homo Sapiens
ggaacgaggtcgaaatcattctcacccactgcaacggcacccccctcgatctcccggcattgctgaccgctgaaccggcaagcttctggcatgatgtcgtcggcatcgctcgccacctcgaccgagataccgggaaactctcagcttccttcatgccgcgccacgttcagaaatcgcgcccgcacccataaacgtccgcggccaagcatgcgcccgaacacccggaaagggcgagtgagacgctggcccggcgaactccgggccgcgattcagagagagcggccggtcagaaaggaaaccacaatgacccacccgcactaccacgctgtgtcgtccgccaagctcttcggcggcctcgcctcagattatatccagatccacaactggttcgatgccaccaaggaaagctacgccgatttccgccatcgcgcgctccgccaccacgcagagggcatttttgagtgcgaacgcgtcttcggcatcaccctgaccaacagcgatggcaagcaagtgcccgttcgctatgtcggcgaacagcacgttatggaagattgcggccgc

SEQ ID NO: 139493 - DNA, 701 bp, Homo Sapiens
gcggccgaaccaatattcaccaagggaggtttacaccgccactgtccctgaaatgtctgatgtcggtacatttgttgtccaagtcactgcgacggatgcagatgatccaacatatgggaacagtgctaaagttgtctacagtattctacagggacagccctatttttcagttgaatcagaaacaggtattatcaagacagctttgctcaacatggatcgagaaaacagggagcagtaccaagtggtgattcaagccaaggatatgggcggccagatgggaggattatctgggaccaccaccgtgaacatcacactgactgatgtcaacgacaaccctccccgattcccccagagtacataccagtttaaaactcctgaatcttctccaccggggacaccaattggcagaatcaaagccagcgatgctgatgtgggagaaaatgctgaaattgagtacagcatcacagacggtgaggggctggatatgtttgatgtcatcaccgaccaggaaacccaggaagggattataactgtcaaaaaggtaatgccgcttcttacacaccatacagagtgaacccatttacttttctccagttcctaagttaccaggggcaattatatctcacataaacattcctttagatttttattttacttattattttcagaaaaatgccagttctgggcctcgtgccgaattc

SEQ ID NO: 139494 - DNA, 736 bp, Homo Sapiens
gcggccgctccaacatcagaatggtaacacgactctggcattcgagagtctgagctgcctcacatcacgcttcaggacatccgcaatgcacttgagtaccagaagctccagtatgtttccgctgacagtaatatcccggtgaatgcggattacagtccgttgcatatcttgggaagcaagggtagaaaaaatgcaaaaaagcctaggataacactcgtcagtaggacaaccctggagcgcatcgagaactatcacagaacaccgctctaccaccgacatagccagcggataagagacccaagtaagacgcctgcgtttttcaattcacatgggaagccctataccaccaagagcgttgaaaagcttattgagcgtgtaagcaagcgggcccagaaggctgggaagaccaagcgaaagatctcggcgcacaaatttcgtcatggctcggcgtatctcctcctcacaagcccagatctgggaaaggattatttcgagcgcctcggaatgctttcgatagggcatggtcacagccattccacgacatctgagggctacacccagatccctcatgacatctaccaaaagctctgcaagcctgactcactcatcaagaccaaatgcggagagatgcaggtactgcgcgagcggacgaccaaacgaatcacaaccggtgatagaaagtgatatctcagaccacacccgccagtacagttttcacgctgaacggatcacttga

SEQ ID NO: 139495 - DNA, 658 bp, Homo Sapiens
gcggccgccagtttgctggtttacttgccggagttgggcgagttggatcgcagagaagtggcggcgttagcgggcatagccccttacaacgacgacagcggaaaccacaatggaaaacggcagatatacggaggaagaacccgtgtcaggcatgcgttatacatgtcgagttgggttgttatccgctttcaagcagactttaaaacgcgctacgaggctctaagggagcgaggcaagagcgcgaaagtcgcgctcatcgcctgcatgcggatactgctgatcagactaaatgccatgctgcgagacggtacagaatggcgctgacggacggtgggttaagacagttgctcccaccttggaatgcattccaaatgtgggagcgggcttgcccgcgatagcgttccgacaggcgactcattactcagcgatgagccaatccatctgccacccaccctgggtctgaccaagtttcttggacagccacggcagcagctcacgcagttcctcctccagcccccacggcgggttggcaatcgccaggcccgagccggtcagggtgttgggcgtgtccagcggatgcaccagcaattccacacgcagcagcttcggtgcgccggtgccggcaaggtcctggtagaaacgccgcagcatgcgctgg

SEQ ID NO: 139496 - DNA, 406 bp, Homo Sapiens
  misc_feature (14)..(14): n is a, c, g, or t
gcggccgccgcgtntggcgccgtccacttcgaaacgctcgttgttactgcgatggccttcgaccaggcccaggtcgtggaacatcgcgccgacgtaaagcagttccgggttgtaggccagttgcttgcgctcaccgctcaacgcaccgaacagaaacacccggcgcgagtggtggtaaagcaagtcggactcgacgtcgcggatgtattcggtggtggccttggccagggcgctgtccgggatctggatgcctgcgatggagttgctcatggtcgttctcctcaacaaagcgccgggggtggcgccgatgagtgaagtctggtcgcgtgcccgcgatggggctatcgcggcgagggtgcgatgtcggccaatgtggctcgatatcaagccacatgcggtcaaatgt

SEQ ID NO: 139497 - DNA, 535 bp, Homo Sapiens
ggcacgaggggcggcgtgcaggtcctcgacggcgagcgccggcgtcgcggacgggatcgcggcgagcgggggggcctggacggtggccgcgtgcgcggtctgaagcgaggccatcgtcaatgtcccagatacacttcgatgaccttcgggtcgttcttgacccgctccatcgaaccctcagacagcaccttgccctggtgcaggaccgtcacccggtgggcgatgtcctcgacgaacttcatgtcgtgctcgatcaccagcaccgagcggcccttgatgatctggttgagcagttcggcggtcttgatccgctcgccgacgctcatcccggccaccggctcgtcgagcatcagcagctccggatcctggatcagcagcatgccgatctccagccactgcttctggccgtggctcaggaactcggcccgctccttgagctggtccttcaggaagatcgtctcggcgatggcgtggatgcggtcgcggacctcggcgtcccgcttgaatgtcagcgcgccgaagaccgagcggccgc

SEQ ID NO: 139498 - DNA, 662 bp, Homo Sapiens
  misc_feature (196)..(286): n is a, c, g, or t
gatgagtttgatttcttttgctatttcattgctctagctaggacagccagtattgattgaatagaaggggtgagagcattcttgcatcatgtgagatcctacaggaaaagcattccattttccctgactggttatttctgctgtggtcatttcatggatggtctttgtattgttgaggtaaatttccttctctttnnnnnnnnnnnnnnnnnnnnnnnnnnnnnnnnnnnnnnnnnnnnnnnnnnnnnnnnnnnnnnnnnnnnnnnnnnnnnnnnnnnnnnnnnnncattatgttcaagtggtatatcacattgatttgcttgactatgttgaaccattttgcatcccagaaataagtggcacttgcatatcaacaatcctttttataacctcttgaatacagttcgctagtacaaggggtcttcaggaagttcatggaaaaatacatattatgagaaaattgtgcatgatatcacattttttgcaccaagataaactggtacaaatccgttataacatgtctgaacagggtttggtttgaggcactcagatgggtaagacatgagtttgaaaagagactcaatcaaggcaatgtaaattctgctaaaactgaaacaagaagaaacatcaaatttgcgatgagaccagatgctgtggctcag

SEQ ID NO: 139499 - DNA, 686 bp, Homo Sapiens
  misc_feature (53)..(53): n is a, c, g, or t
gcaaggaaggaatgaagggatttattgaaaacgaaattacattccacagtgtngggagcggcccgaacataggggctcaaaggccccgttacagaatttttggaagtttaaatatcccctagatgattccattgtttacttcacttaccctctacgtaaatgcagaggatgaagtaaagttacaaagtcacttacagcatacgccctatggagtggatatttcctgttacagccgaagtgtgaattggccttatgttccctgcctcctgaccctattttcctgcctcaggctcactgctcaatgtacacggaagcaataccatggtactgcctttgagaaaagaaagactttattgcaagaccagccagcaaggagacaggaggcaggttcaaatctttctccctgattttgggtctggggcaagttctaaggaagcagagggcaaaggaaaggacttagaaatgttggctgggcaggatctgtttgaaggccttcaaatttggccatttatggtacggtatgttgaggtggattttagcccctatcttctgggccaagagacccttcccttctgagagttcgaatgttcgggttccagtcatgtcccagtcttcttcgttccaaggagacgaatagttggttctggatgtttgttagagatcaaatctttttctatggtgcatgc

SEQ ID NO: 139500 - DNA, 866 bp, Homo Sapiens
gcggccgccttgcttgccacggctggcttcacgctgtgttacgctcgccggtagcgcgcggcagcatgccgtactcggcagtcaaccaaccctgaccttggcctttaaggaagcgcggcacgccgttttcgacgctgacggtgcagatcactttggtatcgccaaactcgaccagtacagatccctcggcgtgtttggtgtagttgcgggtaatgcggatcgagcggagctgatcggcagcgcgaccacttggacgtttcataggggatacctgtacgaaggacgaaaaactgccgagcattatagagccgcgaaccgtttcggggcacttctaaaaaattcggttacgaatggcctggtcggcgcccattgtttgggcgcgctcgccccactgcgctacaatcctgcgccttcgcagcctgtcggcttcaaaatttacccatcagcccgcatttgcgggtctgcatcgcgaggtacttccatggtgcacagcatgaccgccttcgcccgcgtcgaaaaagccggcgcccagggcaccctgagctgggaactgcgctcggtcaacagccgctacctggagccgcacctgcgcctgccggaatccttccgcgacctcgaaggcgccgtgcgtgaagcgttgcgccagggtatctcgcggggcaagctggaatgcaccctgcgttttaccgaagaaaccaccggcaagccgctgcaggtcgaccgcgatcgcgccgcgcaactggtagccgccgccgaaaccatcgccagcctgatcaagcaaccggccgcgctgaacccgttggaagtgctggcctggcccggcgtactggtggccgacgccaccgacccgcaagccctcaatgccg

SEQ ID NO: 139501 - DNA, 662 bp, Homo Sapiens
  misc_feature (361)..(377): n is a, c, g, or t
cctgtcatactttgttaggaagggtgagaatagaatcttgaggaacggatcagatgtctatattgctgaatgcaagaagtggggcagcagcagtggagagatgggacaattagataaatgtccattctttatcaagggcctactttatggcagacattgtgctagtgcttttattctaacttttatttttatcagttacacatgatcataatttaaaaagtcaaggcttataacaaaaaagccccagcccattcctcccattcaagattcccactccccagaggtgaccactttcaactcttgagtttttcaggtatatacctccatgtttctaagtaatatgcttatattgttcacttcnnnnnnnnnnnnnnnnnaaagaaatctatttcataccatggaggaaggctctgttccacatatatttccacttcttcattctctcggtatagttttgtcacaattatagattagatcaaaagtctacataactaatacagctgagctatgtagtatgctatgattaaatttacttatgtaacttttattgtctttggcattaacagtgtttcaaaaaattttctgtgtatacccatcagtgattcattcccaaatcttctacaagcataagtgtctcaatatattaaaaaataatgaataaa

SEQ ID NO: 139502 - DNA, 1093 bp, Homo Sapiens
gcattactgccctgccctagcggcagcgccgcgctgattttcaagacggggctgtatgtccttccgattcagccgctcggtctgcagcgcgagcatcatctcgatccgctcgcgtgctcggcttcgttcaagcgccagaacatcttccagggcttgcatgtgcagatactcggtcagcagcggagcagtagtcttcccgctttcagcggtgtaccactccggagagagaaatcgcttttcgatttcgttggacatcaactcgtagaacgaggcctggccatcaacaggagaccgcctggcaatcatcccattgaggctgttgctggccagcgacatcaccgcgtcatcagccaactcgtgcgcccgcagggcctttccttgcgggctaccggtatcgggaagcttggtggccatctcaaacgtaacgttcttgacgaaggctcgggcggcctcgatctcggcctcattaaaggtctttctcccctcccctggctccaacatcctgtcgaaacggatgtcccgatcctgcatggcggcagccacagcttggcaccgtccagcgctggcatctcgatcggagcagtaagggacgtgacgctggatcagcgcgagttggtcttggtagaaagctccatgagtggcgtctagcagcgtgcgattttcagcagcagtttgccggacgcttccaaccatcgcgcttccaaccgcctgtacgctagccattgtttctgcctggctgctcgcagggatgctctcctcggctgcactaccggcacgctcttgggcctgcaggttagcgtcgaccgcctgtttaccctcaaagagcgcctgctgagcagcgagctgctgtgtcatgactgcctgatggccattcactcccgaccaccaatccgggtagatatcgcctgcaagcacttcgacaatgtcgctggcccaagaagtaaaatccgagaccatactggcgccggcctgaacgaacgcggaatagcccacgaacccccagggatcacagcaatatgctgcagacgctcggtagaccggcagtgctgctatccccagagctaaagctgttgcagcaatccagcgcggccgc

SEQ ID NO: 139503 - DNA, 766 bp, Homo Sapiens
tcgagcgacaggccgtcgagcggcgtcgtccacgtcgcgccggcaatgccctgatagcgcgacacgccgggcactcgcgccgagatcaggccgaggtcgacgcgctcgcccgaacgctcggcgtcgagcagcgtgccgcccccgacgacgcgtagcgacgggatcgggcggccggcgatcgacagctcgacgccccgatggcggagctcgcccgacaggccgtagtggccggcggcgtcgaacacggcagccggcttgtcgatcgcgaaagccgaggcgatcagcgtcatcgcgtcggtcgggcgccagcgcagcccgatctcgcgctgctcggcgacaatcgcggggagcacctggttgcgattcaccgcattggccggcgcgacgccgctgtcctcgagcccgcgggtgatcgcggcgaagccggtccagcgctcgccgagcgctgccaccgccgacaggtcgtagagccagggctcctcgcgcgtcgccgtctgcggctgcgccggggcttcgaaatcgcggcggtagaaggctttctgaacgccgcccttgagccgcagccaacccagcgtcgcctcgtagccgagcccggcggtgagctggcgcgcggaatcgcgcgttcgctcggcatcgggcagcggcggtgggtcgctcggtggaagcggcagcagctggtcgacctccgacaccgcgaccgccacccccggcgcaaagcggttgcggctcgatcggaagcggagctcgccgtagagccggcggccgc

SEQ ID NO: 139504 - DNA, 716 bp, Homo Sapiens
  misc_feature (11)..(11): n is a, c, g, or t
  misc_feature (571)..(571): n is a, c, g, or t
  misc_feature (606)..(606): n is a, c, g, or t
  misc_feature (634)..(634): n is a, c, g, or t
gcggccgccgntgggcggtcacccgcatgctgccgatcgcgtagataaacgcaccgacccggtcgcctttgaagtcggggcttaacgagtaactcaaggccgcgagatcgcgccgctcgccgagggccggcagcggttgctgatgctcgatagcctggcggatttcccgcgcggcactcaccgcatccgggtaaccggataggcgccactggctggggttgcgcaggtagagcttgctcatcaacagatacaggctttgcaagttgtcgcgcatgctcagggttgccatgcggtcaacgctggtctgaaagaactcatcgggcctgccgttgctgaactggctggcgatatcgcggccctgctgctggctgcaaccactggtaaacagtgccaaaagaacaaccaaaaacaacggccagcgggagatacaagtatgtgacgttcgatccatcggcaccgggtctgattctgttgcccacactctgaatgagtggggtcgtgacagggatagatcaggagaatcaaaaaaagtgcggcgagccgggtcggatcagaggttgcctacacacanaggagtgcctataggatcgttcccacgcgccgcanaggaatgccgccctgaacgctccgcgtnccgcttctgacgccgtgacgcagagcgtcacaagatgcgttaccacgcggagcgtgggaacgatcaagctgccggtagtgca

SEQ ID NO: 139505 - DNA, 512 bp, Homo Sapiens
ggcacgaggacagcgccgcatccgcaccaaaaatgtcatgcagcttgcccggcgccacgccctggatatcgttggcggtggtcaggccgttctggcggaaagtttcgtccaccagggcaatcggcaacacgtagtaaccggcttcggccaacgggtaggtgacctgcgaaaccaggctgtaggaggcctgcacttccggcgactcattgatgggtggcagtaccaggatcgacttcggccgagcctgtttgaacgctgtgtaatcaatggtcttgggcgccgcgcagccgccgagcaatgccagggccagcaaggcgccggtgagttttaacaggttcatttagtggcaactccagccttggcgtttttcagcaaaaagtccatgtacgcagcggactcagggaacaatgccttctcggtgcggaactcctgcaccatctggtcatccttgcccatgctcaggtacagcatgcccaggtgcgcgtggtaacccggcggggccttgcggccgc

SEQ ID NO: 139506 - DNA, 665 bp, Homo Sapiens
cggcacgagggtacacctcccatgtgctgatggccaccgacgacgaatgcatcgacggctatcgtgagttagccgatatttgccacgctcagggcaccgtggtgctgtcgcaaatattccacccgggccgcgagatcatggagtcggcagacgggttgctggcggtggcgtactcggcgtcgggagtgcctaatgagcggtttcgggtgatgccacgggcgctcgaccaggcgatgatcgatgagatcgtcagcggttacgcagcggcggctaggcgcctgcatcaggcgggaattgacggcgtggaagtggtcgccagccacggctatctgcccgcgcagtttctcaacccacgggttaaccggcgcaccgatgactacaacggcgtgcttgaacaacgcctgagattcctgcgggaaattattgcggccgtgcgggccgcgaccgacgcgcagttcatcatcggcctgcgcatttctgccgatgagcgcgacagcgaaggccttaccgaaagcgaatccctggaggccgtgcaacacctgcaaacgcagctggattatgtgcatatcgtcgccggcacctcggcgtccacgggcggcgcagtgcatatcgtgccgcccatggccatcgccgccgcgtacctgacccgatgcggcgcaagctta

SEQ ID NO: 139507 - DNA, 657 bp, Homo Sapiens
agaattcggcacgagggcgacaccgacgcaaacccgcatgcgtcatctggctgtggataacttattggcccgcctgaacctgccgttactgtcggtggatgggttaaaacgccagcccagtggggacttgttgcacttgggcacttatccacagcgacaaaaagatctgttttacgttgccgccgttgcgccgctgggtcgtctggactcaagcatgctcaaaggcgccgcacagttggctagtgagttcggcgacggtacgttgcgttttacgccgtggcagggcgtactgctgcccaaccttaaaaaccacggcgccgtgactgaaggcttggagcaattgggcttccttggctcagtcgaccaacccctggcacgcatgatcgcctgcaccggctcaagcggctgcgccaaaggcctggccgacaccaaggccgatgccctgcaactggccgcgctgcaacctggcgccgaggtgcacctgtccggctgcccacgctcttgcgctgccgcacacaccgcgccggtcaccttgctggcggtaagccccggccactacgacgtctattttcgcgaggcagcccaccccggtttcggccggctgcacgcacgcactctttcccattgaagcggcgggcgccctgttaacgcggccgc

SEQ ID NO: 139508 - DNA, 794 bp, Homo Sapiens
agaaaaagggattttttttatgaatacaaatgtataatttaaaaaaaatacagtgttataagtgtgtaggagttataacttattttaagaagcagtaagtagttccctgcattacctttccccattcctaatccttcttccttcttctcctcagaggcaaccactttcatttctttctggtaattatcattatacttctaaattacatgcatgcgttattctttcttatttatttatattatcttttgacatcatactgtgggagatacggtttagtactcttgcagctcccctgtccccggacaaatacttctcttccccatcctcccaatttaggtaaatcatcatttttatcaggttaatatacagtatttatattatttatagctgagtcacatagtaaactgcagttacttttatttcccaggattaataattagtattttgtttgcatagtgttccatgtacctattatttccaccccagactccttatcagaactatggatctcctctgggctggttcagacacacgtcaggtcacttacttgtttcattttcccttggagccttctctcctagagccctctatcatctggctcctcccaggacggagtgcactctaggcctgctgcccaactctcatcctggaatttgcatttaccatcagcctggaattcccttcacctttctctttcatagtagatcctgttttttaaattccatgtcttcttcctttcttgccttggtggagtacattcataacagtttcttgagaaagggagcatgagcagt

SEQ ID NO: 139509 - DNA, 553 bp, Homo Sapiens
ggcaccagggtatgaactttaggaaatcattttggtcggttttatacaatgtgtaagttaatgtctggaaagatgttttgaacaggatgcaggaattagaaggcacagaaatgataatataaaaatttagatcatatatgaattttttctaaatgttcaagctaattgctttcattagtcatcctgaactgctgcaggtttcatttcccaccaggacagctgtgccttttaaagtaaaaatagtcatttgtattaactataaggaaaaagtggcttcagctggaagaacttaccaaccgaaacactcttgagcttatagaaataactttggtaagtggcctctcttaaaaaggctgctgaaagctctaaaatataaggataaaacatacggtttcagactgtacactttgctgctacaaactacatcttgatgggattaagaggctacattgattcttgggtttattgcaccaacaatccatctctgacctacccatggctgcatctgaaacaaggtaaactccaagaagaaatgaaaacagtgggtccctaa

SEQ ID NO: 139510 - DNA, 691 bp, Homo Sapiens
  misc_feature (622)..(623): n is a, c, g, or t
  misc_feature (627)..(646): n is a, c, g, or t
gcggccgcggctgtaggctatgaaggagactaattcctagtacaatacttagctcagagtcagggggaatgaagcaagtagaaagatatcacaatgaattctgtgttttcagtattgctaagaggattctgaacaatttgctaagaaaataaagtgatacctaaattagagcacatgtgtgtatgtgtgtagggagagctttcaaatcatggtttcttgaggaagcaaaagcttaggtgagacctgaaagatgaattagagggagtggtacagacagaaggcagaaaaggaaagaaaggcattcatgtagagagagctgaatctacagagatgattcctttaatgaaaggatttattcagttccccttgagggaactgtagaatgagtgacaagacctcaaaatatagcatagttgcccccgtcttaaaaacatgcaggttttcaataataggatggggaaagtaccaaggtagattgcaaagagtttggggtagctagagtaagaagtagaaatgcttggagaagcaagaagaggcaggagaggaaaggctggacagatcagtggctgaagatcaatgataatgaagaagcttttatggcattcttgggagtgtgaatttnncttnnnnnnnnnnnnnnnnnnnngagatggagtctcactctgtcatcaggctggagtgcacctcgtgc

SEQ ID NO: 139511 - DNA, 769 bp, Homo Sapiens
tgcgctggcgcgcgagccggcggtcaactggtcggcgctcgaaggggtgccgctggtgcgcatcgcgccgcagaccggcaaccgcgtgctgatcgacgacgccctcggttcgcgccgggaaaatctcgactggcgctacgaggtccagcatgtggcgaccgcggtcagcatggtcagggccggcatcggcctgaccatcgtgccgcgcctggccttcggcgcggtcgacccggccggcgtcgtcgcgctgtcgctgcgcaatcccggcgtcacccgcacgctcggcatcgtctccaagcacggcattccgccgtcgccgccggcggcgaccttgctcgaactgatcgtcgcccatttgcgtgaaggggcgaaaggcgacggcgatagctgagcctgttgggagagtgacatcaaaactctcatttgattcatgggtcggctttcgcttctgtgtcgtcaattgacgttcacgctgggcggcccctgcgggccggcggggatctatgaccaacaccttgtctttggcgctgatcggcttcggcgaggtcggccagaccttttcccggcaatggctggcgcgcggcgatgtcagcgtcacggcctatgacatcctgttcgacgacaccgccagggccgaggcccatcgcgcgctggccggcggcatcggcgtgacgccggcgacttccgccgcccgtgccattgccggcgcggatatcgtcgtctcggcggtgaccgcctccgccgtgctcgacgtcgccggcgcggccgc

SEQ ID NO: 139512 - DNA, 848 bp, Homo Sapiens
gcggccgcgccaagaccgacgacggcgtaggcgaacagcgggtgcacccagccgaacatcagcacacagccgcccaccttgatcatgttgctgatgaacatgacccgccgcttgggcatcgagtcggcgaaggcgccgacgaaagcggccagcgccacataggaaattgtgaagaacagcttgagcagcggaatctgccaacccggcgcctgcatgtccttcagcagatagatggcaacgaccagcagggcattgtcggcgagcgcggagaagaactgcgccgccatgatgatgtagaagccaaaaggcatcgaacgtctgcagccggatctggccgccggccgggcgaaaaaagtgcgcctttataccatgaaccccctgacgcccttgccacccccgcgcttcgtgtcacaaagcgtatcctgtcgcgccgcaacacgatttcgacatccgcagcgctgctgtcgcatcgcgtccactgacgcattttggtttacccgccaaccccgacttggtctataaccacgagggcaggcgtcacttatatagagggaaaaatgcccgatagaaggctggaagtctttcacgcagcagcgagccagatgtcgttcacgcgcgcggcggaactgctgcagatgacccagcctgcggtcactttccagatcaagcagctggaagagcatttcggcacccggctgttcgagcgcgcccacggccgcgtgtcgctgacgcccgaaggcgtcaaggtgaaggactacgcggaccgcatcctcgacctgttcgccagtctcgaaaacgagctgcaggcgatggccaccgacctgcgcggccatctgctgatcggcgcc

SEQ ID NO: 139513 - DNA, 626 bp, Homo Sapiens
  misc_feature (552)..(552): n is a, c, g, or t
catgttccattgcattcagatgtcaaccatcccggttgccttttatcccaaagcttgctgtgagtgtgtgtgtgtgagacgtaggcgaccctcttagtactggggtcttggggccaacttttcccatcaagcgttactttgattctgttctgacctcattccatagtttgcagtgagcatggcatctttgcctggagatactatgctaggggcagctttccaggggcaaagcaagccctcgtgttacacggctctcctccagctcacacgacatgtgaggagatgaccaaatgtgaaaacaggtttcccctgtgttgcccgtcatcctttggcccgttcacaggaatggagtactgtataattttaggctttcattcccagcagtgtttactgaggacctggttttctagaacaggtgtgtcctgtcctcttccatgttccctgggggctggtcagctccaagttgtgggtggcagagctgtgtttcagcatgaactgactagagacccatctggaggcaaatattaagttgccaggactgctttcacttcnagggtgattgaaggacacatattgaagtacctataatgccagaaagtgttctattgcccaaaaaacaaatcaga

SEQ ID NO: 139514 - DNA, 941 bp, Homo Sapiens
gccaggccgtggccgccggcgggcgcctggccgacagcgcccaagccctgcaacaggccggcgcgcgctacatcatggtgtggatgctgcccgacctgggcttgacacccgccatcaacggcacgcccgcgcaaggcgccagctcggccctgagcagcattttcaaccaggcgctggtgcagcgcctgtcgcagatcgacgcccaggtcatcccgctgaacatcccgttactgctcaatgaaaccttcgccaaccctgcgcgctttggcctggccaccgggcaaaacctcacaggcacctgcttcagcggcaacggctgcaccgccaacccggtgtatggcattggcggcgccaccccggacccgaccaagctgatctataacgactcggtgcaccccaccatcgccgggcaacagttgatcgccgactacgcctactcgctgctcgccgcgccgtgggaagtgactttgctgccagagatggcccagggcaccttgcgcgcccaccaggatgaactgcgcaaccagtggcaagccgacaatggcaactggcaggccgtgggccaatggcgcgcgattgtcgccggtggtggccagcatttggactttgatgatcaacgcagttcggccagcggcgacggcagtggctacaacgtgaacgtcggcggcagctatcgcctcgacgaaaactggcgcgtcggcgtggccgccggcttgtatcgccagacactcgaagccggcgcccgcgattcggactacaagctcaacagctacatgggcaccgccttcgcgcaatatcagcaaaaccactggtgggccgatgcggcgctgaccggcggcaagctggacttcgacagcctcaagcgcaagttcgccctgggcgtcagcgaaggcgccgaaaaaggcgacaccgacggctggctctgggccttgagcggccgc

SEQ ID NO: 139515 - DNA, 431 bp, Homo Sapiens
  misc_feature (290)..(302): n is a, c, g, or t
acttttaaaaaataacaaaatgttttatacacatttctgtatatacaactgaacaacattttacatgtttcttttgcacagcaaaagatataaacattcagctctgagaacacagttatgtacagaaaaaagtcaaaaatacttcacaacagtgcaaaaatattttacacagtatcatggagtgagatcttttgagcaagaggaagggtgtgtgtgtttctaaaggaaaactcctttttaagatattggatgtctttaactgtaaacaaaacgcgactctctttcatctnnnnnnnnnnnnnaaacagttatttgaagaatttggcaacatttcaggggtctgagtctgaggtaaacagccagaattcttgcaccaaaaagaaccaagggctaaagggttgcattaaagcctcaaacaccttgagagcaaa

SEQ ID NO: 139516 - DNA, 942 bp, Homo Sapiens
gcggccgctccaacatcaaaccggggtcaagaagactctagccggggttcagataattccagttatgatgaagcactctctccaacatctcctgggcctttatcagtaagagctgggcatggagaacgtgacctggggaatcccaatacagctccacctacaccggaattacatggcatcaaccctgtgttcctgtccagtaatcccagccgttggagtgtagaggaggtgtacgagtttattgcttctctccaaggctgccaagagattgcagaggaatttcgctcacaggagattgatggacaggcctttttattacttaaagaagaacatcttatgagtgccatgaacatcaagctgggccctgccctcaagatctgcgccaagataaatgtcctcaaggagacctaaggtggccctcttgcacaaaccagcctaaggcagacactctccactgtccaggttataacctggtaccagcagactttgcagggaagaaagagttgttccaatcatgtaaccttctgtaggggattactgagacagggaagagaagtgcaagaattggttgctggtgctacatggcggcagctttgacattttctctgggttctactttattttttaaaatctttacagttctcaccatttcacgtaccttaatccaatctttataaaagaggcagtctagagaactaggactgctcagccttatcctggagtggagcatttagctcaggtcttaattctccaagaggaggaatacatagtatggtaaggcaaggaactgggtggaatgtcaggttgcctgcccaatgggagaggtagggtttttctagcttgtgtgacagaagtagcaaaatctggtcctcccccctcccagtgtagctgtggctcagagttttttctttttgttgtcacttactcccttgtgattgaaaa

SEQ ID NO: 139517 - DNA, 786 bp, Homo Sapiens
  misc_feature (499)..(556): n is a, c, g, or t
agccattattagctcataatctgtagttggctaaacagttctggtctagattggctcagttgatctctcaggtgcttgcttctgtgtctgaggtcatctagggtgttgcctggttgttggatgatctaagatagccttgttcatatgtctgacaattagcagactgttggttagggctaggagagtgactcaaaccacgtctctcataatccagcaggcaagacggtacacatggaggtcacggggttgcaagtgcagtaagagaggacaaaccctgatgactgaagtgtctgcttgcatcacaactgctaatgccccattggccaaagcagctcacatcaacgacctagacttaaagggtgcagaaaaagactccacttcctggtgggaagatctgcaatgtcacactgcaaaatcatgataaagggagaggaagagtttgtggccaattttataatctatcacattgggttttcttgtgtgagtcattttaaaagtnnnnnnnnnnnnnnnnnnnnnnnnnnnnnnnnnnnnnnnnnnnnnnnnnnnnnnnnnnagtgacattcattgatatcatttaaatatcttttgactcccatcaattgcctatttaccaataaatttacttattttacttttcctttctgatgactgcaacttactatgaaatggatccaaaaagcaaggtagatttatgggtggatagagggaagattagatggacaaatgtgagataaagcatgcatagtaaaatgttaatgttagaatctcaggtggtgggtaaag

SEQ ID NO: 139518 - DNA, 663 bp, Homo Sapiens
aatgattcaattaaataatttattcattgtaaaatatacagagggaggcaggagcctgtgaaacaattaaaagcatgagttaaaatggtagacgtgacttagataatcaaggagggatgaagcagagaccaaaaaaacttgacaatggattggctttgaatggtgaaagagaagaaagagtgaaaataattttatgattcttccctcctccactgcctgtattctttatagctcacaccatttactaagctcagggtcaagccttgttttctttttgtccacagtgggcatagactcacaattatttcaatgctgatatttcctattttgaaagcttctgcctcctttcatattctatcctcaagcaatatccaaaatcaaatatttaagtactaaacatatgtcttctattagtaggcctcaattatttcttctcagttaaaacaccactgagctaatcaggaataaattcacatccaccaaagtaactgcagttggacaaattgtaaaggggtgagggctaactaagttcatggatggaaaaagatagatcagagttttctaactggaaagaagtaaataaaatattttcttggatttacctttggtttgagtcttgacccaggaattaatcttttttctagcttcttctgcaattctagg

SEQ ID NO: 139519 - DNA, 554 bp, Homo Sapiens
gtagaatatgttattttcatgcaattctgtaagtctaagatcgtcatctacagttctgctcttaagaacacaagttttatgacacgctcagcttaagaaaccaaaagtgtctaaagtactttatgttaccaaccaaatttggctgctgcactcattaagaatgcaacttaaaaaattttggttaacaaaaagagtaatttgattatacaagatcttgtatactgaataatttataataatctaccactgtctaaaagtgtaagaatcaaaacagccatctaatttagtttcagaattatagatgaatacagataattataggtgacccaattccaactaaaaaatccagagttgacaactccagatatgtagccatgcttgtgtctttctagtcacagctcaacctacccttcagtttgaagcagtgtggtgccatggtgaagactactgattttagagctttgaatctcggttcttattactatgtgacctgtgtgaccttgggcaaggtactcaatttctctacaataatggacataacagtactacttctc

SEQ ID NO: 139520 - DNA, 354 bp, Homo Sapiens
ttaaggactgccaaaaatctaattttatttttgcatcctttataaataaaaagcaaccgataaccactttcctcttagatccaacttcaatgaccacattctcagaactaccaaaagacttcaagtacactgtctgtaaggaacagtttataattgctgaattttacatttttgcttaatatacaacatttctgcttaatatatcaagcatatttttgcttaatatatttttgtaaactatagttaactcttggaatgtctaaactaccttattttcttcattaataaaaatgagtaatttaaaacttcatgcacatgtaacattttactattattatttttgagacaaagtct

SEQ ID NO: 139521 - DNA, 1288 bp, Homo Sapiens
  misc_feature (694)..(694): n is a, c, g, or t
gcggccgcagccaaatcaccgacggcgaaatctacgccgtcgaacacgacggcatgctccgcatcaaatacctctacaaccgccccggcggcggcctgcgcatgcgcagccacaacgccagcgaacacccggacgaatacctcacccacgaacaacgctttgaacagaacttcgggatcgtcggctgggtgttctggtggtccaccctcaacaaccgcagacccgtcccactggacgaacacctgctgggctgggaaggctctaaatcggatccggaggtaggcatatgaggtgaatatgggtatcatgccgcccacatttggcagggggtggctttgcgctatctattctgcctggcgatgcggaggagttcccgcagatgcccctactattcagcccgacgtgatgtgggctgagcgatttgaaggctggtgaggtttgtcaaaaacaagctgaggcagtccccgagaagccggccacaagccggctttttaatgtctggaattccccgatcagcatttatagctaagccagcttggctcaaacctaccaccactttccaaaacctatattcctgccaaaaatctacctgacgttcaggccgcaaaagactcacgcaaagatagatttctcttacaatccctgtctagttttccaaatccatttacggatgcgataaccatcggcgatcaangaggcgagcctgtgagcaaagtaggtagcacatccgagcaccctggtaaacgttgaaagtctttctgcttcattgcagcgctttgctgatgatcgtgactggcgacaattccattctccgaaaaaccttctcttggcactgacgggtgaagtgggcgaactctgcgagattttccaatggatgagtgaggccgactccgtggaagcggcaaagcgtcctgaaacagcacaggccgtaaaagacgaactcgccgatgtcctcatgtatctggtccgtcttgccagcgtgctggatgtcgacctcaacgaagccaccaaaaataaactcgcgcttaacgggttgaagtaccccgtcgataaagccaaaagcaccagcaaaaaatacgaccaactctgacatcccacgcgctaaggacttttcgtgatcgtttacgctgctaccaaacagcaatttctcaaagacaacgataacgacgatatcgaggaggtcattctcaggcactacaaagaagccaccggcaagcgagttggcgcgtcggaaatcaaatcctggcaggggtcgctgacgtacatggcgaaggtgctcctcgttccg

SEQ ID NO: 139522 - DNA, 578 bp, Homo Sapiens
agaattcggcacgagggtttttcccctggccgcaagccgacgtgttcgatctcgattccgtccggcgaggcagcgctgcgcacttccaggccgctcaggtgtaccatgcgcttggccaggtccatgatcttgaccggctcccccatgtccaggacaaatacatcgcccccttcgcccatggcgccagtttgcaggaccagttgcgccgcttcaggaatggtcatgaagtaacgagtgatttccggatgggtcagggtgatggggccgcccagcataatctgcttgcgaaacaggggcacgactgaacccgacgaacccaaaacatttccaaagcgcaccatgcaaaaccgcgtgatatcttgctctctggaaaatccttgcaggatcagttcagccagccgcttggttgcgcccatgacatttgtggggcggacggccttatcggttgaaatcagcacgaagcagcccacgcctgcggccatggctgcctttgcgatgctgagggtgccgaacacattgttcttcacgccttcgaccgggttgtgttctaccaagggcacatgcttgtaggcggccgc

SEQ ID NO: 139523 - DNA, 1004 bp, Homo Sapiens
ggtttccctcctggccacggttttggcgcctcccgggttcctccgcccctgtcggcagcctggctggctggtacgaatggacggcaattaagttcttggaacaaaagcgcacactggctggtggtttccttgcgtctttcttttttctgggttcaaatccaacttcctcttccctttggagactccttgggcttggcaggtgctggcctatggccctgtagactggatagtttgagtaggcagcaactagaagcctggagggtacagctgcatagctaggtcctgctgggtcgctggctgtgactggggatgtcttgttgatccggctgaagaagagagcccccggcctcagagagttggcgctctcatcctcctccttcacacggaactggccaagcttggtcactgtcaccttctgggacggggcctctgcctcatctttgtctggggggctatgaaaccgtacaaaactcaagccaaagggggagtccttgctgtagggctggctgcaaacaattttgacccggtcccagcgcttctcggcggctgcccggaccagcttgtcaggcccaaacatgcgaacgcggttggggtttgagccactgcggctctcggaaggggacatgaaagatgaggtgaccagaaggacctcatagtcttgctccccagcgcctccagctgaactgcccaccagcacctccacgaaagctgagccatcattcccaatgtccacactgtgtatctgctcctccttctccaactgtaggaccacagagatggtcttctcgcctgccttggctgcccgccattttcggtaagtgtctgccttgagaagattttctgcacagtgagtcgagtcctggctgctgcaggacacgacatggcggaggcggatctccggcatgtcaacgtcgtgggcttcgcctggccagaaggatgaggtagagtatggggtccgaggggcagggagagtgggagggacgcggggtgcccactgcgctggc

SEQ ID NO: 139524 - DNA, 758 bp, Homo Sapiens
gtgattttctttggagactcctagattttctgtggttttgaactgaatttgttggatgttggcaagtgcctcttatgagctgtttctttatccttgcatttgccccacaaagacttatctggaggtgagcaaagtatgtttggtagtgaggtcacaaaggcaatcagccccttcctccccactcccattgccatcttctcagtccttcttcctttctttccaagtagtttacccacccctcctctttcctcccctgtccctaaaataatccacgtgtcttcctaaaatctctctttgatcctgtcctttgataacaccgtcagtgcctactactgggtctagacagacctctgttgagcagtcagagtcttccctgactccacaatgcccctttccttggctgaccagtatgactactggtccccacctttcccttgcctatccctacctccctcctactaggttgtcccatccctctcttcacccattcattcatgaccatttttcactaccaagctccccccctcccgaaggaggctgaggtttttgtgactctctagactctattgtgggatggaatgaacattgctaaagaatcttgtgttcgctttactttaaaaaggtatttttttcctaaattatacaaacatgatgtgtcacgttacggaaaaattagaaatgcagcacaaatacatgaatattttaccacgaaattgccatataatatcttgtcttgctggtggaaggtaccgagctga

SEQ ID NO: 139525 - DNA, 917 bp, Homo Sapiens
gcggttcgggcgcaattgccacacccaaacccgccaccgccgcctccagcaaataatacaaatgctcaaaaccctggccgtgcttcaacgcgccgggctcgatgtcatgttgctgcgcccagatgggccaggcctgcgggcgcgaggtggtgtgtaacaaggcttcaccgcacagggcgtggggcggcgcctggcgcaggcgttcgtaaccggcgaagcgcgggctcattaccgggccaatgcgctcgctggccagctcatacacctgcatgtccgctggccatggcggctccgcaaaaaccagcagggcatccaggccggggcgccgtgggtcgaggtcgccgtcacccgccgacaggtgcagacgcaagtcgggcaagtctgcgttcaagcggcccaggcgcggaatcagccagcgcgccagcaagctgcccgagcagccgagcacaaaaggcgcatcggcgctggcctgggtcagttcggcgcaaacatcccttaaacgctcgaacgcttcggcactggcatccctgagccgaacgcctgcatctgtgagtttaaggccgcgcccgtctttggcgaacaggctgacacccaagtgctcttccagcaccttcaactggcgactgaccgcgccatgggtcacatgcagttgctcggctgcctgactgacgctgttcaagcgggcggtggcctcaaacgcacgcagggcattgaggggcggtaggtctcggctcatctgtgagttttcctgacaggttgtggcgatcttatcggttttcagcctggcgcgtcaggggtagagtggccgtcattgcctctcctcaccttctttcctggagcgccccatgactcagtcccagaccgaccttcgcaacggccccgacgccaacggcctgtttggcgcgttcggcggccgc

SEQ ID NO: 139526 - DNA, 741 bp, Homo Sapiens
gcggccgcttgctgaatgccctgtgtctgttggtagctgccggtctgagtgtgcaattgatcagccagaacagcccgcgtgcccaaggcggcaatgcctacatgaacgaattggcgagcaacggcccgtaccaattttttgccgcctttcgcaataacgaactcgattacacgcagttctacaaaagcctgccaaccgatgttgtcgccaaacagttgcgcgcagaactcagtgaacccaatgcgcactttatcggcacagacccgctggatatccgccgcactatcgacaacccaggcacattgcgtaaacccaacatcgtgctggtgaccatcgaaagcttcagcgccaaatacatgggcagcaatggcgatgagaacaacctgacgcccaacctcgatgcgctgcgtaaacaaagcctgtacttcaataacttctatgccaccggcacccgcactgaccgtgggctggaagcgatcaccttggcgattccacccacgcccggccgctcgatcgtcaagcgcattggccgtgaaagcggtttcgcaagccttggccaacaactcggtgccgtcggttacgacagcgtgttcgtctacggcgggcgcggttacttcgacaatatgaacgcgtttttcagcggcaacggttatcgggtcgtcgaccagagcagtgtgcctgaagcggaaatttcgtttaagaacgcgtggggcatggctgatctcttgccgaatcttggct

SEQ ID NO: 139527 - DNA, 1531 bp, Homo Sapiens
  misc_feature (57)..(81): n is a, c, g, or t
tggggggacccattggtcctgcccggatacatcttttttgtggggggacgtgggttnnnnnnnnnnnnnnnnnnnnnnnnnttccccctaaaacccttttatatgagaaaacgggtggtaggggggaagaatatggtgctctggggaccggggtttaggggtttttccaaagtgggcgcccccatggcccaaaaagggtaaaccggtttttttgtatggtggagagtgggaaaactgagcctcttttaatttaaaagggttagggaaaatcccttttaatacccagggttcccaaaagcttatttaccattcccccccagttttaggctgaaacaataaatttttggaatacttctttgactgaaactttaggccagaaaaagcccaaacctgaaaatggaggaaccgtaatttaaagtgtggccgaaaagttgggaatcatgcggcctggatatccaaagataaatgcatccctgaggcatattcccctggccttgaggtatgcaggcaagggagaggtcacaccttcctgggagacaaaggatcaaagttgacacagagctccaagaaaatatttaccagaagaatgtgatgattcatttatcagtccagaaatcccaagtacaaaacttcaagatacaagaaggatcaaattatatcatatatatgattcaatttaaaaattcttagccctcttatatcatattatctagattataatagtaaaaaatcaagttacattcatatgaaactttcataaaaagaaatcaaatccagttttatgaaattttatagtacaattactttctagtgggtcttttcttaggtcacagtatttataattccatttacatctttataatttttaaaattagaaaacaaaaggatgtcaatagaaatctaaattttcacttgcaaaactcccttcagtttccaggccagtaacacatggtgatgtcgacttgtcctccagacatggacggctaccaaagatccccagttcacggagcatgcaggcctctactcattaggaacgctttttggtttggctcacgtttcaagaaattgtggagcatgtccatgccgtccagagatcccccaggtttcaggattaggtttctgtatttcattccaacctctggattcattatcccttcttttttaaaacagctgtaaaacatatccatggaaaatacttcactccaaagatatccataatattggccatcgtatccccctgccaaatgtccaaaggtagctggcatatttgtgcctggagtagctgcaactcctaatatttctgagcagtatttggcatattcacttgcagcatccagcgatgtgttggtatgaagagactgatcaactttgctcaaaacaatctggcgcagggtcagaagacctgtgttgaccagcctagaagcaacaagtttttcaagcagatcgtctgcaatagggcttccatctttataatgttttgacaatcttcgcgagggaatcgacgtcccacacccaattttcaagcggccgc

SEQ ID NO: 139528 - DNA, 842 bp, Homo Sapiens
  misc_feature (600)..(608): n is a, c, g, or t
agggttcctttgaagtcttataatggctgcctttagagacaataggtgacaaatgtttactattcagatctttaaaaagtgctagactcttagataatctctttaggattaggaagacttggaaaaaaaatatctagctatgttaatagggattctttacagatgcaaattttcccccacaaaggacagctttgcagggccatttcaagttatggcaagtaaacatgttttggggtaaaatatttttattttcttccttgtcttgtaatgttatgccagagtcaggttgcaaagtaactcatgatatatagagctaaataaaacccatctgatgagaatttatggtttatagggcatgaccctccagaccccttagataggaatttgggcaagattaaaaaaatcagagcttagttctcagtcaggatgaggatgatgggggcagagtacagggcaaggggttaatgtgtggctggaacaaggctgtgcctggggggagatcaacttgagaaggtattaggctgcagggcatagggacataatgctggaagaaactgttcaaagagctgcgtgcccaattgggtgagactttaaatgtannnnnnnnncagatttgagaagaatctggtcatctggccgtgaaattcaaagtctgtgtataacttaattcatagacatgtgtgcatgtacacacacacatgcccccatagaaatgactctttgaattcctcaaacattcagttcctttaggttatggcttttattgccaattgaaattaatcaccagggaaggccagtatacaaattctcgagtttttccattttgatgttggagcgaccgc

SEQ ID NO: 139529 - DNA, 832 bp, Homo Sapiens
atttcttgaaatgggtgttctgttcattcatgggcaggggtcaggattgaagttcatatatccataaagcagagcatgagaaactgatgcaattgacaaacgtgtccagggctaaagcagaagatgcactgtctgaaatgaagtctcagtattcaaaagtgttgaatgagttgacccagctcaaacaactggtggatgcacaaaaagagaactctgtctctatcacagaacatttgcaagtgataaccacgctgcggactgcagcaaaagagatggaagaaaaaataagcaatcttaaggaacaccttgcaagcaaggaagtggaagtagcaaagctggagaaacaactcttagaagagaaagctgctatgactgatgcaatggtacctcggtcttcctatgaaaaactccagtcatccttagagagtgaagtgagtgtgttggcatcgaaattaaaggaatctgtgaaagagaaagagaaggtccattcagaggttgtccagattagaagtgaggtctcacaggtgaaaagagaaaaggaaaatattcagactctcttgaaatccaaagagcaagaagtaaatgaacttctgcaaaaattccagcaagctcaggaagaacttgcagaaatgaaaagatactctgagagctcttcaaaactggaggaagataaagataaaaagataaatgagatgtcgaaggaagtcaccaaattgaaggaggccttgaacagcctctcccagctctcctactcaacaagctcatccaaaaggcagagtcagcagctggaggcgctgcagcagcaagtcaaacacctcgtgccgcctcgtgc

SEQ ID NO: 139530 - DNA, 744 bp, Homo Sapiens
attccagggctgtttcaggttgagcatagggagacaggtctacccatgttagccaacacattaattggacaaacccaaatgctgtgcccagactgggcaccaaggttagaaaatgtctaatttttgaagtcattaagtcaacactgttagcattcatgaaaaagatattgttattcaccatacttcatatttggctggatgggaggccataatgtctacctaaaaagtattagctactgaaaagcacagcactgaaagccttgaggactacaggagctcaaagcacacaaaagtggtaaaggaaggcatcatctgggggccacaaatatgttcccatagaaaggaattcttttgggaattcaccacagttagacatctgtctctcagcctcacaagatgaggaaccaggtcctgtgattatcccagagctgactggaaggggtattgactttcactaaccaaactcacaaaagcctgatgtaccaaatgcccaatggccaatttattctgtttcaataacaactaggcatcattttcaaaggggcatatactgacaacagactgcccagaaattatctccctatgtaggaaaactacagaagacaagttcttagacttttaatgcccaatacagtagccattaatgacaggtgcctactgagccttgaaatggaatagtccaaattgagatgtgctataagcttaaattacacaccacatttcaaagcctacagccgcggccgc

SEQ ID NO: 139531 - DNA, 879 bp, Homo Sapiens
gcggccgccgagtacagcgtgcagttggtcggtgaggctcaggcgcgtagccaggtaaccggctttctgttttttgctgctgtgttcgcctttgaggccggtggtgcggtcggggaacttggggataccgcccatgtgccgccagtcctgaatgtcttcataaccttcgggtgtgctgtagcgctgaaacggcgatgagtctcgctgctcggattcgccataccctgccatcagctcatgttcacggccaaacaatgaataggtcccggcaaggttgaagtccaccacgtccattttcgatgtaccgaccatctggttggtccaggcgttcatgccgctgccatccgggttggggtagccggcgccgccgtagtacaccttgccatcagtatcactctggcgatgggtgtaggccgccttgaggcgccagtcagcggacagtttatggtcgatagaggcgaaggtggtcttgtctttgagtggccaggaactccagtcggcagccatgttggccgagcgtgacagtcgcgccttgctgccatcgctgttccagtagggcagggtgccccaagaggtgccttgcacatgtttgttctgatagtccaagcctacggcgaccacggtgtcgtcggtcaggtcgccttcgaggatgccgtagccgacctcccgttgcatggcgtaattgtcgcgataggactggctgtcgcgataggcaagtaccgtgcgtccacgcagtcgcccatcaaacgccagggggccgcccacatcaacgtagctgtagtagttgtcatggctggcgccgctgacgccggccctggcttgccagtctgcggtcgggcgcttgcggatcatgttgaccgtggccgaggggtcacccgc

SEQ ID NO: 139532 - DNA, 656 bp, Homo Sapiens
  misc_feature (56)..(66): n is a, c, g, or t
cacctgtaacactgactttatttttaagtctgaaaatgtcttgggaaagttttacnnnnnnnnnnntcaacagaagcaagttatgaaaatatttgaccagcttcatctttggttatttcttattgcagctctgtaaggacagactgttcccaaagctccagccatggcaggaagggaagcaaatcagtccctgtataaaccatttaaccaattgaatgtatcacatgttgataaatacatagaagcaggccctagggcctacaaaaccagccccactcccaaccacaaggttgaaagtcttatggggcagaacattaagactcctttataaatatgaaaatagattaatcaacaggaaaaggtctttgaataggttagctaagagccatgaccaccacgctgccttgctgtccccttgcatagaaatgtagtgacgtggtctgaccatgcagtaagtgcaaacagcaattactcaaatgtcttagaatactggcaagaagcaccccaatattcaggtctgggaaacagccatgaccattacggcctcttgatcagctccatgttccactcagtagcttatatgccccaagaaaaggcaagagacagacctggggtggggaaagaccggggtaatagctgcctgccagctcagccta

SEQ ID NO: 139533 - DNA, 507 bp, Homo Sapiens
gcggccgctgctgctgtcggtgggcaatgccttccgccgccgccagcgcatgctgctgaccgtgctggcgctggccagcggcggtgcggtgtatctgggcgcggtcaatctgcgcagcgccgtgcgcggttcggtggacgatctcttctatgcccagcgctatcaactgcaagtgcgcgtcgcgacaccttcgcccgccgccaagctggagtcgctcgccctcgacgtgcccggcattgccgcggccgaggcctggcggagcctgcgcgccagcctcgggcccgaaccgctgaccttgctcggtgtgccttccgcgggccggctgctggtgccgcgcctcatcgaaggccgctggctgggcgaaggtgctgcgcaggaactggtcgtcagccgcctgctgcagcgccagcaacctgcgctgagcgtcggcagccatcaccgcatcgccgaccgcgactggatcatcgtcggcctcgtcgaagccggaccacaggctgtccctcgtgc

SEQ ID NO: 139534 - DNA, 549 bp, Homo Sapiens
tttaaattataatactgaatttttattgaaataaagcacactaaatcaaaccaattacaaagatacatgtgtcacaccaagaaaacattttcagttatgctgacagccccaaatgttttccatttttcaaagacagtttgtaatgtcatgggaaaattgctcacgacgttaaaatgaaaaaagcaagatacagtatcatatatgcagtatgatctcaactatgaaataactttaatatttatacattgaaaaaaagactagaagaaaatgcaccaaacattgaactgaagttaatctctatatactgggataacaagatattaattttttacttcttgaaaactttcaaattttccaagaaattaatcataaaatcagtgagaaaattgaacttgaatgaatatcaaaactgcttaaacaaggactaggctgagtaacctggctttgaggcatgctacatggcccttttcactgcaatgaaaaaaaagtccaacaaaattttatcgcaggttcaagacaattttgcattactgatgttggagcggccgc

SEQ ID NO: 139535 - DNA, 1206 bp, Homo Sapiens
  misc_feature (637)..(637): n is a, c, g, or t
cggcccctcggtgcaggcggcctcgtagaaggtgacgccggcaggcgtggcgcccaggtatttggcggccttcagcgtacaggtgcggcccgcgtcggcgagatagggcgcgaggacttgcttgggatcggagttgcccggcaggcggcaggccagcgcaccgctttcgccggcggcgaggcagtccaaaaccaccggatccggctgcttgttcaggaacgtgtagccccccccggtcttacaggctacttcataggccggcccgccggcaggcttcccgtccttgttgttcatggtcaggttgccgatgaagcgggcgtcggtcacgtcgcagctcaacttcaaagtctgcacgatggccggcgcttccttcatgcccttggcttggtcctccttgctgatgggaggcagatcagccttggcggccgaggcggccagcggcgcgaagccggcgttaagaaggaccagcgcgcccagcgccatcccgatgcgtttcattatgttgctcccaagaaccaagggcgtggatttgtcgtcacctttgaaccgccagcataagaccggtcaagcggctgaactttgacgagacgcaggatttcagcgcacaacacctgaaaggcgaatatgggggcggatntggaaggccaggagcagatcgagaagcgcgccgcgctgacctatccttttgagcaaacgccggagatcggcgatggatcagctatagaagtggcgcctggcgtcttgtggttgcgtcaacccctgggcttttcactgaagttcatcaatgtctgggccatcgaggacggcgacggctggaccatcgtcgacaccggcatccagaccaaggagaccgccgacggctggcgcgcggcctttgctggcgcgctcggcgggcggccggtgacgcgcatcctcgtcacccatatgcaccccgaccatgtgggcatggccggctggatcgcccgcaagcacgaggcgcagctttggatgacccggctcgaatatatcacctgccgcatgctcatcgccgacacgggccgcgaggcgccggaggacggcgtgcgcttcttccgcggcgcgggctggaccgaggaggcgctggagacctatcgcgcgcgcttcggcggtttcggcaagggcgtctatcccctgcccgactcctatcgccggctgagcgacgacgaagtgatcgacatcggcggccgc

SEQ ID NO: 139536 - DNA, 854 bp, Homo Sapiens
  misc_feature (107)..(116): n is a, c, g, or t
cagtcgacggtaccggacatatgcccgggaattcggccattacggccggggaaatcattaaagttggatgatcagttttttataaaaatatatatttttgtccaagnnnnnnnnnngcatacatatgtgattatggctaaatcaaaggtaactggaatgtatatacttttgctaatgttccagcaacactgctattatactatccaaatttttattggtaacaaaacctctttaagcaattggtgattgccatgggacttttcccatgtcttctggctgtaattatcctgtgcagaactaggaagaaatttttttcaggactggctctatggtttcctttaaaagaaaaaaacttctggttggtttttagcagtcattatttacaattggcagggattaactgggcaaggcttccttccgggtttatccctgtagccatcatttaagtcaggaacagtcagaaaaatatttatttaatatataaaaaggggtgtctgcaaaggtaaaaatccattaaaaccttaagttaactataactgttacaactcaaggttggcattatagattatatacagcaataggtacggtaagggtttagagtgtatatacatgcagcattagcaaaatggtcccaatagaggagtcaactatctatggtacaaggagacctgagcagtcaaagatccatggattaatgacaaaggacctccatggcaccatggttcgggtatccgtgcgtaatcctggcattaggctccatgaaaccctgatcctagagttgggactgcccacataatgtgtacccctcagctggaactatcgccacataaatcctactatatcaatcccatctc

SEQ ID NO: 139537 - DNA, 694 bp, Homo Sapiens
gcggccgcgccgggttgagcgggctgtcccaggccagcacgcgcgccagcttcgagacgggaaacggcgcgaactcaagccgctcctccagccgccgggcggcccggtagatcgccgtcggctcgacgtagcggcggaactccggccggtaggtctgcatcagccggtgcgtgtgtcgctgctcccagcgaaagccacggccgacgaacagccgttgctggctcaccggcacgtcgcggctggtcatcacgtagcgcggcaggcggcggatgttgcggcgatagcgcaggatcgcccaggcatcgtgcagacgaatcgcgccgaaggtcaggaaggccagcgccgagcccaggccgagcagcgggttcagcgcgagcgaccacggtgccaccaggcacagaatcgcggcgctggtgcagaccgccacggtatgaagctccaccgctggccgcagcagaacctcgaccgcatgcggttgggccatctgcgcacctactgctcgacgccggtggacgtgacgagcaccgggtagtggcgcaggcccaggcgctgggccaggtcgtcgccggaggccggcgagagggtcaggccgggagccagcctacgcagcgccgtcagcgcggccatcgactccacgttgaccaccaggcccacggcctgcagctcgcgcagcaccgcccctcgtgccgaattc

SEQ ID NO: 139538 - DNA, 269 bp, Homo Sapiens
gcggccgctgtgcgatcatcattattgttttggtcatcgccaccgccaacacgccggcggccatcaggccgattgcgccaccttgcctggaaccaagtcggggagacatcgagcactcctgtgccggcgagttgccgagcgcttactctcctgggatgcaattgagtgtagacaagggctggaggtggtgaagatcaaaaatgtggggcttgcccgcgatggccatcgatatctatacaaccggttagtggcaagtggcctgttgtggc

SEQ ID NO: 139539 - DNA, 777 bp, Homo Sapiens
ctgatgttggggcgcaagctcggggtgctgcggattcgcgcggccgatcgccgccgcgcggtggagaccgcgctgtggatcgacaccttctcgcaccggccgatcgacctgtcgacggccgcggcgcgcgcagggctgagcccatttcattttctgcggctgttccgcgctgtgattggcgccagcccgcatcagtatctggtgcgctcgcggttgcgtcacgccgcgcgcctgctcgccgacgacgaacgcgacgtaaccgatgtggcgctcgatgtcggctttgccgatctctccaacttcatccgcacgttccaccgcgcggccggcgtctcgccgcgcggcttccgccgcctgagcaagggcgatcgcgccgctttgggcgaacggctggcgcggcactaattctcgccctcgtagccttcttctctccctcgcatcgcgcaagtttctccaagttgccgctctcgcgggcggctagcctctccttgtcaattcaagccaacggagagcttcatgtacgaccatatcggcctcagggtgcgcgatctcgatgcgagcctgaaattctatcaatcagcgctggcgccgctcggccatgtcgtcggatcgcaggacgcgaacggtgctggcctcggcccgcgcgacgcgccggcgctgtggctccatctcgtcaagaccggaagcccggggtcggcggcccacgtcgcgtttcgcgccacgagccgcgccgcggtcgacgccttccatgctgcgggcctgaaagccggcggccgc

SEQ ID NO: 139540 - DNA, 858 bp, Homo Sapiens
gcggccgcgcactttcagcagcggtttggggacaggtatcggtaagcggacgcatccgttcaccgcggcctgcggcaaagatcatggctttcatggtggaactcgttttctgtgcaataagtgaaaggtggggccggggccccactgcagacggatcaggtgcgctgattaaaaagtgtagccgacttgcgggaccttgttttccagcgcatcgagcaaacgcaccagcggcttgagttccgtatagcggttggcggtcttgcgcacatagtcgagcacggttggcaggtcgcccatgtacagatccttgccgtcgcggtagttcaggcgcgagaacaggccgaggattttcaggtggcgctgcagggccgtgaattcgaaatcgcggtagaaggcgtcgatgtcgggattgactggcaagcccagctgcttggcgcgctgccagtagcggatcacccagtcgagtaccagttcttcatcccactggatgtaggcgtcgcgcagcagcgaggcgatgtcataggtgacgggaccgaaaacggcgtcctgaaaatcgaggatgccgggatttggaatcgaaccatcgttgatgtgcatcaaattgcgcgaatggtagtcgcggtgcatgaatacttgctgctgcgacaagatattcgccgtgatggtttcgaagaccttgtccagctgggcttgttgcacatccgtcaaggtggcgcccagatgcttgccgatgaaccattccgggaacagattcatttcgcgcaggatgaaggcgcggtcgaattcgggcagtacgtccggctggctggccagctggattttcatcaacgactccagcgcttcggcgtacagcacgct

SEQ ID NO: 139541 - DNA, 1247 bp, Homo Sapiens
  misc_feature (146)..(225): n is a, c, g, or t
cttggctttttcttcttaatggcttttttctggatatctttttccttctttgccagcaatgcttgctgtctgacttcctcctcttctttctccttagctaaccgagcaggttctaattcagcttgtctttgtttttctttagcttnnnnnnnnnnnnnnnnnnnnnnnnnnnnnnnnnnnnnnnnnnnnnnnnnnnnnnnnnnnnnnnnnnnnnnnnnnnnnnnnacccttggatcacagctgtatgcattgtcaactaatgttcttattctgttcatttcttctttttttctttgtgctcttgttgctctgttctgctttttcaatccatctcctctcatcacgagattctgctttttctttttcttctttcatctaaataagaaaattctctcccaagaatccaaattataccagaaagaataaaatatatctacatcttcaaatgatgaattcatatcaccaagtttaggaacatgtttttttatttgaccatctggaattcctttcaaacactggggtaaacacttcgaagaaattatcctttgcttcacttttagaaggaactgagttatcaaaagtaggatctacactgttaaatgctcgtcttttcactggatcagataacatttcataagctttagttatgcaagtgaagtagtcattatctccttcttttattggttcaccagctgctttccgtttgtctgggtgatgttttaaaaccattgctttatgagctgctttgatctgtctctgtgtagccttgtatctcacatggccaagtccaagaactgcataatgatcttggttcttccagtctttgggatcaagtgttttcagcatgggaaactcttccaactgcaattcttcatcttctgattcctcggataactctttcttatcctccagttcctgaaaagaggcagaagcatttctgtttctcctcttaacaaaagcttcaaaccatcttcccacaggttcaacttgacagagtgtagaggcagaggtcagagcgtgggtgatggcggtgccccggccgtccgcggcgcttggcagaagcagcatgatggcgccgggtctagcccggtgggcgcagcggctcacgtcccgggcggagggcgcttagggtcccctccagctctacctctcactccgagcctcgcgccttggctctaagacgcccaggaaccggcgcatggagacgacgagtaagcacttccgggatggatctttcgtggtgtccc

SEQ ID NO: 139542 - DNA, 761 bp, Homo Sapiens
  misc_feature (61)..(61): n is a, c, g, or t
  misc_feature (65)..(65): n is a, c, g, or t
atagtaaccaagtcaaggtctcttggctggacatcattaagaaagttctggaaactgtgtntgtntgatgctggttcattggacttttcaaattgttttgtttctgtgtccctaccagacacaaagatgaagtgtgccagctggttcccccaagccagctcatgctgctgaccactgactcagctctgaccttcacatttgctctgaagcaagtgcgttcagctgctggggcagtgatatcacatagtacatatattatttccttagtttatttccaaactggtattttaaatagacacttcgaactttgggctactctgtttaaatttgccactttctggactggaccttagtactgtaaattctttttaaagaataataatgttaccaactgctgagatttttatgtattttgtgactttgtaacaactgctattgtaataagtgtcatcttgtgggcattatacaaaggcatattataaaataataatgatatttttgtatagaagagtcaactgttcagatgtaagatgttgaaaaatgttaaaatctaaagagtaatttatcctagtggtaatggttatatgtatttgtacagtttaaattaatgtctcaaagctgtgcagtcttttgttactgggaaacttttaaactctgaataggcattaaaaaaaatatggctaactagtgtgttttcattatgtttttaaaccttatatcctgaattctatttgttgaagttattttaattagtagtcttt

SEQ ID NO: 139543 - DNA, 446 bp, Homo Sapiens
ttagggtttttgctctatcgaaataacatcttcaggacatatatatttcttaaatgactaacatgtttctgatccaagagtacatacaaaagtggactgagtataacattatcttccaaataaattttaactttgtgtttaatttgtttaagcatttttcacagaatttgtctccagacaaaactcttaaaagttagttttgagtcaacacgttacaatggttgcctgaaatcactaactattttagtactgttaattcaaattcatttgagcagtatttcacatgcaaagcttcagactcatccagtctcagaatgattctttgaaggcataaagctgtcaattatgaattaaatggacaaggtgatagaaagtaaatgtctaccttcaactctggcaggtcattgtttctacatgctatcagtgtttttcattagctgtattaa

SEQ ID NO: 139544 - DNA, 536 bp, Homo Sapiens
tttaaagtatttattactcggcatcaatgtatttcttaatcattatcctgagtggacttttaagtaggaagaaaatggtgtgttcattactccaaagctgaaacacagttggggttgtgtaaggtgacagcaggtgagttggtaaaagagttagcagaagtgacggctttcgtttcctcaactactggattcaccagtaagccacatgagacctcagtcacaatcggtaattcaaaggtagatttaaatataaatatcctgttatttctgacacctttactgaggtataattgatgtatgataaactgcatatatttaaagtgtacaatttgttaagttttgccatatggctacacttgtgaaccataaccacaatcaagagagtaaacacatatatcagccccagaagtttccctttgcccttttgtaatcatttcccctcgcccaccccattccaggcaaccaatgatgtgcttgcattattatagattagtttgcattttatagttttacataaatgtaattatacattttgt

SEQ ID NO: 139545 - DNA, 609 bp, Homo Sapiens
  misc_feature (588)..(588): n is a, c, g, or t
agaattcggcacgaggcgaaatcgtctcgtcataggtcgcatgcagccgccacggccatctgttctggacgagcacacggacgacctcttccaattcgccttccatctcgggtggcatgtccggtcgtgcgacgcgaaaatcctcgaaatcggccgccgagaacaccagcatctcgcccgcgccgttgtggcggaaataatccgtaccctgcttgtacttagaggtccgggtccagttcaggaagtcgtccttctcgccctttggcttctgggtgaacaggttgtacgcaaggcggatcgtgagctgtccctgatccgacagttgctggatgactgcgtaatcctctggatagttctggaatccgccgcccgcatcgatcgcgccggtgacaccgagccgattgagctcgcgcatgaaatggcgggtcgaattgacctggtagtcgaacggcagcttgggcccctttgccagcgtcgcatacaggatgttggcgttcggcttcgccaatagcagcccggttgggttgcccctggcgtcgcgcgtgatttcgccccccggcggctccggcgtctccttgtgtgtaaccngacagcgcgcagcgcggccgc

SEQ ID NO: 139546 - DNA, 491 bp, Homo Sapiens
tttggtttaattttctatttatttttgctgattagttttttacaactatttaaatgaacagatgtgcctttcttgtgttttaaccattaaataatttgagtgcttaaaagaaccttggcttttcatgcaaattaaaatggggctgggtgtaactctctaggatctcaccttctgactttatagcagactcctgccccatgggcactcatgtgtccatgtggactcaccagcacctagacacacagacaaacatttagactgaaaagatgcacttcgataagtacctgcttactttgttaactttctaaaattgtaactaaataagaatggtctaaaacatatatgattttatgttaacaagttggtattaaaactagcctgctattccacacccttaagcaatctgatttgtaatcaagtaatattcagctctaagaataaaaaatagatccacggtcactcaaagagggaaactgatttttgtctttttg

SEQ ID NO: 139547 - DNA, 884 bp, Homo Sapiens
gcggccgcgccagcacccgcccctttgttgtgcaaaaacagttccagcaccgccagctcgcgcggcgtcagcgtgaccggttcaccgttgcagctcacgctgcgggtggcggcgtcaaataccacattgccatgcaccagctgcggcatcagttggccgtggcgacgacggatcaacgcctgcaggcgagccgcaacttccgccagggcaaaaggtttgcacaggtaatcgtcagcgccgctctgcaggccgctgacccgctgctccaacgcatcacgcgcggtgaggatcagcaccggcacgtcgtggccagcctgccgccactgtcgcagcagatccaaaccgtcgagacccggcaggctgagatcgagaataaccgcgtcgtaaggcgcgctttccagcgcgtttttccccaccagaccatcggtaaaccagtccagattaaagccgagtttggtcaagccggccttgatgccgtcgccaattaacttgtcatcttctatcagcaaaattcgcatgtgcgtccttttttagccattgccgcccattacaccacaaggttcttaagaagctcttaagcatgatgatctgcgctacccaccccgttagggttacagtagaatgacagcacttttttgcagccagggccctgcgcataccgctcggccctattcaggagacgtagtgatgaaatccaccaccgtgacccatttgcgccagtggaagcaggaacaacgcaagtttgcttccctcaccgcctacgatgccagctttgccaaactgtttgaagagcaaggcgttaaagtgttgctggtaggcgactcgctggggatgacgctgcagggccacgactccacgctgccagtcaccgtcgccgacgttgc

SEQ ID NO: 139548 - DNA, 234 bp, Homo Sapiens
gcggccgcaactgggccctgggtggattaccacctcgaccacggcgaaaccggcaccgagttgatgggttggctgcgggctcaactggcggagccgattccgggcgtggtgatcagtgccgatggacggccggagatggtggcccaggtgcatgcggccgggttggattacctggccaaaccggtgaagccggcggcgttgcgggccttgttgagccgtcacctgccgctttag

SEQ ID NO: 139549 - DNA, 546 bp, Homo Sapiens
tttattttttgacaagtttattgaacagtattcaagacttcatctttataaacaaaaacctctgctgagtgatgccaaggcagtatttgctggcaatgttgtggccatattggcaacaagccattttgttgtgtttggtttctaaagtctggactactatagaactgccagtaaaacaatttaaatgtggcaattttgcaagggtggaaaataatttttaaagtgaccacttccagaaaattctttccaaaagatttgactagcagcaattttacattttctttactcatttcccgagtgttcttaaaattgatgagattttacacttggcccatacctgtacacaaccacagactccagtaaaagggagctggaatttaaggctttcacgcatccttgtttttatgcaaggctgactatttccacctaaaaatgtaatgtttgcttacttccatacagtcctagattttcatccagtgggttaagactggccttaactacactgaatattactacctgaaattgtaaataaagtttcctaatcga

SEQ ID NO: 139550 - DNA, 1403 bp, Homo Sapiens
  misc_feature (659)..(700): n is a, c, g, or t
  misc_feature (833)..(833): n is a, c, g, or t
gcggccgctggaacgccgaagccggcgacctggcgcagggcaagccgatggtcgtgctgatcaacgggggttccgccagcgcgtcggaaatcgtgaccggcgccctgcaggaccatcgccgcgcaatcgtcgtgggcaccaagtccttcggcaaggggtcggtgcagacggtcatgcccgtcacctcggacagcgcgatccggctgacgacggcgctgtattacacgccctcgggccggtcgatccaggcgatggggatcaaccccgacatcatcgtccagcagccccccgcccagcccgcggacgaggaggaggaggcgccgcgcagcgcctcgaacttctcgacctcggaaagccagttgcggggcgcgctgaacaacgattcgatcagcgacggggaacgccgccagatcgaggaggaagccaagcaggtcgaggccaccgccaagctgcgcgacgaggattaccagctggcctatgccgtggacatcctcaagggcctggcggcggtcgatttctcggcccgcgaggtggccgaggccgccaagcccgccgtgaccggcgaggacgcgaccagcgaggacgcgcgcgaaggcgccgcgtcgggtgacgaggcggcgcccccaccagcgacgccgcgcccgcgacggacgtctctnnnnnnnnnnnnnnnnnnnnnnnnnnnnnnnnnnnnnnnnnntgagcggatcgatgcggacaacggatgacgcgcccggcggcaccgggcccgacgatgccgcgaccggccccgccggcctgccctatcgcccctgcgcgggcgtggtgctgatcaacgccgaaggccgggtctntgcgggccaccgcatcgacaacccctcggacgcctggcagatgccccagggcgggatcgactcgggcgaggacccccgcgccgccgccctgcgcgagctgcgcgaggaaaccggtatcccgcctgagctatgcgaggtgctggccgaaacgcccggctggctgcgctatgacctgccccccgaactggtcggcaggatgtggaaaggccgctatggcgggcaggtgcagaaatggtatctggtccgcttcacgggcggcgacgaccggatcgacatcgccaccgagcaccccgaattcgacgaatggcgctggatgacgcccgccgagatcgcgggcaagatcgtgcccttcaagcgcgaggtctatgaccgggtcttcaccgccttcgcgggccggctggcgccccagggccagctgcagcggaacacggccgcggactgatccggccccttttgcgatggaagacccgatcgttcccttcgaactgaaacggatgttcctgggcgagcatccgctgatgttctacgccgagatcgccgtcaggaccgtcatcatctatggctatacgc

SEQ ID NO: 139551 - DNA, 1075 bp, Homo Sapiens
atcaccttgaagccggcctcctcggccttcttcacgccggccgagcctttgcgcaaagccacggcgacgttctttacgccgctgtctttcaggttcatcgcatgggcatggccctggctgccatagccgacgatgacgaccttcttgcccttgatcaggttcaggtccgcatcgcggtcgtagtaaacgcgcatcttgtctctcctcgggaagcgtcgttgaagtgtgattaaagcggtccgtcttacatcgcttttgggccgcggctgattgcaaccacgccggtgcgcgatacatcgaccaggccgagcggctgcatcagttcgacgaaggcggaaatcttctcaggattgccggtcagctcgaagacgaaggattcggtggtggaatcgacggcgcgggcgcggaagatatcggcgatacgcaaggattccacccgcttctcgccggtcccggccaccttgataagtgccagttcgcgagcgacatgcggcccctcgacggtcaggtcatgcacgttatgcaccggcaccagccggccgagctgcgccttgatctgctcgatcaccggcgccggtccggaggtaacgatggtgatgcgcgagaggtgtgcggcgttgttcacctcggccactgtcaggctctcgatgttgtaaccccggcccgagaagagtccgatcacacgggcgaggatgcccggctcgttgtcgaccagtacggagaggatatgggtttggatcggctgctgcggcgcagtcatcgtttctggctttcttttctcggcttcggcgtcagaccagcgccatgccctcttccgagacggcggagtcgccgcccatcatctcgggcaggatcatctcgttatgggcggcgcccgacggcaccatcgggaagcagttctccgctttgtcgacagcgacatcgaccaccaccgggcggtcggtgttgatcatttccgtgatcacgccgtcgagatcggccgggtcggtgcagcgcaggccgacgcaatggaaggcctccgccagcttgacgaaatcgggcagcgattccgaatagctttccgagtagcggccgc

SEQ ID NO: 139552 - DNA, 1007 bp, Homo Sapiens
  misc_feature (12)..(12): n is a, c, g, or t
  misc_feature (232)..(340): n is a, c, g, or t
  misc_feature (427)..(445): n is a, c, g, or t
aaaaaatgacanatggtttattttatattggcaaaggaattgttataacatcattcttatcaatgtaaaatttacgttattaaaaaattacaaatgatagaatctttactcagggatgggcaataaaacagcaaagagctttgtgattgggtttgaaagattttgaattatagacagtgctcttaatagtttttaataagttgatatttttttctgtgtagatttaaataannnnnnnnnnnnnnnnnnnnnnnnnnnnnnnnnnnnnnnnnnnnnnnnnnnnnnnnnnnnnnnnnnnnnnnnnnnnnnnnnnnnnnnnnnnnnnnnnnnnnnnnnnnnntgagccaccgcgcctggccagggactatactctttttaaaatagacattttgtggggctcacacaatatatgaaatagtaccctctnnnnnnnnnnnnnnnnnnntcaggcggtcaaacttagagcaacattgtcttattaaagcatagtttatttcactagaaaaaatttaatatcaaggactattacatacttcattactaggaagttctttttaaaatgacacttaaaacaatcactgaaaacttgatccacatcacaccctgtttattttccttaaacatcttggaagcctaagcttctgagaatcatgtggcaagtgtgatgggcagtaaaataccagagaagatgtttagtagcaattaaaggctgtttgcacctttaaggaccagctgggctgtagtgattcctggggccagagtggcattatgtttttacaaaataatgacatatgtcacatgtttgcatgtttgtttgcttgttgaatttttgaacagccagttgaccaatcatagaaagtattactttctttcatatggtttttggttcactggcttaagaggtttctcagaatatctatggccacagcagcataccagtttccatcctaataggaatgaaattaattttgtatctactgataacagaatctggcacacattatgga

SEQ ID NO: 139553 - DNA, 642 bp, Homo Sapiens
  misc_feature (11)..(11): n is a, c, g, or t
  misc_feature (495)..(495): n is a, c, g, or t
  misc_feature (611)..(611): n is a, c, g, or t
gcggccgcttngggctatgacattgccggcgccggcagcgattggcatttgtcaccgttcatcagcgcggactattcgcgggtcgaagtcgatggttattcggaaaagggcaaccgctccaccgcgctgaccttcgatgaccagcaacgcgattccaaacgcctgggcgtcggcctgcagggcagctaccggattacgccgcaaacccaagtgtttggcgaagtggcccacgagcatgagttcgaaaacgacacccagaaggtaaagatgtcgctcaacagcgtgccaggcatcgacttcaagctggacggctacacgccgcgcagcaattcggaccgattgagtctgggggtcagccacaagctgactcaggagctggcgttacgggcggcgtataacgtgaggaaggatgacagttttacccagcaaggcgtcagtgtgggggtgagtctggatttctaagcggatcttaaacgccccacaaaacaactgtgnggagcgggcttgcctgctcccacaggttgtccaatgtctgactttagctttgcggcgtttgctctgccaacgccacagcccggaacatcgcgcggcgtttgttcagggtttcttcncattccagggccggcaccgagtcagccacaa

SEQ ID NO: 139554 - DNA, 544 bp, Homo Sapiens
  misc_feature (386)..(386): n is a, c, g, or t
cccgacaccgacagaaaccttttgtcctttccttttccatgcttagagggaagtttctgacttgggagaacgccttagagttcttggggtctgaactcctctgatgccttccaaagtcacgtagctgtaagacccagcgggtgccagccgggagggtgactccagctcagcagcatgtatggaagtgcattgtgaccatgaaggagtctgccagtggccaagccacctagtgagctccctaccaaggaacctgggtgtcacctgcaggtggccaagagccagtttttatgccaggcaggggactggttggactctattgaggcttcttcctgtctgtggggagcactcctgtccccctcgtggtagggatacctgtcaccccacanagaggcagggtgacaggtgttggccccattttaggcagacttgggtgtcatgacttctagttcacttgttttaaacctacctgtgatggcagctgcaccatgctgccctcttgacacactgctggagcccagagcacaggccagagtctcagcctgag

SEQ ID NO: 139555 - DNA, 137 bp, Homo Sapiens
cagcttccacactgaacgagtttcttcagtcactacacattgaggcacctatgacctggcaaccccacatcaccgtcgccaccctcgtcgaagacaacggccgcttcctgatggtcgaggaactcaagggcggccgc

SEQ ID NO: 139556 - DNA, 510 bp, Homo Sapiens
gcggccgcgccggctggaacgtggtcacctcctggctgagcggcaccgccgacaacttcggcaaagccgagcacccgccccacgccgtgcgctaccgcatcgccaaggaacacttgaacgtggtcaagggcctgtgggattcttgggaagacgacgcctttgcctacaacaagcagagcggcgagtttttcacccccgagaagctgcatgcgttgaaccacaagggcgagtttttctcggtcaaaggcccgctgaacatcgcccgctcgcgtcagggccagccggtgattttccaggcgggcacctctgaagatgggcgcaactttgccgctgagcattccgatgcgatttttgtacatgtcgagacgctcgaagaagccaaggcttactcggctgatttaaaacgccgcgccaagggttttggccgtgatgcgggcagcctgtcgattttgccgggcattcgtccgattgtcgggcgcgatgctgccgaggtggaaagccgcctcgtgc

SEQ ID NO: 139557 - DNA, 1036 bp, Homo Sapiens
gcggccgcgtaggcgaatacctccgggtccgggttgctggcggcgccggcggcaaaacgcgggtggctgaaacagttggcggtgccccacagcaactggataccggtttgttcctgatggcgctcaaggtggtcgaccatctgcgcgaagtggttgcggtattccttgagcgagctgccttcgggtgccacatcggtgtcgtgaaagctgtagtaatcaatgcccagcttggagaaaaactcgaacgccgcttcagccttgccgatggccacgtccatcggctcgccgctgcgctgccacgggcgcttgaaggtgcccatgccgaacatgtccgcccccggccacacgaaggtgtgccagtagcaggcggccatgcgcaggtgttcacgcatgggcttgccgaggatcagtttgttggcattgtaatggcgaaaggcgagaggggcgtcgctgctggggccttcgaagcgaaccttctcgacacctgggaagtacggcatggtgttttccttattgttcttggtggtgccccgatactagcaacggcatcgggactgccgattatgaaaatcaccaagacgtagtgcgattttgaccagccagggctagtctgtagcgaccggccccaggataaaaacaatgaaaaccctaccgcccgtgcaccgcattgccctgttgttcaacggcagcaaaatctacgatcgcggcatcattaccggcatcggcattacctgagcagcacgcgtgtgtcctgggacttgttcctggaggaagactttttgtgccgtttaagaggcatcgagcgctggcagggcgacggcatcattgccgacttcgatgacccgctgatcggtgaggcgctggccgatattcatttgccggtggtggcagtgggcggctcctatcaggatgcacgcgcctaccccaagggcattccctatgtggccaccgataaccatgcactgatcaagttggcgtacgaacatttgattgaggcggggctgacccgctttgcctgcttcagcctgcccgaagc

SEQ ID NO: 139558 - DNA, 998 bp, Homo Sapiens
  misc_feature (142)..(156): n is a, c, g, or t
  misc_feature (865)..(865): n is a, c, g, or t
gcggccgctccaacatcagaatggtaacacctcgttccgaattcggcacgaggcaaagctgtagtttacttacaacacaaattctaaacacatagactgtatatacagattttttgaacccacaaataaaaaataccctccnnnnnnnnnnnnnnngacagtgagttgaagcctcgtcattgtctaagtcacaccagctggggcttgccttggagacctgcccctgctcagttctgttcctgttctcctggccctgggtggcccctactcgtcctctgtggtggatgtcagcatccctttgtcgatcagatgagaccgcagcgtgttgaagatgtggagctgctgatctggccgtaaagtcaggaactgctgaatcagtttgcttgggttagggcctctgataaaactggcgatgtatacattgacaaaggtggccatcagatactggcagtcaaagcgatccatgatgcctccatggccaggaatggtattggcaaagtctttgattttaaaggctcgtttgaatccacttgcgaagaatcctccaaaggggccaatgagcgaggcaaaggtggagagagcgatgctgtgaatctggaaggggtacatccggaccgttttccagccaatgactgactggatcaccccaggaatgttgtactcctgcaggcgaaacaggtccgagggctcacagtccacagtgaagctgttggtgtcattgttgtactccacagggcagacaaagcatctgtacccggacatcacataggacagcagaaggccaaacaccacagtagcaaagaagcccccaatgaagccttcccaggtcttcttcggggacagcttgatgagtggggtccgaccnaaagaaaaagccaaacatataggccatgatgtcattacagatcacacaagatatggggacaatgaaccagatcattccttcaaataggttgggataacaagatgtgactgtgttacaacaatcagcaatgtca

SEQ ID NO: 139559 - DNA, 1305 bp, Homo Sapiens
  misc_feature (77)..(111): n is a, c, g, or t
  misc_feature (776)..(792): n is a, c, g, or t
tactatctgaccttttgggcgctacgcgtatagccgaacgacgagcgcagcgaagtatttgagcgaggaagcggcgnnnnnnnnnnnnnnnnnnnnnnnnnnnnnnnnnnncagtcgacggtagcggacatatgcccgggaattcggccattacggccgggggctccggcggcttcgactgctagctcgcggcgacgtcgggccgattgttcccaggatgacagagctgaggcagagggtggcccatgagccggttgcgccacccgaggacaaggagtcagagtcagtagcaaaggtcgatggagagactgcatcggacagtgagagccgggcagaatccgcacccctgccagtctttgcagatgataccccggaggtcctcaatagtggccctttccaacttgtcttcagagtatggacagaactggtgggtgagagtgcatcctgactttggccatggaggcatcatggattgctttgactgccagtatctgatggccacctttgtcaatgtatacatcgccagttttatcagaggccctaacccaagcaaactgattcagcagttcctggcttttcggccagatcagcagctccacattttcaacccgctgcggtttcatctgatcgacaaagggatgctgacatcccccacagaggacgagtaggggccacccagggccaggagaacaggaacagaactgagcaggggcaggtctccaaggcaagcccagctggtgtgacttagacaatgacgaggcttcaactcactgtcnnnnnnnnnnnnnnnnnggagggtattttttatttgtgggttcaaaaaatctgtatatacagtctatgtgtttagaatttgtgttgtaagtaaactacagctttgagttggaaagaagtcacgggttgtaaaaccatttggatttttttaaaacaaaagtattaataatctggaagacagtgttgcccaggtcaggagtgttttcttggtggttccagcccccatcaattgaactgtttctgggctcagtcagacacagacattcatctgtgtctgaccaaatcaggggacttccccacctgtggtgggaggcacagcttagatgttttgtacacctggtcttttctagaaatccctgcttggagctgcagaagggttgccttctgtaggtcggaggaatggaggcttactaaccaggtaagccttctatgcatccacaccaaaatcctgcagaatgtaagtaagctctgctttataagatgggttcaccttcatcgcagactgaaagtttcagtttttattttattcag

SEQ ID NO: 139560 - DNA, 775 bp, Homo Sapiens
  misc_feature (48)..(48): n is a, c, g, or t
gcatcaaaaggtgaaggtctcgtaaccgtagctcgcgaaggtcagccncgcgaggcacggctcggcgacggtgatgccgagctcctcgtgcaattcgcggatcaggctctgctcgggccgctcgccgggctcgactttgccgccaggaaattcccacaatccggccagtgccttgccctcgggacgctgcgcgatcaggatacgcttgtcggtgtcgacgagcgcgcaggcgacgacgagggtgagcttcaggtcggccatcccgtcaggacctgtaatccccgttgatcgcgacatattccttggtgaggtcgcaggtcagcacgcggtcgcggcccttgccgaggccgagcgagaccagaatcgcgatctccggcgccttcatcgcctccgacacccgggcctcgtcgtaagaggggtcgcgcgcgccgcgcttggcgacgcgaatgccgttgaacgagatcgagagcttgtcgcgatcggccggctcgccggctttgccgaccgccatcaccacgcggccccaattggcgtcctcgccggcgatggcggtcttcaccagcggcgagttggcgatcgacatcgcgatcctgcgggccgaggccttggtcttggcgccctcgacggtgatctcgaccagcttgcgcgcgccttcgccgtcgcgggcgacctgttccgagagcgtggccagcacctggttgaacgacttgacgaaggccttcaggcgcggatcgctggcgcggctaattctgggcgcgccatgcgcggcggccgc

SEQ ID NO: 139561 - DNA, 922 bp, Homo Sapiens
tttttacacagttaacataggcaatttttattagtcaatggtagaaaatattttttaaaaaactatgtagtttacaaagcttaaagtatttgctatctggcttttaagaaaatgtttgcccatcccttccctggagtcttggagagcaaggatggctctctataccttttatagtacctggcatttagtaggtacatattaaatatctgttgaaagaagtgaagagcctcaaggcccagctctaactcctctttaatgggaggctctttttttggaagggcagggctagacaggtatgggtcagttctcttctgatagtcccagagtctacagcgaaccaaagatgaaagctctgaaggagagacaccagtactcacaggtctcatgtccatgctccgtccaaggggacctagctacttccttaccccttctcagtttcaggagaagaaaagtgttggagattggttaagaccctttcccaccaattgctgtggtgaaccctccagcaagggcatggctactttcaggaaagcaaagagggtcctctgcttctctatccttcccaaaaaacatgggctgggttagaccctaaagagcaggcatggaggactgtgggaaggactcagccttgctgtagaagctctctgcaaagcaagaggcagggtatggtaacaaatgccaattcctggttaaattggacttgacaggtgaaagatgtcaggctgtgtgtggtcacattgtacatatgcatgcctgggggttaccaggctgtatgcaaatatacaaggaagaggtaggctctgagaacctgccagggcccctgggatgagctgtggatttttgcccctgatcccatgaattggagggtcctctgctcaaaacatacgataccaaattaaaagaagcctacagccgcggccgc

SEQ ID NO: 139562 - DNA, 768 bp, Homo Sapiens
  misc_feature (118)..(126): n is a, c, g, or t
gcggccgcggctgttgaccttctttttacatccccattttatttttgtgaaaacttgggagcctgaactcccatccataccactgaatagagattttgagtaatgatacttgtttccnnnnnnnnngaaaccatacatagatacgtatggattggagtcattaatatcctaggcaagaaacatggaagtgaagacttctttctctgcaagggaaaccgatgatcccactcctgggaaatagtagggaaacttggtatgtgtattcccatgtgtcctctagggagttggtaatggttaacctgacttcagcttccaggaattggctactcttcccgttttctatagtcatttgaatccacgagcttgatttgcactaatttgaccgacattgattttgtgtgtgacttggtttatggggccagctgactgaagtaagcagaccttttgggcaaaaatatgctttgacagtggtctcccacctatttgttccactgtctgccttcccctggttacttaaaattcatcagcttgtccaactggaccttctttccttcctgctgaagttgatttgaagtaaaaccttagatttgatgttaaaacagttgtcaaatctgttggtaaataagatttgaaggaccctactctgtctcccttgaaaaaggggaggaatgtcagtgttactgtttttggaaaaagtagatttttaaaccgagtttggaaatggtaagtatgcagaggtgggtgggggcaatctcaaaaacgtgcaaa

SEQ ID NO: 139563 - DNA, 926 bp, Homo Sapiens
cgagccgcagcagatcgccgcgatcacgccggcgccggagccgcagcccatcccggcgcctgagcccgagcagccggctcagaaggccaagccgtcgtcgggcggcggcttcaccgcccaactcgcctctttccgctcggaagctgaggcgcaggccgaaattcgaccgactgcgcgccaagcacggcggcgtgctggaggcttcagcccgcgtatcgtgaaggcgacggtcgccggcagcccgcgttaccggctcagcgtcggcccgatggcctccagggcccaggcctcgaaagtgtgcgattcgctcattgccggcggcgagcgcgactgcctggtgcgcggcaactgagccggtcgtcaagaaagcgtcattgtcggacccgatgcgctccggcccgcgcccgaactgcgcgattactcgaaaagcttggaatctggggataatctctactgaggcgggcgaatcacctccgctttctgcgacaagcggacgaaagcgattgcacgaagatgacgagcgaagagaacacacctgaaaccaaatggccggatggcgaaggcccggtccgccaggaggcggcgcccgaggccgagaccgatgaggagaccctcatcgtcgacgtgctgggcttcgaaggtccgatggacctgctcctggatctcgcccgccagcacaagatcgatctctcgcagatatcgatgctggcgctggtcgagcaatatctcgctttcatcgagcaggcgcgccagcgccgcctggagatcgccgccgactatctggtcatggcggcgtggctcgcctatctgaagtcgcggctgctgctgcccagggcgcttggcgatgaggaggtgccggccgaggatctcgccgcccagctgtccttccgcctgcagaagctgcaggccatgcgcgacgcggccgc

SEQ ID NO: 139564 - DNA, 587 bp, Homo Sapiens
aaccttgttcagatttctttattgaaaaattaaagtcataagctctgtatataaatacaatgacactgctggtcacctgcaaggcctctgggataggctgggggtgcagagggaagctggggccttggggtccccaggggcatggggagggaaataaataataaacaccatgggggataaggagccaggaggaatgggggtgtgaatggggaggtgctcgatgcttatttgtggcactaaaggtcttgcaagatgccccctgactgggggccgtgtccatgaattctcgagtgacctcactttggacaaaggctcaggcatctggggatgggctgggtcctagctggaggggggacagcagtgcccccaacccaacctggagaaaccagcactctgcccttccttttcctttcttcctgtcttgcaacccacttgtcctgggcgcctactgtgtacccagtacagcaccagttcctgacctgaccttctgtctgccttgtcctgctctcttcctctcccagttctggtccagtgggttgggatggaggggggatgtcttcctgccacgctggccatgcagcggccgc

SEQ ID NO: 139565 - DNA, 996 bp, Homo Sapiens
gcggccgcggctgagctaaattttatatttttgtgcatccttctcccagatgacttaggtggtaagtccagattagtcaaagctaatcatggaagttccattttaatgattctgttggggtgaacttgggagcaatgagatgtttgggaagtattgtgtagtacttctgggaaagatctccttgatacaacattgtcatgacatgagaagagactctgctgggctttttcatgtctgtaacatggtattggcttatcgtttttatctctgaagggcagtagcctgaagataacagtgcacatcgtgggaaaagccagctcagaggtgacgttgccgagctactctgctctctatacctgttctctactgggactttttataaccctcaataactgttttttatttggtcttagggctgtctgatacttagagctgaaggcattccagctgacacagaggaatatttttctaagtgttaatgttctatatggtaattagggggaagaattatttcttttcacaagttaatatagggatggctgtttgtatcagccatggttctttctggtggaaaacagaattctccaactaaaaatattttaatggcagactgattacagtggtgtgggccagaaacaagggacagtgaaacacccagagacttgtatcagcaggaagccattgccattctgagccttgaagggcaaggagggaaacagtgttaccagagcccagtaagaactgctgtcatgaaggaggggccaccttgtaagagacatcattactaccagaactgtggtgccaaattgctggtgtctctctttggagaaaccaaccagatacatctgctggagagcccaggtgggcacagagaagggtggagagagaatctgggaagagaaatggagaataagcagcacagtgttattcatttctgtaaattcctatgtagaaggctcagtgttagaaataaagttattctactaaatgcaagtt

SEQ ID NO: 139566 - DNA, 763 bp, Homo Sapiens
gcggccgcaatcgctgctgcagccatctacatctggatgaattgggacaccctggggccgaaaataaaaagactttggggacagcaccagtgcatataccagcgagaaatggcaggccatcaaggattacatttcgggcgtttgggccagcataagcgccaaagccagcgaaacctgggaagaaataaaacgggcggccagtagcgctgctgaaaaaattggtattggtctgaagcgaggactggacgtcattaccgcaccgctgcgcgcagtcatggatggctttaaatggttgcttgaaaagctggacctgttgccgcaaaaaaacgaggcattagcccaaacgaatgagctgctaaaaaataaccccatcgcccaaaaatatggttctgtgggcgagccagccccaacaggctacacggcaaatgatatggccattcgttttaccggctcaagcatgaaaccagtgaaggcgccaaacggcggtaacttctactaccagccgaagatcgatctcagtgttgacgcgaggaacaaccagaacagcaaagctgttgcaacagatgccgtgaaagcgctccgggagcacatgcagaaagatgcggccaaggcgcgcagtaatttttctgatcgagatctggggtgggaattatgatgatggcactcgggttatatgtctttatgcttgaaacggtcccctatcaggagctgcagcatcaaatggcatggcgctacccaaccaacaaccgcgttggaagcgccc

SEQ ID NO: 139567 - DNA, 774 bp, Homo Sapiens
gcggccgccgagcatgctgatctcgtcctgcagatagagatcggcgcgggtcgtattggcattggcgaagttgaagcccgagcccctggtgaccgagatgggcgtgccggtcgtggcattggtcaccgtgtcctgtcggaaatagtccgtcttggtcgtgtcgccctggaagccataggtcaggatgtgctgcgccgggccgaggttgaagcgcgaggtcaattgaacctcgccctgcaggaaattctcggtgtagttcaggatcgcattggtgcgccgctgctggttggtattgaggttcagctgatagcgggtgctgtcgagctggcggctctgcggcgaataggagacgttccagcgcaccgcgtcgatccagccccaatgcggcgtccagtcatgggcgatggcgaagttctgccggctgagcacctggttgcgctgatactggccgttgcggtgcggcgcgccggaaaccgtgaccgtctggccgaaatcgtagcgctggtcgaccgtggtgttgcggttgaaagcctcggcgacgaaccgccattcgtgatcgtcggccggccgccagaccagcttggcgaagccgttccaggtgctgttgttgagcggatcgaggacattgcaggcgagcgtgcgggtcgccgggcagccccagatgccgccatcggcgcgcgccgtcgacaaggtcggcgcctgggagctgcgctggctgagcacgaaaatgccctgcagggtcggcgtgaactggatggcggtcatgccggtctt

SEQ ID NO: 139568 - DNA, 774 bp, Homo Sapiens
gcttgcgtcgtcgtcgtttgttgcgcttctttcctatgtaatgcaggggcccgtgacccaggcttcggaccgcgccgccgtacgaaccaacgcactcctgcacgatgcggtcgcgcgccgtatcgatgaactcgccgggggtgtcgaattcctcgcctatctcggcgtcacccgccaggtgctcgggactcaccatcgggcctcgctcgaggaatatctcggcgagtatcgcgacaagcttcacgccgactggatcgtggggatagatcaggacggacgggaactcggctgcacgacttccggaattttcgcccgcggcgcggacatgcgggatcgatttaaggtcgatgaagcgctcgatgggcgagcctggcggggcgtttcgacgttcgggaaccgcacctacatgaccgcgacgacgcccgtaaaaatcgggcaagtcgtttacggagtcatcgtcgtagggttagaaattgattcgcggttcgcccagtcgatcgcgcggcaaagtggcctgcagttggtgctgtattccggcacaaagccgatcggccgaacgatctccgcgcaggctcctgcaattcgtcgcaacgacgttttgcgaatccaagacggcggccagccgtatgtcggcaaactctccgaactccgcgacgtcgattcgcccgagccgatcaccttcttggctctgatgaaggagtcggacgtcaccgcgccgttcgatcgagtgcgcgccgcgctgtttatcatcgggttcctcgcgatcgcggccgc

SEQ ID NO: 139569 - DNA, 552 bp, Homo Sapiens
gcggccgcggctgtatgcttttttttatttgaaacctacatatgggctttggaattatttgctttagccttataaagcttccattttctttgagattggtggtttctaaacatgaccatacatcagaaatagtggaggtttttgaactttaatataatttttttaattacttacaatgaaagatcactgaattataatttggagagtcatactcaatagctttgagatggaacttggaaatttgtgtttttaacaatataattcagaggcacggaacccatagattgacatttggaaaacactgctttctgatatgaaacaaaataggtaattaggaagaactttctaataaacagtatttcaagcaatcttcctttaattagtgatgctttctgtccaaagcatgaagaaaagagaggcttctggaaacataggcttacattgttattcctgcatttgggcttctgtgagctcaccaccctctctcagagtttctataatactccatggaaatgtgttgacaaggcctttgaatgaaaatcatcctcgtgc

SEQ ID NO: 139570 - DNA, 779 bp, Homo Sapiens
gaaacacataggatactattttgggtattttttaatattaataagtaaaagtcaatgtaacagaatatagaccaaaagaaaatgtaattgaactaggcatctcattgtatagaaaagaaatttgaaacccagcaaagctaatgacacagctgcttgatagtataattgaattttctagatttcttgttcagtgtgcctttgtattacactatactatcgatattaacaaagtatgcagattatgaaatattattaaaatataaaaggctggaacatttgctatcatgaccaaattttgtaagtgctattaacgtcttgaatgttgagtaaaaagtataatgtaatagacttcatgttaaagaaacttgagtttagtttttttgaaaactactttgaaaaattaaaatttttaaagtaaattattagaatcgatactaattatattttgaagctactaatgggtttaaattatgtacttagaatggaggcttttttgaaaaacccttttatttccactgtagaatataataacacactgtactatgcatcacaacagtctgtcaattaaggaattgctcatattctcgtcaataaagagcaaactcgcacaaaatagtctgacttttttgtatagaacaaatggtgtgatattacagtctagatttaatggcataaataatcatgtgtcttttggcatggcataaataatcattaaagaaaaagttttcagcattttatatgtaagttatatatgtttgaatatatatatatttcacatt

SEQ ID NO: 139571 - DNA, 811 bp, Homo Sapiens
gcggccgccgcgaggccgagccgcaggcggagggagtcgcgcctcacgatccgcccggtccggcaatcaggtagccctggccgcgccgggtctcgatcacccccggcccgagcttgcggcgcaggcgggtcaggagcgcctccagggcgttggcctcgcgctcggtcccgaccccgtggaggtggtcgagcagctcgccggccggaacgacctgcccctgccggtgcagcaggaaggccagcagccggtattccagggcggtcagctccgcggggcgtccgtcgacgctgaccgcgcgggtgcgggtgtcgagctccaccgcgccggcgcgcagcaccggcgcggcgtggccggcggtgcggcgcaggatcgcccggagccgcgccaccagctcctccatgcggaacggcttggcgaggtagtcgtcggcgccggcgtcgataccctcgacgcgctcgcgccagccatcgcgggcggtgaggatcaggaccggcagggcgacgtcggcggcgcgcaggcggcgcagcacgccgagcccgtcgagccgcggcaggccgagatccagcaccatggcgtcgtacgtctcggtctcggcccggaaccacgccgcctcgccgtccgccaccacgtcggcgacgtagccggcccgctccagcccctgccggatatcggcggcgatgcgcggctcgtcctcgacgatcaggacgcgcacgggccggcctcctcaatcatcgtcgtcctcgtccaggatcctgagcgtgccggcatcgaccttgacggtccggcgcttcccatcggcgccgaggatgcg

SEQ ID NO: 139572 - DNA, 649 bp, Homo Sapiens
gcggccgcgaggcgcgcgcaggagaatgacccggcgggcttcgagtccaatgccaacgtcaagctcttccgggccctgagccagttgatgttggatgtggtgccaggcgatccggcacgcgacgagtaccgccagggcaacaccttgggacctgcccaccgccactggcgaagggccaagatcggacggcggttccggctgttcttccggtacgactcgaaggcgaaggtcattgtgtacgcctgggtcaacgatgaacagaccctgcggtcttcgggtagcaaatcggacccgtatgtcgtgttcgagaagatgctcggacgcgggaacccaccagacgactggcacgcgctgatacaggcaagcaagcaggattggagcaaactggaataggcatccctcagtagcaggagacgaccatgaacaccacgacacgcatcagcaccgcagaacgcctcggccgcaccttgggtcgcggatggcgtgcctacgtgcgcggcgaacgccgggcatcgagttggttggtgtccaaggggatgccggcggccggtgccaccgcgttcgtgtgggtggtcaagctggttgcgctcggggtgctgctgtaaccaccttctggctggcggtgttgctactgctgggcctcgtgccg

SEQ ID NO: 139573 - DNA, 822 bp, Homo Sapiens
gcggccgcatactggtccgcggacgcgaccggttcagttggcggcgtcttcgctgatgacggtgaacacgccgtcgccggcgatcacgtcgcgcagggcgcccggacgacggatcgaaaacacgacgatgggaataccgttctcccgcatcaggctgatggccgaagcgtccatcaccttaaggtccttggacagaacctcaagatagctgaggcgttcgtaacgcacggcgccagggtcgcgtttgggatcagcggtgtagacgccgtccacgctggtgcccttcagaagcgcatcgcagcccatctccgccgcgcgcagggccgcggcggtgtcggtggtgaagaagggattgccggtgccggcggcgaagatcaccactcgtcccttctccaggtgcctctcggcgcggcggcggatgtagggctcgcacacgctctgcatgggaatggcggactgcactcgggtgtcgacgccgatacgctccagggcgttctgcatggccagcgcgttcatcaccgtggccagcatgcccatatagtcggcgctggcccgctccatgcccctggcggcggtggaaaggccgcggaagatattgccgccgccaatgacgaggcacagctcgacccccgagggcggcgatggcggcgatgtcggcggccacggcgtccacggtcttcatgtcgatgccatagggggtctcccccatcagcacctcgccggagaccttcagcagcacgcgccgataggtgcggcgtccatggcgggcgttcgacgaaccggcttcagaagtgtccaccaccgtcatgcgccatcaccttc

SEQ ID NO: 139574 - DNA, 770 bp, Homo Sapiens
ctgatcgccgacggcatcgccgagagtgcgctcacggtgagccgcttcaagggactgggcgaaatgaacccggacgagctgaaggaaaccgcgatgaatccggaaacccgtcggctcatccgcatcactgcgggtgccgaccccgatctggtgctgaacaccttcaccatgctgatgggcaagaaagaggccgagcgtcgccgccgctggatggaactggaaggcgacaaggtcgtgccggatgcgtgagggcagggactagggactagggactagggactaggggctaggggctggagcgccgcgcggtgttgcgttcatcccgtgtggcgaagccacacctcttccctagtctctagcccctcgtccccagcccctccaaacacacaacgaaacccccggagcactccgttgactgacaacctgttcgaacccgacatcgccgacattccggtcgatgcgcacgcggcgcaggcctatctgacctatgcgatgtcggtggtgacctcgcgcgcgctgccagggctggaagacggcatgaagccggtgcagcgtcgcatcctgtacgcgatggacggcttcgcccggccggacgctgcgcacaagaaatccgcgcgcgtggtcggtgacgtgatcggcaagtaccacccgcacggcgattcgtcggtgtacgaagccatggtgcggctggcccagcccttcacgctgcgctatccgctgatcgacggccagggcaacttcggctcgatggacggcgacaacgcggccgc

SEQ ID NO: 139575 - DNA, 743 bp, Homo Sapiens
ggtattttaggccaagtgtgcacccacatccaatggtgctacaagtgactgaaataatatttgagtctttctgctcaaagaatgaagctccaaccattgttctaagctgtgtagaagtcctagcattataggatcttgtaatagaaacatcagtccattcctctttcatcttaatcaaggacattcccatggagcccaagattacaaatgtactcagggctgtttattcggtggctccctggtttgcatttacctcatataaagaatgggaaggagaccattgggtaaccctcaagtgtcagaagttgtttctaaagtaactatacatgttttttactaaatctctgcagtgcttataaaatacattgttgcctatttagggagtaacattttctagtttttgtttctggttaaaatgaaatatgggcttatgtcaattcattggaagtcaatgcactaactcaataccaagatgagtttttaaataatgaatattatttaataccacaacagaattatccccaatttccaataagtcctatcattgaaaattcaaatataagtgaagaaaaaattagtagatcaacaatctaaacaaatccctcggttctaagatacaatggattccccatactggaaggactctgaggctttattcccccactatgcatatcttatcattttattattatacacacatccatcctaaactatactaaagcccttttcccatgcatggatgg

SEQ ID NO: 139576 - DNA, 807 bp, Homo Sapiens
gcggccgcttgatccggggtcttaccgcatgcgctcatcaccaccacggccaaaatcgccaaggggaagcgcacgtgtttgagtgactgttccatgaggtgcatccgccaatgtatttgagatgggcggatcatgcgcggcgaggtgctatgtcacgaatcgaatgaaacaaaggtaactatcattcggaatgatataagcgagaggcgagccctctagaatggcgttttcgttagggagctatcaataggcgtgatgacaaaggtgtattgcgtagcgtgcaaggaacgaggctcacaacccgctgtcgttgcctcgcaacaagatgaatccactccttcaaacgtcttacggtggcgtcaggctgccacgcttactagcagtcagccctcccaaaaagtacatcaacccgcccgccacaacaaaaaccaccaacatataaaacatgctgtacgccggctgcgtagccaacacccacccacacaacaccggccccaacgccgcgccgacattgcccaggttctgcgcggcgtagtacatgccgcgcaggtgattgggcgcgatgttatcgatgaacatgtattcggccgggaacacgataatttcgccaagggtgaaaatcgccatcgacagcacccacatcagcagcgtggtcgacagcgcaaacccgcccagcccgacaataaacaggctcaggccagcggcaagccaccgattcaggtcgcgcggggaaatccgcttgccgaggctgtattgcaaactgataactgtcagggcattggtggccacgatcgtgctgatgatccg

SEQ ID NO: 139577 - DNA, 1205 bp, Homo Sapiens
  misc_feature (166)..(177): n is a, c, g, or t
  misc_feature (917)..(972): n is a, c, g, or t
aataatttaccagcactttataaattcaagtttataacataaaagtgacaacgttttccttaagaagaaaaaaacccaacagcacttgggaagaaaattagaaaccatttcaatgaaagtgaccagatctggtataatgcattctactcaagtagccaggggaagnnnnnnnnnnnngtggtaggtacctcgcctactaatcatggttacacctcccatgattatagtgtcagtatgcatgtatttatgaagaatctgtaaacataggttgtgaaattgttgtaactactatagaacaggggttagaaactactgcctctttgacaaattcagaaaataactgcatgacacttgctgccatgaaagtaatgctcattggttttgataaccaggatgtctagtgtttaacatatttcaaactcttgctatatgtagtcaaatactgtcaaaatagatctgcccccaaaatgaagcatattttggcacctgtgctgaatgctgctacaaagaccagcaagtgcaaataaaaataacagtcatgatttagtcacattcataacttttcatagaaaaatataaatatattccctgaatttgtaagacaaaaaaataattttaacagccagctttcaccataaatgccagtccatttccctcttaaatgaactggctttccctcaaggtcataaggtgcaaccattgaaatctaacacattttctaaacttctgtcatcatccccatcatggtatctcacagtccttctaccctgatttctcgtttttatttttgaacgtcgaagaactcttttagattttgcatagtccaaatcctcccagtcattatcatccacacttaacctagggcgtttgctttgtctttgacgtctcacagttttagatatgttagctgtaaaagnnnnnnnnnnnnnnnnnnnnnnnnnnnnnnnnnnnnnnnnnnnnnnnnnnnnnnnngtattatcagtacagtcaatatctgattcagttacagatcccaaatctgatgatttggaactagtatcaggtctaaactttgaattcccagttgtttcagagattttcacattttccaattcaggatgcgatctcttcctttttacttccttctctgctgtttcctgtgaatcatgaatcacttttgtcttactaaaaggagcctttccataggtcctgagtcttctcctcgt

SEQ ID NO: 139578 - DNA, 735 bp, Homo Sapiens
ggaggtttcagatcaactcttcaaccaactgcaaacaatgactcagccctggcgactgatcattcactcgcttgctcaggataatcggcgaggtcgcagtggcttccacaatcggcgtgtagccgatatccgcccggtgcaacacctgcaccgaggccggcaccagcgtcacgcccattcccgcgcccaccagcccgatggccgtctgcaactcgttggtccactgcaccaccttgaggctcaaaccatgggcgtcgaacagcgcgatcacatggtcggcatagctggggcgcgggttgccggggtagagcacaaacggctctgcggccaattgcgcgagggtggcgggcgcgcccagcagcgagtggccggcgggcaatacggccaccagtcgatcttccaccagcacgcgctggacgatggccgggtcgtcgatgcgaatgcgcccgaaacccacatcaatgcgcccggccttgagcgcctcgacttgctgcaaggtggtcatctccgacaagcccaactccagctccagcgcctcatggttgcgcagccgccgtatcaactccggcagcacgccgtacagggtcgatggcgcaaagccgatgcccagccaggtcttttcgccctggccgatgcgccgcgtggtatcgcaaaccttggccagttgttccagcagcacattggcgtgctcatagaaaaatcgcccggcttcggtcagccgcaacgggcggccgc

SEQ ID NO: 139579 - DNA, 1116 bp, Homo Sapiens
tttttgtagcccaattattttagtctcctttgctcagacagacagatctttattagtgttttcaacttattttgctcacaacttcccagcaagaaatgtcttacattgcaaccagttctcacatttagatgtatgggtgaaaagtttcacaaaacagtatttgcctttactacatgatgcattctggcctactttattctgcttcattgctgtgtaatgctggtgaccacttgctaattgatttcccattttactaaatgggctgggacccacggtctgaaaaccctgccttaggctgcaagcatttctgtgatctctgcgagctactccatataggtaaacacacgcgaggtaaactaggaaacagcttctgcttttgcagattagaagtgaagttgacatcacgccaagtacgaaaaggctaaacagctgacaaaatttccacttgagcaaccctggggagcgcaaacatgaggaatcggggcaagggtgacttgaagaaagcactggcagatcacgcactttaaggcaactctacactgcacaatgtcaaataacctagcatggggcggcactaaatggctgcaggaaagccgagtcttcttccacatccggcggctcccctcggatgcgagcgctggcccagggtgtgtttacagaggtgagggcttcccgtggacccttctcgttgggagcgcttagcctcaggagcggattcagggcacaggcagaggacgtccacaaacaccacaggaagccgccacccaggggcgtggaaaggcccaatgcctcgtctgggattcacggccggcaaagcggcccctccggaacgggacagcacagcggctcacctctgcgcctctgggggtgcggggggagcctcgccctccacgctctctgggggaccgcccgccctagcccccgcctgggcttcgcgggtggacggttgggggccccgggcgccccccagcgcgtagcttttctccttcatcgtgggtcttctggtgctcggctagggccaggctgaagtggaaggtcttccagcagcccttacaggcgtagcgcttccggccgccatggctgctgtggtgctccattctgatttggagcggccgc

SEQ ID NO: 139580 - DNA, 835 bp, Homo Sapiens
ggtccatgcatagttttcatgatatccaccaccacagataagcaaaatagtccttgcattgaaaaggttggacacagctggaaggagtttaaaggccggaagagctctataggcagaaatactttgggaatgaaagtaatgggaggacataggacaagacgctgccctcccggtatctcaggtgtggcatgagcatacgtgacaggggcagtgagcacctgggctaaggatagctattctactcctccggcattgttcttcttacagagttgaaagctcctctgcactttgtgtatgccatcggccagctgatagtactttgcaactctgatcaatcaacatgcttgcagattgttacaatcttgccgttttcccatccacgataatcgcatggctgtatcttaatgccagtttactgagttgtattgctaggggctttctaattcccagtaaagatttttaaatccctcagccattttcttacttaaaaccattaaaggtagctttaggtatgttgaggaatgtgtgtggatgatacagcatttctcttctgcctggaatagttgtcttccctattgccgctgcattccctcatctactctccatctcattttaacaaaggattggtattttagaaagaactcagattctctttggggaagcgagcgccaccacttgtaaggtgatttttaaagatatattcacaagttatttgatgcttctctcccaaagagatggagctacattccccttttcttagtgtgggctggacataaggactcagatagatctggcagaaaggatgaaatgtcacttttgagattaggttattgaa

SEQ ID NO: 139581 - DNA, 635 bp, Homo Sapiens
gcggccgcagcatttccgacatggaatggcagcgcgaccgcttccgcgtgcacattcgcgcggcgcagcaaacccgcaagccactggtgatccacacccgcgaagcctcggccgacacgctggcgatcctgaaggaagagggcgaagacggcgccggcaaggcggccggcggcgtgttccattgcttcaccgaaaccgccgaagtggcgcgcgccgcgctcgacctgggcttctacatctcgttctcgggcatcctgaccttcaagaaggcacaggacctgcgcgacgtggccgccttcgtgccgctggaccgcatgctgatcgagaccgacagcccgtacctggcgccggtgccgtaccgcggcaagaccaacaacccgtcgtatgtgccctatgtggcgcagcagatcgccgaactgcgaaaagcgcccgtagaggccatcgcgaaggcgacgagcgacaacttcgaaactttgttcagggacgtcaaatcatgaaaaactacttcaagaaatcgatttatctcattgtcattgctgcatctttttccgcacatgcgggatcgttcgaagacttcttccgggccgtgcgcggcgacaacgccagcggcgtgcgcagccctcgtgccgaattct

SEQ ID NO: 139582 - DNA, 647 bp, Homo Sapiens
  misc_feature (48)..(63): n is a, c, g, or t
  misc_feature (252)..(276): n is a, c, g, or t
gcggccgcggctgtaggcttcttaattttttataataggtaagggtgnnnnnnnnnnnnnnnngcttccttcttgctcttcatttttttctagttttattgacttgtgactagattaaatggcttgtaaaaattctactttttcttttttaagatttctatcatgaccaatgagaaaagacataagccttggcaaatcttgctcacttttgtttttctattcccaaaactgaggtgtttgttttgattcggnnnnnnnnnnnnnnnnnnnnnnnnngttagtggattctcagctgtttctggttatacaaggtaaatgtgggtttgactgttggagtgtgtacaatatggcagctctaggtgtatgggtgattatattccaaattctcaaggatatttcttttgtattaatcagagaataatatcttggctgacaagagcattcctgggtcaaagcgtttttctcttcacagtctacagttgttaaattacaatattctagtctctaggcaagataggaaatctgaggccaatctgaatctctttccttacacgtaacttgtctttctcctctggaatcctgtaagattccttctctagcctctgcctttcctctggatattttgcttcattccccctcgtgccgaa

SEQ ID NO: 139583 - DNA, 609 bp, Homo Sapiens
ggcacgagggccggtgtagcccgcagcacccggatcgacggcgtcgacggcgggcagcgggccggcgatcagcagccggccttcgtcctgcagtgcctgcagacgggccaggtggccgggtcgggcggccatccgtttttcaagactgttggggacgtcttcgcccatcaatgcgtagtacatgcagtcctctattggatcaggaattcttttcttcgatgtgacgcgacagcatgaaaccctgcgcgagcacgaacaggaacatcagacccatgccgccgtacagcttgaagtttacccacgcctcctcgctgtagctgtaggccacgtagaggttgagcacacccatcacggtgaagaaggcgatccacgacgcgttgagtcgcgaccatacgggttcgggcagttccacctgttcctgcatcagtgcgcggatcaggttgcgcttgaggaagagaacagaaaccgtcagtgtcagcgcgaacagccagtagagcacggtcggcttccacttgatgaaggtcgcgtcgtggaagaacagcgtggcgccgccgaacacgacgatgatggccagactcacccacagcatggtatcgaccttgcggccgc

SEQ ID NO: 139584 - DNA, 342 bp, Homo Sapiens
  misc_feature (61)..(61): n is a, c, g, or t
gcggccgcggctgtaggcttttatttcggggcttgtgccccagtacaaggacgctccagcntgactctcctgaaaaaagccagtaggagtgttttttttaattagacaaagtgtgggaattgacatcaggggtaaggtttgcaggctgagctggtagcacatgatgggcaaggcatgcaagtcggcatatctggttgcaatggttatcttgggtaatggacaatttagtggtctggccggtgacaaaagggctgtaaatcaattactcagcatttcttcctgaggtggaacactccccaacctcactctgatatttagattttctaaggccagttcctggaa

SEQ ID NO: 139585 - DNA, 644 bp, Homo Sapiens
atgttatcctccttcctgtttttcaaagggatcctatgatcaaactacattactatattcaggaggagtgagggagtcagtcactcaattgaagaggaaaaaaactgattattgtggaatattttaatgaaaaatttcaaagtaaatctcaattagaatctcaatatgtacatgcagccattgtgatgaaactaagagaatgcttttgttttccttctcattcccctaacttaacaaataataagacataaagcatttttctaacatgcttgtatttattatattaaattacaaatgcctggagttacatttgcttgttttgtgtgtgcgtgcctgcgcatctatgtgtgctagctccatattaaaatcaacatttaaatattaatgcaaggtcacaaatataaatggctacttgttttttttcccttaaaaattttagtgcagctttgctttccttaaagtaatatttaattttccattattttctatttaagcccttcatcgtgggtgtaaatggtactgaagccccagaaagtcctacagagatttttcaccctacagtagctctatgcttcaagcctaaatatttataataacctgaatattatccctgtttcaaggaagactttcttgtctacagttca

SEQ ID NO: 139586 - DNA, 429 bp, Homo Sapiens
ggcacgaggcgttcaacaagcgctgccaggtggattccacactcgaccccagcggcgtcagcgcgcccatgcctgtcacgacgatacgtttactcatgatcaatcgactcctgttgcttgagggatacacagctgtggacgtcactatcatgatgaaagtaacatggcgtcacacacttttgcacccgcagccaggaacgtccatgcaacgcaaatcccttatcagcgacgaatgccccatcgcccgcagccttgagcgggtaggggagtggtggagcatgttgatcatgcgtgacgcgctgcacggcttgcggcgttttgatgagttctcgcgcagcctgggcatcgcgccgaacatgctgacgcgccgcctgaatggtttggtggaggccggcatgcttgagcgccgcgcctacagcgagcggccgc

SEQ ID NO: 139587 - DNA, 941 bp, Homo Sapiens
acggtcgcggtccatccactgggggttggtggggttgtgcttcaggtgccggccccacaacgccacggccatgtcggccatgcccatgggggcgccggggtggccggagttggcttgttgaacggcatccattgcgagtgcgcggatcgcattcgccatttgttgagagttggccatgaggggtggctccgcagagggggcggtgttcttgtgaagaaacccgggattttaccgggggccccgcagcctgggcggcgcggaggctgatgggctggttggcggggcggctggctggcctgttgcacggttgcgcggggcgcatgcactacagtgcgcagccatgcccacggtgccttcctgcttcgcagattcctccatcacgacggcccccggcccggcgcacggctgggcgcaagtgccggccctgctgctcgccgccggccgcggcgagcgcatgcgcccgctgaccgacgcctgccccaagccattgctcgaagtgcgtggtcggccgctgctggagtggcacctgcgtgcgttggtcgaagcgggtgtcgagcgcgccgtgatcaacaccgcgtggctgggcgagcggattggccaccggttttcagatgtttttgccgtcgaaggcaagcaggacaatcgcgagcagctatcaatttcatactcccatgaaggccgggatttcggtcgcgcgctggagacggccggcggtatcgcacgcgcgctgccgcagctggggccggtgttctggctggcggcgggcgatgtgttcgcgcccgacttcaccttcgaggcgcaggccgtgcagcggttcgtggccggcgatgccctggcccatctgtggctcgtgcccaacccgccgcaccacccgcgcggcgacttcggcctgtcgcccgaggggttggcgctgaatctgccggcgcaggacccgcggccgc

SEQ ID NO: 139588 - DNA, 596 bp, Homo Sapiens
  misc_feature (44)..(93): n is a, c, g, or t
agctattcagttatgtttataagtttgcatagctacttctcgannnnnnnnnnnnnnnnnnnnnnnnnnnnnnnnnnnnnnnnnnnnnnnnnncaagttggagtgaatgtttttagttttaagatagataggagacacttttttatcacatgtagtcacaacctgttttgtttttgtaaaacataggaagtctctttaatgcaatgatttgttttatatttggactaaggttcttgagcttatctcccaaggtactttccataatttaacacagcttctataaaagtgacttcatgcttacttgtggatcattcttgctgcttaagatgaaaagcattggttttttaaaattagagaataaaatatgtatttaaatttttggtgtgttcacataaagggatgtagctaaaatgttttcataggctattatatattctcgcagcatttccagttaagaggatattaggtatataattctcttcttaaccgaatgtcagatggtcttacgccacagggtgcaggtaacccttggtctgtaagcaccaccgatccagggatcattgtctaaataggttactattgtttgtttcatcttg

SEQ ID NO: 139589 - DNA, 720 bp, Homo Sapiens
attcggcacgaggtgttactacgcttcgcccttacggagaatctcttttggcaaacgccggatggccggccccgcccaaaggaagcacaaggtctgtccccagtctggctcactcaccggcctgggtgagtgagccgtggtgcaatcaagccagcgccgtgcgctgtcgaccttccacgcgccgtttcagcgccgccccttcgacgatctccaggccgccgccttgggcgcgggcggagcggtcccagtcttccagcagttccatgcaggcatggtcgatatagctgacccgcgccaggctcagatgcaggcgtgtgccgggctcgacgctggccagcagcttggccagttgtggcacacggaggaaggtggcggcgccgctcatgcgcagttcggcgctatccgggccagtgggcacaagcttcacgcgcaggcgcgaggcattccataccagcttcagcagagtcagggcgaagcccaccagcacgccggtcagcaggtcggtgaagacgatgcatagcgccgtggcggcgtagatgaacaccgggatgcgcccatattggccgaggttgcgcatggccttgggatcgaccagcttgcagccggtgtacaccagcactgcgccgaggctggctaccgggatgctctgcagcacgccgggcagcagggcgaccagggccagcagccaggcgccgtggaggatggtggaggcgcggccgc

SEQ ID NO: 139590 - DNA, 1173 bp, Homo Sapiens
cgactagcgatgccctcgatcggctcgtccgatgtcgaggagatgcacagttagttcgttgggggccggacgtgtgacggccatcgaccggacactgcgcaatccaagaggtctgacaaatgtcccaatttttgcccgatctccggggtgatttttgaccccgaagttactcacaacaatgcgacgctgcgcgggtccattcgaaggtgccaagatcggtaccacaagcagaatcaactaattgcaacaatccacaccggggacgcatgccggttcgactcccgccgacttcgtgcaatcgctcgcaactgattgattttaaatggggtatgaggttggtgcccgaggtcggagtcgaaccgacacgcttttaagggcggcggattttgagtccgctgcgtctaccagttccgccactcgggcgccgaggggggcgcgaagtatagccgaaccgattgcgacctttcaggactctgctgcatctaagcagtcgtggccggactcaccgacatcgacgtctctcgggaagtcctcgcaagcgcgcgaggcggcaatgaatgcgctcgggcggcgatttatgcggcggtggcgccggcggcgttcgggctggtgcggcgccttaccggcagtcgcgctctggcggaggaccttttccaggaaacgatgatggccgtctttcagagcctcgagtcgtttcgcggtgaggcaccgctgggggcttgggtgaggcagatcgccgtttccaagtgcttgatgtacttacgatctccatggcatcgggcccgatgcggctgcgctctggtggggattcggagagcgagtgggtcgagtcgctgctgccggccacgccgggaccgcgggcggagagcgtcgatctggagcgggcgctcgcgagcttggcgccgaccgcgcgagcggttgtgtggctcttcgaagttgaggggtactcgcacgacgagatcgctcagcacttcggacgttccgtcagtttctcgaaatcgcagctagcacgggcgcacgcgaagctccgccagtggctcgagccgccagtggacagccagacatgcacaactctatagagccatcgaattgtatccagcgtctgaggatgctcccgaccgaggtgctcgttccctataactggcaggagtttcagcgacgctcggcggccgc

SEQ ID NO: 139591 - DNA, 743 bp, Homo Sapiens
gcggccgctctcgagcacgaaggcgtgggtgcagccgctgtcgaaccacacgtcgaggatgtcggtgacgcgctcataattggcggcgtcatatttctcgccgagcatcgctggcgccgcctcgtcggtccaggcgtcgacgcccttctcgcgcacggcggcgacgatgcgggcgttgacctcagggtcgttcagatattggccggtcttgcgatcgacgaacagcgtgatcggcacgccccaggcgcgctggcgcgagatcacccagtcggggcggccctcgaccatcgagcggatgcggttgcgccccttctcgggcacgaagcgcgtcgcctcgatcgcggcgagcgccttgccgcgcagcgtgccgtcctcgcgcggctgatccatcgggatgaaccactgcggggtgcagcggaagatcacctttgccttcgaacgccaggagtgcgggtagctgtgcttgtagtcggcggatgccgccagcagaccgcctgtctcgcgcaggtcgctgcagatcgggccgtcgggcgcgttgagcttggggttgatcaccgacccctgcccgccgagccaggcccagtcggcgcggtacttgccgtcattctcgaccgcgaacacgggatcgatgccgtgcgccttgcacaggtcgaaatcgtcctcgccgtggtcgggcgccatgtggacgaggccggtgccgctgtcggtggtgacgaactcacccggcagccctcgtgccgaat

SEQ ID NO: 139592 - DNA, 748 bp, Homo Sapiens
  misc_feature (654)..(706): n is a, c, g, or t
  misc_feature (733)..(733): n is a, c, g, or t
gcggccgcagggcctgctcgcgaggcgatgagatgtcattgctgcagagcacccagttccgcaccgaccgatccggcaacgcgacccgccgcgccctgctccgcacctggccggaattccagaatcccgtggcctggctggtcgcgctgatcctcgtgatcatgccgctgatcgccaacggcttcttcctgatcgagatcttcgccaccacgctgatcctcggcgtcatcgccctcagcctgatgttcctcgccggctatggcggcatggtcagcctgatgcagctcaccatcgcgggcttcgccggctacatggtcgcggtgttcggcgtgagcggcaacgccaatatcagcctgggctggccgtggtggctggcaaccccgatggcgctggcgctggcgacgctgttcggcacgctcggcggcgcgctcgcggtgcgcaccgagggcatctacaccatcatgatcacgctcgcgatcggcgctgcgttctactatttcaccaaccagaactgggcgatcttcaacggccacaccggcatcaacaccgttggcgacgccgcatttctggggcgtcgactggcgcagcgacatcgccttctactatgtgacgctcggcgtcgccgcgatctcctactttgccgtccagtatgtnnnnnnnnnnnnnnnnnnnnnnnnnnnnnnnnnnnnnnnnnnnnnnnnnnnnnggatgggggcgctcggcttcaccccantgccctcgtgccgat

SEQ ID NO: 139593 - DNA, 1150 bp, Homo Sapiens
  misc_feature (673)..(686): n is a, c, g, or t
  misc_feature (719)..(728): n is a, c, g, or t
tttttaatgtttcctcactgttttgacaatatcatgaaaaaaatcagtttagaatctggaattggcctggacgggattcgagggcagctggcgggggctgcatagcccctgaggttcctcccccaccatgggacctaagctattggaaacaggagcaccaacagggcaccgaacctggaactaagttagtgtctagagtcaggcaagagaggagagtcaggcaagagaggaggggccgggccacagtcgccatggggacgcccctggctgtggttggttctgtgtctccccctcccctcactggctacatggagacagggaggtgggtcaggctgttcccaggacagaaaaataaccggcagtcaacctcagggctcatacccgagcttctgctcaatcccctcggggacagttacaggactcagagagaaacgtgaatttcagaaaaacaaatcatttttcacataagtgttccaaatattgcgtggggcatattaatgctagaaaattatcttttgtttacctgaaatttgcgtttaactcagcactctgttttggttttgctaaatctggccaaccctggcctcaaaagtcggtggggggaggcctgagaaaagaaagggaagtagtcagtactgagggtattgaggggagggagggaataactcagccnnnnnnnnnnnnnnggctttccccccataggaatgatatattatttnnnnnnnnnntcgttctccaaaaatattctgcactggccttcctcagttgttaatagctatgggaggtgcgtagggaaaacacacacaccagacacccaccccatgtcattctaaataaagttgggaagcactaaagttgagctggtgtctttgccacggatgtccccagactccagtccgtaatcgccaccagactccagtccctaatcgccactgtgaatttcgaagaggaggcttagtataaaggttttctaaaaggattgattctcattctgaggcagacctattaacaccatcctgatattgctctataaggatttaaacacaataataaagaacaaacaagcccctagggactgagcgagtgccctagccctgttcctagtgtcatcctggaagggtcccttctgtcgtcttctcgcagccatata

SEQ ID NO: 139594 - DNA, 354 bp, Homo Sapiens
  misc_feature (289)..(289): n is a, c, g, or t
gctttagggtttttttgtttcccgttttgacaatatgaagaaaattcagtttagaatctggaactggcctggatgggattcgagggcagctggtgggggctgcagagccccttcgattcctcccccaccgtgggagctaagctactggacagaggagcaccaacagggcaccgaaccaggaactaagttagtgtcttgagtcaggcaagaatggggaggccaggccggagctacagcagggactgccctgattgtggttagttctgtctctagccctttaacagcattntaaaagtgcttttcgtacttacttcctacactgcttcccactcctataaagtgggtacttggaga

SEQ ID NO: 139595 - DNA, 499 bp, Homo Sapiens
cttaatgtttcctcactgttttgacaatatcatgaaaaaaatcagtttagaatctggaattggcctggacgggattcgagggcagctggcgggggctgcatagcccctgaggttcctcccccaccatgggacctaagctattggaaacaggagcaccaacagggcaccgaacctggaactaagttagtgtctagagtcaggcaagagaggagagtcaggcaagagaggaggggccgggccacagtcgccatggggacgcccctggctgtggttggttctgtgtctccccctcccctcactggctacatggagacagggaggtgggtcaggctgttcccaggacagaaaaataaccggcagtcaacctcagggctcatacccgagcttctgctcaatcccctcggggacagttaccgacgcgtgggtcgacgatatcccgggaattccggaccggtaccagcctgctttttgtcaccacactggttctatatgtcacata

SEQ ID NO: 139596 - DNA, 674 bp, Homo Sapiens
  misc_feature (595)..(595): n is a, c, g, or t
cggctgttggatttctatttgtttctctcttcctcttgttttatctgtgtcactcttgtatgtcctcatatctttcatacctcttgtgtagtctctagaagcagaacacctaagtcctgggtctggataatgaaaccctcagtctctggggcctctgaaaataaggaagcattggagctattgccatgttgagtaatgggcttcctagaactattgtcatctatcctgccagtgttttatgttgtagctgtttttctttgacaggtgagttccagctatgttgttagtcatgatcctgccattattttctgtgttctgtaggatgtctccaggctacttaaacatattttatgagtttgcaataaaattgttgaatcttgtatgatcaagtcactcctctgctcagaaatccaccgtgacttcttagtaagcccctacattatatgcatacttgtttttttcttaactttactcccacttctacctaacagggacctcaacttaagtctcttcagttcttcaaggcctggccttgttcctgattcctcaaaaaatcttgactctaaggcctattttattgtctgtctctgaatcnctataaagcttcaagtctgtatgacattcttaacgccaaattatatattgtcttgtactgttcctagctggtacatgta

SEQ ID NO: 139597 - DNA, 816 bp, Homo Sapiens
gcttcgcggaaatctcgattcgccgcaaagtgacgcgcgacagccagaacagtacttcctcaacggcaccaaatgccgtcgacgcgatatcaccgacattttcctcggcaccggcttaggcccgcgcagctactcgatcatcgagcagggcatgatctccaagctgatcgaagccaagcccgaagacctgcgtaactttatcgaagaagcggccggcatctccaagtacaaggagcgccgccgcgagaccgaaaaccgtatccgccgtacccacgaaaacctcgcccgcctgaccgacctgcgcgaagagctggagcgtcaactggaacgcctgcaccgccaggcccaggcggccgagaagtaccaggaatacaagggcgaggagcgccagctcaaggcgcagctctcggccctgcgctggcaggcgctgaattatcaggtcggccagcgcgaagcgatcattggcacccaggaaatcagcttcgaagcgctggtggccgagcagcgtaatgccgacgcgagcatcgagcgcttgcgtgacggtcaccatgacctgtccgagcgcttcaatctggtgcaggggcggttctactcggtaggcggcgatattgctcgggtcgaacagagcatccagcacggccagcagcgcctgcgccagttgcaggacgatttgaaagaagccgaacgcgcgcggctggaaacagagtcgcacctgggccacgaccgtacgttgctgctgacgttgggcgaagagctggacatgctcacgcccgagcaggaaatcaccagcgccgccgctgaagaggccgcggccgc

SEQ ID NO: 139598 - DNA, 473 bp, Homo Sapiens
aaaacaagaaagactaaaatgtggtaagaaatcagtcttgtgcattttgtacatttgtgtcctccactctgtcttcatttactgctccaggaagctgatgccacagctggccacagttgaacaaagacatcagaaggccagttagtctctaccacagaagcccccaagtgaaccgaattctgaagggcaggtctcagtgtcccttaactttgttctccccaggagaaatccattttgctgccaaatgtgaccagcagacttgggcaggtacatctagcacaatcacagtcctgtcacactgccaacgtggcccaaggcatggcgtgcagggcagtctctctggagggcctctgctatgcctgctcaccagcaccacctccaccagcagcggagcccttgctggatgcctgggcatctgaggagcgggaggcctgcttcggcaggcggatggggacatagatgttggcggccgc

SEQ ID NO: 139599 - DNA, 723 bp, Homo Sapiens
cagatccggaaactgcccaccagttgtttcaagcgcgctgcctgctgttccaggtcaggaacaggcgcgcaacgttgattgcaggttttccacaccttcctgattgagggtgttgatctcggtgatgtccatgttgatcgactccaccaccgaggtctgttcctcggtagcggtggccaccgactggttcatcccgtcaatctcgccgatgcgctgggtcacgctgttcaggcgctcgccggccaggttggcgatttccacgctgtcctggctgtgacgctggctttcactcatggtgctgaccgaatcccgcgcgcccacttgcagctcctcgatcatcttctgcacttgctgcgccgattcctgggtacggtgtgccaggttgcgcacttcgtcggccaccacggcgaacccgcgaccggcttccccggcccgtgcggcttcaatcgccgcgttgagggccagcaggttggtttgctgggaaatgctggtgatcacttccagaatctgcccgatgttcaccgtcttgttgttaagcgcttcgatattggtgctggaggcgctgatcatctgcgacaactggttcatcgccttgatattgcgctccaccacctgctgcccgtcttcggccagttgtcgggcatcgctggcctggttggaggcctgtgcggcgttgcgggcgatttcctgggcggcggcccccagttcgttgatggcggccgc

SEQ ID NO: 139600 - DNA, 1192 bp, Homo Sapiens
gcggccgcttcggcgtaagctgcaatatattccgcaggatgcgctcagcagtttcgatccccgctatcgcgttcaggacatcatcgctgaaaatctcgcgggcctgccggagcgcaagcagcagcgtgaacgcatcgtttcgctgcttgagctcgtcggtctgagtgccgaatacctcgaacgccggccgaggtcgctgtccggcggccagcgtcagcgggtctcgatcgcgagggcattggcggccgaacccgccctgatcgtctgcgacgagccggtgtcggcgctcgatatctgcatccaggctcaggtgctggacctgcttgcggagttgcagtcgaagcttggcatggcgctgctcttcatctcgcatgatctcggcgtgatcgaacatctggccgatcgggtgctcgttttccacgacggtcgcgtggttgagcagggcaccgtcgaggcggtgctcggacatccgcaacagccctacacgcgggcgctgctcgccgcagtcccggatatccagcgtggattgaccgcccgggcgcaagttgccggcgcaatcgtcgccggtcctgctcaagggacagaagccgcaacaggaggatagcgatgacgcagatcgatcaagcctggggcagtggcccgtcgtcacgatatgaagaccttgccgaaccctttcggccgttgttccgctcgatcaaggacaccgccgtcgcgcgcgatcttgagcggcgctgccctatgacgagatcaaggcgttgcgcgcggctggcttcacgaccgtgcgggtgccggacgagtttggcggtgccggcgcgacgctgccggagctgttcaacctgctgatcgaactgtcggaggccgactcgaacgtcaccaattcgctccgctcgcattttggcttcacggaggacgtgctcaactcggccgatccaaagcgccgcgaactgtggctgcgccgcatcggcgagaagaccctgttcggcaatgggcacagtgaggtcggcgacaacaagctgcaggcgttctcgaccactgtttccagcaaggacgggcagctggtgctcaacggccgcaaatactacacgaccggcacgctgttcgccgactggatcaacatcgcggcccagcatgagaatggcgagccggtcggtgtcgtcgtttcccgccattcgcccggggtcgcctcgtgccg

SEQ ID NO: 139601 - DNA, 764 bp, Homo Sapiens
gcggccgccgaagaagagcgcttcgtacgcgacaaacatgcaaagaaccgcatgccctacgaatcggcgaagttctgcctggaacaagccggcatcaagccttccgacgttgacgtggtggcgatcccgttcgccccgatcagcctgttcggcgaggcgcgctggcactacgccaagcgttactggtacgccccggaccgcgcccttgacgcgatcctgatgggcaaccgtcgctacaagcgctatcgcaacaagatcgtctggtgcctggagcagttgggcttcgatccgaagaaaatcaagatcgaaccggttgaacaccacctggcccacgcttccagcgcctaccactgctcgggtttccaggaaaaaaccgcgatcctgggcatcgacggtaaaggtgagtacgccaccacgttctttggctatggcgaaaacggcaagatccacaagatcaaggaattctacgacccggactccctgggcggcctgtatggcgcgatcaccgagttcctcggtttcgagatgcttgacggcgagttcaaggtcatgggcatggcgccgtatggcgacgccagcaaatacgatttctcgcgcctggcctcatttgaaaacggcgagttggtgatcaacactgactacgccaacgtcatcggcctgcgtcgttattaagagaagggcaagggtttctacttctcgccaaaactgatcgagtggctgggtccaaagcgcgaaggcgacatcgccgacgagccgtacatcca

SEQ ID NO: 139602 - DNA, 396 bp, Homo Sapiens
  misc_feature (40)..(40): n is a, c, g, or t
gcacgaggctcatcagccctcaatttgtgatccggaattntgtgagaaggattagaaatcagcacctgcgttttagagatcataattctcacctacttctgagcttatttttccatttgatattcattgatatcatgacttccaattgagaggaaaatgagatcaaatgtcatttcccaaatttcttgtaggccgttgtttcagattctttctgtcttggaatgtaaacatctgattctggaatgcagaaggaggggtctgggcatctgtggatttttggctactagaagtgtcccagaagtcactgtatttttgaaacttctaacgtcataattaagtttctcttgtcttggcatcaagaatagtcaagttttttggccgggcatggtggctcat

SEQ ID NO: 139603 - DNA, 542 bp, Homo Sapiens
ttaattattaacggttttatttcagtctgagatacttaattcttgcagtgcatgcccaccgataacaaaatctattaataacactccaaaaccatgggactttaaagttacaatcaacggctgagaggcacaaaagtaattaggttttaaagttaaaaacaaaacctggttactattctctaggaaatatttcaaatatataatcatctccaggttggacaccaaatttcctatacttaagatatggtagattgcaattaattttatctttttaggtaggagattattaagctttcaatctttggaggacctagaagttttgaaatgtaccaaatttaatgtcattaaccaaatggaatttttaatataagttctgagtgcaattctattcagaatttcctgttctttttcattttggatggatgttggtatttgttccaccacttttttgcacctgcatacttcttgttaatttatagatactataagccataatttcttagtattaaattttattttaaaatgttaaaaacatgattagg

SEQ ID NO: 139604 - DNA, 755 bp, Homo Sapiens
caacgatggtcctcagctgggacgcagtgtcaggcccagaagaagcacttcagagcagcacctttgcctctgtttcaggatcgctggtgacacagccctcaacaaaaacatccacgagtccgtcagcgcccagatccggaaaaactttgccaagagcaaatggagacaagcatttaatgccacggccgtcgtgagacatatgagaaaactacacctcggcagcagcctggacagttcaaatgcaagtgtttcgagcagcctcagtttggccagccaaaaagactgtctggcaccttccacgctctgtagtttcatttcttcttcgtcgggggtctcaggagttggagccgagcggagacccaggcccaccactgtgacggcagtgcactctggaagcaagtgactggccctggaggtggggcccggggtcggggctggggaaggggagccccagggtcgccagagccgcgagccactccagcgagaccccaccttgcatggtgccccttcctgcataggactggaagaccgaagtttttttatggccatattttctactgcaattctgaagtgttcatttctcacaaactgtactgactcgaggggcgctgatttcataggatctggtgctgtatatacgaatcttgcaaagctctaactgaacggaccttcttattcctctcccctaacaccatcgtttccattcttctcagtgtaggtaaccgtctatggtgtgttttttcattaatgacaaa

SEQ ID NO: 139605 - DNA, 865 bp, Homo Sapiens
gcggccgcaacctgtggggatgaatatttcgtacgccgtagcccaacctcaacttcaccgatatcgacatgctcagcgtaggcccggtggccgaacaactgggccacagtttcgatcagtactggaacagtgcgttgagcaagcccattggcgatttcgtcagcagcgcctccaaaggcgacctggccagcgcccgcgtacgcctggaagaatcccttgccgagtctcgccagcaaaaccatgccctgtacaaccgcctgcgcacttacaagacccaaccgcgcatggacatctggcgccgcgaactgatctgggcctggaaccaggcactgtgggatgcgccgagcaaggtgctggccaaggccgatccggatccacggctgctgctgaccacccagctggcaccggagctggaaggggtgagccacgagttgatgatgatctcggcttacttcgtgccgggccagcctggcctggtgtacctgaccggtcgtgcggacgccggcgtctcggtgagcctgctgaccaactccctggaagctaccgacgtgcccgccgtccacggtggctatgcgccctaccgcaaggcattgctggagcacggagtgaaactgtacgagttgcgccgccagccgggagacggcggcggcagcggccctcatctgttccgcaaaggcactttccacggctcggattccagcctgcacagcaaggcgatcatctttgaccgggagaaatcctttgtcggctcattcaacttcgacccgcgctcggtgctgtggaacaccgaagtcggggtgctggtggacagtcccgaactggcggaacacgtgcgcaacctggcactggagggcatggcgccccc

SEQ ID NO: 139606 - DNA, 970 bp, Homo Sapiens
tgatcgcagaccgtgccttccagccctttcagtgcgtggcctggcacgatggcaacggcgccctcagcctgagcgtcatcgaccgtaccaatacccgcatcggcagcaaacagctgtcttcgagtacttataccgatccgactcaacttgaggatttgttgttgcaggcgcgtgccgaactcgacaaagatggccatcagtgtgttgtcgtggaccatgcccaagtaagacgcggcagtaacttccgatcattgcataacaatgatcggaagtgagcatcacaacgtaagcggcttatcgcggtacgagaataaagcgctcgatcgcttcagctgcgccgtcctcgacattgctgccggtcacaacactggcttggcgcttgaccgtttcttccgcctgccccatcgcaatcgacaaacccgccactgcaaacatcgccgggtcattgccgccgtcgccgatagctgccgtttgttccatgcgcacaccaaggtgcgcggccaaggttttcaaggcctcgcccttgttggcgagcatggccgtgacatccaggtacaccggctgcgagcgtgatacctgcgccaggccctgcaccttgggctgcaactgcgcttccagctccaccaataactgcgtgttgttgctggcagcaacgatcttgtcgacccggtccaggtacggctcaaaactctccaccaccaccggcccgtaacccaagccatcggcttcacgctgcatcatcggcccaggcggatcacggcgcagccaatcgccgtcagcgaacacccagacttccacatccggttcggccgaaaacagcgccagtgtcaccaacgccgcctctgccggcagatgatgggcaaccaggatgctgccatccgggttgatcaacgtgccgccattaaaacccgcgaccggcacatcaataccgaacgtttcgataaggtgcagcatggccttgggcggccgc

SEQ ID NO: 139607 - DNA, 404 bp, Homo Sapiens
  misc_feature (195)..(225): n is a, c, g, or t
cttattgtctcttcttttcagtgttggtatgatttgggtttcttgtttgtgtgttctgagaaaaacaaaaagagatgaaaagacaatactttaaaaaactgtattcaatcctagtgatccacttccacatgtttgagtttaatagtactctttatatgtcaagcaaatcttaatgaattgaaagtttactgtcannnnnnnnnnnnnnnnnnnnnnnnnnnnnnnttagagaaaagggctcatttgaaaaatatataccactttataagtaactacgcatctaattacactctacaggtttgctcttaaaagtttatgtaaggctgggtgtggtggctcacgcttgtaaacataaaattttatattgaaaataaaagcaggggtcaggcatggtgtctcatgct

SEQ ID NO: 139608 - DNA, 563 bp, Homo Sapiens
aagtaattcactaaaaagaggaaacaaagacctcaagaaaagaaaaatggaggaaaacacttctattaacttgtcaaaacaagaaagttttacttcagttaagaaacctaaaagagatgactccaaggacctagctctttgcagtatgattctgactgaaatggaaactcatgaggatgcatggccttttctacttcctgtaaacttgaaacttgttcctggttataagaaagttattaagaagcctatggatttttccacaattagagagaaactaagtagtggacagtatccaaaccttgaaacctttgctctagatgtcaggcttgtttttgacaactgtgaaacatttaatgaagatgattctgatataggcagagctggccacaatatgaggaagtattttgaaaaaaagtggacagatactttcaaagtgagctgaagttataataatctctttatttttttccttctaaacaaggacaaatgagaccagcaatgtgaactgtatttacataaacgtgcaaggcacatacataatgactttctttttccttaagtat

SEQ ID NO: 139609 - DNA, 1182 bp, Homo Sapiens
  misc_feature (16)..(16): n is a, c, g, or t
gcgcgaccgcacgatntcgttggtatgaaactctgtccagcacgaccgaacaacagccgtagcacccgctgctgggttcccgtaaacagtactgcggcaatggagaggcgctcattcgatcccataacgggaatgatagagccctttttgggattgatccagagccgcaatacatattcgacctcagcgcccggatccgctggcgtcgttcttcaaactgaatacgacgggaaccaaggcggttgcttgcacgggctcacgtcccttcatcgctggtatgaacacccactgggtcactgcctgaacggctgacgcatcgagtctcggcgagccgcttgacctctcaacccgaacatcgcttggtttccccgacgcctcgaccacgactcgtagcagcacagtcccctcctccttgagggcacgggactcttccgggtaaatgggtgccaccacgcggctcgttgcacagccgctgagcatcagaacgacaaaaagaatgcggcaaatcatcgcgagctacttagggaaacgctgatcaaagccacccttccgggatttttcgtccgtgaggcagcaactccgaaattcgcatcgtcatgacatcgaatttcggctctttttcagccccgaatcatcgacccgaggccctttcggggttcatcgccccgatttctcgccctcaggacgcacctgtcctgtagggcgcgcacagacttctctgcgacagcaccagattcgccatcgcgaacagcacatgcaactgcgccgcgttcttcgccagacccttgtagcggcacttgcgatgccggaacaggttcttcaccacatggaacgcgtgctcgaccttcgagcggatgctcgccttggcgtgctccgcctgctcgatgagttggcgtctcgggtccgtcttgtccagcctcttgtaagtcgtacgccggcgtgcgatcacgaattcggccgggcagtctttcagttcgggacgcttgcctgcaccctggtaaccagcgtcggcatgcacgtgcttctcctcaccatgcagcagcttgtgcgtctggctcacgtcggaggcgttcgccgccgtggcggcaagcgaatgaacgatgccggtgtgcgcatccgtaccgatatgcgctttcatgccgaaataccactgcttgcccttcttcgtctggtgcatgtcgg

SEQ ID NO: 139610 - DNA, 641 bp, Homo Sapiens
attaaaacagctttattgagatatgattcacataacatacaattcacccatttaaagtgtacaactcaaatttgccatttaaaccatgtttaagtgtaaaattcagtgacattgattacatacacaatgatatataatggttgtcaccacctatttccaaaactttttcatcaccccaacgggaaactgtaatcattaagcaatatagctctcctattcccccagccctctaatgtggctttctgactccatgagtttgctttttgtagatacttatataaatggaacgctacaatatttgtccttttgtgtctagcatattaacgaggcagggatcagggatctagtgtatcttattcattgctctacccactgcaacctaactcagcgtacacagcacacagtacatgctcaacaaatactgttgaataaactaatgaattataagcaagtcacctaactttaaaaaaattttatattgtatcaatttaaggggtacaagatgtttgaaggtatacatgatgttttgatatacatatacatagtgaaatgattatagcagtcaaacaaattaacatattcatgggtgtgtgtgataaaaactgtagaaatctactctcttgacaaattttcctcttgcc

SEQ ID NO: 139611 - DNA, 658 bp, Homo Sapiens
ctttgcatgttctgttttttctaatctagttgcatcagctggtctgagagccaggggcctttaggaggacctgcctggacttagcttgtcattggataggtgctttgtgtgtaggtcctggacttacatcccctcgggacagcctaggagccgtggcttgtctgacttcaaagccgttgccagctgggaggctttgggaggagccagctggcagctggccaccatcatgtgcagctggggttaccagcagtcactctccggccttcccccaaccacactcactgtctccagtggctgattcccagacacacccaagacagcagtcagccaggcagggggaagagcagctcgaggctcctaatggagtggcgctaatcagggaaaaagggagcctctttttgctcccttccccactatgcttctggcataacccctctcccacagggctcctcaggcatgacatcctagaaattcctgggtgcattccttcttcccagttacgtactttccaaaatggagtaggtagggctactgggtctttgtggaggggtcagtgttacatgcctctagggctctctcctcacttcactgggagatcctccagcaggggtaggatctcccctctcctgagccagcatcgggcctcgtgccgaattct

SEQ ID NO: 139612 - DNA, 585 bp, Homo Sapiens
ggctgtaggcggcattttttgctttcactttgtgttatccctaccagtttattataaaagatacaactcagaaaaagtcaaatggaagaaatacataggaccaggaaaaaaggtggggaaaaatgaagcacatagataatcctggtaaagagctatgattaataaaattctccatctttgtattctccaaaaatagtttttcaaaagaaataccctcttattatgacttagatggtgctctcttttctcacctgttgtagagccagacatagactctgcatattttcttccttttcttaaaaaaatcagctaaatttgtcttcagtggtcaaaataaaatacttcttaatcaaacttctttttcccacagcaactaaactttgagctacactcagtctgagccaacatacaaccccattttatgttcaccctaagaatatgctaacttcagggtaaaacattttctgatctaaaacctgactttttcactctctattcaccattcttctgctattttctttctaatcttgttttctcccctctgtggaaaaaagtctgcctgaactttgcaataatcctcgtgcc

SEQ ID NO: 139613 - DNA, 380 bp, Homo Sapiens
ggcacgagggttgtttttcaggaacttggggtcagctcttatccagttcaagccacttatgaccatcaatccttcaacttggtctgtgtgagtgtccagtaggtgacgtttgatgtcagagcgccaaaaactccatcttccgtcatgctaatgccaccattttgtgaacctgcatcctatgaagaacgatgaagcttgactaggcttgcacagatcgccgatgtcctacttttccctccaatcaccttccccacaccttaggccacctgcttctttgtcccataaacgtctctaaaccccatcttcgaggaagtgggtttgagacctgttttcccatctcctcacttggctgcctcatgaataaatgcattctgtgctgc

SEQ ID NO: 139614 - DNA, 435 bp, Homo Sapiens
ggcacgaggggcaaatttaagaatcagggcatatggtattcagagccaaaaggtgagacttccatggcctgcatcccagtaaaagtaaaaggatcatggattcatggatggtagaggagctttgccacattccacagcatcagcaggagtgagggtgaaaaggtgcaggcagctggctagagtcatgggatctcagcctccctgtttcatctgaggcattaggttgacagactcgtagtgagtctgttggtgtgagtgggagtcttagtgcctgaggagtggcggggaggagccattgggtattttgagaggaagatgaggggtagcagagaggcttgagcaaggaggcagggctgatgaggatagaatcaacggactgctggatcaaagagccaggcagctgacccttatggggctctggcaaatgccatatca

SEQ ID NO: 139615 - DNA, 1193 bp, Homo Sapiens
tagacaatggcacaagtgcagagaacaggctggacacaacccaccttaatgattggttcttccctttatcattttaaaattgatattggtcacattaagtttgtttacaataacaaataactgcatattataggcaaataaaattatcaaatttcccaaaagtaagaaaaacaaaatcagtgaagcactgtaattctacgtccatgaataatctatgcttcttacttgctataaatggtgtgtcagcaggagctcttgataaaatatctattgttttttaaaaatacatcaatcattatgtacactataatattctagtagtaatacatgctcactagagatatttccaaaaacacccaaaagtaaagccatcttatatagtaatacttgattgcaggaacagaaactgacttgagaataaataataataacactgtatattataagccaggcttcatgaaggctacaaccagaaactggaaagtcatcattaaccagttcctctgttagatctcatgaactcttgtctttttctttctttgtatatctgcttttgtcttattttcctgaaaatctgctttctttgtgcaagtgggagaagatgcccgcacctccagtccaaaatgttcatgtctctcaatccaaggcatgcatacaaactgacttgttttctctgaatttccaagtctaattcccagaagaaaagatccagtttgcccaccatgagtcaggtgtccatcatgatccaatttcaatgctaggtgtttcaattcatggttcaaccaggaaccttctccactgggatttgcaatactagaggcagtaaaacatctggaccatgaggtcacttcttctcctacgacaggttttcttgtgagtgtaaaaaaattatgccagatttttagcggtgaagattcttcctgtgttaggaggattgaagacctatgactccaacagccaaaagagtaagatgtgcttggaatgcttgccttccagaatatttgaagcaattaagcaatttgctcttatttcctctaactaccttactcagctccagcttactgttgccatatgggaatgcaggcccaggatttccagatcttctcatttttccagaaaaactagtttcatctgtgaaatctcttgattgtgaaatgttggaaactaattcaattttttattctgtacaggtt

SEQ ID NO: 139616 - DNA, 328 bp, Homo Sapiens
attgtgtctttctaaggacaaaaaggaaatatggtattttcattcagtcattcaacaggaagaacttaatcacatactattttgtgataggaacctggacaatctcattttactaagaggatgtgtgacagtattctttcatcttttatgtttgtgcaacagtatttacttgatacaaagaggtaaatgtctaatacctctactaaaatgtctaataaacttgtttttcattatccctttattcataaattattcacaaatgacttttgagaaaaagatggtaaatgttgattattttccccaggtatactgagggcaacctcgtgcc

SEQ ID NO: 139617 - DNA, 710 bp, Homo Sapiens
ttcggcacgaggcccaatcctgtttgttaaggtctcatcagcccagtcttcttgttggagtagctaattttaacagcttgatgttttcccccttctcctgtgaccacacagcattcctattttttgggtgtttctttaattagagagtggaataattattaggtattctggaaaaggagggaaattcagggacccacctggttactgccccctttctctcttatttggctttgcccagaagagtcatggacatgtcatcctgactgggattttggccattctttctcttattttgggttttctgttatcctatggtttctttgcctagttcttgtttttatttgttgttcgaatttttccatcctcctgcaaccacccagtgctattcctatatcactgtgagtataaacaccctttaaccttataggcttcttgaagtataattcccaagaccatgttgcagtggtccttaaagaaccaataaggcagagagaaacaaacatgttccaaattttgttctcaggagtaaaccttactcaattgttaaaggctgtagctagctcaaaagaagtttccttgactctgaaaaacaaaacaaggatcagcaatgttccaagcaaaagtcaaaaagattatttcagtttttctattagttcagcctattctgttaactcttgttctgcttgatatttataaacattttagctttt

SEQ ID NO: 139618 - DNA, 617 bp, Homo Sapiens
  misc_feature (476)..(530): n is a, c, g, or t
ccaaagaaatacactttttaatataaaaacataaactaaaatatatagcatgctaacagtaatcaaaagaaagctggattatctacattagcattacaaaaattggtttttagacgaacaaatattaccatagatgaagatagtaattccatactgataaggggtcaattgatcaagagaacataacaatcctaaaagttgatgccccttattaacagagattctaaacacatgcagtaaaaaagtttctgtattaatttgattaggataatggcctccagctgcatccatgttgctgcaaaggactagattttattctttttatggcggtgtagtatttcatgctgtgtatgtagcacatttccttcatccaatccaccattgatgagcacctacattgattccatttctttgttaaataggctactttcaagaaatgcattttatttatttgagacaaggtctcgctctgtcannnnnnnnnnnnnnnnnnnnnnnnnnnnnnnnnnnnnnnnnnnnnnnnnnnnnnngctcaagcaatcctcctgcatcagcctcctgagtagctgggactacaggggcaagccaccacatctggctaatttttgttctgtttt

SEQ ID NO: 139619 - DNA, 747 bp, Homo Sapiens
  misc_feature (454)..(479): n is a, c, g, or t
  misc_feature (678)..(678): n is a, c, g, or t
  misc_feature (722)..(722): n is a, c, g, or t
tttgtcgaagaacacggcattagatttaatctcacatatgttaggtgagtgattgaatgtgataaatattatagtactaatattctaattttttgtcatttgagtattagcaatgcaaaaataaacattagtgaatgtctagtatatgtgctatacacgcaatatatatttgtttacctgatcataatccagttgcgaatcaacttgaattttctggtctagtagcgggaggaagataagtaaacatgagagtagagatatgaacaaagttccatgaaaatatgatccaggctgctgactctccctgagttacagggggaagacttcacaaaatgctggcattgggtctgtgtcttaaggatgagatgttttcttgaaaaagcaggggaaaaaaggcaattttatcactgtaaaccaacaacttctttaaaaataatacagtaaaattaactcnnnnnnnnnnnnnnnnnnnnnnnnnnacagcttgatggttatgattctgttgttctcttgtgctgctcctttgtagtcacacactcctcctactcctaacccctggctgccgttaatgagctccccatcaccatagtcttgccctttccagaatgtcatgtaaacggagccatgcagtatcgagccttctgagactggcttctttcacgtagcacagtgctgtgngagattcatccatgattctgcaagtattgatagtttgttccttntctgtcactgactagtgtgcattgt

SEQ ID NO: 139620 - DNA, 685 bp, Homo Sapiens
agggtctcgttttgttgcctaggctgttctcgaactcctgagctcaagcagtccgtccgcctgggcggactaaaatcacaaagtgctagaatcacaggcatgagccaccgtgctgggagggaagtctgtattgttcctgcgttcaacccagtgcatagtgcatgagaagaggaggcagtttaggggcccagaaccaagcggatggggctggttgcaggaacaaagtaaaaaccattctgattgccaacagctgcctacgcaggaaacacccttccaacctccgtggcggggctctcccaggccacccctcggtcccagagtctcctccccgtccagagctctcaggatcctacagaaggggcggacaactcttcccttccaaactggaaagtcggcctaggtttccgaggataatgaaaggcacagcgttttttgacctcgacttcaggcctgaccccccactctctcggtcccctacctcttctgcgggatgttactctgtgggaaccgctcctttattctgatgattaactgtctgatatccttgatatttggggatagtagatgaaagagagcaggagagaaaaatggacggcaagactccagctcagaaggtgggaatgatggcaaaagtccgctacctctccaagctcaataaacatctcaaactgctctacaaaaaaaa

SEQ ID NO: 139621 - DNA, 308 bp, Homo Sapiens
gaagcagtattgattctttattgggagtacatttttttaggtctcttaaactttaatttcacacagtaaattttgaatctcataaggaagcatatttgaacctagtcaatttaatcttagtgttcccttgaaaactttttttccctacaaaattttaagtgaaaaatacaatagtaaattaagattacactggggaaaaaaatgcaggtatcactttactccattgttatctgacctagagcttaattaagttttagaaatatgtaataccttccaccaccccatcatactctttcacccacagcccc

SEQ ID NO: 139622 - DNA, 571 bp, Homo Sapiens
tttttttaagctttattgattctttattgggagtacatttttttaggtctcttaaactttaatttcacacagtaaattttgaatctcataaggaagcatatttgaacctagtcaatttaatcttagtgttcccttgaaaactttttttccctacaaaattttaagtgaaaaatacaatagtaaattaagattacactggggaaaaaaatgcaggtatcactttactccattgttatctgacctagagcttaattaagttttagaaatatgtaataccttccatcattccatcatccttaaattctgttaccaaataatggctaatgttacaaaaagttatactccagagacccaaagcttgacatttacctaatgtatgagaaaatattaccaattaacaataaagaatgatcatatttttaacctcttttacatagcctaataactcagcaaggcctcaacgtctgtgctaatttaaactgccaaatattgactgcagcaaacaagaattatattcagaatttatgagggtactgttaggagtatactgcttacaggtttagatatagtc

SEQ ID NO: 139623 - DNA, 1086 bp, Homo Sapiens
  misc_feature (909)..(917): n is a, c, g, or t
aattcatgcacaaataaaaaatggcaatagaaaaagcagaaaaatatggatgtttctaaatgagacaatgagacaattataaaaatttcatgtattaatatcaagacaaggctggggccagcttagttgtaagaaaaactattattgtatataattggacagcaaaacccagtcctgtctaaaagcaatggatcaaactgtcttctcaagtccttcctggccatatttctatgtgatacaatgaaacatttttaataaatgcaatctatcatagaactgcaagtttttatattcctaatgaacttaactttattatagcaatgatttaaatacatgttctgtaaaaaagagaaaaccagttgtaaacacactcttaatttttttttttatctgcaagataatatttttaaaagattacacaacttcttgattctttaagaactaagaaccaaagtattgaacataataaataaatgtgcaacctggaggcctggaaaaagagatagaataccaaataacaaaccagtgcattaaaaatccagtatgtcagtattaagacttcttcatccaaatccagttaggtttattgctattataaataagcttcacattaaggcatctgtcattacctatgaaaaagatttggattcaaaacaaaggaatatacactgtacaattttttttctttcattctgatgtcattacagatattatcagttttaaatgttaagtttttgtatggcaatatataaatatctttaaacatattacctgaatacagttcaaatgtctctctatattttgatactttaatatatatatttaaagtatattcaattaatgaggaaatagacaaaagcaaatcaacatagatggtaaaggactaaatctgagacattacaacctctnnnnnnnnntactgtacagacagtgacgatgagcagatcttggccaagtcatttaacttccctgagcctcattctttccatctgtaatatttcaataacagttgctctgtcaagctgttttgagatcacccggccgtaatggccgaattcccgggcatatgtccggtaccgtcgactg

SEQ ID NO: 139624 - DNA, 987 bp, Homo Sapiens
  misc_feature (161)..(181): n is a, c, g, or t
atatttatggatacataatagttgcattgttcttaccatatagtagatactggctaaaagtaagccattagaaattcatagtgaatacaaggtgctcagaactttaaaggtgcaaattgtgaatttttatcttcttaatcctggaagatatgctgtggtcnnnnnnnnnnnnnnnnnnnnnaattctactgcatcttctcgcaacactgtggtcttttaaatgttgtaggttacctaagaacagccttataaaaaggattttactttttcaatgagctttttatattaatagaatctcttttcttaatttactatcatctccctcaactctgttgaaatttatttctgtttttgagaagaagcattttgtcactgtatacatgtagtgacccttttctaaaaagtcttctccttagcattaattttacatgtttttatttagtatttcagtttcttgaaatatattcttagtacatgtaactcatgtcaaaagagggaatacagttgtcttgaactttttccccagaatgtaacctcaactggtccaggaaactaataacttggaacagatctttctcagagttgtagtatctgatagtccagagaattcagagaatattattgggtccaatataataacaataagagaaaataacttgacatggaaacacaattttttttaataatagttctttcagagggagctcatcaataaaaaatatttagtaccttttacattgtaattaattaatttactaaatttagttagaatgtctgctcaaactcactaaggccaccagaagaagttacttaatcctggaatatattctgtggtcttcttgttttaaaaattctactgcatcttctcagaatgctgtgatctttcaaatgtcatagtttacctaaaaacagctaatagtctattactgctggtagacttaaaatcattctgatatgaattagaaaataatccaacatttgctaata

SEQ ID NO: 139625 - DNA, 757 bp, Homo Sapiens
  misc_feature (332)..(366): n is a, c, g, or t
cacattcactcaatttattctttgaatacatattttaagcatctgctacagaccaggcactgggttacaacagtaaaacaaaaatccctaccccatgactgtccaaggaatcttgggggagacagacaataaataagcacatctatcaggtggtgctgaggaaaaataaaaataaggcaggataaaaggtcaagatgggcatctctgacaagacttttgggccaagacctgaggaaagtgagggggggcaaatcatgtgatcctagtcagatgtaatagcaagtatgaatgtccaaaagtgtaaaatagcaaaagcatgagcaagggatggnnnnnnnnnnnnnnnnnnnnnnnnnnnnnnnnnnncccagtgctgccttttcctcaatgttttgttttgggtagtgtctgtttcttcaagttcactagttcgttctcttgtaccttatctgctgttaaccccacacactattttttcatcctacacaatgtacttttcatctctagttccatttgggtctttttttctatcttccaaatctaggtaactttttgaacatatggaatacagttattctgttttaatgctctctgctaattctgacatctgtgtcaggtctggtttgggttcacctgatctttctcctctctatgggtcgtgttatccagcatacctggtattgtgtttgtcagcatacctggtagtttctgatcagacacagatattttttactttgttgggtgtatttttgtattt

SEQ ID NO: 139626 - DNA, 687 bp, Homo Sapiens
  misc_feature (641)..(641): n is a, c, g, or t
gtagagacagagtctcactatgttgcccaggctggaaattttttccttgttactttgtgaggcctctctgttctatttgatcctgtttttcccacaggaacttctgagtcaactgaaacaccattcttgaattcctactgactatatgctccacctacactgtccaactccttcttgttgacatggttttgctgaggataatttggaacttcactggtctttttgggaaacttatcatctccccaaactggtgtctctaagacttctctcttcccactggtttctctcctccttcctcctcttactgtaaccaaacgcaggctaagctgctcattgcttgcaaaattgaataacaaggacgagggtggtaaaaagaaagtgacttttattccagagcttagcagtggggaaacagaacaggctcctgccttaagggaactgatttaactttcagggaagaaagcaagggcttaaaaagggaaagttggtgtgaagggcaaggaggtgcggggtctacgtgactcgcttggatgacttatattgagtgatgccatctgatggtctggtctgcaccatcatggatagaattggattgtgaattaattgttgtcttgagacaatctcctggtggggaattccanagagtgcctgttttgttttgagatttggtccctgatacttctaagc

SEQ ID NO: 139627 - DNA, 167 bp, Homo Sapiens
  misc_feature (167)..(167): n is a, c, g, or t
gataatactccccaacaacaaaaaaataaaattcaaaggaataccaactagaagtacttgtagcaaatacgtaagaagggtaatatgttgcttttattaaacatagtttgataattaagacaaaaaaattagtagggtgctaattaataattttagatctaagaatn

SEQ ID NO: 139628 - DNA, 347 bp, Homo Sapiens
ataaacttttcagtattggggtcttggggaaataccagtcttttacagacacgaaattatttgaggtacttggtagaaatatactgagaaaaatccaaggaagaggaaaaatgtatttttacatggtttgtgtttggttgagtaaaatttaaataaccaagaaatttaattttcacttttctcaattattacggtcatataaatgatgagagctaatgaacttcagtgatcagaggaaactattaacagtgataatataataatactgatttattctcacttgagttttttccttaaggtctgacaccatgccaatttccacagacctgtaactttaagttacctta

SEQ ID NO: 139629 - DNA, 759 bp, Homo Sapiens
  misc_feature (79)..(91): n is a, c, g, or t
  misc_feature (441)..(475): n is a, c, g, or t
  misc_feature (743)..(743): n is a, c, g, or t
cctattcagtatgatactagctgtaggtctgtcatatatcccttttattgtgttgagataggttctttctatatccagnnnnnnnnnnnnngagggcttttatcatgatgggatgttgatttttattaaatgcttttttcaatattaattgaaagtatcatgtgggttttctcctttattatgttgatatggtgtatcacattgattgatttgtgtatatataaccattcttgcatccttggcagaacccccactttgtcatgatgaatgatctttttaatgtgtcactgaatttggtttgctagtattttgttgaggatatttgcatcaatgttcatcagggagattggcctgtagtttccttcttttaatgtttctttctttgatttgggtatcagggtaataatgaccttgtagaatgagttcgaaagtactaccttnnnnnnnnnnnnnnnnnnnnnnnnnnnnnnnnnnntttgaacagtttgagtaggattggtatttgttcttttaatgtttggtaaaattcaacagtaaagctatcaggtccctggcttttctttgaggggagattttttataatggcttcgatatcattatttgttattgattggtttgggttttgtatttcttcatgtttcaatcttgataggttgtgtatttccagaaatttatccatttcttctagattttcaaatttattggcatatagttgctcatagtagcccctaatgattctttgntgtttccacagaattg

SEQ ID NO: 139630 - DNA, 560 bp, Homo Sapiens
  misc_feature (452)..(452): n is a, c, g, or t
ttttggcaaaatatattttatttgttcatacaaagaaatagtatgaattaccagaatttcacttgcctagaaacatctttctctgtgtaaaattaatttgtgttatacataggacaaaatacttgatttaattttttgtacatattggctatcctaacatccaagttatcgaagacatactgctagaatttgcacagtattttagattacttggttgaatgagactcagtgataaattaatgtcacaaaagtgagaaaacatctaaccacacctttaagttttattggccatcctcttgataagctgaaaagtcacattagcttctgtgtcagcatcttagatacgtactgtttctagtttattggaatcttccattttccttttttacaaaaatatcctggcaggatctgaaactgtttctccaaatgtctaaaatatatctgtcacacanaatgacccccaaagagaatcctgggaagaaaacaatttctcctcctccatcatccaattaagtatttattaaacagtcactatacttaaaatacctttcccctcgtgc

SEQ ID NO: 139631 - DNA, 655 bp, Homo Sapiens
gtgtttttttaatattaaaagaatattaatgccccatattgactatacgttttatgtgcaaaccaagggtaagctttaaaacgttcgttagtccttgaacccttttaaaacaagcgaacgataccagaaactacacggcatagttaaaacttcttccatctgtgaaaatatcaaaatcagagttattgactagatatggcttttcatcccgaggaacaggaacatgtttctaagcgctgggggattggaggtggggaatccttcagactgctctggtctcgccaaatccacggaaaaacagctttcccggctccaaacctctgacatgactttaaacttgagaaactgttgaacaagtgtgaatcaaccatcacatgttaaaaaccggttttcttgggtccttctgggtgtggaacaacacagggaaacttaaggcaaagttcttctgggcagcgggcagtcacttccggtggaagtagagcggcttggcgttccccgactccaccttgggcagctggtcgctgatgatctccaccagcattgcggggaactctaccttcagcgcatgggactctcggaaggtgtagaagcagaattccagcaggtcgctcaccaggtcatgcatggagtccagcagcttggtcagttggtagaa

SEQ ID NO: 139632 - DNA, 412 bp, Homo Sapiens
aactgattaaatgatttattttgatcttatttctgatgaaaaaaagaatcaggataagtacagttgaccactaccatcccttcccatttttgagacatttttctctcttggttttcatcacaccacatctcctttgactactatgctaaaccatagatactttgtgtttttcatttactttcctaattctgattttgtttccctcagttctgtgaagtaataactttgtcatggctggaacatctctctggaaaggttgttcgagtgatgcttgattatgttgatcaagttcggatctgttcaatgttgaaagctgtgctccaaaatgggaagggatggtagtggtcaactgtacttatcctgattctttttttcatcagaaataagatcaaaataaatcatttaatcagtt

SEQ ID NO: 139633 - DNA, 563 bp, Homo Sapiens
tttacctattaatttacaaagcctttttttattaaaatggggaggaatacaaatagtttatatcagtaaaatacagtagcattcaggctctaatatgaacattacatcaaagcctatggatagataaggtaagagatttaggaaattgggggaggaaggaaacatcacttatcttattactccagattacagacagctgccacagataataaaataaaatcgcaattaagttgattgcagtacttgaaagaaaacttattaaaaataaagatttttaataaaatcttacattcttgacagatataccatcacctacctttctaaaagcagtagtagtaaacacaattgtagaatatgtatgttacttagtctttgagtggtacaatactataggttttaaaaccctgacaacactcctactttctgctgcttcaatatcagattatggcatggaattcatgtaaggttggttccaaaatggaatatcagatcccagaccagtatcagtaagttgtacccattttggcacagattttccagccatgaaaacacaaatcacaaag

SEQ ID NO: 139634 - DNA, 653 bp, Homo Sapiens
aatgctttagaaaacacagctttaggatattgactttttgtttatttctattttcaaatgctgaaaagtcaagtcccagtttgaataccatagaaaagctttgatgcatttgtaaattatattgcactctttcactatatattttcaaaatcactggagtgttgttatacaagagaattacaatacacaattataattctcttgtataacaacatattaaaatacatatattaatgccaatagttaaattcaacaatatgtaatctaaggtgctcggttctacatgaagtatgagttaactgctcataattaagttgccaagattctattatatatttatagacaaattaaaatgatcataattacaaatatgatttctttatcacttaagctttgggctgattaatatctgtgtgggggtcaatggaaactacattctctacatttataaacatttaatttaattatttatattttaggaaaatatatttgaatagaattaatgcattttctagagtaaattaaaatgttattagcaagaaatagaaaatttgactaagataattgtgtatatgaatcatttttcgcccaagttaaaatgtatcataatagagacggctctaatgaatcaatttccaatactcatttctttc

SEQ ID NO: 139635 - DNA, 715 bp, Homo Sapiens
tttgttttttttgcagttgtcagtcttcatgatccattctgtggcgagctgggaaaaaacgcagttgctaagtcaacgtctgaacagtgtgaggctcctgaatatctcccaggagtccctgcgcaactgtcctgagcatgagatcattgcacagagaagacagtccaccgcgcagcgctgactatctacagaggtctgagaggggcgcgtccctcttgtgtttcctctttttgccatggtaatactgattattggatttgccttgatgttgtttgtttgtcatcaaggaaccatggcttgtttgagttgtaccttggaagcctttgctggaagaacgaaagagccttgctgatccatgctgagatttgttggtgctgttggatgtgttagtggtttgggtgctttgcattttcccaactgcctgagaggactccaaggatacatcttgcgaccctactcggttcccagtggacggacggcaaagcagctgtttcggggttttgcatggtgttgcatcggaatctacatcactagagctggactgtgtggcagaagaggacgacactggaccattgcatgaaggctcaggtctattcttcaagccccactgctttgatatccaatctctatatgtggcaacttcatctgttactctaattattctacctagtatgctttctgtatcaccaatagcaaagtactatcccaacctccg

SEQ ID NO: 139636 - DNA, 456 bp, Homo Sapiens
ttttcagctagaaataagttattttattttaaaacacatacagattaataaatattactggaaaacttaatagcctttttatttacatgaggcaataacaacatgctatgactacatctataaagcaaaatataagcaggtcttggccactgacacatgtgtctatgtatgctaattggaagctccccaatacatgtctatgacaaaacttttacacaaccaatcaacatttgacattttttacatcttcttcctctcatgattatattccattttcaagaaaataatagttatcctttgaaaaggcaaaacgctcaagccactgaaaaacagtatctaaatttctgtaaagtgcaaaaatactaaggtggggggcaattattatattctgacaaataaatattctgaacttttcaacatgaccctttggcactagtggtttgggagccctgacat

SEQ ID NO: 139637 - DNA, 957 bp, Homo Sapiens
  misc_feature (80)..(212): n is a, c, g, or t
gtgaccttttgtggtcccgagacctgctgcatcttctgtctgatgttcggcttgagtgtctacttcgtgaacgacttctnnnnnnnnnnnnnnnnnnnnnnnnnnnnnnnnnnnnnnnnnnnnnnnnnnnnnnnnnnnnnnnnnnnnnnnnnnnnnnnnnnnnnnnnnnnnnnnnnnnnnnnnnnnnnnnnnnnnnnnnnnnnnnnnnnnnnagacgctcatcacgatcaggttcttcggttcttttccttaacttttcttttaattcttctacagtagctttaattttggcatagcccatgtgttgttttcccatcaaatggtcatctacccgggactgggcatctcctactattaaaaaggctccacatacttcacaaacttccatttgtttttcttgtgcagcaaagctttcaattgtcgacgttgtggaccttagcagttctctctcttcttttaattgctcaactaatttcatcatcccttgggcttcttctacttttccttcagaccctaattcttcaatctgttgcagaagtacatcaattttgtctgttagaacctgaattttttcttcatttttgcctgttgggccagcggccccagaagactgctggttttgagataatgccaaacgagcatggcctcgtctgatcctacgttctacttctgcaagtaagctctgtaagtatcgcaaaaaatctctctcatagccaactttcatgaaacgagagctcttctcatactgttttcgtagattttcatcatgaattttttcacacggacctgcagagatcacttctcaggaactgttcactttctctagagaagaatcctcttttcttctgcctggtgcctccaaatcctgagcctgtccagggttctgctgatcaaacactcgcttctgtttagtatccccttctgtcgtcttctcgcagccgtatagtagtagtaggc

SEQ ID NO: 139638 - DNA, 420 bp, Homo Sapiens
attttttcttgtcggctcctgtgtgtaggagggatttcggcctgagagcgggccgaggagattggcgacggtgtcgccggttttttcgttggcgggtgcctgggctggtgggaacagccgcccgaaggaagcaccatgatttcggccgcgcagttgttggatgagttaatgggccgggaccgaaacctagccccggacgagaagcgcagcaacgtgcggtgggaccacgagagcgtttgtaaatattatctctgtggtttttgtcctgcggaattgttcacaaatacacgttctgatcttggtccgtgtgaaaaaattcatgatgaaaatctacgaaaacagtattgagaagagctctcgtttatggaaagttggctatgagaggaggattttttggcgatacttacaggagcttacttg

SEQ ID NO: 139639 - DNA, 966 bp, Homo Sapiens
  misc_feature (850)..(884): n is a, c, g, or t
acagacttatttgcatacccatgtgtgtttcccaatcaatgtcatctaccggactggcatctcctactataaaaaggctcccacatacttccacaaacttccatttgtttttcttgtccagcaaagctttcaattgtcgacgttgtggaccttagcagttctctctcttcttttaattgctcaactaatttcatcatcccctgggcttcttctacttttccttcagaccctaattcttcaatctgttgcagaagtacatcaattttgtctgttagaacctgaattttttcttcatttttgcctgttgggccagcggccccagaagactgctggttttgagataatgccaaacgagcatggcctcgtctgatcctacgttctacttctgcaagtaagctctgtaagtatcgcaaaaaatctctctcatagccaactttcatgaaacgagagctcttctcatactgttttcgtagattttcatcatgaattttttcacacggaccaagatcagaacgtgtatttgtgaacaattccgcaggacaaaaaccacagagataatatttacaaacgctctcgtggtcccaccgcacgttgctgcgcttctcgtccggggctaggtttcggtcccggcccattaactcatccaacaactgcgcggccgaaatcatggtgcttccttcgggcggctgttcccaccagcccaggcacccgccaacgaaaacacgggcgacaccgtcgccaatctcctcggcccgctctcaggccgaaatccctcctacacacaggagccgacaagacccccggccgtaatggccgaattcccgggcatatgtccggtaccgtcgactgnnnnnnnnnnnnnnnnnnnnnnnnnnnnnnnnnnncggccgcttcctcgctcacaacgtcgctgcgctcgtcgttcgctctaacgacgggcgccctatagtgatctatacactcttt

SEQ ID NO: 139640 - DNA, 461 bp, Homo Sapiens
cagttctctctcttcttttaattgctcaactaatttcatcatcccctgggcttcttctacttttccttcagaccctaattcttcaatctgttgcagaagtacatcaattttgtctgttagaacctgaattttttcttcatttttgcctgttgggccagcggccccagaagactgctggttttgagataatgccaaacgagcatggcctcgtctgatcctacgttctacttctgcaagtaagctctgtaagtatcgcaaaaaatctctctcatagccaactttcatgaaacgagagctcttctcatactgttttcgtagattttcatcatgaattttttcacacggacctggtgcctccaaatcctgagcctgtccagggttctgctgatcaaacactcgcttctgtttagtatccccttctgtcgtcttctcgcagccgtatagtagtagtagtagtaggc

SEQ ID NO: 139641 - DNA, 884 bp, Homo Sapiens
  misc_feature (807)..(841): n is a, c, g, or t
caagttcaatatttccattatctttctctgctggctttggagttgtaatgctggcttgtttctttgctttttttctgtaagtgcttacttgttccagaaggaatatcacttctctcttttatgtaactgtcgttatctttttcttcctcactatcttgatcttcatcctccactgtctttttcagatttttatcatttacacttttcttaccactctgatcatctaaaactgggagggacaaatcaaggaaagattcatgaaccaaggagacagttctgcattgatcacacatgatcatactagttagttcaccaccaaagatgcggtcaacaaaacttggcattgattttttcttctcataatctttaactttattttttagttcttcatccaacttttcagtagaattaccaaatgctttaagtattcctttactcactctttggtgttcttctgctctcatcccatccaataagtagcgaagcagctcctggctgtcttgctgctgatagcctttaaaccgcactgcttttttacagacctgagaaaagagttctttcggtgtcacaaccccctttttggtctcttgcatctcattaagaaactggctcatggctaaagtaagagggcctggaggctcaaggtttatttctaatggttctgttaatgccaaatcaggtggttcaatttttacaattgttccagacattttcacttcttttagtagttctctaagcactggtgtttgtgacaagcccggccgtaatggccgaattcccgggcatatgtccggtaccgtcgactgnnnnnnnnnnnnnnnnnnnnnnnnnnnnnnnnnnncggccgcttcctcgctaactgactcgctgcgctcggtacagta

SEQ ID NO: 139642 - DNA, 603 bp, Homo Sapiens
aattaattataaacttattacattgattttttacaacagacataactaaacataaaacaaaaaggagcaaaagactttgctgaaacatcttcataggagtccagaatataaactgaaacagagcacatacaccagaaagaccttcccggaagattgtggaaccaggtccccagagcagaaagtacaggagagactcataactctccaggcccagtgctgggggaacccctcatgggagcagctgtaatgaggcctggaaactggacactgctgagccctgacatccagacctcaatgccctgactcagcccatggcagcgaccccttcaaacaggctccatgtgggcctgtaatcaggaaagactagagcatccaggagtggagatttgattctgagatgctgggagttgttcctggttcttgctcctgtctggctggtgctgacagccaaaagcggggagttgtgtgagctttgtccttcagcactagaggcttcacccaacccatgagaaggggatgccccaagcttgcccatcacaagcactggccaagctgactccccgctgctgagggaaagagaaagaagccaaggctgctcaagtc

SEQ ID NO: 139643 - DNA, 1158 bp, Homo Sapiens
taagagttatttagccttgtgaatattttgaagtaaagtttcttgaatttccgtgatgaactcttcaagcaattcaacttctcagagtcatcactcaaaagttcctttgacatgggacctatcccacggtgacaaagcggcttccccctttgttgtatgtgagagtggctctttgttccttcaggatcccaaaccgctcattcaacgtcatccctgtctgttttccgacactgtttatgtcaaactgcaggggaacacctttaggaactttcttgacgtcactttgctcccgctttgttaaaaatgaaggtacagcagtacgagttaatcgtggtttctgagttactgggcattgcactgctccaggattgtccaatagatacagtcaaaatccctccctttgtggtggaagtccgccattgacgagttctctttgctactacatcgtctagccgttgttctgtattcaactgggcctgcaccttcaggccctcttctgaaaagaaaagttgcctgacgagtatctttctgatgatttaatttatttccactcctggtaaaattagctggaatgttattttttctgcttagctggctaggtctcttgagaactgctactggtttcctctgcccttcattttgtctcagaaggtttgccttcctttttaacactggaaaatattgttctatattcttgtcacttagaggtggacgattcataggactaattccttttcgaattccagtcgttttcctagctgcaaggccagtgataactccattaggacgtctctttccaggcattactcttcctctatgattcagactagtcttaccaaaaccagaattctgttggattccccatcgcactctcatcctgaattgctgggcaccactttgctggaggagtcttctatttagtcttggaaaattctgcttcttcccttcctttcgattcaacttgatgatatcatccaaagacatatctattttgtcgaggttttcattgctgcgggccttcggcggcggcgaagaagtcgccgtggctcccaccaaccgggtaccaaaccggttcatggctggagacgtcgcgccgagagcgggcgcggacaaggccggagtcgcaggccatcccgggaattccggaccggtccagcc

SEQ ID NO: 139644 - DNA, 447 bp, Homo Sapiens
cgatgcactttgtagatgctgtggctttgtgttgcgttttgtgtctctgttgcacagatctgttttttcacactgatccgtattcccctgggtgtgcacacagggcgggtgtggggcatttaggccatgctgtgctctacttcattgagtaaaatcgagtgagaggttccgggcagcaggatcgacgcccagtccagccggcagagggaacacacgggtccttcattgtcctgtaagggtgttgaagatgctccctggcggcccccaagcagactagatgggaggaggcgccgctcagcccctcaccctgcatcactgaagagcggcgcctctgcagcaagcagggcttcaggaggtgcccgctggccacagccaggttttccctaagaagatgttattttgttgggttttgttccccctccatctcgattctcgtacccaactaaa

SEQ ID NO: 139645 - DNA, 443 bp, Homo Sapiens
ttttttttggttgttgcacctactttaatgacaacttcaaaaaaggaacaacatccatccacttcttaatgtctttatgaacacagaggctagagtccccagccagcttctgaggcagccctgcacatcctgcaggtggccacactcaacccatgccacaccgtttgcttaaagctacaagtcctagagctgaagaactggcaagccagtgcgtgaagcttatcgacagcgcttccagccacacgagcaagctgcgcagatacagggaggtgcgtgggtccctgtggggaaatcctccaggcacatcgaagcccgggcatgtttagtgtgagacttggacaaagtcctctgtctacaccagagtggtaggaaccaaggcaggcatcagctgcgtcataaggatctggtagatggagtctcgctctgtcgcccgggctggagtg

SEQ ID NO: 139646 - DNA, 855 bp, Homo Sapiens
aagtacaaataggtgtttatattacaaagtgatactggtttataaaaggattcaacatagattttttttaaatggttgttttcctcaatcaatttaacaatgattttaaatgtataaaattttaatatctctttgagacagtgatccaagcttcttccccttgatgatgttaccagttcatactttgtttcaataacctgtccctccacagaaagtaggtgcagtctcttcaccaatacactaagaagtactgtggtcaccatatatgcaaacctcaactctggacactcctgtgtgcctgagaatccaagtgaggaaaaagttttcattactaattcatcatcaaaccgatctggatcaaacttgtgtggagatggccaagtattaggatcctgaagtaccacaccaagggcataaaggacgagggtctctctaggaataataaatcggtcaatttttccttcaatatcttgaaactgggcagaaactggagtcagtttggcagttcgaacagtttcacaaagcacatgctgacaatatctgagctgctcaattttctctggagtaacaggaccatttccaaaaacttggtttatctcttcatataattttttttgaacttcttcagaggtggttaaaaaacagattgcccaggtacacaattttgcagttattatgcaactggccagagaaaatatcatactgtcttctaggatctgttggtcattaaggttcccttgtactaaggagtcaatgaaaatatgttgactgaagttccttccttttcgttcttttatgatgttcccccggccgtaatggccgaattcccgggcatatgtccggtaccgtcgactg

SEQ ID NO: 139647 - DNA, 1193 bp, Homo Sapiens
  misc_feature (54)..(72): n is a, c, g, or t
  misc_feature (1080)..(1114): n is a, c, g, or t
ggtaaccagggcccattttcccaaaaaactggggttaatctcctcaataaaaannnnnnnnnnnnnnnnnnncagagggtggttaaaaaaccagaattgcccccggtaccccaattttgcaagtttattatgcaactggcccagaggaaaatatccatactgtcttttaggattctgttggtccattaaggttccccttgtactaagggagtcaatgaaaaatatgttgactgaagttccctcctttttcgttcttttatgatgttccttaaaaacagactccagttgcatgaggggcatcttcatattgttttttccgagtcatgtttttatcaagtgacccatctagaaagccttttccaatctcagaccaaactgtgccatgattcttctggaagcgaatgacttcctgatcatcttcaaatgtactacccattaccatctgtgtaacagacttcatagcaaaaccaagcatatgctggctgaggggcacgtgctgggtctctgggtaggagagccatttatctaataattcttctgaaagctttaggaggagggcaaagttactcttcagagaatcagtcacaccattttcatacaattttttcctcatgtggttttcactcacactgccaccaccagattgataccttaataatgacttcagcatggtttcaaaagggtccaatgtcttattgggattgatatgctgcttcagtacatcaacagtgcccaaactaaccacgaggcgcctgccaaaccagaaggagaccacaggcccatatctctcatgcaaattaaccaggaactcatgcaaacttccactattcacaatatctggaagattaccatctttttcttcagttggagtaatccctggaattcctgcagcttgtctggaagccggatagaggtagagcacggctcccaccaacgccagcaagaaggtaacggcgaagatcgcgaagtccaacatggttctgccgcccagggagccacgtctcggatcggccgctccagcagcagcccccggccgtaatggccgaattcccgggcatatgtccggtaccgtcgagctgnnnnnnnnnnnnnnnnnnnnnnnnnnnnnnnnnnnccggccgcttcctcgctcaatgactcgctgcgctcgtcgttcgactgataagcgctagcgccctatagtgattatcgat

SEQ ID NO: 139648 - DNA, 452 bp, Homo Sapiens
cttttaatcaaactactgtctggaagtaaaacatgaaagttgagtaattttctcaagcacgtagtttgcttgctaacaagtaatggattaattagctttacgttttcactcttgtctcaaggtttttactgggtaataatttgtaataagttattaggcacaaaccactggtcaggaactgtacacgcattttaaaaaatcctcagtatccttaggagttacaattggcatcttacagatgagaaaatcaaggttagaaacagttactgtcatttgtccagatcatacagctgcaagcaatgaggatcaggattcaaatccaggccagtttgactctaaagtccttgctcatttcaccagagccagctattcaatttttatgttttttcttttgctgtaactgcctgttcactaatttcactccttcccttccttgtgtgaagctgaaattt

SEQ ID NO: 139649 - DNA, 649 bp, Homo Sapiens
  misc_feature (498)..(512): n is a, c, g, or t
gctgatcaccgtctagttgggaaagtaaccctacagggtttgtagggacatgatcagcatcctgatttgaaccctgaaatgttgtgtagacaccctcttgggtccaatgaggtagttggttgaagtagcaagatgttggcttttctggattttttttgccatgggttcttcactgaccttggactttggcatgattcttagtcatacttgaacttgtctcattccacctcttctcagagcaactcttcctttgggaaaagagttcttcagatcatagaccaaaaaagtcataccttcgaggtggtagcagtagattccaggaggagaagggtacttgctaggtatcctgggtcagtggcggtgcaaactggtttcctcagctgcctgtccttctgtgtgcttatgtctcttgtgacaattgttttcctccctgcccctggaggttgtcttcaagctgtggacttttgggatttgcagattttgcaacgtggtactacnnnnnnnnnnnnnnngtctgttagttatttctccaggggaaaaggcaataattttctaagacccgtgtgaatgtgaagaaaagcagtatgttactggttgttgttgttgttcttgttttttatagtgtaaaataaaaatagtgaaaggagaa

SEQ ID NO: 139650 - DNA, 611 bp, Homo Sapiens
tttttaaaaaacaaagcatgatatattgaacaatagtaaaattaattttaatcaattggcattttcagaataataaaagggcaaaaagtgaaaaaagaggatatttgtgacaaaaactgaccaagcactcatatttaaatattcaaggaatgtttacaattcaataacagatgacccaatgtaaaatggacaataagcacttcaaaataaagaaaatatctaataacaataaacttatgaaaatgttatcaaaattagagaaatggatactaatttaatgtaattttccaagatgaaaaattactacacactctccagaatgtctaaaattaaaagataaaaaataccaagtattggcacgaatttgagcaactggcaatctcacatgctgctgctgtagaatacagtaatctgctacaatctgctgctgtagaatacagcaaactgctacaatcactttaaattgttttgcattatcttctatatttgactactatatatcgcataacataacaatttcacactcaagtaattattcagcacaaattcatgagacatgtacctaaagcatagatataaaaatgtttatactcccaaagcaaaaaaagacc

SEQ ID NO: 139651 - DNA, 715 bp, Homo Sapiens
aatgagcagtgtttttattcaagctatataaagacatttatacgtaagtacatacattcatttaaaatatatgtaaagttcatttagaacaggcaatttgtttgcttatgatctacattcacggaggggggaaaaaaagtacacttattaaaaacaggtaccacacatctatattcaccaaattgcgttggtttaaaaaagtattaacttgacatacgttgcatccatgtttattgtgctacttgcgcaaaggaattgtttactgaattatgtttagctctttattcatttaacaagttcatttaaataagttcaatattccataaatgacaagcagcttaaatacaagtttgataactatcattaaaaaagtaataaaatcaaagtcagtgaaattttcaacaaggcagcgtaacatccatcactaacctgactaaaaggccgcactcgcactgctttcacactgtcaacactttgcgtaggcattttcaccaatttctcattatctgtattatttggtagaaaaataaatgcagaaagcacactgcatatgcttcacattaaaatattaaaagcccacgaaagcagttcgtttctagataatcaattattaatagtccattcattacacactatcgattacctgttataaattattttacaacacttatttattgatgagtgttagagcctacatcaagtaccattgcttaat

SEQ ID NO: 139652 - DNA, 1213 bp, Homo Sapiens
  misc_feature (624)..(632): n is a, c, g, or t
aaattttattacctgctaggtatgatgtgtaaaatgattttccatttatagtaatggtatagtttcctttttataaaaggtttataaagtttatgtaaaaagtcaacttaaaaataccaagttaattcagtcagttcaaaaagttttgaataattaaacttggaaagtcactgcaataaagccaaagcaagttaatggtcataattataagacttagctttttaaaataaaactctcaactgtgtctacccttttaattttttttctttcttccccctaactttacagttaaccgacagcgagaccaagtcaaacgtacgtacatcaatcttaaattgtttcattaagagctatgtgaattctgtcagtgcattatgaggaacaatgtctaagaggatattctatgtttgtttcacaggttactactctgttgtatatccaggctggcccatatatccacgtaacagatacacttctctctttctcattgttaattcagtaattctaatactgtctgttataattaccattttggtacagcacaagtaccctaatttagttcttttggactaatacaattcaggaaagaaaaaacccaaaaaccaacctcattcacatatggcnnnnnnnnnaaccaataacaattaggtgtacttctattttaaaacatttcagaaaaaaatatatgttatagcaatactcttactcaaaagaagaaatttcctaactctatcagataaactcatctttagtataaataagcattatttgcaggttgccacaggtggacttttagtaagtaacctaacccatgtttcagcttctaaatctgcaaaatgagcaaggtacagtagcacatttttaggtgattcttagtaactccagtagccttcattagttaaaaacattattattttttgcatgctgcttcgactctaaatatctggttttccctgtctttttggtttactacttccccagattcagaacagaggagtaactaggggatctgattttagaggccttaattttctgttcatggactgttaaaagtaaaaccaaactttcaaaagggataaacctaaatatttacttgttatcattagagagggaacatcaaatgctgggacatcattactaaccaatagcatcagacactggatttaatggataatcacaatggtcgtaatgtatacaaagacatatataccac

SEQ ID NO: 139653 - DNA, 579 bp, Homo Sapiens
  misc_feature (98)..(98): n is a, c, g, or t
ctgttttctctgtctttattcaacttgatgaggtaagagttgaaatgactttctttgtcatgggttccttgactgagttggttgaaatgcccacctgngaagactctgtattttagtctaggatttattccctctgcactggaagctccttgagattagcagccctgcatatctagtgcaccatggaattactcacccttagcataaggcctgacatgtggcagcatttaatacttattaactgaacaagtgttggacccagctggtcaagaaatgcctcaggaggtttttatttttcctcttcagatagatgttgcttcctgccaattgcatcctgtacccactgttccttctggattccatgatttaccatccagcagggcttttctgagtcgtctccaaaagatgtgccgccccaggacactgtcctcccactccaggtaagtgttcctactgagaaggcggtacagctccacctgttgcctgagcagggtcttctccaccttctgcaggacaatgaagatgataccagcacgactgctcagaaactgccacgtctgagcaatctcatattcaaag

SEQ ID NO: 139654 - DNA, 837 bp, Homo Sapiens
agtcacaacgttgattaacggagttccagcgcaaccgctcaggccggctggtgtctcactcagccccaatccgctggggccggtgccaggaaccccaggcccgtcgtcacgggaaccaggatgcgagccacagctttttcagctggttctcaaaccatagcctcccagaggctgacaggattgctgagattatcaagaatgatctgtgggttaaccctctacgctactacctgagagaaaggggctccaggataaagagaaagaagcaagaaatgaagaaacgtaaaaccaggggcagatgtgaggtggtgatcatggaagacgcccctgactattatgcagtggaagacattttcagcgagatctcagacattgatgagacaattcatgacatcaagatctctgacttcatggagaccaccgactacttcgagaccactgacaatgagataactgacatcaatgagaacatctgcgacagcgagaatcctgaccacaatgaggtccccaacaacgagaccactgataacaacgagagtgctgatgaccacgaaaccactgacaacaatgagagtgcagatgacaacaacgagaatcctgaagacaataacaagaacactgatgacaacgaagagaaccctaacaacaacgagaacacttacggcaacaacttcttcaaaggtggcttctggggcagccatggcaacaaccaggacagcagcgacagtgacaatgaagcagatgaggccagtgatgatgaagataatgatggcaacgaaggtgacaatgagggcagtgatgatgatggcaatgaaggtgacaatgaaggcagcgatg

SEQ ID NO: 139655 - DNA, 455 bp, Homo Sapiens
gcacgagggtcacctgggcactagtcccctgttcagcctggcagtggtggtgggcagagccgggcggatggaagagggctggctcctgaagccctgagatgctccataagatcccctgaaacaatgggcacagacttaggtgaaggcagaggcaatggcaggcaccccaaacactccaaaaccagcatagccttccccaggcccaaatttcatgcatctgcggcctcagttattctcaatggctctggaactttcagcaaagactttcacacactatccagtgcacacgctttattttggcattcaagccactgcaccaactaggtcacagggaatgttaattaaggcaagataggtagaaggaaaggagggtatgtacagcaattgctcctctttacggagaagagaacctgccacagaacaagatgcagttggttttgtggtgcctgatgaag

SEQ ID NO: 139656 - DNA, 632 bp, Homo Sapiens
agaattcggcacgagggaggattctgtaacaacctttaagacaattcagcaaataaaaagcataattgagaagctggatgaacctcatgaaaaatataggaagaaaagatccagtagtgcaaaatatgggagcaaggaaaatccaattgttgggaaagcatcttagagtttaacagattggttcagaagaactggaaaatattatttttcttggagcttttcaattcatcatgtattttgttcatggtatttaagaatgagcatccgcttcaatgtcatctgcctccacattgtatttaatatttaataattgaaattaattgtttgggaatcctggtattgatgtattactagagaatttaaagcccaagattcccttcatacctgtgtgaccaaatccatgtttctgcaacttctttttaatcgaaagaatcttcctagaaaagctttgtaacaaagggagaactcctccgtagcaagaaaccatctcttcttgtaacactctgttctgtggacttgttttcactaccatcagtgcctgctctatactgccaacattgtgttttactagaaaactccaattcatgacagttcagagcttttcatttagttcatgtagaccctcccacttt

SEQ ID NO: 139657 - DNA, 431 bp, Homo Sapiens
gtcctagcacactgacttgcacatagcactcaataaaaggtagctattactattctttcaatcattcttcctatgatctggtttctagaattctcactatattaatcaccctcttatggaagctatcttgtttactcaacattcttcttaacacgtagttataacaattcaatactatgtggtgtatggagattttgctttatttgaagataattattttaaggaagtctaaacagacaagcgtctgctgggaaaaagctagtctacctgcttatataaagagctggcacttacaaaacccattaactttctcaaaataccaccctttaaacattgggaaatgtatggttaagagaacaaaaataacagcaaataaggagtgatcagccaggtaagagaagaaccaggatagtgcagtattatgatgaaaa

SEQ ID NO: 139658 - DNA, 647 bp, Homo Sapiens
tttttttcattagaaggttcactgtatgttttaatcaggctcagactgaaataaaagtagtcaattgaaaccccaacctggaaagccatccctgctatggctgtgatttcatcatttcggcatcccgaaacattcacttagagcaacatccatgtaaacagttcgacatatggtcccctgctgtggatctgtggctagtaacagcctgggagcagcagacagacaggggacacttaaacctcagaaagcaatagcagcctctgacgccttgctcaaggcttctcatctggtggctcagtgagactttgggaggtggaagtggtgaaagtggaaagccatgaagacatagctgtctttgcactggaaaaagctcctccaactgactggccaacagcttttcctgtttgtacaacattccggctagttgtgaccatgacgtttccaatttttttgccacgttcactattctgaacagaatgtgagaaccttaacttcatgtctgatactgagtattggccttgaaatggatggtttggatttatttctgcaagtgctggatgcttgttgctgttccacaccctgtagttgtgagtattcttccatgctgtaacaaaagttgtcccatagtccgcctcgtgccgaattct

SEQ ID NO: 139659 - DNA, 671 bp, Homo Sapiens
aattgatcataacaattccaacgttgaacatggcctggagcttaacagatgtttatttaaatactaaggagtatgtctgggcttaggaaggagagggtggttacatttccagggtggtagaattctgcctgaaatatctgttttataataaaagtaaaatgtctcaccgatacactgttaaactgagaaaacaaagatgaggtaaggtgggtcagattatttctaaggtctgtttactatttacatttcatataattttcattaaatgtggagaatgcaagtcttaggagtcacctgaggtacatccagttttttgtgactatttcctgatgtttgacagactgttctttcaacttggtgtagagttacagtctactcttttagggagaatgctgtttgttcacatcatgaggctgtaaatatttaaaatgttctcaccattgtgttagtttccaactgacacatggcctgagagattggagtatcattaattctgcaactcttttagtgctccggatgtgcatgtttatttactttcaggactagttcagacatagtaaaactgctagtgacttcatgtaatccttattctgaactgtatttgaaagcaagggaaatgaaacatgatccctaataacctcaaacatccaaagatcaagtcaattaagggc

SEQ ID NO: 139660 - DNA, 1254 bp, Homo Sapiens
  misc_feature (1134)..(1168): n is a, c, g, or t
  misc_feature (1172)..(1212): n is a, c, g, or t
gctttctcaagctaaagtcggtttttcttaatccacttccatgggtccagtagaaacttaacacgtattataataagttgtctcacaattacaccttgcaatatttgaatatttctatttcttctgcaggatcttaatgggaggttggaagaagatccatcgaggttgttagtcaaacacaaattcaaattttaaattaataatatttataatttctgaaaaatatacaacttaacatgaaaatatatattatagcataaatccaggccagattttggcctaagtaatacatccaaagtgtttcattttttttaaaggcatcaggcttttctctttatttaggctattaatctatcttgtcctttttacctcccttatattctagtcactggttttattagcagttacaactaccaaacaattactttttattgtatcacacactaaccatgcctctcactttaaatttttatggatcatatattctaatcttaaccataaaggcatagctatatcctaaccatgggtactcccattttttatagtttattatagatgcatagacttatccattggtccactgtaagtaaagaatgttggaattgtcagtgaaagaccaggtacacctcaaaaataacatcttaatgaatcaatgcaatgttagttggcagcagcattgtcttgcatgtccaaattacatgttttactatctgttccagcagaaggtacaaaatgttcaccattatttaagaattctaagtttgcttcatccattacttttctttcattgtccgatgccttggtatcttttccttgaaattttttcttcatagcaaaaatgaaaacaatatataaaacaagtgctgggaatcttaaagctatagataagcccaagtagacccttccaaaaaatacggaattatatatcctacaagctccttgtgctccacaactgttggtggaccacttcatacatgttttatcaatcagagccccaaaatatattggagctagaattcctcctagtgttcttataaccattgactggaaacccattgcaagtgctttcaattcaggttgaaccccggccgtaatggccgaattcccgggcatatgtccggtaccgtcgactgnnnnnnnnnnnnnnnnnnnnnnnnnnnnnnnnnnncggnnnnnnnnnnnnnnnnnnnnnnnnnnnnnnnnnnnnnnnnnctgcggacgagtagcgccctatagtgagtctatacatctttt

SEQ ID NO: 139661 - DNA, 712 bp, Homo Sapiens
catcactgtcatcagtcagagctttataaggaggaggaatttcattggcggtggagcagttccttgcctcttttctttcttttcttgggtgtcctggttctggttactggtgattttgttggccttgttatgtacgttaggaatgactcgtggagtggatgacaaactctgaacaatgaacaccacagggtttcctgcattcttaatggcctcaactgcttcgctgtgtgaggcattctgcaaatctactccagacacctcaagtattttatctccagttttaagtgcgttcgtcttccctgctggactgtcttctaaaacttgtttgatgaatatacctttaagctcctctccattctttagacgttttataacagtttgtccaccaacaatactgatcccaagagacacattgggttctctaaaaatctcaacaattctcggtggaccccagtggctaaaatttggagtttcttctccttcgccttcttctctctcaggtaactcacatgtatcagtggcatatctagaagacaacattcctgtgtatgctgaggccttggaaataactcgtgtcgcttggtgttgatataaaggcaaatcttcttgctccctcctttgagccacaacaggaaggtcaatgagcaagctaggaccttggacatcattcgggatcatgcctaaatccagactagtttttgctaatgaatcc

SEQ ID NO: 139662 - DNA, 520 bp, Homo Sapiens
  misc_feature (313)..(345): n is a, c, g, or t
atgtttagcagttttttgtgtcctgtttagaaaatttttgcctattccaaaatcatgaaatttaagttctccacctctgttgaaattataatattaaggcagaaaagactcttcattctgatctgttggttcttagccttttgcaagtccaggatccctgtgaaaatctgactagaactctggacgccctgcacagaagtgcacctacgcacacacacagtagattttcctgcagtgttagggagttcacagacactcagacttaatctgtggaccccttgttagagaacccctcatctattccaacccagtnnnnnnnnnnnnnnnnnnnnnnnnnnnnnnnnnaaggccactgttagtttgtggcccacctggaactagagtccaggtctcttgactccgattctagtgctctttctaacagatttccctgctgcagtctttctgaaaatgtctcactggcagaaccatgaaagggagaatgttttagtcaagggagatttctgtccactagcagcaa

SEQ ID NO: 139663 - DNA, 643 bp, Homo Sapiens
aaggtacagtgtcttccctgcactccaatcgaacacagattatactaaaagcaaaagacttcaaaaatctcactatttttattggttcttcactatgattctttgcagtagattgcaagaatggccacaatcaaagaccaccacagtgcctcaccctggaattccttccactccatgcttgacaactgcctgttctacaggagcaatcagggcatctgacaaggggtcccttgatttttcctctccacctcaaaatgtctccatatctacactatccccttatctgctcctccttacatagaaaggtcacctgtacgctcctctccatgtctcttctttttccttgacctgtctcaactcacttcccccaacacctgcaccattagttatctccccctccagctgacccactcctcaatctgcaaacaggccaatgcattcctcaataaccttcccgtgaccaggggtgagatacaatctgtgtcttcacatcaaactttctgaaaggatattctccatgggtcaccttcaacagctcaccgccctgtgactccatgtccatctgtttggcttccgacctgctcctcacctagaatctttctctccgcactcactaacaaccacactgatgagctcttactcc

SEQ ID NO: 139664 - DNA, 513 bp, Homo Sapiens
  misc_feature (124)..(200): n is a, c, g, or t
  misc_feature (240)..(342): n is a, c, g, or t
ctttgcgtctgtttctttctctcaaatttgtgagactcagctctgagttgtgtgtggctgtcgtcctgtcatttcctctgttgtcacttccatggcatttcactgttacttaggcaagcttcannnnnnnnnnnnnnnnnnnnnnnnnnnnnnnnnnnnnnnnnnnnnnnnnnnnnnnnnnnnnnnnnnnnnnnnnnnnnctcgtacttgagccatcattgatttaagagtctttagaannnnnnnnnnnnnnnnnnnnnnnnnnnnnnnnnnnnnnnnnnnnnnnnnnnnnnnnnnnnnnnnnnnnnnnnnnnnnnnnnnnnnnnnnnnnnnnnnnnnnnncacctccttttaggaagctgaggagctctttgtatgttatcagcactattcctacctccacaaccctggacctaatggtgcctgctctctgaccttgagggaccagacaaggttcatgggaccatcgtcccttccagtttgtatcttctcttaaaacaattctcaagtctt

SEQ ID NO: 139665 - DNA, 1625 bp, Homo Sapiens
cggtgcccagcaggactccggggaggaagccgcggagccgagcgccccctccaggaccccccagtgcgagccgcaggccccggagatgctgcagcgagctcgagagtacaacgcgcgcctgttcggcctggcgcagcgcagcgcccgagccctactcgactacggcgtcaccgcggacgcgcgcgcgctgctggcgggacagcgccacctgctgacggcgcaggacgagaacggagacacaccactgcacctagccatcatccacgggcagaccagtgtcattgagcagatagtctatgtcatccaccacgcccaggacctcggcgttgtcaacctcaccaaccacctgcaccagacgcccctgcacctggcggtgatcacggggcagacgagtgtggtgagctttctgctgcgggtaggtgcagacccagctctgctggatcggcatggagactcagccatgcatctggcgctgcgggcaggcgctggtgctcctgagctgctgcgtgcactgcttcagagtggagctcctgctgtgccccagctgttgcatatgcctgactttgagggactgtatccagtacacctggcggtccgagcccgaagccctgagtgcctggatctgctggtggacagtggggctgaagtggaggccacagagcggcaggggggacgaacagccttgcatctagccacagagatggaggagctggggttggtcacccatctggtcaccaagctccgggccaacgtgaacgctcgcacctttgcgggaaacacacccctgcacctggcagctggactggggtacccgaccctcacccgcctccttctgaaggctggtgctgacatccatgctgaaaacgaggagcccctgtgcccactgccttcaccccctacctctgatagcgactcggactctgaagggcctgagaaggacacccgaagcagcttccggggccacacgcctcttgacctcacttgcagcaccaaggtgaagaccttgctgctaaatgctgctcagaacaccatggagccacccctgaccccgcccagcccagcagggccgggactgtcacttggtgatacagctctgcagaacctggagcagctgctagacgggccagaagcccagggcagctgggcagagctggcagagcgtctggggctgcgcagcctggtagacacgtaccgacagacaacctcacccagtggcagcctcctgcgcagctacgagctggctggcggggacctggcaggtctactggaggccctgtctgacatgggcctagaggagggagtgaggctgctgaggggtccagaaacccgagacaagctgcccagcacagcagaggtgaaggaagacagtgcgtacgggagccagtcagtggagcaggaggcagagaagctgggcccaccccctgagccaccaggagggctctgccacgggcacccccagcctcaggtgcactgacctgctgcctgcccccagcccccttcccggaccccctgtacagcgtccccacctatttcaaatcttatttaacaccccacacccacccctcagttgggacaaataaaggattctcatgggaaggggaggacccctccttcccaacttatgg

SEQ ID NO: 139666 - DNA, 369 bp, Homo Sapiens
  misc_feature (164)..(191): n is a, c, g, or t
cctggcccaatagatgtttattattattattactactatcatgactggcacttgacaggggctcaaccattgcttgtggtagtttgctctctttattcttcatcccaggtaacccaggctatatattagactccagtgggtactcttaaaaaatatgcatgccnnnnnnnnnnnnnnnnnnnnnnnnnnnnaatacatcactaggtttaacaattactagcattcttctttgccaaagatcttaaaggacatcctaaacttcgtggcaaactatataaggcaagtaacttcactgttaaatgctttagtggccatctgtgaaaacaagagggtttcttgcataaccatgatgccgccatcacacagcat

SEQ ID NO: 139667 - DNA, 495 bp, Homo Sapiens
ctacttaggtatttaacttttttgacatcctcttatcccctcaataggatccaaaatatgtctaaaattaattcaaaagaaaaataactatttgaattattgcttgtgtttgaaaacaatatttactgtagtattccacagtttcttctttttttaagctaagacaattaaataaaaatgtaagggataagaaatatagttgaagtcacaataaagtatattttcttttattgacataaaacataaattttaaatgttggcttgttaagaaaaaaattctcctggtaaatattatgcataaccgttgcccaaaaatgtatacagctgttttccaacatatttatatacacagtggttcacttaagaccagccctgttagaaccttctgaatataatgtgctcttaatttataaatgggctaccctcagtgtataaaatatataggcatgtatgttatacatacaaagtaaaaaatataaaaaggaaagatggaag

SEQ ID NO: 139668 - DNA, 1072 bp, Homo Sapiens
  misc_feature (76)..(76): n is a, c, g, or t
attccccaaaaaataccctcttttaaagctaataaaccaaatttagcaaaggctgcagaatacaaaatccaacccncaaaaatccagtcggtttctacacactagcagtacaaaatctgaaaaggaaattaagaattttttatttacagtagtacccaaaagaataaaatatttagaaatcaatttaaccaggaaggcagaagacttgtacactgaaaactacaaagcattctggaaagaaattaaagtagacttaaataaatggaaagagatcctgtgttcataagttggaagacttaatattgttaaaatgacaacgctactcaaaatgatatgtagagtcaatgtaatcacgctaataaaatcccaacagcgcttttggcagaaatggaaaaacctattctaaaattcatataaaatttcaaggaacccaaaatagccaaaataatctgaagaggaacaaagttgtaggactcacattttctgatattaaaatttactacatagctataataattgaaatagcatggacttggcacagaggtagacaatatagaccaatggaatagaatcgagaggccagaactaacactcacatctatgggtaattaattttcagcaagggttccaggatcactcaatggggaaaaggacaatctcttcaacaaatggtgttggggaaactagatatccacaagcaaaagaatgaagttggacctatacttttacacaatgtacaaacattaactgaaaatggatcaaagaccaaaatttaatgctataaaacacttaaatattaaatgctataaaactcttagaggaaaacatactgaaaaatcttcatgaccttgggtttgacaacggtttcttaaatataacatcaaaagtacaagtgatgaaacaactgataaattggacttcatcaaaattgtgtatcaagtgacactataaagaaagtgaaaagataacacaaaaaattggagaaaatgtttgcaaatcatacatctgacaaaaaactaatatactcaggcatttctttatggcaatgcaagaatggcctaatacaataccc

SEQ ID NO: 139669 - DNA, 643 bp, Homo Sapiens
ttttttttagaatcagaatgtatgatttattccgcttgttttacagatgagaaatctgagggccagagaggtcaagaccattcaacaagctagggtaggagccagagcttccacccaggcctctgggctcccaggtgctatgtgctccttccacaacacccaatatgagccagtcagtcaacaggtatatgtttagtgctactcaagttctgaccacttagagtggactcgagatagaaagataagctcttatttattcagggcagcagacatgccccagttatcatcacctgaccgtaacacagttctcaaaaacaccggatctggaatgggagggaaggaacaaacttgtgtttattaaacatctattatatgtcaggcccaatgctaagctttttctatcaatgtggtctttcatttaatcctcataaccatctgttatggaaagctgaggttccaagagttcaaccgaaagtcccagggtcacacgtctgatgtgtgtgaccataatcccacagggtcagtgtgactccagatttgtaggagtaagtctaggggggatgaagtaccttgcctgattctgatcttacagatcagagaaaggatgtcacagagttgtgagtgtgttgagctactgtgtcta

SEQ ID NO: 139670 - DNA, 544 bp, Homo Sapiens
ttagctcatcagctatggttggtattaagtctattttatgtgtagccctcgacaattctcctaatgtggcccagggctgccaaaagattggaccccctgcgctagaaagtacttaatataaaccagtggctctcaaaatgtggtctacggattcactggggattccagagtcctttttgggagggggttgtgtaaggcccccttttttcatctatttgtgactttggattgtcttcatatacctccaccaaaatgatccgccacagcaatcaaatgtgtttaagtaaaattgccttaagacacatgttgaatatctgtaaaaatgtaaaatgctactcttctcagcttttttagaaaagtcattttagaaatttgttttaatttctactgttagtattgataattataacccatataaacaaaagctctctggggatcctcaataatttttttagagtataaagaggccctgagaccaaaaaaagtttgagaaccagatgatatcaataaatcctttattcctgtcagagttttacatcaatgt

SEQ ID NO: 139671 - DNA, 340 bp, Homo Sapiens
gagtttgttttaaagaagggagggggaacctggtcaagttgagatttccgagtcaaatgaattagcggaggccgccagacttcagctgacaggcctggaaaccctcccgccgactgcagccctgagccacaggccccggctcccctcaatgggagcgaggccccgtgccagacactggggactgtggagggtgtctgagcaaccctcaggtgcctgggtcccagctgaagcccatctcttcatcctgcagccccctccctgccagctcatcccggttggcccccttcggctggactttcctcccccactgagtccccaatgagaaatttgattcaaaccc

SEQ ID NO: 139672 - DNA, 837 bp, Homo Sapiens
  misc_feature (524)..(524): n is a, c, g, or t
  misc_feature (557)..(557): n is a, c, g, or t
  misc_feature (652)..(652): n is a, c, g, or t
  misc_feature (677)..(677): n is a, c, g, or t
  misc_feature (681)..(681): n is a, c, g, or t
  misc_feature (718)..(718): n is a, c, g, or t
  misc_feature (740)..(740): n is a, c, g, or t
  misc_feature (795)..(795): n is a, c, g, or t
atcattattgatttatgtcattgttatccctctaccgcggagaccttctttcattttccatttccctgggagttcacgtgaagtagtgaatgggtcaaaatcttaacagtggttgttgatcaagtccctcctttcttatccttggcactgaataaatctttggttttccataatcaaagggtgagggagacttcttttgtctacattattcagctttctgtaagctatgctgtgtccatttgagaaaaagccccagggatattgaaggtctgagaagttgggtggttcagtgtgttattatatttagggtcccagtaaagaagaactgaagcaactgtgagacaccagggcatacttccctgtatgagtggaaaacaaggtacggaaaatagctcacaggatagtcctcaactgacttgcttgaggataagcagcttctcttcgtgaagaagttgccatttctctggccttcatatttatctactttttgttattgttgtctgtatcggttcaatctcacactngctataagaaatgcctgagactgggtaacttantaagaaaaaaggtttaattggctcatggttccatgggctgtacaggaagtatgactggggaggtctcagggagcttttactcatggcaaaggcanagcagagaggtatctcacaggctanagcngaggaaagagaaggggaggtgcaacacttttatgcancaatccatgagactctacacanacagcataggggacatgctatcatcatgagactactgcgtgtcatcactgcacangccactccacatgggattacatacataattggtgggtcagtc

SEQ ID NO: 139673 - DNA, 569 bp, Homo Sapiens
gatagtactaaatattgactttattcgtccaaaatttttaacccaatcttattattcaaagaaagtcattttttaaacttaggtatttttccttttttaaaaaaattaagtttacacatctatgctgtaacctcccctccccgcccacacgtgtacttcacactgtgcaccacccaggctctcaacttgaaggaagtgacccaggacccccaatcagaattgtggccatgtggaaacaaccactctgcagctagaaggctcttacggctctggtggagggatgtccacagtgcagatgtcctcagctcacgactgtgacagcgacttctcggcaagagtgccccccacccccaacccacttgagacaggtgtgttttgtagaagagactgggccatgcacagcacacacccggtcttccagccaaaagcaaatgagtgctggtggagggggcttgcagtggaacacccactctgctttaattgaataaccccaacttaaaatgtatgcactaggctgactttaggcacttttctaaagcaacatggcattatcccaaggaaagtgacag

SEQ ID NO: 139674 - DNA, 563 bp, Homo Sapiens
cacattactggcttaccccaaaaagcatggcaatatacattttcaaaaacaatcttcccctgtaattacaatgaaaaacaagaagcagaatacccatcatcattacagaaacaatgattgtatacttttaacataatattcaggtatttttaatcactatcttaaaccaatttttaattatataagttaactgtatatgcttactggctgaaaaaatactggcacaacctacctactgcttttaatacacaacgtggtaacttgtgtcttctgcctaatagcacaattatcagaaaaagaatgcaaaaggtatattagagaaatgaagaaagcatcagaaaaatttcctcagccttggtttatcatctctttgtctttcctttgtatatatactgaagttgactggtcctctttcattactctattcctacccaaagaccttttgggtttcaaagtgacagcagccatatcatgttgtctattgttgctattgaattagcctcaattacaggcccccactaaaaaggataaagaaatacgtgaggttaagaaagataacacag

SEQ ID NO: 139675 - DNA, 645 bp, Homo Sapiens
  misc_feature (52)..(52): n is a, c, g, or t
  misc_feature (263)..(263): n is a, c, g, or t
gagacatagcagtctcagacatgaccagagactgctgccagtggtggaagcnttccctgagcgtgatgacctgcccactccacaggaagcctccaccacccaaggttaaaggtgtccagctgcggccagggttccggggtacctgtggatcccgtgacgtggcaccgaagatctgagctgtgcagaggagctgcaccacagaggccaggtttccgtgtggagaacgcgcataatgggaggccttgagctgagacccagccccncgacccccacccccacccaccagcaggggattctcctcagggcctcacagagcaccacgtggtgtcattgctggtcctgccatagctcccaggaccaatgcttcccagaactccctgctacataaatacatccggtccctttccctcgagatcttgaaaagtgaagacttcacttggcagtaacggtaaaacatttcaacatggtaagttgtcattttatgcacacatggaatggtggcccataaagggcctgggggtccaatatcctacatactggactcctcattagtccctctgagtcttctgttccccaacacactgcattgggatcaaactgaatttgcagccaggcatcatagctcgtgcctgtaattccagcact

SEQ ID NO: 139676 - DNA, 1182 bp, Homo Sapiens
  misc_feature (23)..(23): n is a, c, g, or t
  misc_feature (27)..(27): n is a, c, g, or t
  misc_feature (54)..(54): n is a, c, g, or t
accagtctggagtgaaatcagtntatntcagtgcagcagcctcttagccactcnttaattcagcccaacggaaagtccaataatcaatgctaaaatgcccagcaacacaactactagcacaatgataattatcaatttcttccgggcctgactctggtatttcacagcttttttcgtttcatctcgtgccttctccacgtggtccactgtgtgcatgacattcaactctatgttatctgacatctcagcctgattctccaccagcatggcgatgtccataaacatgtcgtgaagctccttgatgctgctctccagcctcacaatgtccttgtgtcgtccctcaatctcactgagggcttgcttggaaatctgtgagtcaatgatcccagaagtgaagatggccgggttgccactctccaacatctcctccagctcctcatcggttgtctttttgccagtaatttcgagctgccgctggattcgccctttgctgcgttctcggaagtccacttgagcttcattgtatttggtcatcacctccacaaacttccgagaaaggacagagtgctgggatttccgaatccgaaggtctgccgatgacctgacctcatcttcttcaatatgcttctccatgctcttcagtttgttccggacgttgttggcccttttcttaatctcagtcgtgagctgctctaggtcatccttggtttttggctctggaatcggtgcagagagaatgatactgtagagtttcttagcctcctctacatgttctgagatcttgtcaatgttaagccgagtttcctcaatctcagaaaagaactcgtccataaaagccgtgttgtcgatagcaatctcaaccgcatcagtatcatcatcctgtgtcagctgcttggccttcagctgctccagacggtccttcatcctgaagcccaggcgcccggaggcaggtagcgcgtcccaggtgagcgcgtcccaggtgagcgcttcccaggtgagctgccggaagcggcggccgggcccgccggggcgaaggagctggaggcgcaggcggcggcgggcggcggccgctagctaggaggagcgtccgaggccacgggagcctccgccgcgcagccccctccgcccccaccggcgcctcgcgctcccctcgtgccgaaatcgccacccaggcctcgctcc

SEQ ID NO: 139677 - DNA, 622 bp, Homo Sapiens
gggaccagttctaagggaccatacagagtattcctctcttcacaccaggaccagtcactgttgcagcatgagttcccagcagcagaagcagccttgcatcccaccccctcagcttcagcagcagcaggtgaaacagccttgccagcctccacctcaggaaccatgcatccccaaaaccaaggagccctgccaccccaaggtgcctgagccctgccaccccaaagtgcctgagccctgccagcccaaggttccagagccatgccaccccaaggtgcctgagccctgcccttcaatagtcactccagcaccagcccagcagaagaccaagcagaagtaatgtggtccacagccatgcccttgaggagccggccaccagatgctgaatcccctatcccattctgtgtatgagtcccatttgccttgcaattagcattctgtctcccccaaaaaagaatgtgctatgaagctttctttcctacacactctgagtctctgaatgaagctgaaggtcttagtaccagagctagttttcagctgctcagaattcatctgaagagagacttaagatggaagcaaatgattcagctcccttataccccccattaaattcactttcaattcc

SEQ ID NO: 139678 - DNA, 558 bp, Homo Sapiens
tttggagtttaaagttatttattgagggaagactagggatggttcacttgatccctccccaaatccatcctcaaatgcacccgagcaacaagaagactagctcagtcagtgagacgttcagccttatgcagaggctcaggagccctccagaatgagggtaagggacatctttttagaggtgcaaaggagcgattatgattcagggtgacagcatgctaactgcagggtcaataggcaaatgggattcataagcagaatggagtagggtgttcagtatccagtggccagctcctcaagggcatggctgtggaccacattacttctgcttggtcttctgctgggctggtgctggagtgaccgttgaagggcagggctcaggcaccttgggctggcagggctctggaatcttgggctggcagggctcaggcactttggggtggcagggctcaggcaccttggggtggcagggctccttggttttggggatgcatggttcctggggtggaggctggcaaggttgtttcacctgctgctgctgaggctgagggggtggggtag

SEQ ID NO: 139679 - DNA, 851 bp, Homo Sapiens
  misc_feature (117)..(125): n is a, c, g, or t
  misc_feature (705)..(757): n is a, c, g, or t
aaaaatgatcctagtttttcataggagtctaggattttgatcttttaaaaaatacagtgtgatttcatgcttttgaacatctttttttcattgaaacaaattcaagttcttggcttnnnnnnnnnttagtgatgtctttaaaaaatattctgttacactacagataccaaaacactgacaaagatttaggcactccaagagagtatgacttcgtgtttaattggggagcttgttttcaacattgcttatatttgaatagtagaaaacccgacattgatgtttcttcctgttgcaaggtggggctttaaactttcaaggtacaaaagtatgtcttttaaaatggaagtaacgtttgtttagctagtgaatgtgacaatatattttatgtatataatgagtctaatgtaattttgatcaacttggtaatgatgttattaaatagcaaaacaagtgcagtgtattaaagctaaacactacattgaaacgcaaacaaaattctggtgaaataactgggctgttgatgcaggtcaggtggaagctgagaaataaatgtatataaatatgtagctgaggatattaattcccattatataaccataattctgtgacttgtaataaaccaagctgtacaatttagtttataatagcagtatctgagctgctccaaaatatatatatcaacagtggtaaatactgtagattttnnnnnnnnnnnnnnnnnnnnnnnnnnnnnnnnnnnnnnnnnnnnnnnnnnnnncacacaagcactattttcttatgtcatttatgacattttttatctgtatacttttttgatgtgattgttttttaacatgctaaaagtaataagt

SEQ ID NO: 139680 - DNA, 726 bp, Homo Sapiens
  misc_feature (612)..(612): n is a, c, g, or t
aaaaggaggaacagtttctttattctgtagtttatattcacatagtaaatataaattagggagattcaacatattttacattgcacataattattctattaatattctataaactgtttatttttcctttggtaagtacagatggggaagttgaacaaaatctgcatacaagaagactttctaaaaatagaaaagactttctaaaatctgcatagaagagactttctaaaattacattttttctaaaaaactaaaatgcacttttcttctttaggaaagaatgacttttattcagtattcatctacagtttgccaaaaaagtacttccttatccatttttcctttaatttggaagaaacattaagagctatagattaatttgcaagattaatttgcaaaattaatccatttatgtatttcatgttttttctcatcttgatagacacttactataaatgtctgaaccatacaaaatagtaacattagtataagtcattaatagtgttttgaaatgaatttaatcaaagaatcaggaggaagaaagttgatattataatgggagaactgaaacacacagttgcatttttttaaaaatcatggcttcttcagcanacacagtaaagcacttattgggtgtttagaaaacaaatatgatttatttttctcatttcttggttagaaagcaattgaactgaaccctaaagatgctacttcaatttcacttat

SEQ ID NO: 139681 - DNA, 600 bp, Homo Sapiens
ccttttaaaatatatttattgaaatacaaagagtcaatataaagaaaaatagaggtcaccatacttggccacagttagaccgctcataggcccatggctgctgcaaccatgggcaggacacagagggagtccagcctctactgataaatctgggcaggttcaccttcgcaggccaagccaggggccatccctggtatgcgaaacctggaggttttccaggaagccggctgctccagagctagctgtcaagtctttagccccacaggctggtgcccagagccacttccacaggagcagcctcgggcttcacccacacccaaggagcttccgaggcaggaggcaagcaaggtgaagggagggttcagggtcccacaacagcagtgagcagggtccagccatcaggcctcagagcctctgtcatgccacctgcgagacgggctcctcctgtccccactgtgtccccgcttcctcctcttacagcagggggagttggagtcggagtcatggtggtggtgcctgggcctctcaggagatgtgggagaggaggtggcctcagctggccgcctgtgctctttgtctttcttcttcttctcctcgtgc

SEQ ID NO: 139682 - DNA, 874 bp, Homo Sapiens
tagccccacagctgtgccagaccacttccacaggagcagcctcgggctcacccaacacccaagagcttcccgaggcaggaggcaagcaagtgaagggagggttcaggtcccacaacagcagtgagcaggtcccagccatcaggcctcagagcctctttttctttgtcttcttctccttcttgcttttcctgtggctctcacaactgctttccgtctgatcctccgcccgcggcttcctcctggccgaggctgccgaggtcccgggcccgccgctctctacgcggtgatgcgtgaacacagacagccccagtttgcggcctccttgtcctctcgggacatcgccacgcggcccacggagccacttgcgctccccaggccccagcagccggtccacggcccttcgtcctcggggtcgcctgccttcccgcttgcagacctccgcgaagtcctcccttgctcaggcccgtgggcctgcttcttcacgttccttgtagccaaggtcgtccagcagcgcctcgccgctccgcctcccgcacggctgccagttcctcctcgcggctcgggcccgcgcatggcgcccggcccttggcgtaccaggtgaggtcgcggcccttctgccagcggcctaccggcgccatcagcgagttgcccaggtagttctcccgctgcttgtcagtcttcacgtcctcccagttgaactggtcctgcccgccgcgcacgcctccacgactggagccgaacatggcgccgggaaggcagttgcctggggcctgcggcttgcaacctgcaacccgcaacccgagacccgctacccactaccgtcggacccagcctcgtgccgattaacccccagcctcgtacctagcctaatttt

SEQ ID NO: 139683 - DNA, 429 bp, Homo Sapiens
tttctttatcacaagcatttattgagtacccatagaactcatggtaccttcacggtgtttacagaactttgcttatatgccgaccttgcccttaaggagcttacaatctagtggaaagaaagacggagaaactcagatgtgatagagcaatgagtgaacagatactatagactgaaaaataaccataaatgtaaaacacatactgaaaaatgagggttaatggggatggcaaggatgataggtaggcctggatatactcctgacttcttgaaggagtaaatatctagaatattcaaggacgtaaagtgcggttgagaaagccaggatgcaaacaaacatttcctatctgctgtgtattttcttgctccctgcagctgagaattgcaaaaagaaaacagggatagagataatgggtaaaaactttttagt

SEQ ID NO: 139684 - DNA, 1248 bp, Homo Sapiens
  misc_feature (221)..(230): n is a, c, g, or t
  misc_feature (1132)..(1166): n is a, c, g, or t
  misc_feature (1169)..(1207): n is a, c, g, or t
ccattagaagctgaagttttattataggataacagtacataaagcacatctaaaattgatgtgttcaatgcacttttaataaaggtaatgtaatattaaaggtacagtttctaagtacaatataacaacattcatattagaatgaaaattggagtatttaaaagacaacattaaatctctcttttttgtacagcttgtatttacaaaatgaatcaaaatannnnnnnnnnaaattcaggactcaataaaataaacagctggaaataagcagactagtgtaaggagtgaattgaaaagagaccccaggttaagtgaaaagttggacgatctctgtgataaagatcattagccaagttttagttcaataactagttttaggatgtcccatagattgcttgcatttttagtgtggcagaaaaggagtttttaccatactgtacacatgacagacagcatatatttataggtacagtattactgttttccaaacttgcatgtatatttacagaaggctgagtttgtttactcgaacagaagtttgtgaaatttgtgtgcttaatcctcaggacctacacacgattagaatcagcatttcatgtggtcttttgtaaatgtggctttaatacttggttgtagaggagaatgttaaccgtaaggcttggcttactttgtaaatttaacataactacccaggaaaaacgttttaattggggcacacttgttatcatttaacaattgtcaaatgctgacatgtgctagccattgtgcagacgcaaaaagatacaatctctaccctcaggaagcttaggatgctaaatcgtgctttaaaaaaaaggtttcaatctctttccaagagaggcagttaaggaatgatgtgatttatattaaaagagatttctccctcaactgtagccaatccactttaaaaggttaactactagcattagctctcattaaccacacaattgcatttataattaaggtaacagcaactcttccacaaaaatggaaaatgtctagaattgtggataaatattgcagtgcatggaagccaataatcatggcttgagaatttatcacccccggccgtaatggccgaattcccgggcatatgtccggtaccgtcgactgnnnnnnnnnnnnnnnnnnnnnnnnnnnnnnnnnnncgnnnnnnnnnnnnnnnnnnnnnnnnnnnnnnnnnnnnnnnctaaaacgcgctagcgccctatagtgagtcgatacgtcttg

SEQ ID NO: 139685 - DNA, 496 bp, Homo Sapiens
tcaagttcaagctgctccaacttctgctgccgttttaatagctctatttccaagtcagatttcttcttctgtgcttcttcttccttctgctttattacttggtctcgttttcttttttccatcaccttctgcaattctggtttgttctgaggagcaagaccccttttttgattcataagaagttctctgtgaagatcttgatggttccgggaggtttttacaggattgatcagtttctgaggcctaatgagttcaggattgtcatcttctatgtagtctggctcggccatgatgcttcttgtaatgagatatgagtccttatggtcaatatcctcaggtgggctgttaaaatactttgtaaagcagttccaacagtttctctatccacaaaattagtttcaactgcattctcctcggcgcgcgcacaaaggcgcgcggctccctcccagctcgctcccggcgcccgcggcggcgcccagcggcccgactgctcggc

SEQ ID NO: 139686 - DNA, 697 bp, Homo Sapiens
  misc_feature (626)..(653): n is a, c, g, or t
acatcatttttcctttatagaaaaccacctataaatccagggattgtatgaacacaccaaacaacctttggttctgttgctcttctgaatcccaatgtgattaaaatgttcctgaggtttccctaaccaccaactcaggttctaagtatttaggatgtagtaaagataaaattttgttaaagagacagctaaagctaatttttacatagaaaaaaatgtatatttatatccctaaaaggcaatacagaatttataaccaaaccatgtgtgagaactgttaaattacattccaaataccagcagtggaacaaacagaaacacagagatgttttaaaaaacatgcagcacgttacaaagaggccgtgtaataattcacaacttttgttagcagccgttaagtttgattagtattaagcagcaatggtttaagcaattttaaatcatgatatgatagttacatatatgcattttactgttccaattatagtttagtaataggtcaggggtttgagcaacattttaagcattataattttctcctaaattatttactatgggaaattggcttccacttaaggttttcatagaaactgatggttattttatgagggagatgtctggacgtnnnnnnnnnnnnnnnnnnnnnnnnnnnnatatacacacacatagataaattagaatttgcagatattatgtg

SEQ ID NO: 139687 - DNA, 440 bp, Homo Sapiens
cccaatacaaagagagaagataatttattttctacagcattttttcccataaagctctatattccgttacattttaaagggcatttcaacaaatgatgtatgaaatggagaacaaaatctgtatggttctgcagtaaagggcatgcaaaactagagaacggctctgaaatgatgtggaaaaacagcaatctacttttctttaaaaaaattaaaggcttatgcttcacataaattcatgtcgattttccaggcattatttggttataacgtctgaggcattgcatggatttactggtacctaaagtgtggatttattcttaagaagcatgcagctctacaatcttgtacagtgaaacgttgggcactcacaaagttatgcaagacaggttatgatgtgggcttaagaaaggtgttgagagctaggagtagagatatagaag

SEQ ID NO: 139688 - DNA, 1106 bp, Homo Sapiens
cgcgggtcctgcccagatgtggaagactgaggcctgttgaaagtgcagagctcagccctggcaccctctgttcccaagagctccatgcaggtgccacaggatggagaagaccttgctggccaaccttgaaggctgaagctcttcttcagcaaaatggcgacttcctggttctgctgcctctgggtccctgtgggggcaaccccgtgatctcctgccgctggcggggctcagccctccattttgaggtgttccgtgtggccctgcgtccccggccaggccgacccacagccctctttcaactggaggatgagcaattccccagcataccggctctggttcacagttatatgacaggcaggcgcccactgtcccaggccacaggggctgtggtctccaggcctgtgacttggcaggggcctctgcgacgcagctttagcgaggacaccctgatggatggcccagctcggatagagcctctcagggcaaggaagtggagcaacagtcagcctgcagatttggcacatatggggcggtcaagagaagaccccgctgggatggaagcctccaccatgcccatatctgccttgccccgaacgagcagtgacccggtgttgctgaaggcccctgctcccctgggaactgttgccgacagtctcagggcctccgatgggcagcttcaagccaaggcaccaacgaagcccccccggacaccctccttcgaactgcctgatgcctctgaacgtcccccgacgtactgcgagctggtgccccgagtgcccagtgtccagggaacatccccgagccaaagcttcccagagccagaggccccatggtgggaggccgaggaggatgaggaggaagagaatagatgttttacaagaccacaggctgagatctctttctgcccccatgatgccccctcctgcctgctgggcccccagaatcggcccctggaaccccaagtcctgcataccctccgtggcctgttcctggagcaccatcctgggagcaccgcccttcacctgctattggtagactgccaggccacaggcctcctgggagtgaccagagatcaccagggcaacatggtgagacctcatctctac

SEQ ID NO: 139689 - DNA, 702 bp, Homo Sapiens
ttttttttggcctttacatgtatttattttaaataattagcttaggtctgagctataatgactaatctccacgagtctatgcctgacggtgataaaaagttgacatacatggaaggtgttagaggaaagaaccagaaacaattacagtaagtggaaccgtgcacaaaagctgctctgcatcccgggttcatgcttttaagcagcctttttgctgaaagcctcacgaagtagttttgtttgggttgagtgttatgtttaaaatttcccttctaccagttattgagaaaataataatgccgagctcatctaataaacaaatgtctagttcgataagctttaatcaggccctccacaccctgggatggtcgttaatgacatggatcagaatccctgaggtggctggaatctaacaagtgggtagcacagaaagctcaccttgcctatggaggctgtggatatttttaggaaggtcatgcattatgggatgggaatttttataaacaaattgctacataaaaactaatgcactgttgcagcacttgtggaggtttcctttgctttgagacaccactgtttataggctgcagactgtaaagggaagtactgggaaatggcaaaggtcacatgggccagtgccatgttttaaggtcaaaggcactgttattttaagtgacctatctcattattaaaatcacctcgtgc

SEQ ID NO: 139690 - DNA, 495 bp, Homo Sapiens
  misc_feature (344)..(368): n is a, c, g, or t
cagcccattatatttaaatagataaattgtctcagttatttcacactagctgtatgactttatttctgttatccccagcaactacatttttagctttaaagaatatttttattgcttttgcatcaatttcaagtttcaatatacaaaagagagtagtaactagttcctatgctcttcagtctgcttccccaagtaatcattctactgtgaggtgttttgtttttggtattggcattttggtattaggattcattattactagttatcaaggagactcattattacactgtgtcccctaatcatgtataaccagtggcctggcaaagcagaagacgacttcctcnnnnnnnnnnnnnnnnnnnnnnnnntcgtagtttactttaagagttgacactgctgtaacccaaagacctattgaacttacattgctggttgagaagcacacatccaaaaaatccagttatcttctgatccaccaataaatttttggaaaat

SEQ ID NO: 139691 - DNA, 1213 bp, Homo Sapiens
atgtgcaccaggggttagcaattcccaaggtgaatttgctcacaatggaatcatctgcctggcaatttctgccggcatcatggaacctggcgctggtatctgacctgtctggggtgataagttgtgcatcttgtgtggcatcagagggtagggagggggcttttggatgaggcatcatgccaggggtgccctgctgctccaaagtggggccaggccaggtctctcctgagtgctgggtgtgcctgtttgagggtttctggccatgctgctgctgttccatttgctgtcgtgctcgtaattcagcatacttcagctgttccatgtggaagttttggcgttcagtaagcaactgctgcctctgttgttctagagcttctttctctctgtccatgatagtttccagctcttcaaaatgtcgaagtttgatctctagtttcttcatttgtgtctcaaccaagagagctaccagggacttgatctttctttcttccactgcagccaggtgcttggctttggtagccgctgaggcaagagcagctgctgcggctgtggcaacatttccttcggaaatttcatgttctactttcttcttcccagtatcactttctctttctttacatgtatcagtgagttctttgttctcttcagtctccttttcttctgatttggtatcctcactcacttcactatcctgttccttttcactatttttttcattttctccatcttgtgctttatcaccttcatccgtttcattttccactttattttctgccttttcaggctgctgaccatcagggtcggcttccattttttcctcttcagctccttcaagcttctctggctcatcgggccctgtgcctgcaatgcagctgctctccagaccgtaggtgggatccactttcccagaggctcgtgctgcttcttgtactttcttgacatgagcttcaaccaattccagtggtacctcctcccggacccgagaaaactcctccaaagccgcttttgctgcagcagatgccacgcgagggtccaccacagatgccaaaaaagcaacagtactcataactggatttcctgactgactgaaggggacaggctggtaggccaaaggcccaagggaagcatctgaattctcaaggtatgggtcctcaatgggaagtcacaaaaagtggaggatgcattcatcctgagtacgactttccaacatgtt

SEQ ID NO: 139692 - DNA, 376 bp, Homo Sapiens
  misc_feature (315)..(315): n is a, c, g, or t
ccatacaagctgttgttaatttgggggtaaagtgctgatttgcaaacttcatcaaattgttcccaagtggattctccttgtttgtctccccctaccaaccccaaagttaccatatttgatgtaagaatcaggcatgttagaatgttgtgtcacactaactgattctgctctttttgtcttgtcattcaagttccgttagcttctgtacgcggtgccctttgcagtctggtgtctcttccagaggcgagggggctgaggatggggtgctgcatctcactagctatactggcatcatcttggtaaactgaaaaccanaatgtggacatttgtaaaatcagtgcactgtttctagagagagattaaattcatttaaaaa

SEQ ID NO: 139693 - DNA, 366 bp, Homo Sapiens
gagttaataaaagacatgaactaacatttattgttgggttttattgcagtaaaaagaatggtttttaagcaccaaattgatggtcacaccatttccttttagtagtgctactgctatcgctgtgtgaatgttgcctctggggattatgtgacccagtggttctgtatacctgccaggtgccaaccacttgtaaaggtcttgatattttcaattcttagactacctatactttggcagaagttatatttaatgtaagttgtctaaatataagccagtttgtgtttctgtccatttcttgacctcaacacaacagacatttggggccaggtaattctttgttgtggggtgcctgtaatccctatgctt

SEQ ID NO: 139694 - DNA, 727 bp, Homo Sapiens
  misc_feature (636)..(636): n is a, c, g, or t
  misc_feature (700)..(700): n is a, c, g, or t
gtgtatctagaaagttctcattgcatgctgaacattatagttgctacataactggacatagagattttattatctttagagaatatattgagttttgtttccacaagcagtcaaaatactggcaaatcaccttgatccttttgaggcttgtttttaagcttattagtttgggtctagagtagcttttactctatggctttggccctacccctaagctgtggtctttctgagatgtcaatggagtgtccaaggagttcagtaaggtttccactcgcttgtccagaacttttatctcctagtaatctataaaatctccagttcacctctcctttgcagctcttttctactatgccttgtaagctgttatctacaagcttagtatttgatcaaagacttaaggggaaccttttgcagatttctggagctctttttttcttctcccccttattctgccccacaaactccagccatctcagaagccccaaattctctgcttcttcagatcactgagaccactgtttccagcttaggctctgcctctccataacacagtttgggaagtgccctgggtagagacagtgacagtggggttttcccttctctcaaggatctcagtcttacatgagtattagtcanaacctgacatacataaaacagtggctttatatattttcacaagttttatgcttgtttatagtanggaatctaatctttgcctcgtgccgat

SEQ ID NO: 139695 - DNA, 623 bp, Homo Sapiens
ggttttcaagtttggctttaatattttattaaaaatttttgtatttgtaaatattaaaacactgaaacttgctactgacacaagaacgacaatgcactaacaataaaatcaaagtagaagctaaactattcagaagcagtagcaactccatgattccaaggtaatttaaacaggcaatttcagagtgcttcaagatgaaggcgcaaagcagcctctcagcctgcagtgatgctacgacaccggcagatggcgctgcaaagcttctcaaatgcagcgggaagtccatttaccaacggctgttgcgatctcttaattagcttgaactgagtttgtattagaatttataatttttactgcatattgcagttactcgtatattactgacactggaacagacatgttttaacaaactggttgagccgtatcagtgcgaaccagctgaatgtcagcgctgttccctcctgtgacagaagccaccggcgcctgcctgagggcactcccctcactgggactctcagtaccacgcccacctgtccccaaggtttgtttcatcactaagccccaccttccagcattttcacctttctccttcacttgatccttcttcctaacatcgtgttaac

SEQ ID NO: 139696 - DNA, 764 bp, Homo Sapiens
  misc_feature (296)..(304): n is a, c, g, or t
aatgcacaaaggttttaataccttggctttaatgatttttcaaggttaagaaaccaaattcaaattgggttggagcttcaattccgtaattacaattcccattgcatctttgaaaggccctgcatttggagggcagagtaatctgcaaagatgatagtttttccatatgtcctgttacctacaccaatataattactacattatcttataaagacaaacagttgcttcaaactctttaaaaaaatatatatataatgagtttcccaaagactcgagtctatattcaaagatgagtnnnnnnnnntccattacttccctagggtcactttcttcctttactcctgcttaaatgcaaaagctgatagtttctgatttgtagaaaaatctaaaggtttctgctttttagacaaattcaagttctcttttgctttttcttcctggttttctgtttcatcactttcatcaaccacacgttttcgcttctttgcttcagttccttcacttgccgtttctcctttggctttgttagcccacacctttctttcttcagttgacaatactctaaatcgaatcattccttcttttattatgtctgcttcatctgaaaagtcaggattgtcagacagaatattacttctattttcttctaaccacatctggaacccggtctttggcctttggttttcagtgttttgaggaggacatatagctggggtttcagataatacatttttaagattttcttctttcacttcctcagttcc

SEQ ID NO: 139697 - DNA, 531 bp, Homo Sapiens
  misc_feature (517)..(517): n is a, c, g, or t
gcttttttccagatcttgcagaagcctttttagccctctcagaaacatctgcaggaggacttggggaaacaaattcatatgagtcttgctgagcacttgcatctttttttattgcaggctgggtttgcactgaagctttactcacaacatatctgactttcttacttcgagggctaaaccacattttaattgaattcttcttgtttcctgcatcattaaacaaacttttcctaggtttatcttctttcaaatctgacagctcattgtcatgtagcaaatttcgaagcttactacaaagttgaatcatgctgtccagttgtctatttatcttcaagtcttgtatccaggccggggtgtaacacactggacatccagttccaatgcagtcacttacacaattactacagaagatgtgctcacatcctcctaaacacacaggctctctcagaatgtagtacaacgcgagcagcgcagcagcttctccaggcggtcgagcgcggcgcgactgtgggcccangcaccgcgaccatc

SEQ ID NO: 139698 - DNA, 371 bp, Homo Sapiens
  misc_feature (123)..(135): n is a, c, g, or t
ttttcagcatcaccttgatttattttcctagtatttttttcctcagatggaaaaataatttcatcaagaaaacaaatgcttctgccaaagtgaaagaattttatgtcttaatgcttttctttnnnnnnnnnnnnngtcaacattgaactaggacatgctctgcttccccacccccattttgctgactacattttaaaaaatctattggcagaaaacaagatattttcttcaaatagagtgattatgttttattgctattttgtttagtatatatttttctcaattgggaaaaaaatctaggtgaaaaaaattacctaacaagagaagtagtttacatagtcataacatttaaattgctgcccaaaaaatgt

SEQ ID NO: 139699 - DNA, 999 bp, Homo Sapiens
ttttttttgtgtttggttatttttataacactactcactgtacaatttctgtcatgcacattttttgtatcaaaaagggtgctgtaactttaaaagactgggtatttccaacttggaatattcaaaccatcttttgcaagggatgttttaaatcaacatgaagggttgtgttgtttttaatcagggttaaggatctggaatcaaaggttatggtttactccatctatggcgtatcttaaaaactgagcaagatgtccttgccttttttgaatttgatgattgtgctgcagttccacagctcactgttaggtggcacataccccaaactgaaaacctgagcttggaggaaatgagtgaaaagataggtaggtacaggacagggcagtggtgacactacagcattcagggttcccagcctgtcaagaatgagcatgtcttagcagtgaggcatttccacatcttctcaaatccacctgtggcagtttttggtgtctttggttatttttataaccctaaatatttatatacaatttatatacatgtacaaaagggacatgtacattatatattttgatacaaaatatgcacaagtacatattttgtatcaaaaaaaggttctcaggagaattccacttccattaagctggagtagacatacttttccctattcttccgactaagtgacctaaaaccccttgataatatacacaaaacaaacataagactctgaaaggtggagtgaaggcagatcagacggggaccttgtgaccacgcagtaatgcagcgtgttccttccctttcttctgctggagtgatgtcagaggatgccagccagaaccaggaagatctcaaatggaatgacaggatacaatcaagagatgtcaacactgatgacaaagatgttagaattatctgtaaaaaaattgaaagccaccattatatgcttcattaagcaattaagaacgcatttgaaacaaactaaaaatagaaagtctcagc

SEQ ID NO: 139700 - DNA, 349 bp, Homo Sapiens
tttgtgtttgaatgcaaaaaccacgcatttattaaacatatgattaacttaaaaacaacacaccagtttgttttaaagtgctccttatccaaaaccttaaacaaaactatcagcccaaaatgaattcaaaaaaacagattacaaggcaaacaatgacaataggtatggacaggcactaccaaaaaatgctatttgttctttaattaaataatgccattctcaagtgatatagagcagtcatcttgacagaattcctttttgtataaatattcataaataaaaatgtctctagatattggaaagagctgcaaacaatactttacaacagcagcttaatatctattttagg

SEQ ID NO: 139701 - DNA, 616 bp, Homo Sapiens
  misc_feature (7)..(15): n is a, c, g, or t
gaagagnnnnnnnnntttattatgttccattgttatgtgacgttccaaaattggaacactaggcaaaaccactgctacactgtacataatgtataaaactatgtttcttatctcaggaggtggtgacacctgctattcagtgtgatattcaacggaacacttcacatgtaaggcaacatcacatttttcacatcgaaaagttgtgttcttatgacattcagcgcatcgcgtttgctttccctgtttgactatcacatgatttatgccatcataacgtgagtcaatgttacgcttctgaggtcttcctttttggccaggttctggaggatgaccatgggtctccagataatggcataccacacgtcgacgaaactccagaaaatccactggtttctcatcatatgttttatgcaattgccaagcattttgtaagaccaattcgaaacagaacaaaagagggcttgaataccatttctttccacggattggatgcccgatacttatcaatgttttcatcagctctgtctacgcctcccatgaactggttatacactttgatcatgtctgggtgctgaacttgtatcttctttgtcagtttctgggagtaacgactgac

SEQ ID NO: 139702 - DNA, 902 bp, Homo Sapiens
  misc_feature (193)..(201): n is a, c, g, or t
  misc_feature (265)..(265): n is a, c, g, or t
ggggggagaaattcaaacgcccttggttcattagcccagggttttttcttgtggaacaccgttaatgggccctgtttcccctttccttaggtgggggccggggcggcccaaaacggaattggttttaaagaaagtttttttgggggccgagaggggtccgaccaaagttttctgtttgcttctcgtatgcgtnnnnnnnnnattgtgtcgcttggggtgttcggggtctcgtgcctatgtgttagcgcggcgtcgcttgttttcncgggagaagcatgttaagaagtttattttatagaccacagcagaaattccagccaagtttctttagaggaaatcacctgggtgtggcaaacagacagggcttccattattctacctttaggatttcaatagtataaaaccggttgtttttgatggggattacagcagcatcatcagggcagatgcctaattcccgaataacatcaacgacggctgcaatttgcacagttctgttggtgtaaaagtcccagtagaaggtttttggattgtcgtcacataggcaggcagtatacttatagttaaatgcaccttgtagagggatgctgctaatgaggtaagttttaaccaccatgcattctttcaattctgtttgaactgcaagcactgcagtgacttcgtcatttggacgtactgacttgggaatgtcaaaattctttattatgatcttccgagtgttgtcctgagctttgttggcccccaactgcaggcagagaaccaggagcagggtggcagggctggccctgaacaggagctggagcaagcgcatgctggagaaaacagaaggcaatgtgtcccagagaagtggtccccggccgtaatggccgaattcccgggcatatgtccggtaccgtcgactg

SEQ ID NO: 139703 - DNA, 566 bp, Homo Sapiens
ttctgatttaacattttcatgtttaatatttcaaaataatgtaacaaactaaaacctaattttagactgtctttaaggcacaccaccttcatattcctttgtatttaaatcccctgttctcttaacaggttctggataaaagcagtctccaagtcccaaatgagtggtgccaccagttttaaaagtaacttgcttggctcagtgcagaacagatcatttgatttaacacagaagggaaataaaaaggcgtattaaatttcaggcagattcgcttcatcaggtccagtggtcactacacccctgttgtactataggtctatgcttccctggtttccttcccattgatgtatccagaggttggcagggagcttgaggaagcaaaggatgggggcagggaggagggtcacctgcccactgcaactcttacccatgtgaggagtaggtttcactagtctattattagttttgttgaaggacttctgcaggggttgtgaggcaagagcttgtgaaagggccattgttgtgggaacagacaccacgggtacttgtggcagaactcctcgtgc

SEQ ID NO: 139704 - DNA, 1077 bp, Homo Sapiens
atttctttataaaccacaactctgggcccgcaatggcagtccactgccttgctgcagtcacagaatggaaatctgcagaggcctccgcagtcacctaatcactctcctcctcttcctgttccattcagagacgatctgccgaccctctgggagaaaatccagcaagatgcaagccttcagaatctgggatgttaaccagaagaccttctatctgaggaacaaccaactagttgctggatacttgcaaggaccaaatgtcaatttagaagaaaagatagatgtggtacccattgagcctcatgctctgttcttgggaatccatggagggaagatgtgcctgtcctgtgtcaagtctggtgatgagaccagactccagctggaggcagttaacatcactgacctgagcgagaacagaaagcaggacaagcgcttcgccttcatccgctcagacagtggccccaccaccagttttgagtctgccgcctgccccggttggttcctctgcacagcgatggaagctgaccagcccgtcagcctcaccaatatgcctgacgaaggcgtcatggtcaccaaattctacttccaggaggacgagtagtactgcccaggcctgcctgttcccattcttgcatggcaaggactgcagggactgccagtccccctgccccagggctcccggctatgggggcactgaggaccagccattgaggggtggaccctcagaaggcgtcacaacaacctggtcacaggactctgcctcctcttcaactgaccagcctccatgctgcctccagaatggtctttctaatgtgtgaatcagagcacagcagcccctgcacaaagcccttccatgtcgcctctgcattcaggatcaaaccccgaccacctgcccaacctgctctcctcttgccactgcctcttcctccctcattccaccttcccatgccctggatccatcaggccacttgatgacccccaaccaagtggctcccacaccctgttttacaaaaaagaaaagaccagtccatgacggaggtttttaagggtttgtgggtaatgaaaattaggatttcatga

SEQ ID NO: 139705 - DNA, 1628 bp, Homo Sapiens
  misc_feature (1618)..(1618): n is a, c, g, or t
ggagagagatttgctatcagtggtgctttatacaaaatagcataatctgataacataagacattttagatttatgtttttaaatagccaaataaaacaaaatatcaagtcacagattacatatatttacattaattcaaatgtccaaagcacagtacagtagggtctatttaatagttcacataatttaagatttacatatacacaagcacatgaaccaatattagtttgctagaacagggatttaagaagttactcagacattttggtattgacacttacatatttatggcaacaaattatgatgactttaaattttcaatgagatcttttgtacaagaatacagaatgggaagaatgtacaaaatgaaaagacaggcaaacaaatgtactttccttgcactatttctataacaccatataggatgtggcattatccagtacattttatcagtgtagtctattcattctggtctaaaacggtaattttggctgaataaccccccaatctaactttgctttaggctttataattaattgatgcttgattcttctttctacatcttgttaaaaatgaaattggacactagtgtttttctttaaaataactctggtactagtaagttagcaaagtctatttttaaaggacactaatacataaagtttattttttctttcaatatcctaaataaagggacaatgggagtcatatcacctttgggcctactctgaaattaccactagtgctaaaagctaagatattgtgatctagaacttaaactttggaaaacaaccccatctttctctggcacattgaggaactgaagtactttacctcatttcctaccaatcattttaagagaatttggttgtatttcaaagaacaaacaacacaatttctgtcctgctgtttattttgcagaccacacacaaagttaaatatgaacagattaaattatgacatcatacaaatataggcacaaattaagtggacgccacaaaaggtgtgtcagaaaacactgaattgactgaatctgagtcagatttccccctcgtggactttaggatgccctcagctatcactgcctcgctgggaaagagcctgactttcccgttctgcccttctgcagtatccttgaggggttccaaaaacaccactcttttacctgcacctgccttccgttcatcagcggaggcatcactagcagggccaggactgagaatcgatgaatgggcattgctttggtgtagcatatttttctgtctcttggttttacacttgcaggggcatggagtcagatagaggtacaaaagtaccaaaacgatactggccacgcaagcagcaagagtggtaaaagctgtgttaaatgcctcatgagcatgggatctgcttacagtgaaattgctcacatttattgtgacgtccacagtttcatttaacaggcgttgcttattcattgcgatacaagaatacactccagcatcctcaaaacgagggctttctataaccagacttccattgtgaaacacgtaaaagtcttccatctctttatccggctctagcagtctgttatctggacccacccagatgaaatccgtatttgcattacctgtttgcntggtgggaag

SEQ ID NO: 139706 - DNA, 664 bp, Homo Sapiens
  misc_feature (442)..(466): n is a, c, g, or t
cttaacgttcatcactgtggactcaaaacacctaaaactgggaattttccaggcccagtttggcagtagggcttctgtaggcagtgaggtaagcggatcacacgttccgtggctgatctgtgtgagccgcagcttggtgctgggggacaccagcttcagctttgcaggaaagccatgtttaaagagtagcctccagtcctactggcccaatgcttttgccatcagggacctgacaaggtttagaatgaggtgagcgatggtgacagtatccctgggcctggacactgtgtgccaccctgactgtgtttggcagcccctccacctggctactgaagccagtcaggtgtgggggctgcagactgtccccctgccgtcaggtggctgaagggtcccctgtgtgccagcatcagaggccaagttctctagctctctggtttgcagnnnnnnnnnnnnnnnnnnnnnnnnnaagatgaccacaagaagttttacattattatattcagacaaataaccatttagttactctatttcagagcactgaaaaaaacaagtagcaacagaagacagacttacaagggcactaagtctctggtcactcaaggaccaatcaaaggaatgcgctgttaggccagaaaggagtctctgaagcaaatgattggaagga

SEQ ID NO: 139707 - DNA, 617 bp, Homo Sapiens
  misc_feature (234)..(550): n is a, c, g, or t
gtacacaatacttacacactttttatttgtgaaaaaatccatgttacacacatgtacatatatacacaaatgtatacacaccaacatatatatgaataacagttccggtcattccaaacaaaattataaaattacagttattataaactaaggtagcaagtggaagttaaacatatgctgagcactgctctaagctacccaaatacacagcatatttaagaaatctaggaagcnnnnnnnnnnnnnnnnnnnnnnnnnnnnnnnnnnnnnnnnnnnnnnnnnnnnnnnnnnnnnnnnnnnnnnnnnnnnnnnnnnnnnnnnnnnnnnnnnnnnnnnnnnnnnnnnnnnnnnnnnnnnnnnnnnnnnnnnnnnnnnnnnnnnnnnnnnnnnnnnnnnnnnnnnnnnnnnnnnnnnnnnnnnnnnnnnnnnnnnnnnnnnnnnnnnnnnnnnnnnnnnnnnnnnnnnnnnnnnnnnnnnnnnnnnnnnnnnnnnnnnnnnnnnnnnnnnnnnnnnnnnnnnnnnnnnnnnnnnnnnnnnnnnnnnnnnnnnngaagtgaacagatacactaaaccacactacagttgagaatttggggcagagtttaaattacctcgtg

SEQ ID NO: 139708 - DNA, 470 bp, Homo Sapiens
ttttatattcttttttagaacaaccaatctttattagaaagttgtagtcacgtttacaataaatatcaacaatataatgaaaaagtagaacaaattagtttccaaatactgaactcctgtaaccaaaacacattttggatttgggaaaacacagtaaacacataccaaaaacacagccacaaataccaaaaacaaaaaccagctcaagtataggattgaactggctggaaaacacttattgtgttactgccttaagaaccccacggagcaccttgtagctcattaactgcacattttccttaggggggaaacaaggtcctctctcagtcacatatgcataaggaaatctcaaaacccaaaggccatcaggtggaagggtgatttcttgtttttctgggtagaataccggacatggtggtgggcctggctgaacctgaggcattagtattatctgcaaaggagcatcagga

SEQ ID NO: 139709 - DNA, 1080 bp, Homo Sapiens
  misc_feature (161)..(213): n is a, c, g, or t
tttatcatccatgtattttatattcttttctagaacaaccaatctttattagaaagttgtagtcacgtttacaataaatatcaacaatataatgaaaaagtagaacaaattagtttccaaatactgaactcctgtaaccaaaacacattttggatttgggnnnnnnnnnnnnnnnnnnnnnnnnnnnnnnnnnnnnnnnnnnnnnnnnnnnnnccagctcaagtataggattgaactggctggaaaacacttattgtgttactgccttaagaaccccacggagcaccttgtagctcattaactgcacattttccttaggggggaaacaaggtcctctctcagtcacatatgcataagggaaatctccaaaaacccaaaggcccatcaggtggaagggtgatttcttgtttttctgggtagaatacccggacatggtggtgggcctggctgaacctgaggcattagtattatctgcaaaggagcatcaggaaccacaacaaaaagcctcataagttgagcataatgaggtttcagccctctaccttgagaggatgacagaatatataagggcatgtcactatttagggcttttaaggctgattcctttgggccacttcccattactttcatttctttgtcagggccagagcacatgaatctccgacctcgagagtcttcatattcaaagcccacaaaagctcgagctatgtcatctcgccgtcttcctcttcccattacaaccgcacttctctttccaggaatagctttatttggagcaggccaagagtttgtgtctaagtctccttcatcttcagctctagtcctgatgacaatgtcccaaggcataagataatttgttcctggaataaagccctgttggtccaaacctgtatgaaagttataagacttagcagggcctagtttaaccaaagaccagctggagaatttgggtaggagacctttagggcaatttgaatgtagcatgcctgggagatactcaactgtggatgcctgtcgatcaacgaagtttggcctcttctcagttttcacttctacttgaccatgaacttctggattacc

SEQ ID NO: 139710 - DNA, 551 bp, Homo Sapiens
  misc_feature (240)..(282): n is a, c, g, or t
aatcctgtttttgaggaggtggtaggtgtttagaaaaggatgtgggaatggaaggggtagatgagtcaaccctctttcaagattccaagggtggtgtgttacctgatccttttcgtgtgtggagttcagggggtcgggaggtttggcctttattcccacattcaaagttggaacctcccccaaattaagaatggagttttagtacccacttgtggcaggaatcctggggggaaggggtcnnnnnnnnnnnnnnnnnnnnnnnnnnnnnnnnnnnnnnnnnnnggcaacccacacccttccacacacgctcaccccaaaattaaacaccaagatcctctaacttgtttggattgactgatgaagacataaagctctatgttttttgaggtggagtgagtggtttttcttcatttttaaatggccaaatgacagcttgacccagtttgctttccaatcaaagggcatttattttgaatgtctctttgtggcgcaagagccaacgcaaaaatgatggcggcttacaatggcggtacatctgcagcagcagcagg

SEQ ID NO: 139711 - DNA, 206 bp, Homo Sapiens
gagtgtgccactgcacctggcctaatagagattttaacataacttgtgtccattgactattctaagaaactgctggagaccagcagtagcaactggaatcatcaaaaagttcttaaaacaatattcaattcagaagcaaatcatgatttttaaatgatttatttttctggctgagcatggtgactcacactgggctataatttcaa

SEQ ID NO: 139712 - DNA, 545 bp, Homo Sapiens
  misc_feature (421)..(421): n is a, c, g, or t
  misc_feature (423)..(423): n is a, c, g, or t
tttttcaacaactgacatctgttttattttgtactagttattttagagaaaatgaaaccatttattttctgaaacctgtgtaagcttttacacatgtgaaggtaaagggagggcccagggctaaactggtgtacatttccatgtgaataagccatcttttgaaaaccaaaacgaaagaatatgcacaataaatttggatccacattaaactagttcattcaaaaatggaaccccatcaatgccagcaaaggaggctggaaggttgtaaggccagagtcagcacagacccatggctccttgaaggcttcctgctgccagggcctccccagccacaggaccattttgctgattaccagggtaaggcagagctatcagccctcaagcagcttaattaaagccaggagtaagacattttgtgtananggggtcaaaacaatcattttttaaatcttgcattcttttttcttgtgcacttggtagcttgaaatgaaggtgtggcatttctgcatcaaactttgacgatgaaggacaggagtacacaattt

SEQ ID NO: 139713 - DNA, 910 bp, Homo Sapiens
gggaaaagggagaggaagccggagctaaatgacaggatgcaggcgacttgcagacacaaaaagagaagcgttcctctcggatccaggcattgcctcgctgctttcttttctccaagacgggctgaggattgtacagctctaggcggagttggggctcttcggatcgcttagattctcctctttgctgcatttccccccacgtcctcgttctcccgcgtctgcctgcggacccggagaagggagaatggagagggggctgccgctcctctgcgccgtgctcgccctcgtcctcgccccggccggcgcttttcgcaacgataaatgtggcgatactataaaaattgaaagccccgggtaccttacatctcctggttatcctcattcttatcacccaagtgaaaaatgcgaatggctgattcaggctccggacccataccagagaattatgatcaacttcaaccctcacttcgatttggaggacagagactgcaagtatgactacgtggaagtcttcgatggagaaaatgaaaatggacattttaggggaaagttctgtggaaagatagcccctcctcctgttgtgtcttcagggccatttctttttatcaaatttgtctctgactacgaaacacatggtgcaggattttccatacgttatgaaattttcaagagaggtcctgaatgttcccagaactacacaacacctagtggagtgataaagtcccccggattccctgaaaaatatcccaacagccttggatgcacttatattgtctttgcgcccaagatgtcagagattatcctggaatttgaaagcttttgacctggagcctgactcaaatcctccagcgggggatgttctgtcgctaacgaccggtagaaatctgggatggattccctgatgttggcc

SEQ ID NO: 139714 - DNA, 1597 bp, Homo Sapiens
caaatttaacaactttattgaatttgcagaagcattctacagtaatacatttttaaaaatcacatagcactcagtaggtacatgtatacatgtacatttcagaagacaacaaataaaattactctcagaaagctgcaaagatggacacatataatctaagaatgtggtaatggccagagggagtacccaagagaccatattttattatgcttaaggctactactttccacaatacctctgcagttaagactcttaacttacaatcacagaaatgaaaacatgataatacactgctttatacagacatacagatactgggatatagtataatttcttatggcttaaaaaaatttaatttgcttttagagtctatattgctaaacttaactttccacaaaatacaatatatcatgaaagcaaagtattattttttaaaaggccccattatctgacaaaatagatggtgaacatgcactatcccaggatatctattattatccaaagaagtgtttctcaaagtgtggtccatggtactggtccatgaattggttgctaccagtcaatgaagagataaattacttgcatcagagtgtaaatcaatacattgctttagctattaataaaattttgctaaaaaatcaaatcctgtcattgacctaaaaagtatctctagatttaaattcttgtgcatgcttatcttgcctgtggataagtaacagtttgtagactggtgctttgagttgcattgatctagactactatgattgatgttgcagacatgaataaataccaaaggaaaagtaagaaaatatgagcaaaaatatggacaagttatggaacgtgaaaagatactgagataaaagtatcaaaaagaacaacatcactgttctgaatgtgtaacaaatgtttaattctgtcctaggtataaaggaggatgcatattattctattgaacagtaaatactccttatatcctaattagaattttcttagttttggagaattgtaaaaacataagtaaagcaggaaacagaaaacaacttagagactaatatgtgatctagaaagcgttaaattgtttgtaccaggcttcctatctacgcaaatctttagaaaagacaagtagttctacacaggcaattacttttatactgtaatttgatgggtagaagcttaacattttgtaattagccctatctggaaactaaaacacccttaacagaaaagaaaatgttggcataaagtacctgaaagataagatagatgtctttttgtccttaattttactagtgtttatttccacgctttttaattactttgcatacttctcctccaaataatgttccacctttaaagggagtggaagccagcttattcttagaagctaaattaattttgcaatccttcagccagaggtatcgacgacctacagtggcatttcccatggtatgggcagccatcttcacttcatcaaatgcagcttcacaaatatatgaggctgcatcatatgttttgctcagaatcccaagcgcttggtgggtacgactaggatctgagctaagaatctgtgcagcttgactaatgtctgcctgcatag

SEQ ID NO: 139715 - DNA, 678 bp, Homo Sapiens
tactgatttatagaaaaatggcaaagtacagtagttccattccaatttgaagggccatgaaaagccactgcaagaccttttagcctaattcaaacctgtaaacatgttcagtcttttttaaagagaatctttaatatttggttaccaggattgatgtctaatatcctgttaactgcaggttttgaatttattacatgtgcttgacttatacaattaaagccaccctaaggtgacttgctttaaaaaacaattaccttgtacaaatgaaaataggttcatattttttcataaataaatggaaaaatatcaaatgttccagctttaacaaaatacaagggaatacatatacagtaagttatcttaacatgttctgacccaccccttaactatgcttactgtattgtctctacaggcagtgaaaagcctccatttgccacagtggaaggccttccagttaccagacacacaattcccagacaagttggaaacaattattgcttgaggaaaagcagttcattgtactttttcttcataaaaaagtgcacttaagtgccaagtcagcttgtcaagaaacaatttttaaatataaaatagtgcttgtctgatatttttttatactgcacagtggcacaaaaaaatatcagacaagcactatttttttgtgccactgtgcagtat

SEQ ID NO: 139716 - DNA, 432 bp, Homo Sapiens
  misc_feature (362)..(391): n is a, c, g, or t
tttaattcagagacctttttttattaaatgtgtaaaaagcagttctcatcttacaagctcaaaatcagacgaatgtatgagggtgtataattgttatatttataaactgtatcacccaaaaactcaatgaggacacaatctatattacattcaacatttgcatatttacatgatacttactgcaaagtaaatacaaaatgaactcccatcattttagttcagaacacaggtgatataatttcaaaacaaaggcaatttttttcaacaaagaacagaagtctcccaagtaccaattcactattttgcagaaaaatacaacactaattataagatttccattccagtttagtcagtaagatacnnnnnnnnnnnnnnnnnnnnnnnnnnnnnnagaaacagggtctcactctgtcatacgggctggagttcagt

SEQ ID NO: 139717 - DNA, 659 bp, Homo Sapiens
agattcattcatcttcttctctgtgcagagagagtctacaaggagattgaacaggtggttggcccacatcgccctccagcgcttgatgaccgagccaaaatgccatacacagaggcagtcatccgtgagattcagagatttgctgaccttctccccatgggtgtgccccacattgtcacccaacacaccagcttctgagggtacaccatccccaaggacacggaagtatttctcatcctgagcactgctctccgtgacccacactactttgaaaaaccagacgccttcaatcctgaccactttctggatgccaatggggcactgaaaaagaatgaagcttttatccccttctccttagggaagcggatttgtcttggtgaaggcattgcccgtgcggaattgttcctcttcttcaccaccatcctccagaacttctccgtggccagccccgtggctcctgaagacatcgatctgacaccccaggagtgtggtgtgggcaaaatacccccaacataccagatctgcttcctgccccgctgaaggggctgagggaagggggtcaaaggattccagggtcattcagtgtccccacctctgtagataatggctctgactccctgcaacttccagcctgggaaacagagcaagactctgtctcc

SEQ ID NO: 139718 - DNA, 416 bp, Homo Sapiens
tttttctaagtagtgtgggtctcggagagcagtgctcaggatgagaaatacttccgtgtccttggggatggtgtaccctcagaagctggtgtgttgggtgacaatgtggggcacacccatggggagaaggtcagcaaatctctgaatctcacggatgactgcctctgtgtatggcattttggctcggtcatcaagcgctggagggcgatgtgggccaaccacctgttcaatctccttgtagactctctctgcgacatgagggtatttgagcatgagcaggaagccgtagcggagagtggtgctggtggtctcagtgccagcaaagaagagcgagagcgtgttgatgatgaggttctggtggctgaattcactgtgtgggttggatttctccgcgatcgaaagctggggccggctca

SEQ ID NO: 139719 - DNA, 1341 bp, Homo Sapiens
  misc_feature (431)..(431): n is a, c, g, or t
  misc_feature (582)..(615): n is a, c, g, or t
tttttagattagtggcagtttattgccttatacaaatttaaccaacatggcaaccatgccaaaggaattaaaacattttcaggacatatgtacagactgtacatttcaaaaacaaacaataaaaatgcaagaacaatctgtgcatcatgtatcaaacttaacaattgggtgaaaacaccaatgcaataaatggaattacaaaggcacttccctacacgaaagaggaaatgaaaatgcagcctacagggagagcttgaggagtgcgaactactgcacaatctcaacgtgggggaaaaaagcagatttaatcatttataggattcaatgtgatccacttttacaaaatattttcacacagtctcatctttgtttttatgctgtttttcttggctctcttgttctatactttggctccttcgacgatcatgttngtctgactggtccttactatcactgtgatctcgtttgtgggaacgttctttgcttctactacgctttctagattttctttgctgggactatgttcccgtttttttgatttttcaacactgtcagttcttccttgactgccacttcgacttnnnnnnnnnnnnnnnnnnnnnnnnnnnnnnnnnngtttacttgatttctctttgcttctacttctacttcgtttccctgcatttctacttcgactcctacttctgtgtttcctttctctgcttctgcttctactgtgttttttctctttcttggaatctcttttgtcatctctgtgccgcctatcatctttgtcttctttatgtttcttctcttctacctctcccctacttctctgttccttggacctttctcttgatcgctctctctctttttctcgttcatttcctctttccttatcatagtcacgatctcgtcttctacctctctcattttctttctctctttctcgatccctgtcccttctatcccctttcctatcacgacttcgactgcgacttctatgcctttccctacttctgctgcgcctgcgttctaacccccggtcaatacttcgggatcttcgccgttctctctccctttctttggcttcacgctctagtcgctagcgttctttctctctttctaattctctgtcaaaactagaagacccatggccctcccgatgatgacttctacttcttgaccttcttggggacctccgtggactcagagatctccttggagaccttgaacgtctgcgttcaacatgtctgtctatttcctcagcaccttccttcccatctttcttgatttttctaggtcgggttttaatctgttgatcaatattcttttgaactgcaactggaattcttggaaaca

SEQ ID NO: 139720 - DNA, 606 bp, Homo Sapiens
aaaatatttaacagtgatttattcaaacatgtttcacgtttgtgtattattaggtaacaaggatattagaattgagtctttactcctatcctctagccagttagttttatcagggagataatgcacacatgtgtacatggaaagatacaaaataatacaatgccaaagaaaggaactcaaaatatgataagacagaacttgagctagatcttttgaaaagttaggatttagataagttgagaagaatgagagaaaattgctcacaagagttaggaatatttgtgatgtgtttgggaaaaaaataaatggaatcatttcactggaattgagaaatcaattaggagatattaaaagctggggaaaggctggattctaggggtttcatatgtcatgaagacatagatgatttttgagccaggaatattcgagaagcagtgttttggaaaataggcagcagtaaataaatgagaaaattaaagagattagaggcaggtagatttctaatttaaaatcatcacaggcggtgaagaggaaggaaaggaacataactgatatactgtcctttgtttttctttccttcctcttctccgcctcgtggcgaattct

SEQ ID NO: 139721 - DNA, 539 bp, Homo Sapiens
caatacttaactttttaattcactaagtactattttattcaatttaattgcatattagatgtatcttttcagttacatgcaacagaaaatattttttaaacattcctatatagacattttctgtgctatttacacagtacagaaagccctcaatgagaatttaggcacatatgcttacaaaggaaaaaattataattattagaaagtatgtcaaaataaatccatgatccttgatttaaataaaactaaagattatgatcatatttctttctttaaaagtacaaagacagttaataaaatgtgatagttacaaacatgtgctatgattttgcagcattaaatagtattgttacatatgtaataaatctaacattgtgctacattattttctaaagtaaattaaaaattaaatagcaaaatcagtttttataaacaaagtttttgaacataataagccaacacataaaaataatatacatagttgttgcaggttaatcttgtgattaaaagtaattttgacaacattattcatgaattat

SEQ ID NO: 139722 - DNA, 501 bp, Homo Sapiens
aaggtctcttttaatttccagacagttaaaaacaatctagttatcttaaagcattagaaagttattatctggagagtgcagagatttcagtccatacacctttctccacaaagcagagccagaagtaactgactattgtgcctaaaactctgtttcatttttaaaaacaagtgccattaaaatggaatatctaatgataagcatatgaaataatgtgtaattagctcaatttaactattccacaacttacatattccaaaaccctgttatacatgataaatatatataatttttgtcagttaaaacaaattaaaaaaatggactatcgtcgcacagaagcctagaacaaaaatatgaagagaaatatctgacatttgtaaagaaattataagaagaaaaaaagatacagaacagaaaacattcactactttagaaacactttatgcatggcttcttgccccaaacttttattgtgatggccctaataaagcagattattgg

SEQ ID NO: 139723 - DNA, 629 bp, Homo Sapiens
gaaatggatcactcattctttaatagaaccacttttaaaacaaatgaggttttcagaagtaacatagtatgcacagaattttggggctactggaaagaatgacaagcacgggaacatctaccaaatgtagaattggttcagattttagcatgactaattgctagtcatatgttgttgagaacaatactgattagaatactcattattgcaggtacattgtttacctaccccaaaatacttcaaccggaagagaaaccatggcagccttaaataaataaatctggataagaatgaaggccaaaataatgtctgagtttcaagtgttgtctaccaacaaaattaacagggtatgagttgagggtgggcatatgggtgcatgggcatgccaccagacgaaatcagttttggaaacaccaacatatgattggtatgttactatgagttaaggggactggaaaaaatccagtgaaactctcgagttatcctttctagttatcactgcaggagattggatccttcactgatgcattatcaggaaagaatgttagtgttccaagtcttagtgtaacttgatatcgtagtgagctgcttggtccctttcgatcctttttctcctcgtgccgaattct

SEQ ID NO: 139724 - DNA, 733 bp, Homo Sapiens
gtttcattctttattctttccaatgattcaaagacggttagaggatttaaccttaccccactgcctcattgcaaaatttgagtatagattcaaggttatgctttgctgttcattggtttgaaggccaggctttcacaggaaggcacacgatttaaagtaacttcggtttaagcttctacaggtttgtgggaatcctcttcaaaggacagacaccatcagaacttgaggttatacaggctgtccagtaagtggggaataggacaaacccttcccgaccctattccagatacatgattaaaacagacagaaaatgatcctaattgcatattcaccatttaggcataacagttttgaatttgcttatcattgtgtttacaaattacatttttgatcaaaatcttccattgcattcacttgtcttccaaatcccatcttgacaaatcacaggtctgtcattctgtgactttaatagatccatgttctgtggtatgttcctcctgctccatggaagcccaaaggcagcacaagaagactctgctgaggactctctctttagaccctcacagaccagggtttgcagttttctgggacaccagtgacacacagggtggtgaacttgtccacgcaggcattgcggatcttctccggggtggcagggctgtctagccggaagagttccttcacgttattacctgtgtgctgagctcgagctgcacggatggcatctttgatg

SEQ ID NO: 139725 - DNA, 1317 bp, Homo Sapiens
caaatggaagagggttttatttgtaaagaaatgaacttacaactgatttacaatatattattgtaatataaacaatataaataaatgatcctgtaggcccactaattttccatccagacccacatgaagcaatgttacaacaatattttatttgaaaatgtgcaggtaacaaaggtgcaattacaagcaagttaagcagcagagtttaaggtgctttaatttaatagttaatgttgccatcaacaaacatttaaatgctcaatttacttcactgaatacagacacaacaaatatgaaaatctaaattcatacacatgctacttaatatgaaagtgctttctcttttttaaaaaaatacaccaaatggacactttttacatagatcaaatgtgctcttacaatgcaaaattaaccttcattttcaggttatacattttaaaactgtagctatcaacaccaatctaggaactctaatgctaagagtgctaaaaactatttcatttcttgtgaggaggactctaatacaatatccaatgtaaagaatacatctatatataatcttaacatgttttctgtaaagataaaaaatgttttctttccccttggtgatctttgttcatcctgggtggatcatcttttgaggttttaataatatgaaagtcctattttagaacaatgggaggaaccaaaaggggaattaaaaaattggttaacgtgtgcttgaagcatccaaaaaacaccagtttatcacaacaattggtctttgctaaaattaacaaaattttaataagcaagacgacaaaaagtactaatttaaaaggcttgaaatgcctgccaccattgtcagtatccatccatccaaccttcatttactacaagcacaatactactttgaggatagtttttggaacttattttgacttttttccctataggagaaaacagagaccaagcttttgaaggagaggactgggaatctagtttaaatgtctacatccaaaattatatcatctttgcgcattcagttgactttttaaaatttaagaatacatatacaaaaagtacttatggaatacatattttaacagcataacatatttgaagaattagttacactttaaaaattaaaacacttgaaaagtattttttaaaccagtaccatggaataactttttgaaacccagattatctggctacttagatgatagtcttcctgttttcaattagtttgaaagattctaatatagattctaacccaacagtttatcccggccgtaatggccgaattcccgggcatatgtccggtaccgtcgactg

SEQ ID NO: 139726 - DNA, 1329 bp, Homo Sapiens
  misc_feature (647)..(846): n is a, c, g, or t
  misc_feature (863)..(1167): n is a, c, g, or t
  misc_feature (1216)..(1250): n is a, c, g, or t
ttctccgaataaatctgcccttctttacgttacactatcttggtaaatggctgttaccaccctgcaaaagtgaccctaggttgttgctacccgatatggtttggctgcgtccccacccaaatttcatcttgaattgtagttcccataatccccatgtgtcgtgggagggacccggtaggaggtaatcgaatcatgggggcaggtttttcccatactgttctcgtgatagtgaatacatctcactaaatctgatggttttataaagggcagtttccctgcacgtgctctcttgcctgctgccatggaagacatacctttttgctccttctttgccttccaccatgattctgaggcctctccagccttgtggaactgtgagtacattaaacctctttttctttataaattacccagtttccagtatttcttcatagcagtatgaaaagtaactaatacactacccgagacatcttaggagatttgtaatagctgtaatgccaggtccaccatatttttagcataaagcaaatgtttacgcgtgatatgactgcacgggctttctttcagctggagccatagcaactcaagtagtaaccctatcttagtctgattaaaagtaaatattagtctgggcatggtgggacatnnnnnnnnnnnnnnnnnnnnnnnnnnnnnnnnnnnnnnnnnnnnnnnnnnnnnnnnnnnnnnnnnnnnnnnnnnnnnnnnnnnnnnnnnnnnnnnnnnnnnnnnnnnnnnnnnnnnnnnnnnnnnnnnnnnnnnnnnnnnnnnnnnnnnnnnnnnnnnnnnnnnnnnnnnnnnnnnnnnnnnnnnnnnnnnnnnnnnnnngcagtgggcaatgatcnnnnnnnnnnnnnnnnnnnnnnnnnnnnnnnnnnnnnnnnnnnnnnnnnnnnnnnnnnnnnnnnnnnnnnnnnnnnnnnnnnnnnnnnnnnnnnnnnnnnnnnnnnnnnnnnnnnnnnnnnnnnnnnnnnnnnnnnnnnnnnnnnnnnnnnnnnnnnnnnnnnnnnnnnnnnnnnnnnnnnnnnnnnnnnnnnnnnnnnnnnnnnnnnnnnnnnnnnnnnnnnnnnnnnnnnnnnnnnnnnnnnnnnnnnnnnnnnnnnnnnnnnnnnnnnnnnnnnnnnnnnnnnnnnnnnnnnnnnnnnnnnncggccgtaatggccgaattcccgggcatatgtccggtaccgtcgactgnnnnnnnnnnnnnnnnnnnnnnnnnnnnnnnnnnncggccgcttcctcgctcactacttcgctgcgctcgtcgttcggctgcggagagctagcgccctatagtgattatacact

SEQ ID NO: 139727 - DNA, 831 bp, Homo Sapiens
  misc_feature (813)..(813): n is a, c, g, or t
cactttgtaaaatacttgatttaattttgaagtatgagggtagagatggaatgttgggttatcagcagccacagggaacaaggaggctggtgaattgatagtccacgatccagcctgcctatggtgggggtgagggtggtactatcctttagccagttgcattaggcttgactagtttttataagatttccaattgccatcaatttatatggagtttatactctaaagcaataacactgattttgagaaagaaaaggtaatttctgcttaatacaataaatgagaaataattgaagaaataatttctttggaaaagaatgcttctttattgatggttatatttatcagcaaggatcatgactcagtagccagttgaaggaatcagaacactttgggtacatgctgctaaaagcccgtcagctcgtcatccttgtttttgtcaacctggtatccagtaagtaccaagtcctcattttgtccgggaagacttttgaatactttcaagtgcatatatttattatcacctgctcgtaccttaatgtagtaatttgttccagcaacaacttgagttttatactgcacagcttccaattttccataagtctcatttgttttttcttcaagctgtggtttaaccttatcaacaatctcctggatttctggagtggcgggtttggcctcagataagcctccaggtatcattttggctgattgcttctttgctggacaggatgctggaaccaaagtgaacagggaagtgtggagactcgtgttttaaaagaggcgttcactagctccgcctatagaatgctntattttccacaaacagca

SEQ ID NO: 139728 - DNA, 1018 bp, Homo Sapiens
  misc_feature (529)..(548): n is a, c, g, or t
  misc_feature (811)..(811): n is a, c, g, or t
  misc_feature (994)..(994): n is a, c, g, or t
gcacgaggccttatttgtctaattttggaggtatttgataactgagtaggtgaggagattaaaagggagccatatagcactgtcaccccttatttgaggaactgatgtttgaaaggctgttcttttctctcttaatgtcatttctttaaaaatacatgtgcatactacacacagtatataatgcctccttaaggcatgatggagtcaccgtggtccatttgggtgacaaccagtgacttgggaagcacatagatacatcttacaagttgaatagagttgataactattttcagttttgagaataccagttcaggtgcagctcttaaacacattgccttatgactattagaatatgcctctcttttcataaataaaaatacatggtctatatccattttcttttatttctctctcttaagcttaaaaaggcaatgagagaggttaggagtgggttcatacacggagaatgagaaaacatgcattaaccaatattcagattttgatcaggggaaattctacacttgttgcnnnnnnnnnnnnnnnnnnnngcaaagggcctctaaagaatcagcctctttggtccctttgtgctgtcacctttttgccatgtttaacagcatcttggttggcactctagtcttaatcttgctccttaactttgaatatgcagtctaaaatgtcagtagtcaacatgtaattttcctttgaaattctgaatattccagtgctggaacttatccaaaaagaagacctcagaaacttagattggtagatctctagtgcatattatcatgtgggcaccttctcttanggtggaatgaggcagtctggatgcagcatagttaaaaggagctgtttaatattctctgtagtctggcctctttactaggaagtaaagctaaatcagaagcctgtatttaacccatgtgaacagggagggaatttagtggttctgatgggctggattactaagaacagcctaggataacttaanagccatgaccgttggggaatgggg

SEQ ID NO: 139729 - DNA, 623 bp, Homo Sapiens
  misc_feature (529)..(549): n is a, c, g, or t
tttttgaacttgaaccaaattgatttggataagatttattgatcagattgttttagaaaaccaacagcaaaacactgacaaggtacataaatacagattggacattttagggtaaattcactgtatttcctacttgcttgtaggaaaccgagtaaagtggaaaagctgtcctgatcatatggcatgcacaccagactgcaaaaggacgtccacactatttaacaggactgtggcaaaatagctttaaagtaaggcgagcattgtgtatggcccaagcataccctgtaggaagagcaaagctaggctcacctctcagagactgtgtctcagaaagaggcttcctttcttgcctaggttcttccatgaaattcgtcattggcaggtgcttttccagggagatgcctgtgctctccctgtgcagactctgtgcacaaggaagtggctttagagagtgtgttttctgatgcctcctttatattctaaatgtataactagtaaaacaacaattactaccgcttggtgaaattgnnnnnnnnnnnnnnnnnnnnnctgaaaactgcctctgactccaccctgtacactgactaagcagggcccttacaaaacttataaaaacctcgtgc

SEQ ID NO: 139730 - DNA, 1332 bp, Homo Sapiens
ttttttttctggtagatcactcatctttattaaagaagtgtgctcatgataaaaaattgtctggtatgacagcaaatgcataactatatatatagaatttatcccttaacatattttagaggataaagcaacagagggacgatttaacagtaagcgggccacctgcaggattgtcctgattctctctcagtagttactccttgctctctgcagagacttaagttctctttgccccagtgcccagacctgccttctcttcaccctgtcatcatgcacggttgggccctggttggccttttctgggcctcctcacagcagaatgtgcatcatcattcctcaagggcctcgtgctttccttgtaagtcacacagtttttgtgatttacatgcaagtaagggggaggagaaacacaaacaccttccgtgtgaatctaaagcatggagtgctccttttagtccccatggtgaagtcggtgatgctggtgaaggtttgagctctggcgaaagcttttcccacactggccacactggtatggcttctctccagtgtggatcctctggtgcagcttcagggttgactgccgcccaaagcagtttccacactctccgcacgtgtagggtctctctcctgtgtggactctcttgtgtctcttcagctctgaattccacgtgaagcttttccacagtcatcacatttgtagggttcttttgctgagcgggttggctggtgacccagatgttgcaaacggttgctcagactccgtttacctcctttgcttttctttagctctctcagtgggtggctttttagggggctgctgatgtattccaccctgcaatgtctctggtagtgagcaaatggcttttgagcatttggggagctgacctgcctccgtgacaaccgaggttcactcatatttgcccctcttggttcaggattctgcagaccattccctttggatctgccagctgacactgcacatggctttgctcctttagccccttcctgttgtggattttccttgttgtcacttctcattctgggggcctctgtcccagccaatttgggggttggttcttggaggagtggggatttctcccaatgatgggggctcagccggtcataagctcctgcctgggaaggctctgctggagagctctccctgagatctctcctaggagtctgcggttgaaagtctggcagttcctgttctccaagctgagatccagttttctccaagagcaccttttgcccctgcatacaaacggccacccactgctttggtttcttggatgctctgtgaaaatcttccacgagggtcacaatctcctt

SEQ ID NO: 139731 - DNA, 385 bp, Homo Sapiens
aatttaataacccttctttatttcaaaaaaatatttaaaatacttcaattctttctcaaacatgcacagaattactaaccttctacattcatgggttccctcagaacctgaagtttcttttgtttctctcggattcggtccaaagcacttgatatttcttaggaggtgggcgattctcgagtgtgatatattggatccattttcttagggccaaagatatccaaggctatacttccatctgagtatcttgcctccttttttctaggagtagttgaagtccgcactgttactgcctcagggtgacaacgacgatatgtggcagtctctcctgaagagaagtctctgtcagctgtacaaagcaagtccatggatgaagccctcgtgc

SEQ ID NO: 139732 - DNA, 939 bp, Homo Sapiens
aactgacgtaattttttaaaagaaaaaacaaaaggggaataaacagcacttcctaccctggaatctcgtcatttataaaataacatgctcaaatgtcagtgaaaataaacagttgataaacctgaaaacaagtcttttaatgagttcaggttacaaccgaacacaggattttgtaactgggaaagaacagcttgtgtaacaaccgattcttaccaaatacaaataaatataaaagacaacttaaaaacaaactgtataatcaaaatctttccgtaaaatagcagctttcacaaagtaaaaacaatttagttccacagagttgtatgctctgtaggcatatggccaattttcttccgagtccttttgtcttgcactatcaaaatagaatctttgtcttggagcaagtctgctgaagaaggcaccaaaatcctatcctccctattcccctaactgatattaataatcctcttatcaatcattgcaaggtaacttcaatgtcattaagtattaacattctaaatatgtaaagctatagaaggaaggtcctgcctattctctttgcccctctcacatcattctagtctggtttaccaaacagaaccaccagctaggaggataaaaatacattcccatgttcactagccattaaatgaacatagccacttgtgcaggaagcctaacatttttaggatttcctaactttttaaaacttaaggataagtccatttctacaagctaattttacagctccttaatattcttaatctggacagttaattttgcagactttgttggtgtctgccttttcaattgttttacccaaaaagaggccttgaaaaaactttcaaattcaggaaacccctaaacccctgcagagaaccctcatggtatgtgagtgtgagcactaagttgaagatactcttatttcacagaaattct

SEQ ID NO: 139733 - DNA, 993 bp, Homo Sapiens
tgtaacagcactaatagcaggagcttttccccaacttggaccaaagaagctaaggcaagagagactcgcccaccagggaaggacccagctctgctgcaggaaggggagagaacggagtcgggttgtacttttactcagaagcacaacgaccatctaacagagggacagagtcatcagggacacgctaagaagatggtgggtgaggttcctgtcctcaccttaggatggcatcagggacctgcctgagcttcaaagatcacacctgcaccaaaaagccaggttaactaagagaccttaacaccaagagggggccgaccgctcctctgagtaagcgctccttcagcgacagagctggcgcctcacgtatgcttgcggcgtaaggctacaggtgagcctggcctgagcatcagttctgttctttgcttcaagatcaccaaggtagatgaagaaagtcagcttgtggcatcctctatgcttcaaatatttcaaacaggaactcccggcaacatagggacattcacagctgcctctgaggtctctgaggagtctaggatagtcaggattgttctgtggcccccaaaatacccaaataagtggacgaaatgcccatgacgtagtcctattctctgctgcttctcctcggggcacagtctgaccccagtccaggacagggagagggaaaacgccatccccgtttcagcagcaggagaggtggttgagaaaggcctggctcagaagctccagaactgaaacaaaggaaaattggaaatgatacctgacatgcaggtgaaacctagaggagaaggccacagacgctggaagaacttggtcttgctgtctcttccactgacagaggcactagaagcttcactgaaggacccgcatgtcagttctgatggaaacacctggtgtttacaaattatctgtcaccacagactctggacccatcaacctgccgacggctgactgcacacagacgtcagacaagtcagt

SEQ ID NO: 139734 - DNA, 996 bp, Homo Sapiens
cttttactgtagctttattcagtagggagtggcaagttgcctggtataaacagtggcacacactttcgaagttgacggggggaattctgacggaggaactgatgatggcatggaagaacttttcagtcatctgaaggaggttccgctggttttcctcaaggctctctgatggttctaacctggtaggatccacttcaaagctaacatgttgccaatcagaggatgtgatcacaattcgtaataaaggatccaggagtttttgtagataggtagcaccatataccttgaaacagaatgtcattattttactggccaagctgttgcctcggaagagagtctgcgtggagtctgccaattctacttctttagaaaacatgttccagagcagttggtagagtaaatgccgagaatcaaacagagtaaccagaactcgagctagttcatcccactgagaacaaggaaccacattggccagagccatcgttatagggagttctccttgatcacccatcattgtgaccagttccaccaatctctcaaaccgatcagccaatactgtttctgcaagtgtgtcaaattctgtgccttgttgaaggatttttgtcagaacttccataaatgtagctcttgtctggagatccttgtggtaacctaagcctatggagtgcatgagaccactgtctacgttggcattgagtaagtttgacattgcaaggaccgtacagtgcctcagtgatgccagcctccgagacatgccacgtttcctgccacctgtttgcgcactttcatcttcaacttcactgcagtcattcaaaaggttcataaataatgtgaagtatttaagaaataactgtgatttggcttccatcaattccacaccatctccttcttcaggctgcagagggagaccagctagaagtgaaactactgcttccatgcttgcctggtccaaatctcttgtaagacattttacatcatcatctgctgcttggttcc

SEQ ID NO: 139735 - DNA, 515 bp, Homo Sapiens
ccatacaaaattccccaattttgtgaagttcaccaccccttccagtataaagtgtcagacatcctttccacatggatgcataccctctggtcaaccgaataatatcccctggctgtaataagacctccggatctcatccccacacggaaaatagtgatgctgcccgttttaatctgctactttgcacgatctcacttcatggccgtctttggttttggtcacgcgtcctatctccaggacaataaagacgacatttaagtttttcagtccgggcttaatatctcttataaaaataagtgggtcgttgaccctattcatattgggacaggcgcggctacggctgcggagacgcgagtgggcagggcggggtcaaagcttcccaccctcccgggacaggggcgaaggcagaggggcgaccttgggcaggggtggcgagagaaggggcagaaagccgttagtcagggaccgggcaaaccagcccggacagcactgagcctaaaaaaagaaaagaaaga

SEQ ID NO: 139736 - DNA, 179 bp, Homo Sapiens
aggctcagtgctgtccgggctggtttgcccggtccctgactaacggctttctgccccttctctcgccacccctgcccaaggtcgcccctctgccttcgcccctgtcccgggagggtgggaagctttgaccccgccctgcccttctgtcgtcttctcgcagccgtatagtagtagtaggc

SEQ ID NO: 139737 - DNA, 1054 bp, Homo Sapiens
tttcctcttttaaaaaatgctttatttctctggcaggcttcatcggaatcacaattttcatttatttagtaactgttgttgtttattctatgtatttttgcaggaggcctgaggtgggctgtgttctcctcctatggcagggcttcactctcctcctcctccgttggggcttcgctgtccccagggtccctgttgaggatcttgtcctcattagatgacttcttgtgcagcttccacgcatgattatttattcttgtggcactgagaggtttgtacatatctttaaaccaaagcggctgtccaaatgaggaaagtccatcctagaagatagaaagggaaatattaattttgcatgtcctctgctttccctggccacagcaatgaatcctccaatgtacctgactctcccttcgcgaagagcatcccctccgtggcagaaatctgaaaatgcccctggggagacacatgcacaagacagtgagtgatgcagccgtttcccacgtatctcacaatgtacttctctggtcttattaggactaaatgagtatctcagtccataatcacagggagaagcaccaccacagaccacatacctggggtcttgaaaataattccatgcatgtgggactttcagaagctctccatgtctgtccagaagggccccacaatatactggggggactttgtatgtggctcagcatggagcaggggcaggatgttcattcccactcatccccttggccaagtgcccttgtgcagtgaacaaactgcacaaccatgctgggcagaagcattttatatcagtccccttcggacttagtctcacaggcatcatttgatggggggtgggagatgaagtggttcttccttttctagatactttattctataagttggatcacctcaagcaaatgcctgagtgcagctagccaagttctctatctcacagtcttcatacagctggctgtcgctgatgagtgagtgagctgcgaaatcagcttaaaccacaacatgttatttttgaatttgaataaaataggaaaaggcattaaaa

SEQ ID NO: 139738 - DNA, 379 bp, Homo Sapiens
ttttccatcttttaaaaaatgctttatttctctggcaggcttcatcggaatcacaattttcattcatttagtaactgttggccttgtatccacccctctctggcactcaggtctcacttaagagctggctgtctgagctgtgatttgcgatcagtgagatggagacagaggcagccctaggcagtcatgttttgttccacctgaccctgggcgccactccccctcccaggctacaggcaggcatgggcaccagccagggagagacaggtcattcatactcttgcccagcagaaactctgggcttagacaaaactgctcaattgaggacaaactgggcaaagtagaatctttctttgggagtttttagaaatatggtggg

SEQ ID NO: 139739 - DNA, 473 bp, Homo Sapiens
ttttttttccaaaaacaatgttatttaattgtaaaatctccaccccctgagcatatgttttcaggtctgggtgactaattagactgggaaacaagggcaggaacgatggccctgtgcttgctctgcccgctgcctctgtggatgtgtgggccgctggcttcagtcctgcttttttgatggccgttgtttacgctatgtatttttgcaggaggcctgaggtgggctgggttctcctcctatggcagggcttcactctcctcctccgttggggcttcgctgtcccttgagaatccttcttcatcttcttgtaatgaccttcggtgacaacagatctcaatgaggcagagaagtataatcaaaatcgttagtattccagtcacaattaacgccaagatgagttttttggtatagccatatcctggaagttcttttgtgaactcaagcgacttctctttctgttcactctgggcttc

SEQ ID NO: 139740 - DNA, 253 bp, Homo Sapiens
tgtgggaacagtaaaatgttttaatagctgaaaagatcccagaaggtcaggtacacagtcacatgggtcaagcaggactcactttcctaggctgattttgagttcctttccataattctgtaatgtgggaagaaatatccaaactgtgaactgagcttcttactagtgtcctgaaaaatatttccttaaaaaagtgcataaacttgtctgagggaattaagacaccaggaagaccaagtgttgatgaggctgg

SEQ ID NO: 139741 - DNA, 543 bp, Homo Sapiens
ttttttttcatgtttcaaaatatttattgaaaaacaatttaccatgacattcctataccacaaacataccactggattctaaataaccaataaaagtatacaaagcctatcctgaaaatatctttggaggtattaaatatataggcccatgaggatagagctgagtaacttaaaaatgttagtccttggtcacaaagactatttggtaattaataaagaagtgcctcttgacattagactgcaattaactgaggggtggggggcagcttcataaactgcaagtacgtcaatttactctttccaaaatttaaaaagaaaataattcgatttgaggagtaaactcaggtttctaaatcacacagttaccatcttagggtgtgggtttgcttcatctctttcagtacatcccccaaccaaccccctcctagggaacttaaatgcaatggctcaaaactaataggactgcaaataacagcttcaaacaaggttgggaagttcacaaaagtgcttaaaatattaataaaatttgaaatctcctcgtgc

SEQ ID NO: 139742 - DNA, 657 bp, Homo Sapiens
  misc_feature (470)..(470): n is a, c, g, or t
aattcagccaaggattctgatgaatttattattcctaaaatgaagccagttaaaaagtaaacgatgtacaccagtgaagtatattgtcacgctgacttttgcataaaaagatggcctgctgtttttggagtgatgaatgagcactgcaggacaaatcagaaaaaaatgtcatagaatgtattaattttgtccataagttatactttcttattccatgatacggctttcactctgtaaaactttgtccccaaaggaactttaaatctgttttgtgcctttttggcttgacagtattctttttccattacttttccaagtacccagggtcttctagatgcacctgaagctggtttgagatccagggcaggtagagactctgaatgtagaaaatataaagtaggactaacagtaaataacacataattgtcatggcgttcgtctaggatgatgagtaccaaatctcccacctngaaaatctctaatagctatcttttcagaatgccttgaagatactgaagacatgctctgagacatcagtctttgatttaaccgtttattttcttcttctttcaattgcaatgttcgttctaacagcattatccgctgtttttcttcagacaacatatgaatattttcttgtacagacatcatgcttgt

SEQ ID NO: 139743 - DNA, 749 bp, Homo Sapiens
  misc_feature (236)..(244): n is a, c, g, or t
ttttgctttgatgatttaatgtgggaaaatctattaatatacctcatcaaaacatcaaatgagaacaattatatgaatgctttaatagatgcccaaatggtatactgtttaaagttccagagccatttctaattcaaactctttaaaaactaaaagagagacactgtctttcagataaagactatctaactcccaacagcaaacttaaaactatggacattcccattaaaataagnnnnnnnnntgtctaacatcattattgttaacattgtcctaaacatttcagataacaaaacatgcaataaaagtgaaataaaactatcagaagaaacactatcattattcactgatgatactgaagtttttcctagaaaacccagaacttactgaaaaaagtatttgaattaagtgactacacaccaggaaaatatcaatttatcgtctgataagactattaagtatatacctatcatgtctctccacatatctccactactattacctggactctagttagaatcactattatttttttgtctggatcactgcatcaggctcctaattggactggcttccctatctccagcctggtgagattttacacactaaggagatagtgatgtttctaaaaccaaatctgatcatgtcattcctttgcttagatcttctcatcgattcttatcatatttaaagtaagatccaaattccttattatagccttatttatgtggcctcgtgccgaattcttg

SEQ ID NO: 139744 - DNA, 623 bp, Homo Sapiens
  misc_feature (446)..(480): n is a, c, g, or t
  misc_feature (512)..(512): n is a, c, g, or t
tttgactgtgaagtatacattttatttaacattccattaataagccatatttacatatataaatgtatgaagtcttaatataaaatagaaaaattgcctggactgaaacaatcactccatatggagttactttacttattgaagaccttctgtttacataaaaatttacaataatttatataaattattttctcccaaactagatatttaataatccacactattctgatgactttacaaataggtgtacattaaaatcttcccaagaaattacagcatttttctgcgtaaaatttgctttggataggaagacagtttctttctgttccttccaagacctgttcctgtcacttctgtagtttttcttggtttgctcttgactccgtcagctgggctagccaagggggaaatcagccgaatttctatgggaggaggtgaccaagcannnnnnnnnnnnnnnnnnnnnnnnnnnnnnnnnnngacgtcctgattcgtttcgcttttggctttcncagagtttctactgattgtgcatcatctttcagttcatcttcaagcttgttcttattggatgtgtttttttgtctgctccttacagcaggaggtgagatgacaaactgaga

SEQ ID NO: 139745 - DNA, 450 bp, Homo Sapiens
cgttctagcaaggccatcttgttgccggacctttctgcaccaaactatgagcctttattttctccagcgtcagaagttcctaggaatagcataataaagatgatgcactatcagtaggaactctgggaaagcctaaagcgaaacgaatcaggacgtccataactagacaagcaagcaagtagcacagatataagaaagtgcttggtcgcctcctcccatagaaattcggctgatttcccccttggctagcccatctgacggagtccagagcaaaccaagaaaaactacagaagtgacaggcacaggtcttggaaggcacagaaagaaactgtcttcctatccgaagccaattttacgcagcaagatgctgtaatttcttgggaagattttaatgtacacctatttgtaaagtcatcagaatagtgtgcgattactcaaatctagtcttgc

SEQ ID NO: 139746 - DNA, 533 bp, Homo Sapiens
gcatgttctcatttatttatgggatctaaaaataaaatcaattgacctcatgggcatacagagtagaagaatggttaccagtggctggtaagggtactgacggttgcagggggaggtggggatggttaatgggtacaaaaacaaataagataaaaagaatgatctactatctgatagcacaatagagtgactataatcaataataacttacttgtatatttttaaatgatctaaagaatgtaattggattatctgtaattcaaaggaaaaatgcttgaggggatggatacctcattctccatgatacacgtatttcacattgcatgcctgtgtcaaaacatctcacataccccgtaaatatatacatgtactatgtacccacaaaatgtttacaaaataagtgagacattctaattaaagacttgagatcttttctaaataatgtatatacatgttttgtgatctgtacacacttattctccaaatcctagctataatccaaacagatatgtaaaatcagttgtataacagat

SEQ ID NO: 139747 - DNA, 343 bp, Homo Sapiens
ttttctgtggggggtttatgtatttattcattaaaagatctgtaaacaacattttatacaaatcttgattcttttacaaaaatatccagaattcctaacactttacagaaaacacaacagacctaaggaaatgaagcagcttcaggctgcgaggatgaagacaccattgctgaagcaaaggtctcctcctagagggatagccaggatccatcacagtaaacccttttacccccattttataaacatccaattattaactgttcctgctgggttggagtgtaagaagagaccaaatggagagatgtctagtagaagccccactgggggtaacctgcttaacatt

SEQ ID NO: 139748 - DNA, 592 bp, Homo Sapiens
  misc_feature (569)..(569): n is a, c, g, or t
aaaaattaataccctgggtttattatttataataaattctaattactaaaaattacaagtttcttatattggctactaaatcatacatctaaactaatcaaactgctggtcacatctgtatagaccctttccctttgacagaaccccttctttctaatccatttaggaagcttcaaagaaagtttattctctagcagtccatggttgtctgccccaccctcttcaggctccagaagactctcaaggcaaaggccaggaagaatatcatacgtttcacttcctacctgacaatgaggtaatcatcacattccagcagacactgaaaagctgaacaagggaaaccttatccctgctctagttggttgagtctctcctctcttcctctcatcactgttgcccacgtactgacttccttaagaaaggctgtccttgagaacatgggagcatctggtttcctaattttcacaatgcagatcaatcaatgactctaagctgagtcgtcctccttatcctgacttcaattttagggtacctctttgcttggtgagtcttcaaggtttacatcttanaaggttaagaatggacctgagaa

SEQ ID NO: 139749 - DNA, 346 bp, Homo Sapiens
accattgtactccaccctgggcaacaagagcaaatctctgtcttgaggggggaaaaaaaccacgcaacaatggaatacatatatttaaataactgcacataatacaccctccatttttgttaccaagagaaagcttccatcaggtagctttaccaatacatttccattcccatgaaatgcaataccacagtactaatattctattcagaaaaagactacaattcccttgtaactctttttctttttcccttgtaactctgagttctttcttttaatcgttcaggccacataggtaaggccattttagaaaaggactgctttcaagtatctaaatatacttccggag

SEQ ID NO: 139750 - DNA, 172 bp, Homo Sapiens
gcagtttgaatttatattttattattttgaaatacaaaaatttaaaaacatttcaaaatacaccagtacatgtttgttgtaaaaatttcacctaggaggatataaaatagaaaagccgaatattccttctaactctcccctctacctcaattcccttcagaggtaacacagc

SEQ ID NO: 139751 - DNA, 450 bp, Homo Sapiens
tcactttcagtatactatattttattaggtactgctcagacagacctccagtgatttttataaatttggtacttcctaatggccacatcatctaactgtgggatctatttcatttctggaaataacacaacttagttctagggctttcatgcacatgaaatataaaacagcttagttgttctgaaaacatgacaatggttaattttattcaagtcccaacactgagttcagagcacttctccataggccccattaatctctccaggtttctgggagtatcattaaatccctcggcatccttaagaagcaggtgcttagcaaacatccagtttccaaatgagagtcagaggggcttgatcctgaaagtgtagtattttcctgccttgtcctactggtatagcttcttggacctaaaatctctctcctgctgaggcctcatgcagctgcaca

SEQ ID NO: 139752 - DNA, 563 bp, Homo Sapiens
acaaataatgtaatttattttccatatttaaaatacatggtgtcaacctcagctaagcacccagaagtacactgtcaccctcatctgagaggtgtaggactgtaagggaatgtgtttgggggtttaggaagtcacttatagacacatgaaggtggagatgcctgtttgatgtcccagcagagagctgcggagacaactgcacacaggattgtagagctccggggcgaggcctgcaggggacacggagccatgtaggtgggtcaaagccgtgagatgataaggttcaaggtgatttgagtctaatcctgtttttcggaggactggaatcctttaaagttcaaattacaactaaatacctccctgtcctacaggaaaagccacacactccattgtgcccatcatttcaggggtcagtgtcactctgactgagcttttctggtcttctccctcacctgtatattacaggtgggctcactgaggttcacagcgggggacgtttcaccaagttatcctgagaagctccgagttttgtaagaaggaagagtcgctgattttcatgtgat

SEQ ID NO: 139753 - DNA, 496 bp, Homo Sapiens
catgtatacgtgtaactttctttttatattataaattacaacatttacaaataaaggaatttatctcccatatttcaaatacatgctgtcaagtttggctaagtccccaaaagtccacagtcaccctcatctgaaacgtgtaggactgcaagggaatgtgtttgggggtttaggaagtcacttatggacacgtgaaggtggaaatgcctgtttgatgtcccagcaaagagctgaggagacaactgcacacaggattgtagagctcagtggagaggcctgcaggggacatgggtaggtgggttaaagctgtgagatgagataaggaaaagcagtgggtgtggacagagacaagaataagttcaagatgatttgagtctaatcccgtttttccattccggtatttgtgggtttttttacatttttggaggacaggaatccatttaaaattcaaatcacacctgagcatcaccctctcctacaggaaaagccacacact

SEQ ID NO: 139754 - DNA, 771 bp, Homo Sapiens
  misc_feature (164)..(183): n is a, c, g, or t
  misc_feature (383)..(419): n is a, c, g, or t
agaaagtggtataaaaattttattttagatggggaaaggtagaaaatactaggttaagtataaagggatttctttacctatagtacttgtcagaaattttatggtgctgtttttgagtaaaagaaagtcacacagtaacacaaaatggcttccaaacatttgannnnnnnnnnnnnnnnnnnnagaagactttatgagacactagcattccacaggaaacactatgggagaaactgttctcccacaaaaataatctcttcttcctttctgttcttgcagctgtcaatatagatgaagcatcccaaatctgaaatctgaaatgctccaaaatatgaaactttttgagtgccaatacagacgtgacactcaggggaaaggctcannnnnnnnnnnnnnnnnnnnnnnnnnnnnnnnnnnnnctggcaagcattaatgcaaatattccagaacccaaaacacttctcaagcattttgaataagggatgctcaaacctgtacttctgagttgtctcaccaactatattcaattttttaaggctgtcttgtcctgtccctttacacaatacatgtatttagtttggttactttcagctcactgaaagtgaagtgaaaaagaagattcaccagaacttcacaagcttccctcaaaaagccattgaaaaagattattctgagtcagggtcatctgttaaccaatataaaaggatccgacccacagataacgttgtaataaagcagtattaggccaggcgcggtggctccacctcgtgc

SEQ ID NO: 139755 - DNA, 341 bp, Homo Sapiens
ttttttgctttacaaagaaagaagtttactcttcataaaaaccaagcatttgtgtgcactggtcctgcgggagtctggtgggcgcggccatggcgctctcttacctgtgccgggttgaagtccatggacggctgtttgcagtcctgggcgcggtgaccagtggccccgcagttgtaacaagataggttcccgctctttttgtgactggaaccattgctactgcccaccagtccttgggtctggtacacccctgctgtccctgccatgaagttctgcatgggtggcacggcaaacgtggactgcccactcaggacagggtctggggtccgctgctgctgtaa

SEQ ID NO: 139756 - DNA, 156 bp, Homo Sapiens
aaaagggagtagccaatatccatttttgagttttctcaaacaaataataaggatagcaaactaggataagaaaacacattagaagacagccttctacttcgtacaacttctagttaccttttcctatccattcacctacttctgttcagcagcaag

SEQ ID NO: 139757 - DNA, 738 bp, Homo Sapiens
actgtgagagtgtccataggtgtcagagttgtgtacgtctcagctgctctgcaaggttgaggggccatcacagggcgcctggctcagtgtccccagcacacccccatttcctctccccaaacttcctcttgtggggacctctggtctgggctgcctttgtcaggagcctgatgcctttgtgttggacaaccctgatccgtgccgtggctctgggagctttgcccgtgggtcagctccccgtgagaagctgccatgacaggtaacttccgcctcagcttgaagaacaatttggagatgggggccttcctccctgcactctgctcagctctaacttgcacaatagcctcatggctcaaagtctgggcaaggccctagcatacacttcatgggagccaccagaccccaagagtgggcttagggtggccagaaggcagaatgttccagatggcctgcttctccccagggagtaaggccagtgctgtctcaaaggctcagaatggggtacacccaccagataccacactggctttgtcccaacccagtgacatcttagaagtacagctggggtcaccttttccagaatgcacatcgcgactggaagaccagctctccaggtctcagtggcacagggcccttgcatttaaacagccttagacacacccttatgcctgatcccaaacaccctgagatgaagctaaggcgtcaggagagctctgggatgtgcttcagttttcaagt

SEQ ID NO: 139758 - DNA, 1133 bp, Homo Sapiens
  misc_feature (477)..(477): n is a, c, g, or t
  misc_feature (718)..(764): n is a, c, g, or t
  misc_feature (976)..(1032): n is a, c, g, or t
gaggagggccaaggggacaattccccctcaatagggaaaaaagttcccgccaagaaagtggtctgtgccccgagtccatgagccctgtttatagtggaacttaggatgaacagtcaaatttcggtcccagatctgtatgcttccattctggcaggcagctgctatgaggtttccatctctactatatgtgcacgtagtaggaatgacttttttgccttgcatcgtccgtggtttaaacacacttttttgcttctttggattttcaacttcccacgtcctcacagtcgcatcatttgagcaagtcataaattctccctttattttgggatgccatgagccagtatgaagcattgctgtatgacccttggtgttggccatgtccacaatatactggtctccttttatacattccattacttcaaaaccatctctgtcaatcaccttggcctgagagcttccagatacaaccaagaatcnatgtctcctgtgttactatactgtaatgacttgatctgatggcactcacagggctgaagggatcgaaatgccttaaaagaagcatccattccagcaaaatcccaaaacttaacatcatagtcatatcctcctgtcaccaaacgggcacctgagggatccagacccaaagcagacactgttttagtgccatgcttcagcgttatctcatgcgagtcaggaatcttgtgaacaggattttccnnnnnnnnnnnnnnnnnnnnnnnnnnnnnnnnnnnnnnnnnnnnnnnattaagaggtggaggtaaaggaccgaggatatcttcctccataaaattaactggttttcctaccattttagggggtaaaggagggccaattaactcatcatcagaagagtcagaactctgttcactttcactgctgctcgtatccctggaagatgatttggagcaatctctgaccacatttgatcttgaggatgttggctcaatatcttcannnnnnnnnnnnnnnnnnnnnnnnnnnnnnnnnnnnnnnnnnnnnnnnnnnnnnnnnagtgttttgcgacttctttccacagctgtccttcgagtttgttcaaacattgcttccaagtcaaatgtgcgagcttttttaccgaaccccgtgaagccccc

SEQ ID NO: 139759 - DNA, 1520 bp, Homo Sapiens
tataatttggggggttcaataggatccggaaaaaaaattcatttaatttaaattttcatatgtaaaggaatattacatctttccaggtttcccatagaaggaaatccattttggtatgtatgggtatatccccagagagggagaaaggccaaagtagcgcataaataaaaatacatacattttattacctattacagtatttactcttctacacacttctcagttcatgtatatacgggaggtttcttacatcctgcatggatgcctgaggttccaccactaaggagtcttgtccctaagtgaagaagtcattaaagctgtttatgtaaagcctgtgtcttggagacagggtgttatctctttatcagtcacatgcattgggtatgaaatggccgattggattggctggcgtgcctgtcactccacaccgccctgggaccagacagctttggtgaccgagctggagaggggctccagagctggactgaccctgagaaggctccacctcagagcagcacagggaggagatgaggccccactggtttccctggggccaggcctcatgtcaaattgcagaaacagcctgaggacagagccatggagagctgaggagagggcaggcttgtccattccaacttccatctctgcctctgacccacatctgtggaatcagggcggtgaaccagaagcctctggagtttctcagtgctctgatcccgtgaattcctcctctgtccccgtgatttcccaatgaatggatgcttcccattctcaccaagtgcctgttgaaactttcctcagcctgacagctttcttctgttactttcaaatgatgacaggctcccaggaggaaagtttaggtaaacctctcttcaagtgctgcatcccagaagtcccaaagaactgtctacctatgtggcgctctcaggacccgggacgtgtgatcacggtatctggggatcagccagcgctgcgccctggggaggaggtggcgccgggttactggctccgggctgcgtcccctcgtctgggtctgtgctgttcctgcacttcataacgtaattttcctcttattccttaaggctcaacaagtcttctactgctctcagtcactttatcctgggagtcggatgtttgcctggttttttagtgcaggtgaatacctacccaaaattgctatgtgattttcaaaatgctaaattccgtagattctttgagaccagtgactttcactctttcaatccatttccattgggttgaaccagtgttttgcaacttctttccacagctgttcttcgagtttgttcaaacattgcttccaagtcaaatgtgcgagcttttttaccgaaccccgtgaagcccatggtgaccgcaagctgcgggtccggtcccgatgcgtctgagcctgtcacttcgctgggcccagagcgctccatggctggccgcacgccgcagaaccagccacagagacagcccaaactgccctcgtgccgaaatcgccacccaggcctcgctaccta

SEQ ID NO: 139760 - DNA, 874 bp, Homo Sapiens
tgtcgctgtggctggttctgcggtgtgcggccagccatggagcgctctgggcccagcgaagtgacaggctcagacgcatcgggaccggacccgcagcttgtggtcaccatgggcttcacggggttcggggttcggtaaaaaagctcacacatttgacttggaagcaatgtttgaacaaactcaaagaacagctgtggaaagaagtcacaaaacactgggccaccaggaacacacctgtagcccagcaaagttgaggccatcgactggctctatcacaacaaggaaggctgtgcaccactgggacccagcagcagctcagcagcagcagtgagagggccttgggaaagacttggagggtttggcttatacaagaccagattacatgaggggtattgatttgccttgcccccgcccccaccatcacagtgtgtccctgtccagtgttggtgctgtgtggcattgcttgtgtccataggagtccatcaaggcagagcggcagagcggcaagcagagcggcaaggcaggtcagcttccggctcttccaggctgcatgtccccctcaatatcctttcaacccaatggaaatggattgaaagagtgaaagtcactggtctcaaagaatctacggaatttagcattttgaaaatcacagagcaattttgggtaggtattcacatgcactaaaaaaccaggcaaacatctgactcccaggataaagtgactgagagcagtagaagactgttgagccttaaggaataagaggaaaatcatgtactgaagtgcaggaacagcacagacccagacaaggggatgcagcccggagccagtaacccgggcgcctcctcctccccaggacgcagcgctggctggtccc

SEQ ID NO: 139761 - DNA, 949 bp, Homo Sapiens
tttttttggtttcagaacttttatttggattctttccttgtctgttaataatataggctgcacctgggcatcatcgtgcccttcctttttgattctgctgttttgcttttaatcctacaggcatttcttctggcaggagccttgtacacactctgggtggttcatgaccaccacggacttgccctttcaaggcagaagcctgtgattcaaaaacttccattccttccaatcgactattataaaactcattttgtctagtgcccatactcctttaccttaggatcctgggccaactgtcactaaagaaaacaaaccatttcctcctcctgggggaatgtgcttctttcaagaaggtgcttagagaatagacattctaggtgacagcagttatgaaagaggtgtctctaatgaacctaacacttcttccaacatactccaggttcaccctcctttgaagacagaaagtactacaacttcagttgccaccctagtcaggttcataggatttactcagtaggttaagagatggtgctgagaatgaagtccagagtttgagtctacaagtggcatttgcttctcctttgggacttctgtggcagggtgtggaaccaaatcagattggttgcatatctgtttctcttcctgaaaatacaattcaaataccttcatagtctgtgacagcaacttataaccaacagacaatggtattatttttatttattgatggcactcccccatagccagaacttctactgagtcattcatcgtgtattccaggaatactttccaaatggagtagtgaggcacttccaataacagttatgtaatctgttaacagtggctcaaaatgacatgtgaaggaatgatgtacttcttttttcagactcacagatctcatatgttaattcagtcaacaagtacttagggcttatcacatgccaggcacagg

SEQ ID NO: 139762 - DNA, 694 bp, Homo Sapiens
  misc_feature (255)..(263): n is a, c, g, or t
gtaaaatgtgtcaatctttttaataatcacttccaggtctttaaataaccgttaaaacaaacttctcctttgttataacagagtttactcatattttttcaagtacttgcctggcttgcttttggtttgtttatttctattgtgataaaatatacctaatatttatcattttaaccactcataaatgttcaattcagagacattaaatacgtttacaatgttttgcaaccatgaccactatctatactcaaaacnnnnnnnnnatcattcccaataaaattctgtgcccattaatcaataactcactttcccaacctctccccaggccctggtaacctcgattttatgttgtgtctgtaaatttatctattctaggtagctcagttaagtgaaattatgaaatatttaaccttctgtgcctagcttatccactaggcataatatttccaaggtccatgttgtaggaaaagaatttcattcctttgtatgactgaatattgcaaatacatactactctattgcaaatatatgccatttatgtttatgcattcctcagttgatggacacttggattgtttccagctctgtggctggcttttgtggataatgctgcaatggacatttgaggtttcaaggaatttgtcccttggttcgaggttatctaatttttaggcctacagctgtttattgtatt

SEQ ID NO: 139763 - DNA, 1061 bp, Homo Sapiens
  misc_feature (60)..(89): n is a, c, g, or t
ttggatttgcaaatacagtttattttacagaaattcaacattataaacagcaggcacttnnnnnnnnnnnnnnnnnnnnnnnnnnnnnnatctcccaggtgcagaccatgctatgcagagagtgagcagcaacgcggccctactgctttggagtgagagtcgaaagcgatggaacctgcctgcaccacatcctgcctgccccacacacgcacacgcctgctcgctgcgcaggccaccacagtctgtctgggcccagccagcgctggaccccattacatggatccagcccagttctccaattccttcatgtcgtcgtcctcctcttctttcttcttggcgggttttgatggtagggctatagagggaacatttggtagagggactgtttcgggtccactgatttccagcaaattcttgtctagttcctcctgttctagttcttctaattccgccatgagctcatcctcgtcaaactcttctccaaaccctacaggtttcgaaattgctgttgaaatctcctctgcaagttcttgctggtcagcaatgtcctgcattaactcatcaactttatcgatgtccatgttgtcatgggccgccttcatggccttggcggcatagcccatgttcttgagcacctcggtgttggtgttggcattctccagggcctcccgctggaactcgatggttgataatgtgccgtcgatctgcgccagctgcttctcatacctcttcttacgcttcagtgcctggagggccgcgcgcttgtttttggtgccgtgcttcttggcggccgtcagctcctgctcgattttcttctccaggaactcctgtttcttgctttacatctcttccgtgtcccgcagccgctggatggcctcctgggggtcgggccgcccttgccggccttaccccctccagccccgaacagcttcccgacatccgacatggttgctgcatcaccgcgaccggcaattcgccgtacgctccggctcggctcggctcggctcaggctcggtcggctccgcgccacgctcacacagtcccgccgctcactgccgcca

SEQ ID NO: 139764 - DNA, 905 bp, Homo Sapiens
cagtcgacggtaccggacatatgcccgggaattcggccattacggccgggcggatgtctaggccaatgataattatttttgatgcagtgtggattagttcttttgttaaccccactgtcttggggaatgatgccagctgggaaattgagtttttgactgaaacatggagccttcactgctttttttctggttcctatgaagatttggaacatagaaaacacaaaaactcaccttaaaatttgagcaggtcgttgatggcaaaaataattttaaggaaaaaggaatattcttatgtagttattctaaagtttaaggagcgttgttgaccataatattgcttagttttcttactgctgttaagtaagtaaattgtttcaaagtaggttttgtgtgtgtgtgcctagtgtaaaagaactgaaattttgatgcttacagcacttggctcgtgcatttgtatcaaaatttgcctgcctctttatgagggaggcctgcttttcacacctcagtttatttaatacgaggcaagttgtaagacaacactcattctaggtgattctgtggtgccatgaaatttaaggtaatttggggaaaaggattagtcagttttatgcaagagtcacatcttttgagctttcgattatcagtgtagtactgactaaaaatgaagtaataccttaaagcattataatttttagtatgtctctgaaagaatcgtggggacaaaagtgactgacatgtccaattcatttcgaataaaaagctaggatttttaaaagttcagatggttggtacagatacagtaggaatatggacaaagattcttttagaggatatttttaaatacggttaagaattaggttgccgtaaaaataaagagggttaaaaagggtgggaaggttaaggtg

SEQ ID NO: 139765 - DNA, 1060 bp, Homo Sapiens
  misc_feature (939)..(939): n is a, c, g, or t
cagtagagacggggtttcaccatgttagtcagttgtttgagagccatacgggtacttcagaagaacggacatgtgccaagtgatccagctctttttaaatcttatgctgaatatggccactttgtggacattaggatagcagctttggaagcagttgttgattatactaaagtggacagaagttatgaagaactgcaatggctacttaatatgattcagaatgaccctgtaccctatgtaaggcataagattctcaacatgttgactaagaacccaccatttactaagaacatggagtctcccttatgcaatgaagccctggtagatcaactttggaaacttatgaattctggtacttcacatgactggaggttacggtgtggtgctgtggacttgtacttcacactttttggcctcagtagaccttcctgtttacccttgccagagcttgggttggttcttaatctaaaggagaaaaaagctgtcttgaatcctaccataattccagagtcagtagcaggcaaccaagaagctgcaaataatccaagcagtcacccacagctagttggatttcagaaccctttttccagttctcaggatgaggaggagattgatatggatactgttcatgatagccaggcccttcatttcccatcatttaaacatgcttgaaagggcgtcaactccagggctctcgaaatatcgggcagctagctcccgatctgctttaataccccagcactcagcaggctgtgacagcacacccaccacaaaaccccagtggagtttggaacttgcacggaagggaacaggtaaagaacaagcacctttggagatgagtatgcatccagcggcaagcgctccactctcagtctttactaaggaatctacagcctccaaacacagtgaccaccatcaccaccatcaccatgagcacangaaaaagaagaagaagcataaacataagcacaaacacaagcataagcatgacagtaaagaaaaggacaaggagcctttcactttctccagccctgccagtggcaggtctattcgttctcct

SEQ ID NO: 139766 - DNA, 418 bp, Homo Sapiens
gtttgtttgtttgcttcattgttgattgtgtattttcttcattcctggggagtactaacccaaaagcgtctgtctcttgttttctagtccagtttgagattaatttagaagaaaggaatactgtatgtgaaattcatcttgggctttcccctaaattgcaagataaggccatgtgtaagattttccctaaaactagaatatattaatgcatgtttgagaattttaaagcaccatggtcaaaaccagaagctatattttgcatatttggactcagccatccattaagaacccatgttgtcctctggacatatttatcaatataattgggttttaaatagtataaaagaaaacttgtgatctatataatttatgtatcaccttcattgtaaatttagcaggaaatgcatcacaattatga

SEQ ID NO: 139767 - DNA, 702 bp, Homo Sapiens
ttttgtaatcaattgttaattaaatttttattttgagataactgtagattcacatgcagttgtaagaaataaggcagagatatcccgtatacccttcaaacattttcccccaatggtaacatcttgcaaaactatagtacaatatcacaatgttgatttctacccctctacctcacttcagagcatatccatgtatatacattttatattttaggcttcataaattcctagtttaaaaacagtttacttggattgaactttgtacttttccaaggcattttctagtccactatttctcttaaggcttaaaacatctctgactaagtgaacaaacagatgaacaaatgaaacaaacatctatacaatcagaagttaagggaggtttgaaataggcactgccacagagtaactgttagagaaggagttccatggtacaaactttgcactctccatctacgaaaggtggcagagtccttgaagtgtttttcctctctccagccagtccccaccactactgataattaaatccttcttgtcaaaggacaggactggttctggaacaggtgatttcaacatcgtggtgagtaatattatggaagctggcaagcactgtataagatggatccttttgtgctcatcaccttaaggaactgtctcctgagatgtaaaataatcacttgtcctctttaaatgaatctcttc

SEQ ID NO: 139768 - DNA, 1626 bp, Homo Sapiens
  misc_feature (14)..(14): n is a, c, g, or t
tggctttcctgggnctaatgacttgactttggcaaggcattatttataaaaggctgttctttgatcttctgctccaagattctttctttactgtatttaaatcaaatgttttaacttcttcccccagaccattctgcaatcataatctgtattcatccacatttcaagccctctagaataaaaaattccaatagttgatttatacgtaaaacatgttagtgttattttgctttacataaacttataaggattttttatttaaaggatttaaaaatataacacagtcaatataaacatgtactgggaattataaaccattctttcttctaagcactggatgagatactaaaaacatacagtatcttaccaatagccattaaaataggctaaaatgaaaaagaaaccgttgtaacaaggttactaatcccccaactttcaatgctgagttccttcatcatccatgtgcaatccagagatgacatctagcagggtggtaaaattattctggaaaatgccaactgtacttggacaaaataagttaattctatatggttgtccattaaagttttatgtggctatggttccactggagctaaaaattggcttttaactgtttccaaatcagaactagcagaggagagaagtaaataaagccaatggcactcccttcagaggctcaaaatggttagattttgatgcagatttaaccttagcgagtttcagtcagtccatttagatgatcctgtaggttcataccaatacgctgaaccgttggtttaacttctccttccttcctcaaaggtttatgataaagagactcatccctgtattgggagtgactgacataagttcagatctgctcagagtggctggtaaggaacacttaaggtcagtcagaagaataatcagacagacttctcatgtaagcaccgtgactcacaactaagacactggctgctaatcctggaataccgctgtctgaattaactttagagctgtgattttttcctaaaggaaatatctctgccaaagaagtttccagacagttgcttggagatccttgggaaaactgttctttttgatccgcttctttcaggattagttgacccaagaaattccagaaaagtctattccacgcattttcacctggtccagcgtctctcctccgggcggtgtaaacacagggcactcttccctggctgctttggccatggccctcagctcacttagcgctttgccttctacaaccccgtatttcctttcccgaagtcttgagtcatactttaccgtcatatctttgccaaatttgcttctctccaaaattccatgcatggtctgctttgtcctcatgagatcactggagaaagcatgagtaaacttcacattattcagaaatataccagcagctgctgcttgtttaaatccacgtttctgaaagaggttcatctactccttgtccttggattattttctccttgttaaatcttgtttctccatgccggacaacagtcagagcgaagcgagccatgttcccggagccgcgtcccgtcggtggccccgcgccgcgctgcccctccccggccgtaatggccgaattcccgggcatatgtccggtaccgtcgactg

SEQ ID NO: 139769 - DNA, 881 bp, Homo Sapiens
ctgttttataaatattttcttatcatacttttattataaacttttttagtatgaaatttgcttcaactgttacaaacagaatcatttcctatggggtcccctccacataaggaagttattcctgtaattactattttttaaatagtcttcttaactgtgggaaaactttaccctcccccagcacgcacacacatactctcctgtgatgaggctgaatgctatccagtgcactggttcagtcagcaatctgcccatgttcctgggagaaatcagtcccagtccttttgctgtcatggtgtctccagagccacccctttctgtaacaagcattttgaaattcatccatgctcatctcatttggatttcaatgtttcctcccactcaacagccgattcggagttcttgggaattgttggaaatattgattgcattttacttcgaaagtcgttcatactgtgaactcctaaagctttccagactgcgaagctaatcacaccaaccccacaccatgcatacagggagccccagcccagagctcgcaaggcaagggaagacccgctttccggtaatgcagccgtggccatacttcccttattgaaccattcagggcttttctttttagccaatgataatgttgtaataaatccagctagcattcccgctgcagcaacggtaccaaggaaaattccacctttaaccaggaaaagccggtcattcgtggaccccggagcctccagcccagaggccggctgcccagttgcagcgcccgctgtctccatgtttaggtcgcctctagtgcgtccgtccccaactgggcccgggtggaagcgagaacgaggcggaggagcaaggttccgcttccgcctcctcctgtgcaatct

SEQ ID NO: 139770 - DNA, 402 bp, Homo Sapiens
  misc_feature (44)..(44): n is a, c, g, or t
aatttaaataaattaaatttaattcaatagaaacacacacattngttactagcataagtaacaaaaacttccaatggtttaacaaagtaagtaaaatgtgataagcatgtacagtctaagaattttctacatgcattcttgttaaactactacttttgctttgttcagactttataatacctttctccaaacagcttatccttgatttttttaaaaattcaaatacccacaagtttcagtgaatagattgtgaaataaagactatttctaaaaataccttcatgttcacattctgacagagtaaacaataagagttgagattacaggcatgagccatcatgcccagcctattttatatatcttattaaaactattttcattttgaagatttgtgcctcgtgc

SEQ ID NO: 139771 - DNA, 611 bp, Homo Sapiens
  misc_feature (47)..(47): n is a, c, g, or t
  misc_feature (157)..(188): n is a, c, g, or t
aatgtgacgtaatacatagatagatttttattactaaataccacgtngagtatacaaaatgcatcactgaataacagctaaaaaaagtccaagaaatgtgaaatacacattttttgaaatgataaaaacatatccatgaaaaatataaaatgttgcnnnnnnnnnnnnnnnnnnnnnnnnnnnnnnnnacaaatgaaaatcgtaaataagaaatgtatacaacagtgagtggcaaggcagtagttttacacagcggtcactttgttccagtcgatcgttagtgctatttacatcctgcgctgaggaagtctgagaaagagactccaatatagtgtcttttaaaagtcatttgcactgaaaatcaagagttttcaagttaactgaccaaaggttgagaaatcctttgtctgaagttgaaggaagacagagagtgggggccgcaccagctggcgtggtgctgcgggagggagcgtgtgccgccaccatcttaacgggcagcctgcaggagcaccactgcagacaagggtcttgggaggagggaacagtcttctgggtaggtggtaaccatggtgacattgttttggggtacggggaggcactggcaggaagtt

SEQ ID NO: 139772 - DNA, 344 bp, Homo Sapiens
ctttatcccatttattcgtattcacaagttaacaaatagttaacaatattgtaggtgaagtggggtattgctggatcaaaggctctagaagacgtctttaccgaccgaatctgaaggtttattgagttcaaccctcacacctttttcacctgttagatatttttctttatcccatttattcgtattcacaagttaacaaatagttaacaatattgtaggtgaagtggggtattgctggatcaaaggctctagaagacaaagcccagtttgctgacattgaacccacatttgatagactgctgtttttctggtctgaccgtcgcaaccctcatgaagcctcgtgc

SEQ ID NO: 139773 - DNA, 132 bp, Homo Sapiens
gttcaagtgattcttccacctcagcctcctgagttgctgggtttacaggtacccaccatcatgcccgactaatttttgtatttttagtagagacagggtttcaccatgttagtcaggctgtctctacaaatt

SEQ ID NO: 139774 - DNA, 492 bp, Homo Sapiens
gcacgagggtgttagttcactgcaaaccactagccagtatcttatcaggaatgtggaaaccactgtagatgaagatgttttacctggcaagttacctgaaactcctctcagagcagagccgccatcttcatataaggtaatgtgtcagtggatggaaaagtttagaaaagatctgtgtaggttctggagcaacgttttcccagtattctttcagtttttgaacatcatggtggttggaattacaggagcagctgtggtaataaccatcttaaaggtgtttttcccagtttctgaatacaaaggaattcttcagttggataaagtggacgtcatacctgtgacagctatcaacttatatccagatggtccagagaaaagagctgaaaaccttgaagataaaacatgtatttaaaacgccatctcatatcatggactccgaagtagcctgttgcctccaaatttgccacttgaatataattttctttaaatcgt

SEQ ID NO: 139775 - DNA, 581 bp, Homo Sapiens
cttctttggcttcactctcacaaactccttgaatttcttctctttattcttttccttgtcttttgtatttggggaactggcagagacccgcttcctggtcagggtctcctggctgggcttgtctgaagctgaagggcccctggtttggacatgcctctttcccgggctctcttctggctccagtgacttctccattccatggaaatacttcatgtgatagtgcaacagtttggctttgcggaaaaattttaaacagtccacaactttgcatctaaacttatggtctaggtcgacagctggtgcattagatgacccaaaatcatctgttttcttaaaagtatttgttacttccacagtcgagatctcttgtaattccacaaggggagaagtcggttctgttttcatcgtgttttctcccattgatgggcagttcaactccaagcctgcagccccggatccatccccaaaggagtggcaagtcagtgcagatgagacctggccagcttccaaagcagacttcaactgaccttcttcagattccttggtactagacaacgtgtcttgcaaaggatccgtatcaa

SEQ ID NO: 139776 - DNA, 441 bp, Homo Sapiens
gcccttggggagttctcctgtgttttttaagccataatttttccatataggatagaatgtcttctttaagttcaatattaagtggttctctccaaattttcagattagtctgtacttcgcattcttccaatgagtcttttactggtgcatgtaaattctgtttcttgttgtcatcatgatttccggttctccattgacttaacacttcctgaaaggactgtgcaaaagcttcttcatcgaatgacccttcacacaaaagactctttcttggttttgtacgttgggctcttttcatcgttgtgatttctacctcagaggtgctcctctggggaagtacagctttgggtttatgttgaattttactggtttcctttgaagaattattctcctctttgggttcatctggattaacatcctttataaactgatgggcaaccctcg

SEQ ID NO: 139777 - DNA, 617 bp, Homo Sapiens
ccagtaaaagtcctttaatcttttcatgaaacttctctctatacaaattgaaatacataatgctttctggttcttcttcaaaccaaaacttgtcaaattcatagacaagataacagtaaaactgatgaaagtgttccattgttggtataccaggaacaaggttatagagatgaaacttcaaagcttcactcttcagtaagctataagccatctctgtaagattgattccaactattgcataagaataccctaattttggatgatttgaacgggaaagaatctgatgagcttcactagtgtaattttcactgaaatacacaagattgattaacccaagtatgcccatgcctctgaagtctgtcttgggatcatcaccctgaaaaccaatttcagcccactgcttggagattctagcgtttaacttcttcgtgggcattagaagattccaaagcttcatgagtagctcttcatgctgtaggttatcagaatcatatggccttttcctcacactttctacatccagatacagctgtttataaccagttatctgcagtaagcacatcttcatgcatattttaaaactggcatccttctcagggttaatattctcctcgttc

SEQ ID NO: 139778 - DNA, 643 bp, Homo Sapiens
  misc_feature (82)..(119): n is a, c, g, or t
  misc_feature (245)..(258): n is a, c, g, or t
gttaatttgggtatttatacagatatagtgtatatacatacatacaggcatggaggaatttccaaatttcctctattgtaannnnnnnnnnnnnnnnnnnnnnnnnnnnnnnnnnnnnntggtatcctaatagaaggcaaggagaatagacatttactgagcacttcctatgtgccacatgttttatatacattaggatattacagtatatggtagcttttatccattcattcaatctcaatacnnnnnnnnnnnnnnaagagtagagcaactgaggctcacagcagttatgtaacctgcccaaagtcacacagcatgatggagggtctggattggagattttgtctgactacaacactcatgtatcaaatcctattcagttttgatgttaaaaattctgtggttgaattcgtcacagtgtctttaaataaaacaacaacaaacaaaacacagcaaaccttaacatagttgctaatcatatgagtttacaaggccacctgtgtctttactatcagttacactccttcccaccccatcacattaatcactcaggtctagggatttgcaagtttgctaacagccgaatggaacaaagacaaaacgctaaaatttgccatgtgggcctaactccaaagccttcaag

SEQ ID NO: 139779 - DNA, 449 bp, Homo Sapiens
tggtttcttctaaaaccaaaaaagtgacaaaaaatgaggagccttctgaggaagaaatagatgctcctaagcccaagaagatgaagaaagaaaaggaaatgaatggagaaactagagagaaaagccccaaactgaagaatggatttcctcatcctgaaccggactgtaaccccagtgaagctgccagtgaagaaagtaacagtgagatagagcaggaaatacctgtggaacaaaaagaaggcgctttctctaattttcccatatctgaagaaactattaaacttctcaaaggccgaggagtgaccttcctatttcctatacaagcaaagacattccatcatgtttacagcgggaaggacttaattgcacaggcacggacaggaactgggaagacattctcctttgccatccctttgattgagaaacttcatggggaactgccctcgtgc

SEQ ID NO: 139780 - DNA, 438 bp, Homo Sapiens
gcacgaggccttttttgtgtgtgttttggtacaaatccattgtctttttgggaggaaaaagggggacagtaatttaaatgacatttagatgaaggtgatgctactatgctagtgaagactttcaaatatatgagtgagttgtataataaaaaatttggatcagtttttaaaattacatctaaaatatttaaattttacttaagaaatgttgttgatgttatttgagtagtctgaggcaattaagcaacaacagcttaaatacactgtgtattacccgataagccatttggtatttctaactttacagactggctcacctcgtctttccaaaaagacaatggatttgtaccaaaacacacacaaaaaaggcaaacaaaacatgataatctgcaaaagttcatgtatctacttcattgtgcataggaagtgtttacaggt

SEQ ID NO: 139781 - DNA, 1024 bp, Homo Sapiens
  misc_feature (766)..(783): n is a, c, g, or t
gtttgtctttctgacacagaaagactgatgatggtgtccactatgtattcttcaaaacatttggcacatgctgcactaacctagtctatcttttctatcttggaatttgctcatacaaaccctatagcctagactagatcccttaccctctctccagttcctatcattcacccatttcactgtgcaagacacctcactagtcaccagtgatacagaaatgacttttaagcagtttctgctcttaagggcttaccgttttgtctataagatacacaagtataaatgacaagtacaaataacaatgaatgtttaatgctttacgtttagtgtttaagcttgttgttggaagagcagcattttgacccttggagaagaaaaactagctgtggcattccaggtggagaacctgacagaggactaagaagttatctaatgtaaaagacctcaggcaccaccttcgcataaactttttccagacaaggctaaatgtgcatgcttcataaccataattcttatttttctttaataaatatttttctacttgtaacactgtgcattatttcaaactgtttacctgtttgtaaagcttgtctcttaatcaaatttgtcttgaccaaataagtttcctgagggctggaaattatgccttaactatatctatagtatttaacagtgaatcctttgtattatgaaagcatcaacagactaatctcctacactttgcaccacactcacacagcccagcctccaatggtaccaaacacannnnnnnnnnnnnnnnnnttcacagacatctccagtcgctcacataactcaaatccaccagtcacaccatcatcatcaacttccagttcaatccatcattctactacccataccttaatccctcacactccccctttccctccacagcacccatccctcacgccaacactctcacccgcacccagccaacactcactaactagtctaatccaccacatctcacccacccctcattcctcaaccactcatctcgtcagca

SEQ ID NO: 139782 - DNA, 382 bp, Homo Sapiens
cattcatactagaagtgtttttataacgaaaatctgcactttacaactctgcaggccatgcatgcaatggtgatttacagccttgtttacgtgtaattcctccaggtgatttatcccaatttatgcaaagatcctattttaaacagacacggagaagtggtaaccgtttcctaacagcagcaagaatgccccttccgtttgcctggtgaaaagaactgacattaacagcagcttggaggcttcgaggaggtggggacgtggcctgagctcgggacgggggcccagtgcgggttgtcggagcgtggctgcccggcgatgtctctgtatttatcaataaatctcccggttgctctgggaagcacttatgtcctgttccattatt

SEQ ID NO: 139783 - DNA, 1653 bp, Homo Sapiens
  misc_feature (305)..(360): n is a, c, g, or t
  misc_feature (479)..(487): n is a, c, g, or t
gtatccatggctggcactttactcattgcacttgagtttattgccccataactaaaggatcaggatgatggtagaacggagatctgggtttcagagctttcccatttaagaaaaatagatcttgagattctgattcttttccaaacagtcccctgctttcatgtacagctttttctttaccttacccaaaattctggccttgaagcagttttcctctatggctttgcctttctgattttctcagaggctcgagtctttaatataaccccaaatgaaagaaccaaggggaggggtgggatggcacnnnnnnnnnnnnnnnnnnnnnnnnnnnnnnnnnnnnnnnnnnnnnnnnnnnnnnnntaagattagccattctctgctgctatttccctacataatgtcaatttttaaccataattttgacatgattgagatgtacttgaggcttttttgttttaattgagaaaagactttgcaannnnnnnnnaggatgagcctctcctagacttgacctagaatattacatattcctccagtaagtaatactgaagagcaaaagagaggcaggattggggtcacagccgcttcttcagcatggaccaagtgggccttggggattgcagcgttctcgaagtggctgtaggactcgaatttacagaaagccacagaggtgcaacttgaggctctgctagcaagccaccagtgaggctattgggtaaccacctttctatacaggagattggaatctactttgtcatttatccaccacagtgacaaaggaaaagtggtgccgttatgcaatccatttaactcataaacatattactctgagtaactggccagccattcatcggatccttcattgggtactcctgaaatcagacatgttcctgtagaaagaattttaagttaggctttctatgcacctatcaagaatcaagagaatagattgtatcaaacaacggcagggaaatccttcagcaattctaatccactttgggttttcagctgtttttacatctaaagcaatagactagaactgaattatcttctacatagtaaaatcacaattgtggaattacaggaattctggtgatattaaggtgaaataacaaaacacaaaaggccctattttaacagttgatgtgacagtaagttttaatagaacctgtaacttcattttggaaatgcttctccaccaaataagggctttttcccctatttaaggagccagatggattgaaagatgtggaaataggcagctgtagatcttgatcttccaggtaccccatgtacctttattgagcttaattataatactgtcaaattgccacgatctcactaaaggatttctatttgctgtcagttaaaaataaagccctaaatacatttttattctttctactgagggcattgtctgttttctttgtaaatgccgtacaataaacaaattatttaataaccccgacaaccccccccgtcaaataataaaaacacctgtccggccgccttcggcccctccaagaagctttctaacaaccattctgtttgggcgccgcgggccccggtagggtaaagtgaaaccatggttccctaggtgtgtttccccaaggaaaaatccctggttcaatgaacctagatggcttgggaatt

SEQ ID NO: 139784 - DNA, 662 bp, Homo Sapiens
  misc_feature (461)..(469): n is a, c, g, or t
taaactgcttcccatatctaaggtgaaaatagaaagacatttttaaaagtttaatataaagaatgaaataatttcaggtcaagtttattatacagaaattatattaatgggtgggataaatactttacaggagagggtcacactctcagacactttggctcccaaagggcttggagcttttgtgaggctgagcatcttccaaccaggtgcatgcactggtttgccaacatcctcaccacgcccaatccagccccttcacacactgacatcgcctacctgggccctccttgtggccttaagttttatctaaccagtgtacacaacatatttataaccaattaatacgtgtgagtcatgatttgtttaaaatgtcagcttttgtgaactgaaggggatgggcagaaggcaggatgctgtccttggtcaggaatgtgacccagattttaacactgctcctaggnnnnnnnnntatttccttttatgatgccacttcctgggacatgatgagctgaagattaaaaactcttcagagatgtgcgagaaaaaacaagcccagggaaaagtctgcaggcatggtggaggaagaaattagggatgaaatcgcaagtggcagagcaagcatgaccaggctgaagtcagcagagacaagagggcagcgaggc

SEQ ID NO: 139785 - DNA, 900 bp, Homo Sapiens
ggcacgaggctaaaatccaacccaattatacaatgattcttggctgagaataagctaatggctggagctctatagaatctcaagatttttctatgaaagtcctaccaccaaacagctgtgaaaataaaccaacgttccttgatgggcttcctccaagtgcgggaccaccccaaaccctgctgtcttgggccactgtttatcacaaacactgcggtctacatccagaggacggatctcaaggggaactttctgttgacgctccttccacaacatggagatgggagacaggcacactcagagatgatcagagatgacagcaaatgccatcttcagctttccaggccagtgatttaagtgcaggaacaggggtggaatgtagtggatattcacttggaaggtgtgcaaagtctcttattcacagaactcccatctcctaaacagaaatgacaaaccccaagcaaaattcaacacatcttttttatgtataaatgggtcagtggtacagagggagttactttttataaatatctgcagcaaatcccctaaaaaagatgtgaataaaaactctctctcagcacaaagggcctattccttccccaaaagtgttaaattcccgagagcctgtgcttagccaaacacttgtggggcctcctgggaagaacaggaggactttgggaccgagaggagagccttcccatctccccggagagcggaggtgacttgaaggtcatctgttgcccaggacttgggagtgattaaactgtttcttcccaagacttgaggtcttctttgtcaagctgctgattaagcggtctctctgtttcctggcagtggcccagagggagggaggagaggaacctacaatcgcgtgaggaagtaaaaaactctgggtattttgat

SEQ ID NO: 139786 - DNA, 688 bp, Homo Sapiens
  misc_feature (382)..(384): n is a, c, g, or t
  misc_feature (415)..(415): n is a, c, g, or t
  misc_feature (431)..(431): n is a, c, g, or t
  misc_feature (625)..(625): n is a, c, g, or t
  misc_feature (645)..(645): n is a, c, g, or t
ttttgtatgaaatagacacaatttgtaatttattgatataaatctaacatatggtcaaatatataaaattgtttaaaaagttaatcaatgaaaacaagaaggataatacgattattaatgcaaacattcaaaattggatgtaaggggagacaggaataatcttattttagcacccaatcaatttctatatattattttggtagcagagtattgaaaatcctgataaacatctgtaagtagttgcagcaggaaacagcttttaacagctcactttgcaatctcagaatactcctcaattaaacaaagatgagaggagaagccatctgtcagcacagttactggaaggcaggatcataatgatgcataacacatttgggtgtgnnngggttttcttaaattatataaaaattacctntaaagtattatttttntcaaagtgaaaattcaatcaatcatttgcagaaactgtgaagcacctcccagaagttcatgaagcacacttggaaaattgtctgatatttcattagggtagactttgaagaagaaattcggaagatgtgcaaagcttggaaaacagagttgcaaggaggcctcaggggtcacagactccccctcttcctttcanaagcaggaactgaggcctgnggaagaaacacttttctcaggacttacacacaggtatcttcgc

SEQ ID NO: 139787 - DNA, 751 bp, Homo Sapiens
gggttttacaacgatttattttaaaaaattacaattatccagtggaacaacatatgtgaggtttgttattatcatgttgttgctgttgttgaaacagggagagtcctggaacagaaagatcagagctggatgagcaagccactaacggagagagtctttccacagaaccagtattttccccatccacttctccatgagatgtcaatcaagacacaccatctccaagtagatagcttttaaaaaaagatataccactggtaaaagtaatttaggaaagcaagaaaacaatgacagcaatatgcttgtgtgccttcaccatttcacgtccattaaaagaatagtagctctctgtccaaagatggaaatagaaaaataaaataaaacagtagcccacaggcaacatctggtgaacccaaccaagactggtgccagtgggggccatctggcgaaccatactgatcccaagctggtcgccaaggccaacacctacagaggctacatctggttgacctggcgactttaatgatgggccgtctttattgtttgctagagtgttttccgaagctaaaattttctctggtgtccatgtttttgtctcccctgttatctttgagtttctctacagccttcttaaataaggtctgagatgctcagttctttccattttattcctctgttactacacagggagcttgctgatgtggtggtatggtgtcagggtatgggaggtgttctatagtcctatgatgag

SEQ ID NO: 139788 - DNA, 790 bp, Homo Sapiens
  misc_feature (166)..(178): n is a, c, g, or t
  misc_feature (297)..(329): n is a, c, g, or t
  misc_feature (507)..(555): n is a, c, g, or t
  misc_feature (762)..(762): n is a, c, g, or t
aggtttcagtgcaggtttatttcagttttatattttattccaggcaagtgcttattacatggatagtattcatgtctcggtaactaaagtcttggagcatgaacagccactagaatacagttcaatagtaaaaatacagtatgtacaaaattagggtttttgtagnnnnnnnnnnnnnccacacagcagatgtatccaaacacataaaaatctctacagtctggggtcgctacagtttatatttcaggaaacagagacacagtggccgagtcctcactgtaaacaagggccacctcnnnnnnnnnnnnnnnnnnnnnnnnnnnnnnnnnagaagcagctgtttctggagagagaaggggtcatggtggccccccagttaccctccaggcattccctgccttctttggccccccaaggaaccaacctccccctctccccgaggtaaggactcccagccagtgagccactctgaacatcaaaaggtaaaacacgcatgagaggtaagannnnnnnnnnnnnnnnnnnnnnnnnnnnnnnnnnnnnnnnnnnnnnnnncccaggctggaagggctagggagggagggccaggcggtcccacagggtgaggacagatgtggtcccgacagcactctgggggagacgcccaaggaagggctgggtggtgactgcccacttgggcacacagcatcacagcgttcacaaacgacaagaaaaacagcaacacccatcgtcaccaatctggacatagtcattcggcactanatttgcaggcccccgatgctgggggaca

SEQ ID NO: 139789 - DNA, 402 bp, Homo Sapiens
  misc_feature (169)..(181): n is a, c, g, or t
  misc_feature (339)..(341): n is a, c, g, or t
  misc_feature (350)..(350): n is a, c, g, or t
  misc_feature (379)..(379): n is a, c, g, or t
ttcaggtttcagtgcaggtttatttcagttttatattttattccaggcaagtgcttattacatggatagtattcatgtctcggtaactaaagtcttggagcatgaacagccactagaatacagttcaatagtaaaaatacagtatgtacaaaattagggtttttgtagnnnnnnnnnnnnnccacacagcagatgtatccaaacacataaaaatctctacagtctggggtcgctacagtttatatttcaggaaacagagacacagtggccgagtcctcactgtaaacaagggccacctctgggggttgggggtgggaccctgggatggggggagacccnnntcttccccntccaccatgctttcctgccttcccccctntccctcccaggcccgggtgccct

SEQ ID NO: 139790 - DNA, 688 bp, Homo Sapiens
cctgttgtagaatattgtttatttctgggcataaattgttgaatgatgcaaaacaaattttatgacacaaattagtattgcttgacacaataaaaaaaggttaattatttaatgatatatcttcatttaggttcccttgattggggacatgggtaactaacttaaacaaactaccttacttgacataaaacttataacaagggaaaaaagttaacaacttaaagagataataaaatcaaagcctattatgttattaaaaagattcacgagttactaccactactattactagttaatatttattgaattactctgtgcttggaactgttctatgcattttacttgtgttatctcatttgatgctcacaacaaccttgtgaggtaggtattattgttatcatcatcatccccattttaaaaggaggaaattgaggcacaaagagattaggtagcatgcccaaggtcgcacaactgaagatggtaggtttggaatttgaaccgagacagtctgacaagatatatgagactaaagtcaggaattttaaattggttaggcttcttatttacagatcatataatcatagaactacaggataaaaatagttatttcagaatatcataatatctaaaattagtaattctgaacctttgtcttggcaaatgtaccatcaattaagacaatttttac

SEQ ID NO: 139791 - DNA, 255 bp, Homo Sapiens
ggacaaggatattttaatataaaaaaatactatgttgtaagaggggattacctagtaaagggaaaagaaaactctaaagaatacaattacagcagatataaggggcagcctctagggctgaggcagagcacccaaggaaggaagaaacctggatgaggtcctcatcttcacattctaccaccaggctaagatccataccttgctgaagatggtaatggatgacggagaagttcattgcagttctatgcagatgtg

SEQ ID NO: 139792 - DNA, 472 bp, Homo Sapiens
tttagcaagcaaattattttaatgtgtttcaagaattgaatactctgtatggaattaaaaacaaagagaaaaaagcaacgtgcagaaaattaattaaaaagagttaagacacagaaacttcgaaatgtcataaaattacaaatacaaaagcaacaaattaaaaaacatacacgattgcagatttcagtaacatcagtagccagaacatacccaatgaatcacttaatcatcaaatatctcgctgattttgaaagggggctagtggttgatgatttaacctcaatcaatccaaaggacatgactctttccttacattacaagcaatctgtaaagatggctttaagtacctttgaaaaggtggagtgtcctttctcaaaggaaacagacaaggaaggggttatccgctctgcccccccactaccgaaatgtgtacattcattcaactctggtaactaaggcaaccaaaggacaa

SEQ ID NO: 139793 - DNA, 443 bp, Homo Sapiens
gtgaggcgcttgtattttgttttgttatttcatggaaactcctggaagccttttcatagctgaggggttaagtgaagttttaggaagatcactctagttttagggtggaagatgaggactgggagagggttcagaccaggaactgctaagaagctcttgcagcttctggagggagctgtgatgtggacacgctgaaatcggtggggaggaagcggaagattcaagggacctcaagagacagaagagtcaggactggatgactcccattcattcacaaacgtttactgtgtgcctactatgtgtacaggttcctgtgctgtacgagggagaaggttcccaggctgcggatgatgtattcaggatgctgagggcttacctgtgggggtatcactttgaaggaactggattaaagtcgcgtaagtgatggtggggtgagggtgcgg

SEQ ID NO: 139794 - DNA, 443 bp, Homo Sapiens
aacgcgctgatagcctccctagtagctgtgattacaggcatgcaccaccacgcccagctaatttttgtataggactatagttttaaggcaagtttataacctttggctcatttgagcctgacagcacttggttggtagtgctattatccccattttatagatggcactgagaagtaaaaagtgactagccctggtcacacaattgatatggactgaaactgccgctttctggctatcacaggccttgacacagctagtttgtgacctttacagtctagctctgtctctgctacatgaatcccaaatttttgaatcaagttcccctctgggccataaggcctcatctcagacccccaaggaaggcagtccaaaggtagactcaagtctcgcagagtaaccaggcactaggaaagcatcatgggcagtagctccacgagaggggc

SEQ ID NO: 139795 - DNA, 1031 bp, Homo Sapiens
  misc_feature (242)..(302): n is a, c, g, or t
  misc_feature (333)..(442): n is a, c, g, or t
gctaacaataccatttttactcaatctcataggctttggctaggatgacttgtatactgcagttcacttgtagataccaaattttaataaatttattcttctttgcatctaataaatacagagggaagagttcttactgcattaattacctaccaatacgtataatgaatgttaattctaataaggtcgcaggcatgctcccaaaggaatgctttgtaacaaagcgtcagtcttatgctttnnnnnnnnnnnnnnnnnnnnnnnnnnnnnnnnnnnnnnnnnnnnnnnnnnnnnnnnnnnnnggatctaaagcatacacacaagtgtgcacannnnnnnnnnnnnnnnnnnnnnnnnnnnnnnnnnnnnnnnnnnnnnnnnnnnnnnnnnnnnnnnnnnnnnnnnnnnnnnnnnnnnnnnnnnnnnnnnnnnnnnnnnnnnnatgcatcactgtgcattcttatgattttaatattctgtacatttattattgatttaaaatgcattttacctttttctttaatagatgttggaattcctgatgaatctgcagtcaggtaagattttatagatttaaaaaattatgttaactaagaaaatatagatggaagaaattagtatctgttgagtgttgtattctgggctagacatcctaatatgttctatgcatttatcatctcataaagccatcataacatctgtgttcctataacctactgtttattaaataaacaactatggattagagctgattaattgcctcatgatcccatagttaacaaagtagctggcctacagtttgaccatcagcctgcctgccttccaaatcctgtctcttgctcctcagcatagattgacagatatctgtgcagcccttggatcaaggtataggtctgaatcagattagtcagattgattaatttgattaatgtctaaattaatgagagtttaaataccttgaactctcatttaagtttatcattagaatgtggttagtccaagagtttgtcctaaaaaagttggcggccgca

SEQ ID NO: 139796 - DNA, 537 bp, Homo Sapiens
  misc_feature (177)..(225): n is a, c, g, or t
  misc_feature (256)..(365): n is a, c, g, or t
acttgtagataccaaattttaataaatgtattcttctttgcatctaataaatacagagggaagagttcttactgcattaattacctaccaatacatataatgaatgttaattctaataacgtcccaggcatgctcccaaaggaatgctttgtaacaaagcgtcagtcttatgctttnnnnnnnnnnnnnnnnnnnnnnnnnnnnnnnnnnnnnnnnnnnnnnnnnggatctaaagcatacacacaagtgtgcacannnnnnnnnnnnnnnnnnnnnnnnnnnnnnnnnnnnnnnnnnnnnnnnnnnnnnnnnnnnnnnnnnnnnnnnnnnnnnnnnnnnnnnnnnnnnnnnnnnnnnnnnnnnnnatgcatcactgtgcattcttatgattttaatattctgtacatttattattgatttaaaatgcattttacctttttctttaatagatgttggaatttctgatgaatctgcagtcaggtaagatttcatagatttaaaaaattatgttaactaagaaaatatagatggaagaaa

SEQ ID NO: 139797 - DNA, 775 bp, Homo Sapiens
gtaatacatttttatccacatttgcttttgaataaagaaacttctaagactctgtatgcaaattaatggaatcacaagataataaagctttgattcatagacactcatttatccctccccccttccacttctcagaccacagagaacgtttgctcaaggcggatttaaattgaggagtttgttcaaaagtcttcctcgacctcaatcctatgattgtcgcagagcaacatgaagctagcagcactgactccaggaaaaaacgagcataacccagtgttgaaccccagcgtgtgggctgcagaggcaacatcagtcatcaagtccgcaagcacacaccaccagagaccctgagaatgtggctctctttctgcaacgcccttgtccaggcacccttagagatccagaattcagcatgtccttacattcctgagccacaccccggccaccatcccttgtgaggaaaagagggggtgagttaaacgaaaacgtcctaagcagccactcaggcccacactcttgggctcatatgcattctccagcacggaacgagaccttagacagcaagaggctacgtgccagttctttctctaatggctgagttcacctactgatttctcctttgctttttccatttaaactaaactcctctactcctcagagctcacctgccagaaccccgcttgggcgcacccctgtcaccggcaaagaagcgcccgatggatcaaggatgccctgtctctgggcctgggaagagcatgcctggcatggccatggt

SEQ ID NO: 139798 - DNA, 632 bp, Homo Sapiens
aatgcaatcaaacaaggaatgtattaaaagcacacccaatagctcaaaataaaagacaagtgaacaaagttaagcaaatgacagtaacaaaagctgttctgggaacctctattgaaatagctacttattacatcaacatgctaccatagaacaaaagctcatgttgcttttgtgaacttgaaaaacccattaacaatgtacagttctgagcctgagctgaccatagtgctcatgccaagtcctgagcagggcatcttgaatggtggttccctcatgactacatacaccgttagggaatgtttcgttaagaggaaatcaagatgttctaacctgtgaaggtagaatagattccaggctacacaaacacatgaagtgtgccttatattgattactaaagaggttgctgccaagactgcttccaaagggcagaagatagccctaaaaaatgtttgcagtgtggaaatgcatttttaataagtcatattctagtaacaagttgcatttggtaagacacaaagaaacaatgttggtatgcagagtagaaatctctggaagatgatattgtcatatcagagatattgtcagtatcagagatactgaaatctctggaagatgatttttgtctcacatat

SEQ ID NO: 139799 - DNA, 660 bp, Homo Sapiens
  misc_feature (605)..(605): n is a, c, g, or t
gcaattttaaaatattttattatttttaatatagtgttgtaacatttcataatattgcatactactcaaaagttggtttatttagtagggtaagaatatcttctcttcttactccccagtcagaatttaaagatatactatccttttagagctctattatattggctcctaaaatgtcacatttcataaaacagtaatgctataaactaaactgaataaaggttaagaacaatttgatttcacagtttcgcaagcagccagtagattgctgaattgagaaccataacaaaaattcactaagactttatatttatttttccataatgctccttcttaaaagaagaaaaaatataaaggcaaaggtaatatatgcttcttttagtcccttatccaataaatcaacctttaactgcaaataggttttacagttaccaaatgatatgttagttctgtgccagcagaatttattacttttttgctttcttgttctggtgttaccagtaagttgaccaaatgacactaaaatttaaggacactatcacttaaaacaacgttttgaaataaaacacagtaaaaagaccacacccagtgagtcaagtgcttantaatataaaacaagcataattgcatagattaaataggagaaattcagattcagac

SEQ ID NO: 139800 - DNA, 908 bp, Homo Sapiens
agtgataaaaatagagttcttttgtgagcatggaaacaatacatggaatctgtttctttgcatgaaaagtagcgtcaaaggaaaaggactcaaattctgttgccacctttcggttaacccgggtaagaatgtgcataaattcaagcttgtcggcatactgtttcagcatggcccaaagggactggatgaacccgggagccatcctttgaatttcgcccaagaataataacccgggtgctgtgggggtatgcattcaagaagtcggccctcccattgttatttttatgacacgccatgtcatcatcaacacccactgtctgtctcaatgccacagtccatttctgtaccacggcaggcctgaataatgaaaagtttgggttttccagttagacttctacaacgatcccctctgaaaaagtttgttatttttttcaggtcaacaggtccatttgttccaaaaattattccttcttcaccatggctcagaagcacacaaacaaaactgctccttttgctgtgatcttctttagaaacatcacgcatcaattccacaatttcttcacgtgtaagatcatttttattcctgacttcatatttcaagtttctgaatgtttccctgaggtttgctgcatcgacatctgtaccagaccgagatgtcattccagtgcttttatgaaaattcttattattaattattatacataaacccatctcaggataatccattttataactgttgtccagggatattccagagtccattgattcgcttccatgtatgatctttggttccaaatttttaatggattttgaatccactgagttttcagtgttctccatggatacctttattaacttccacaaccgcctcacaatagcacccatccgctaggagccgcgtctgcccc

SEQ ID NO: 139801 - DNA, 1134 bp, Homo Sapiens
  misc_feature (52)..(52): n is a, c, g, or t
  misc_feature (219)..(219): n is a, c, g, or t
  misc_feature (984)..(984): n is a, c, g, or t
  misc_feature (1007)..(1007): n is a, c, g, or t
  misc_feature (1017)..(1017): n is a, c, g, or t
  misc_feature (1042)..(1042): n is a, c, g, or t
ctttttcagaggggatcgttgtagaagtctaactggaaaacccaaacttttnattattcaggttattattcttggcgaaattcaaaggatggctcctggttcatccagtcgctttgtgccatgctgaaacagtatgccgacaagcttgaatttatgcacattcttacccgggttaaccgaaaggtgggcaacagaatttaagtccttttcctttgacgntacttttcatgcaaagaaacagattccatgtattgtttccatgctcacaaaagaactctatttttaatcactaaagaaatggttggttggtggttttttttagtttgtatgccaagtgagaagatggtatatttggtactgtatttccctctcattttgacctactctcatgctgcagagggtactttaagacatactccttccatcaaatagaaccactatgaagctacctcaaacttccagtcaggtagttgcaattgaattaaattaggaataaataaaaatggatactggtgcagtcattatgagaggcaatgattgttaatttacagctttcatgattagcaagttacagtgatgctgtgctatgaattttcaagtaattgtgaaaaagttaaacattgaagtaatgaatttttatgatattccccccacttaagactgtgtattctagttttgtcaaactgtagaaatgatgatgtggaagaacttaggcatctgtgggcatggtcaaaggctcaaacctttattttagaattgatatacacggatgacttaactgcatttttagaccatttatctgggattatggttttgtgatgtttgtcctgaacacttttgttgtaaaaaaataataataatgtttaatattgagaaagaaactaatattttatgtgagagaaagtgtgagcaaactaacttgacttttaaggctaaaacttaacattcatagagggggtgggagtttaactgtaaggtgctacnatgccccctggatctaccagcantaatatcttnctgatttgtccctatgcatatcagntggagcttcatataccagcaatatatctgaaagagcttattatataaaaacccccaaactgttggattatttagcccagggtaatggtgaaa

SEQ ID NO: 139802 - DNA, 400 bp, Homo Sapiens
taccaacattacaaatctctttttattgggagttcatggttttttttaattgaagaggatttcctttgtcacccagcagggtcctggaacttcttggctggaattcagatatccagagttctggttacctacaacatctattctttacgtagtagcttacaagcatcaaaggccaccctcacctgatgcttggccggatctatgccctccaaaatagtcttcatgtcctcctgcttgtcctgcgaaaggaaaaagaagaactcacggatcttattccaaaaacgaaaatcacatttggccatgaagaccttgtgaccgatacttcagatggtgggctttgttaactcaggatcttcaactaaaaagattctcatctgtagagactgtaatgtcatgagca

SEQ ID NO: 139803 - DNA, 804 bp, Homo Sapiens
accagcaatacaaatctctttttattgggacttcataatctttttcaattgaagaggatttcctttgtcacccagcagggtcctggaacttcttggctggaattcagatatccagagttctggttacctacaacatctattctttacgtagtagcttacaagcatcaaaggccaccctcacctgatgcttggccggatctatgccctccaaaatagtcttcatgtcctcctgcttgtctaaatcagcccctgcttgaagtaaaacatctgcaacatccgtatgtccattttcacaagcataggttaaggctgtgtctcctgttgctgttgtagcatgcacattatcgccagaagccagcaaatatttaaccaattccaggtgtccctcctgagatgcctccatcagaggtgtggagcagccaagttctatatcagcccctgccttaataagaaagtctgcaacttcagaaaatcctccacagcaagccaaagtaagagcagtttcttgagtttcttctgtctgggcatttatatttgctccttgtgctaagagtagtgccaccatttcttcatgtccttcccgggcagcttccatcaagggagtgtatccttcatcattaacttcttcaagatttgctcccctatcaataagtagagctgccaattcaacatgtcctccacaggcagctagcgtcaatggagattcaaatgaatctgcaggcatgttcacttgagcaccactatccaaaagcaaacgtgccaccctctacatgtccatccatgcagaggtggcatcgataaaca

SEQ ID NO: 139804 - DNA, 807 bp, Homo Sapiens
tgataccattcttcttttaatccttaggaattttacagagatatacttcatatatcacatatatatcatataattcttccgtttaaatatatttatagacgtgtgtaaccatcaataaaatcaatttttgaacattttcatcatcaccccaaaaaagactccacacccattggcagtcgctgctccttgttttgtaattcccaactcttttaacagaagccttgaaagctgtgcatttcactctaagaactggtgtagtggcatcccacacatttctacattttatataatcatcataatttattttgaaatattttgaattctcttttgatttcatccatgaactatgaattttttataagtatgttgcttaatattcacatattgggagtttttctagatatagttattaatttaatttcattgagatcagagaacatattttatataatttccttcatttcaaatgtttttagatttgttttatagttcacaatgtggtctatcttggtggaagtaccatgttcatagaaaagaaggaatctctggtacatgttgcatgtgtgtgctataaatgtcgattaacccatttatgcctgaggttgcaattttttgaaattttacaattagaccttggtgatgaccttgagcagtaggatataaatcattccacatgtttagtgttccaataatggaacactaggcataagtatttgtcaagatggttgacagtgttcagatctgttgttattttactgttttcatcagatcattctatcaattggtaagaagggggtgagatgatct

SEQ ID NO: 139805 - DNA, 1125 bp, Homo Sapiens
ccaggggaaaggtcccaacagggtttctccaggagagaatttcttcaaattccctcaaagattccttgcttttggccgggcattaaacatagtccccccaactcttgggatgtcataagcagggggacctgggaacatgtactgagtcccagtttaaaggcaggagggagggagaacaggatgatctcatcgaagggatctgggtggccgttcacctggggtaggaactggaaatcccaagtggcgagatcaattttgacgtacccacccaggtttctggaagacactccctgggcagatgctgcgtgacctcagatgtctttaatatttgaatcctctcccggactttgtccttcaggaggagactgatgatggaatagggcactcggaaccatatgggtgcccccacaatcagcaccttcttcaaacgagctggaaatgctcccttcagcaggtttaggactttcttgccaagatccagctcaaagttggcataattagaaccacacatgtcatagataaacaccagtccattcctctgagtttcaaagctatccacagctctgtctagcaagtaaaacagagcctgaagtaccacatgttggactgacttgtggggatgatgcaacctggcagtaaagagggcaatggaggctcctgttgggtcccgaacatttaagatggtgaattttccactgaggatctcagaacgaagaggttcctcatgaggtttcagctttacaatgccttccttccttcgagtttctctgtaggagtggaacaattctatggcacggagcacatcaaacttccttgccatgaggaacttgacagccacattccaagacagcggggaaacattgtactgaactgtccacttgttaatctcttcgagaaactgcttggtagcctgctcctcctccggggtcagctccggcgccatgtcgggccggggcgcggtcgcgggctccatccccccgccaccgccgccgggcggacaaaactcgctcgcgagcgcgggagcccggcgcgctcggcctccgcttccgcgtccccgcgcctcagcagcccggggccggctcgcgcatagtgtggccggcagggcccggcgcctgcagcggccgc

SEQ ID NO: 139806 - DNA, 951 bp, Homo Sapiens
aatcaggcacactttttattttacatcttaatcaacattacaaatacaaaaggaaaaaagtcagaaacaactcatcacagaggaaaaaaacatcattcagaagagattaatctgaacttcaacgttctttgtgctcattttaaaattattaaaacaggaattcaaaaggacaagcaaataaaaaccaagtattttattaattaaaattgagaccctaaaccaactaagactatacaacttaaaaataagctgtcttcatcctagaaaagtttgatttgccatcttataatgaatatgcaggaacttactaatgggtaagtaaacaaattttcttttacaaacaagttattttgagttatagggatcctcctggtgactagattttttttaatgactaaaaatgcctatttagatagtcaacctatccgtaaagttggacactaaatgacatagtgaacatttaaagttgaaactctttgtctaccaaatattcctaaaactgtttttaagcatatacattaacttaaaaggtcaactcttaattgtctatagccaaagagagctttggtaccaataaattcgaattagggaatcggtttttttagatgtagaattacagagtatttttggaattaaattggaacgtgcctaaatatgaaaatgtgaaagtcccacttttctgttatgtactctattatgaggaatgaacagcctaactatactggattattgatataaataaagcaccactgtaaaatctcttcctaaaagattgctgggtcacacctagcaatttagggcaaaaagtcaataaagaattaaggtactttatttttaaaagcctcatttcccttttgacaggagcatcaagatactaaaataaaaataatgtaataagtactttcaaaatataacaattttcgttctcccatataacagggggctaacaag

SEQ ID NO: 139807 - DNA, 654 bp, Homo Sapiens
aagatccaagtaagcctttattattttctggaacttcattcagtgatagctgcattgatgacaaactaggggttgaagagtcacctgtgtgatgtatttaggtcacgattcatggaggatcaatttagtcaattactttccccaattcacaaaagcatgaccttaatacatataaattttaagttttatttttagaagttacacatattttaaaagaacaatttctttttattctttcattctagtaatattatcactacttagaacattaaaggaagatattttcacttatgatagttgaaatcaaaactttgtgaggccaaagcaatgaataatcttcaattcaacaagagatgctgggatacctgaggattatgtttcccgttctgtatgaaagagcacaacattcaaaactacaacaaaattcagacatgagttccttagctaatgaaagtttatgcatttggtatactctacttcatttttaatttggaaaagcacatgttaaaaataattttaatacaaaggcattataagtgtaaatttaaaaatcagactttgtatgatcagtgggaaatgtttaaaatattcagcacacactttcctcctcctggaaattctgattagaaagcccaagtttttgaacttctcacc

SEQ ID NO: 139808 - DNA, 582 bp, Homo Sapiens
gcacgaggagatgtaagaagcagcatgaatagtttatactgtggtttttcagagattgaatgccaagagaactcggtaaatgtttattcttctcagctttctctttaaattcccctaaatagcgccccatttgggaacagagcaagagtgttgaactgaagaccaaaatgccctcaaggtgtaaaataatccgagggggaatatttgctgggcgtcaggaaagactcagatgaaatttcaaccctgatggttttcggtgatccaggaagtcagtgagacaatctctctatatgcagagccctttcatgttaattagaatggtatggacaaaccaatgaaaacaagagggaaagtgagaaagatcacccatgattctgtttcactgtttgctttctcctgtcatggttaagagaaatgtgcaattcgatcctcaatcagtgggtggaggataacagggtagattcacttgtgtgcacttgtacagttgtagctgcgagtccagaagtcctctagagcatgtgtactggcactgagttggtgagacagttgtggagtatcccattctgatgttggagcggccgc

SEQ ID NO: 139809 - DNA, 586 bp, Homo Sapiens
agattatgcacatttaattttatttctggggggaagatttgctttacttctggggaaaaattcacaagaattttaaagatattcctacagagtaaaaagcatgattgtttacatgtttttgagcacctgtacttacaagctgatcatacatttgcagagctttaggtcctaaaatatactgtcccatctaccattctaccaagattgaagtgtgtttatcaagacagaaaaagaacaggttttaatagctatcttctaacaagataaagagaagaaaaatataagatataggctcttgttaaccttttattttgagaggttcttttgagaggttatctcagcaaataatctaaacaagtgaaggataggatatctattacttgttgacagtagttagatgactatataatcattagtgaaaaagatcaaggaagtatctgaaagctgctgtctgacagacccctagacaatctccttcctggacagacccctccaggaaggagattggaagcctctattctagggaatctgacacaaccagaatattcatgtggaggaggggactcccaaaaaagcccattcagat

SEQ ID NO: 139810 - DNA, 823 bp, Homo Sapiens
  misc_feature (125)..(213): n is a, c, g, or t
cttttgtcctctctcacttggagtttcgtgagatcgggtatgactctagaacaagtggatgggatcctgtacacgctgctggagcacaatcacatactcgattgagcaccagactgtataccctnnnnnnnnnnnnnnnnnnnnnnnnnnnnnnnnnnnnnnnnnnnnnnnnnnnnnnnnnnnnnnnnnnnnnnnnnnnnnnnnnnnnnnnnnaccctcacctttatgccttatatagagaatgctctgtgtaaatcctggctcataatcagtgctcctttttatcagttttggtgtggagaaagaggccagtttaaataggctttcaagagtctagggtcagaaaagcaatagtcactaagctaggtgacctgaaagctttaattttcatgacctggatatgtggtctattgtatatctttttctgaaatggtttgtattcatttaggttagatcaatcagcagatattgggtccggtataccaggtattattttggggtaagcttacaagtacaactcatgtttgcagccttcgaagatgtaacaatctcgttggaaacataagacatacatcacattatacacaaaagtgtatgatatgtacaactgagtggtacagatatgacatggaagatctgggggaggaagttcaaggaaggcaccacaccagaaatgggacctaaattaaggcttaaagaatgagcatggccacactgtcagtgagtgttctttaggtggtaggactatggttgatatttttcttcttcctatcttcctgcctttttcagattttcaatattaaacttgttattcttacattgg

SEQ ID NO: 139811 - DNA, 693 bp, Homo Sapiens
  misc_feature (669)..(669): n is a, c, g, or t
acttcttaagaaattttttattaattaaattataatttttacataaaagtgatcagagtgacattcacatgttccattcccatcaaaattcttggcccataatagtatttcctaacagttttcatctctccaccctaagaaatactctttttagtgtattagtgtacaaaaccacatcccaggccctccattactctcctttccctaaagattccctactcttctacgtttttaacattcatatgtgacatttcatgtagacacaaaaccgtattttatataaaagatcatacataacatccctaaaacttcctgatgagcctagaattgtactaatcttttgagttattatgatttcagtgaatctatcagattcctttcctcaattgtgagtttgaagcatgacaactttcaggaccagcatcattttttttcctctggcaaaatatcacatctgactgcccatgtgtgacaatccctactttcttacataatccccctattctccattcagaaagtcactaactctgtctaatatacaatttaaaacattgtcccaactgcataggcaacctgataaatcccatctcaattttccacttctgaatttgaaatgttcactgcacattataaagccttgtcaggatgctgtcccaatacacctcacanaaccagagcataaataaaagtatt

SEQ ID NO: 139812 - DNA, 698 bp, Homo Sapiens
  misc_feature (128)..(128): n is a, c, g, or t
cgaggtcagtaactattatgtgtatgaagatgctgcacattaagtctcagtagtgactctggttgttaatatttgtattgtaagtgtaatattccttttaaattataaggcatctttttatccttttntgtgtttgtaaatggatatagacagtggtaataactaatccttcaaaaataagttaaaatgtttttgtaaaattttcaaatgtcagtcaagttttgcattagggacacatttatatatagcaaaagcctgagctgtttttaaacagctaaaaacagtagtatttattacaatctccacaatgaaaacaaatagtgcaatgtaagaaatattatgtatcttactgttgatgtgtgagcagggagcagagctatctgcatttgtatttagtgtgagagtcctaaatgttcttcaccaactttttcttcctcatagaagcaacatggcatagttaagggtgtggactctgggctcctgctgcctgggccccgattccagcatggggcatgctacttaatatctctgtgcctcagttcccatcccataaaagagtagtgatagtgacaacatcttaggattgctttgaggtctaaatgagttaacattttcaaagcacttagaatagtgtctgagacacaagagctatatgttagaggttatcatcattatttgtattttgtgaattacgctgc

SEQ ID NO: 139813 - DNA, 567 bp, Homo Sapiens
ttttaaaggcaaagaaggtttttatttaagtgacaacatttgagagctaaaaaccagctcacatcaaaatcaagacccagttgtaaaaatcttttaactccataatgctgtttttgtcttgttagaaatctgatatcttacattagcgtttctaacggattttgtacaaggcagccataaggaatataataaacctttttcaccacagaaccatctgtcacagataatactgaaagttacacacttaggaacagtcagaccacagacaaggtcagactggctgccaccaccaagtaaacaactagaaaaggacaggggggtccaagggtgggggtccctgtgcacgagtcgccctcctctggcctgccccccctcgggtcacctgtttctcctttgccccaaagagggtggagtcaaatgcagattttcctcccaactgcctgttagggtcccaacaaggagagcagagcccaggtcaggcctcactgcttggacttaaccctaactaggatttttacgagggttcccccaaaccccggaaggaaaggaaggagggaatgtttcttt

SEQ ID NO: 139814 - DNA, 622 bp, Homo Sapiens
tgacagaatgagactgcatctcaaaaaataataatgaaactttccaaaacaaagtgccaggaccagctgggttcactgatgtgtttttgagatacttaaggtagaaatgataccaagtctctaccatctctttcagaaaataaaagcagagataacacttcccaactcattttgtgaggccagtattaccctaatagcaaagccaggcaaagatattacaagaaaggaaaactacagatcaatatttccattgaacacagatgcagaaatccttcaaaatattagcaaatcaggaatgcaaggcttgttcaacatttgatattcagtgtaatccattgcatgcattagcagctcaaagatgaaatacgatcatatcaataggtacagaaaaagcatttgacaaaatccaatatccattcatgttaaaacctctcaacacagaaggaatacaggagaacttactcaagttggtaaagaacatactacaaaaaaccctacagctaacattatccttgatgtttccaactagacactttcctactaagatcaggaacatggcaaggaacaccacaccactgcttttcagcattgtactggaagtgctatataatgcagtgatacc

SEQ ID NO: 139815 - DNA, 704 bp, Homo Sapiens
  misc_feature (577)..(577): n is a, c, g, or t
acagtgtacaaaaatatttactttattgtttccttatacatttctaacagtacaagattatcaatgttttgacaattttcaaaagacaggaaaaaaatcacaattttacccattaatgattatgaacagcacatggcagtttcaggttggaaggtcatttttacagttctgaactgctgtgcagtgaggactgtctgttttatgttgggagactctgtgttctgctaaaattccctgaagaatgtttcttttttttctgttttgtcaggcaatcagcctcgttagccttagtctgcaggtcctgcgttgccttctgtttggtggtggtggtccgagtgtcagttcaaagtgtggctgtgttgcctgggctctgtctcttgtatgtgcagctctgggctgagcacggaattcagctcatgtacagaattagagaatcctcttttcaggtctttgctcttcaggatttccccccagactccctggcacccagggggccccttttcctcatcctctggcttagaaagatgggctttctctctgatgattacctgcctacactgcctgctcattttgccanaaggaacgcccctcaggcagaaagcagagagagaaaaaaagatggattatttccacattcttcagaccatagggtcattttttcctgctcctctggctggaaagaaggtttctctcaggggaatttt

SEQ ID NO: 139816 - DNA, 864 bp, Homo Sapiens
ttcccaattatttttccttttccagggtaaaaataattcggttaggtttcctattcctaaccataaattaaggtaaattatggtgggcaataattcactttttaaccatttattttttccctagacttcaactatgcaatttaaaagcctgcttttggaaaaagtaaagaccctctcatgtgcttatcataagaatagtcaaattgtcacttaaaaagaaaagcaatattttagaagaattttaatatgtttatgatattaggaagctttacataatttaatttccacaatggaacaataatggccattactgactttaataggcaccacttgtaaaagaagcagctacagtttcttaaacactcactttaaatacataatttaaagttcaaaatgtttggtactatttaagagttttctcatcaagatggatagtacattctggagagtcaaactatacatttctctatagaaaagaaacatgctttatttaagataggaacatctcatgccttctaaagctttcatttttatttaacacaatgctgagattctattcttaggtgaataattttcaactatttttagtaagtcacctggggctaaatgaaaagtctgccattcacagtgtgtgcttcctgagagaaaatcatgagaatacagggggctgaaatggccccaagctttcttccaaaacaggttctttgcatcttgagttcccatccacttcaaaggagggacaaagtgggaggctccaacccactgggttcttacaagtgcttagaaattgtatttttaagattaggtcctttttattactctttgccatgggatttcttatgaaagctaaatggacaaggttct

SEQ ID NO: 139817 - DNA, 839 bp, Homo Sapiens
  misc_feature (718)..(730): n is a, c, g, or t
  misc_feature (732)..(738): n is a, c, g, or t
  misc_feature (752)..(753): n is a, c, g, or t
  misc_feature (789)..(790): n is a, c, g, or t
gtgatgtcaaaaagttgtatcagatcaactaaaaatggagagcaagacagagaatgaaaagagttgattttggacctcggaccttgccgtggctaaatctttaccttctcatagctgatgggataatgttggaaagaaaggttctgaatcctttggccacattttgccctgcttctctcagggttaagggttctggaagaacattaagaatgagattgcaattgaaaatagtcattttgaatcctattgattattcaaaaattcaggctgatttgtcttttatcagaggtaggattctgttttatagtatagaatctactttatccttccttttaatagttcctttagacctgtgaaatttcttcactacatttaatagttctcctatttcccgctcccccatatcaattttccttttgtctccggggctgagtaaataaacatgttctgtcacaaatagcagcaccactttggattgattttgctctccaggacatcagcacatggccctgatcagcactaccacatccaaacataagtcactgaaaaacacttaatatttatgagttggtaatgacaagggacattgtataaagtactatttgctagattcatgcctcaaaagttattataaacagacctttattaaacacatcttgaaagatgtagaagtccctctatagtctagtatagtttacaatagagttgtaagaccctnnnnnnnnnnnnngnnnnnnnaacatgggtcggcnncgcctcggccccttcgaagaaagcttttctagaacnncattcggtttgggcgccgcggggccccagtagggtaaagtggaacatgg

SEQ ID NO: 139818 - DNA, 315 bp, Homo Sapiens
ctttaaacctcaaggaactcttcaagaagtgtcattttttaactgagtaaattcttaatttgcagtataagatggccaaaagcaagccaagggccagttactagctggctttcaccattaaattgttttaatggttttaaggccattatttgctctatatcccttacatatttttgatttgggctctcagttgccaaaatttgatggtgaacatcctttgcatttttcccagccttggccgctttttcctgtaatgatgagttctccagcttaagattttttatctccctggctgttaacgctttatagcttatt

SEQ ID NO: 139819 - DNA, 896 bp, Homo Sapiens
tttaatggcttgaaacatttatatatcctatgaaaccgcaattagttaagaggctgctgattctaataactatgacaccagcaagggagtgaggggagaaatgttaactctggatgccaaattcagagcaaagtatctattatctccttctcacttttgcagtatctataaataaagtggtggggggagaattatatgaataatgttaaataaaagtgcatacagaactgagaaatattttcatggaatttgccacttagttcttaaaattcttataaggaaaataaccatttacaacaaaagactagttacactgttgctgtttagaacatgagagcaaaatgagtaacaatcaaattctctggtttaaacttaattatcttaaaacatgttattctgtaagttgacatctatgccttgaaaattcaaggcagaaagtaaaatcatttagaaagccagaaattccatcaatacatctagacagatgtttgcttgtagtttttggtatccaaaaccttttttccacacatcgcacagatgccttttttgtaggcacagccctggcagtaatgagaacctggttggtgcacagaacttttacaaattctacaagtggagaacttattctttccatatggatcaaatcttgctttttttgaagtcaaagctttattttcattcagctttcttccaccactttctgtggtattcctagcaccatctttccatgtatctggagtgataacagtaccaagtttcttttcacatttttcgcacaccatccttccccacgacggttcccctagccgcaacagcagcagcagcagcaggctgaaaacaacaacactacaacttggaagtattccccttccgggctacgtcaacccacttccccc

SEQ ID NO: 139820 - DNA, 924 bp, Homo Sapiens
  misc_feature (542)..(609): n is a, c, g, or t
  misc_feature (628)..(628): n is a, c, g, or t
tattcaaaatataaatcatcaacataatttgccactaatattcagtcccttcacaggacacgtgattcactgggagttaataaattagcagctggcaggcagtgacacacagcaaaaatgaaaaccaagaggtgaaatagttctgaaataaaggttttaaagctaacagaaatcactgaattactaagtcattagcactaattttgagccaactaactaatttatatggagatgatacaacgtcttattctttggtatatacagactatgtttaaacaatgtttgaatgtctgtaacgtgactttcaaaatgctcctggcttttacaaagatgtgattaagatgtagtaatacatgctaaaccatttccccctgcagagcatgtggtaactttcatcagtcacattgagagtccagaagataaaggaaaaggtcgtggatttcgctgagaacttgccagagttgaactccctcattttccgttccccagcattagcgggttctgggactggtggctgtggtggctcgttggtctttgtgtcnnnnnnnnnnnnnnnnnnnnnnnnnnnnnnnnnnnnnnnnnnnnnnnnnnnnnnnnnnnnnnnnnnnntacttgagggctggggggntgagcccccctcagccttgggggagctgaggtaggactacagagatggggttgcgccatgttgctaggctgctcttggcctgaagggtcctcccgcctcggcggcgccagacatagttttctatttttgaccaacataaacactgtgctgggtctgaatttttcagctacccttcttcggctggcaacacacaggacctggcggggaggtcgctcttaccagtccccactctgacgagaagactgcccagctccaggcaccgtagggccccagtgacgtagccgaacacccacccc

SEQ ID NO: 139821 - DNA, 692 bp, Homo Sapiens
ggatacaatattaagtccaaatccaacctcctgtcagtggagcagttatgttttatactctacagattttacaaataatgaggctgttccttgaaaatgtgttgttgctgtgtcctggaggagacatgagttccgagatgacccaatctgcctttgaatctggaggaaataggcagaaacaaaatgactgtagaacttattctctgtaggccaaatttcatttcagccacttctgcaggatccctactgccaacctggaatggagacttttatctacttctctctctctgaagatgtcaaatcgtggtttagatcaaatatatttcaagctataaaagcaggaggttatctgtgcagggggctggcatcatgtatttaggggcaagtaataatggaatgctactaagatactccatattcttccccgaatcacacagacagtttctgacaggcgcaactcctccattttcctcccgcaggtgagaaccctgtggagatgagtcagtgccatgactgagaaggaaccgacccctagttgagagcaccttgcagttccccgagaactttctgattcacagtctcattttgacagcatgaaatgtcctcttgaagcatagctttttaaatatctttttccttctactcctccctctgactctaagaattctctcttctggaatcgcttgaaccca

SEQ ID NO: 139822 - DNA, 942 bp, Homo Sapiens
  misc_feature (768)..(791): n is a, c, g, or t
gtctctctgcttcctgctgccgatgttttttttcagccaggacctcagagaaggttttgatacggatagtggaggagcttcttgctcctgaagtagaatcatcagtttttgaaggtccttctgtcttgagtttagtttgcaattctccacgtttctgactggctctttcaagaagaatttcttctaatgtcttcacatggatctcaccaactttattaactttatctgttgcatcctcattatctggatcagctgacatgcctaatcgctccttaagagacttggaaacttgagctttctttggtgttttgtcaatgttagtttctggagcttcaactttcttccctagcctctgtgccaggctacgctttaatggaggatcactgtcaccgcctgctgaaaattttcgtttccccagtctctcagtaagactcaatctaaccaagggttcttctccttgtttggtggagagagttactgtcctcaccacagtcctgacattttctttttcaggacctggaacgggctcagggtggagtaaaagactggaaactcctgaagaaccctcacctatgcttcattagatttttccgttcattttctttgacttaatttcctcaagagtttttattccaaaattcaaacattcaccttgctttatattgactgcaggtttccggacagaagtcactcgtaatccattgtgaacttcaggagttggttgcagggtaggtgattttggtttcatcaccttcctcagaaaactgnnnnnnnnnnnnnnnnnnnnnnnntgcagcattaattacaactggtggatgcgtggggctaggaacattttcggaactttctactttcataacgctccgcagctgaggggaaggattggactggacagacaatttgttctgctgaactgaaagttggctagccttcacttcctct

SEQ ID NO: 139823 - DNA, 630 bp, Homo Sapiens
tttataggcaaacacatggtattttattgtcgttttattctataatttttaattagtgacgttaaacatctttcctatcggccattttacatattttttccttatgagttgccttcacttatcttcagcaaaattatctattgagatatcttttttttcctgtaatttggaagtgctcttgatatgctgaaatgtctgcactgccacattttgccctatttgttcttcagtttggggtttgcttgcagttgtgcttatggcgttcactgtatggaagtgttgttgtttcatcaaaagcaaatctattgagtcttttttcttcatggctcctgccttcggtcataaactcttacaggtactacaatgaacactcgccactgtggttaccatggtgcagatgtcttttgtatccttccagaaaaccatttgaggagtgacttttgcaaaatgtaccagtctgccaaagtatgcagtcaggcagagtacttctgctattgaggtggccaagaaaggcaggggaagcaactcaggctcttcaaacagggcaagagcgaggtctacacaaataaagaagtatgcggcaacctgcgttgtctagtggttataaaaatagtaacgtctcatgggtct

SEQ ID NO: 139824 - DNA, 893 bp, Homo Sapiens
ggtattagtgctttggttgaaatacctaagaactgtgttgtggcagcagttggcaaagaactgataattttcaggttggtagcacccacagaaggatcactagaatgggatattcttgaagttaagcgcctccttgatcaccaggataatattctctcattgattaatgtcaatgatttgagttttgtcaccggctcccacgtcggagagctgatcatctgggatgccctggactggaccatgcaggcctatgaacgcaacttctgggacccatctccacaactggacacccaacaagaaataaaactctgtcaaaaatcaaatgacatttctattcatcatttcacatgtgatgaagagaatgtatttgctgcagttggaaggggtttatacgtgtatagccttcaaatgaagcgtgtgattgcctgccagataactgcacatgactccaatgtcctgcacattgccagacttccaaacaggcagttaatctcatgctcagaagatggcagtgtacgcatttgggagttaagagaaaaacagcagcttgcagctgagcctgtaccaacaggtttttttaacatgtggggatttggaagagtcagcaaacaagccagccaacctgttaaaaagcagcaagaaaatgctacttcatgttcactggagcttattggagatttgattggacactcatcatctgtggagatgtttctatactttgaagatcatggactagtgacgtgctccgctgatcatctcattattttgtggaaaaatggagagcgagaatctggattgcacagtttaagattatttcaaaaattagaggagaatggtgacttataccttgctgtctagtttaaggaattaaaaatacacatgcatgaaccttg

SEQ ID NO: 139825 - DNA, 455 bp, Homo Sapiens
cagctttgatattttgaagcaactgctcatggcttttctcaaattgttcttttagatgatctgattttctctggcagatttgtagtctttctaattctttctcatctcgaaaagaatgaatttgtgaatttaaatgctgaatattcttctcagctacagcatgtgcccttgtgattctgtctacttctctttgtagtttccctttttcatgattaagagattctaattctaactgataattgcgctttattttcttgagatcactagcttcttgcatggcttcttcagctttacctgtggtttgattcaattgcctaccaagctctctgagttgttgagaataccctttctccgcctgatccttcctttccagctccaacttaaggcatctgagtgtattatttgtttcatctagtttatcttttagcaaacgagccttttcctcactctctcgc

SEQ ID NO: 139826 - DNA, 893 bp, Homo Sapiens
tttttttaatgaggtccaaaacaaactttatttacatagagataataaggatctcaataactcaaatgctgaataattaagctgtaggttgactagaagtccgtgattcaccaatcctgttttatggaagtagtataaaactacatttggtattttccctcagttctctggtattcttgaagcttgacagattcagaacactttaatggtaacttgttgaacagcaatagaaaggagatgatgtacttagaagtcagtctctcacaaaaaagacattatatccgagttctgttaaagccccagccagcaaggcccataaaggaatgaagacataggatagattcatggtagtaaactgttccagtttagcacagagtgcgaggcagaaggctaatttaagtaacattgcaatgaggtaccaggcttttcttttaatattgtgtgatccatgtcgagggtcaaagccagacttacaccgcccagccattttcacaatcagcaggacaagaaggatagtatcaaatatccagactggaataaatatgaggaaccagttccaaggtgctttctcatccagtttcaacaccaacatgatcaagaagagtagtgtgaaaagccaggtgagtagtactctctgagccaaggacattctcatttaaacagtttaaagaggctgttgcaggatcggaaaaaaggaaatataccctggcagcgctgccggccggaaagcggagagggacgcgaagatcagcaaattcgccagtttggatccttgtccttttccgcccttttccccccattaaatccagaacccgtcacatgataattaagaaaaaacttcagttccgcctcctcaaacgactgcggtagaggatctctcagttctacctccc

SEQ ID NO: 139827 - DNA, 427 bp, Homo Sapiens
tttaactgtttgttcggaaacttcttttattaaaaaagattttaaatattaatgctattttcaatacaggtgtgataacactcaataaagcatggtgtacttgatataaatttcggaatgtaacagtccatctagttcctggtcccctccagtctccaccacatagcctagtagcaaaacgtacacacccgtttaaaaatgaagaagcttttgggcattgggtgagcacagtggggtggggcaaggaaagtgctcgttcctgaattattcatgcttttggctttgacttcagttagtaacatcaattctaagagaactgagacaaactcttctatgttccgcaaaggaatggaggaaaaagcctgccattcgcaagcagctgtgggcaaaaccagcgcagagtacaggggtcgggaaatgagggatt

SEQ ID NO: 139828 - DNA, 665 bp, Homo Sapiens
ttttgaatgaaaagggcttttactttctttttaaaacaagtgatttttaagggtttgtagaaaaagcaaagaaaagcataattctcctcttacttcaagctagtgtctgatgagaaagtaccaggctaacctctgaagaatcctaccccaacaccttcttctttcttctgctgggatgaacatctaggggtaagatatgactgctctctaccatctggggacttctcttctttatattgttgcattcctcaatctttgcataaggaagagaatggctaattcctctaggtgccaaggaagagcttccctcttcctacagcctcgcatgtttcttttcccactggttgccaggaagcttggagatatggtgacgactattcaggcacacatctcttccttgggtcctaccacagtcatctcctccaatatgcagtgatgttgacaggcttggagatggtgactagggagttctgaactaggtacttcaaatctatcaagtccacagtaaccaggagctatgatcatttcttaggttttctgatcttcccttctactttatttgtaaccatctggttgtaaatgttttcttgtaggttgcctcaattgattgtccattgtgggagtaggtagtgaaaaacagtaataaaataagactcatagttctc

SEQ ID NO: 139829 - DNA, 1419 bp, Homo Sapiens
  misc_feature (446)..(454): n is a, c, g, or t
taccacctctaagtcagtgactcctaaatctgtgcttccgaggcttgagatcttcagatcctaccctacctctccaaccgctggatgggcatttccacgtaatgctccaaaatgtctagtgagtgggactgcatgtccagcaccactatgcagccttccccatccaggtaagttttagattttagtacgcgttttcgttttcttttgttttctccacttgagctcttgacagaaggaggttcaggctcagtctttggcactggttcaagaggtggagacggaggaggaggtggggatggtgactcagcttcataagccccaggagagtctggaaagacttcatcttcactgctatcagattcaggaagtttgattcttctcctctttttcctcatgttttcagtttcctttgtctcatcatcagataatgctactcgcttcccccnnnnnnnnnccttctgcagcaccttaacaggctctgcttttttgctggattttttcaggcctgcaggagttgccagctttggttccgtgacagacactgtaggctgctccactattttttcttctttcacggcttgttctgagtccaaattgactttaaatttattcatagcagcttttccaaaaaaaggttgctcatcatattcccttttccctggtgccttgttgcctgctgcagatgcatttgttacttctttagcctctgttttcgttttccttgttggtttcttgggttttagcagcagctttggaggcaaacattcccataattcctttgggctgctgggaaacctgcttggatgcaggtgggccatgaccattggtggtcagctcattgttggcttgtgtctcacttgacatgtgaagatgtgactgctcaaactttttggaagacgaagaggattcagcaggagctctagggacggcagctgcacattgtatagcactaaatttgctgcagttctgcaagttgcttttaaggatgtcatagtcagtattgaacagaggcccactgtcctttagcatggctttctggatgctgtacacatggatgctggcagtcacagctagcttggacttcactgcttccaatttatcttctctcactactgcaaccttgtggcaggaatgtccattctgaatgagactgccagacaccaagtaggtaacatgcagttgggctcctgaattttcttttcgtttcctttcaacataatcatacagcatctgtttggcctggttaacatgaacccctagtgtatagctcagccatttgtatgtcacgatcttgttttggtccgtgacgaactcgtctatattttccagataaagctggtccgccatggtgcggcagcgctgggacccccccggccgtaatggccgaattcccgggcatatgtccggtaccgtcgactg

SEQ ID NO: 139830 - DNA, 535 bp, Homo Sapiens
  misc_feature (110)..(119): n is a, c, g, or t
aagtgatgttttttaaacaccagcatcaataggacagaagaagacatctgttttccaattaggtgtgtcagtagattccattcattgtttgtagttcccaatcagctttnnnnnnnnnngtttttcaaatttgcatacaagtcatctaaaatcaataacaacttgatctaatttagaaaaatgaaagagtatcgttcactaaagcagatctcttttgggtagatggaccatcacaaagggagctcttacatgcttttcccactcccatcccaagtccaccctcccaccaattgtattgtataaatcaataaaaagcaaaggttccagaacaactgaaagaaaaataattccaaactaagcagagtgaactttccattgggaatgaagacccatgggaaaaggcagcccagcccataactcctccctgctggaacacacaccgtaggtgtaggaactgcctgggaatcccattagaacacactgtttctcaggaagagaaaaagctgcattacaagaaaagttctcaggactttag

SEQ ID NO: 139831 - DNA, 363 bp, Homo Sapiens
atgagccaccactcccagccaatagtgaattttctaagagcatgtatccctatcagtaacagggatacatgaagatacttataaaatacagaaaaactgcccagcaaatcagggccctaaacagttggtagattccataaattcaactggctaccatgtatagccctcactgtaaggtaggtggttaggtttctagagagcattagtcttagaattatgaagagccatattaacccaaatgatttctaaatttagatatatattttccctgctacataaaaactctgggtaataactagaaatagacccacaatttagagacaatgtatactagatttatctcctttgtttttagttgaaggc

SEQ ID NO: 139832 - DNA, 530 bp, Homo Sapiens
tttttttaaatatttaaattttattcttaaatactatttattaatacagagaaatactcctgctataattttaagtgacacaatagtacaacaattgttaagaacaatccacctgtgtcaaagagacacatacacaaacacacatccatatacacatacaagcttggagaaaattctgaaaggatctcattgtcctagatggtggcattatgggcaattattttgcaaatgtcacccagtgaagaagcaatggtgcctttggaaagtatgtagctcttagttaagcttttatctggaaggtgctggagaaggtctgggcacagagctggttggctccatggttttgtgacctgtgccatcacataggaccccatgttcagaaggaccccactcttggtttaatgctctgctgccgtgtcttgaaattcttaataatttttttgaacaagggatgctgcattttcactgtgttctgggcctaatgattatgtagtcaatcttgtctggcagctcttctctggcccattcac

SEQ ID NO: 139833 - DNA, 715 bp, Homo Sapiens
attctgtcaaaatttttgttgccgcctcggatgtcataatacctgcagtactcttattaccagactcttcatagatcatatgcctttggctcaaagcctcacatctgttagtggttttagaaactgtttcttttttctttttgacagtacttgatgcactttgcacagacagggtgtgttgaataggcattattttataaggaaaagaagtctgtggtgactgttttgaaataagtggtaatggtgatggagggcagttcttttggatttgcctgttagtgctgatgggagacggcagaccacaagcattttcaggagatgatgaccatttataacactcagtgtatgatgatagacgcttcttggcaatagggattaaggcctgtttgtccatttctgatttctttggagcgtctctcgcttttgccttgggagatgcttccatgcttgcttcaagggatgtcttgggggatgctttcaccatcgcctcaggagatgcctccatgctctccttgggtgaccctttcacactctccttgggggctacttctgcgctccccttgggaggtgcttccaggctcccctctggggctgcttccacgctcacctctggcagtgcttccagactcacttccgggggtgcttccaggctcgcctccggggatgctactatgctcaccttgggaactgtttccaggtccaccttcgggagtgc

SEQ ID NO: 139834 - DNA, 934 bp, Homo Sapiens
  misc_feature (860)..(894): n is a, c, g, or t
ttttttaaatgtgatttgctttgttttattagaaaaaatactcaagcaaggtctacaatcattggtcaattaagaatgacttacaagaacatgaggcaataaaataaaaatacaggtacaaactatgtatctgaaacacttctatttggcaattttataacaaatcaaattttaaaaagaacaaaagagattgcagattacttcgcagatacagaataaagcaattgatgaagtgcttaagcaaaagaaaacaaccaaaaaagaaaacacactgcttttctttttaaaaataaaatcacattgctatagatcaaatggataatacccttattaaacaaccattccagaatgtcttatagtagcagtgcttttatttgcacttcacttaattttataagactcattttcatgtatatagctctttacccccattgttaacgaataaagtctctcataatttttacacttttaaattttttaaagcaaatgagaaatgatttatgtatcgtggaacctttcccattttggaaccaaaggttttaattctatatttttgtctaatatttctttaaaaaatttagtgtaaaaactgctggtttttatatcactgtagtaaagtgaaaactcctcaaccaggagtattttctgcagtttcactgcatataaccacatactttacaatgtccttccaacagtaaggaaataactgatttcttgatcactgtcagaaatgagtgccataattctattatgggtataggtcctccctcaaagactttctggaaggatgttcaatgtgttttgttcttcccggccgtaatggccgaattcccgggcatatgtccggtaccgtcgactgnnnnnnnnnnnnnnnnnnnnnnnnnnnnnnnnnnncggccgcttcctcgctcacatactcgctgcgctcggtcgt

SEQ ID NO: 139835 - DNA, 844 bp, Homo Sapiens
tttaacttttatttttattttgagataattgtagatttacatgcagttgaaataatacagagattccatgtgcccttcacccaatttcccccagtggtaacatcttgcaaaactatagcacaatatcacaactgggatactgacatcgatagctgtgatatagaacatttccatcatcacaaggatccctcatgtttctcacagccacgcccaattctctcccatcctcaccccctccttaacacagccaccactaatctgttctccatttctataattatgtcacttcaagaacgttatataaatggaatcttttggtacaaaacctttttaaattggcctttttcattcagcataattctctggaattataagttgctgcctgtacccatagtttgttcttttttattgctgagtagcactcacggtatgaatgtactatggtttgtttaatcatttacccaatgaagaaaatctgggttgtttttggttattacacataaaattgcaataaacatcaatgtacatgtttttgtgtgaaaacatgcttataataatgtgaaactctatgcctaattttctagttgacaactgtagagcaacagatgtcaagacatttgccaaaagtgacagaccacttctttataaatgcgaattaactaatggctcacacttatcagtacttgcagcttttaaactatctgctacctgactttgaaaagtcattgactctatctctttgagcttcaattagacaagataaatgtttttcaaaatgtattatttgaaatgtgaacttcatgaaatgctctgaaaaaggaggggggtggtggatttcatggcc

SEQ ID NO: 139836 - DNA, 578 bp, Homo Sapiens
aaaattatcctgtggctgctgcttagattgaaatttcggtgtctatattctgtctcttctttcagatgcaactgccaggttgggaaattcctcggcatcttcaatcattggaggctcttgaactgtcaggacttcatattttgatgtagatttttctttctttttgttattctttcttgaggcttcattttgttcaaggtcactaccttgtgatgctttagacttttgggtaggatgaataatgtgtttttctttgttgtaggaaggatccgaagataaagcttcagaagatggtatactaacatttttaggatctgctgatgaagcaatggtctttaagtttatcatagaagtaacatttttaggggctgctgacagttctgtagataatgtctgtcgaacaacataacccattggtgtccaagataactctcttgtacatgaaggagaattggtagcggcattagcagttacagattcatttgggttatttttcaccactatttcaccctttgataacactgcagctggttttactacttctcttagaagagaaatgtcggtagagacagaataag

SEQ ID NO: 139837 - DNA, 982 bp, Homo Sapiens
  misc_feature (19)..(19): n is a, c, g, or t
  misc_feature (36)..(36): n is a, c, g, or t
  misc_feature (280)..(280): n is a, c, g, or t
  misc_feature (759)..(759): n is a, c, g, or t
  misc_feature (917)..(917): n is a, c, g, or t
gagggattgtgcggggtcnttcatttggactcatgngggcggcttcttttccctggaatgcccattccttgaaaaggactggcactgctccaactggagactaccactgttttggaggactgctttgcatgctgagagtgctgctcttctccagggctgtcagcatgccccccaaagtcccaactgcactgaaggctggctcttctttacattatttttaaaattatcctgtggctgctgcttagattgaaatttcggtgtctctattctgtctcttctntcagatgcaactgccaggttgggaaattcctcggcatcttcaatccttggaggctcttgaactgtcaggacttcatattttgatgtagatttttctttctttttcttattctttcttgaggcttcattttgttcaaggtcactaccttgtgatgctttagacttttgggtaggatgaataatgtgtttttctttgttgtaggaaggatccgaagataaagcttcagaagatggtatactaacatttttaggatctgctcttgtacatgaaggagaattggtagcggcattagcagttccagattcctttgggttatttttccccactatttcaccctttgattaacactgcagctggttttactacttctcttagaagaggaaatttcggtagagacagagtggacaggtccccacttgggttgcttctgtatctctgacatattgttctctgcaccttgcagttcaggaaaagtccangtgtggtaaattcaaactcaggtttggaggtagatacattttttgcaatgattctggatttcctgtctgttcgcttatggtaaccatctgatttcaaactattctcagcgtaaatggacaaatgatgtgaacctctagctgattttatctcagatgantatagttcccccacgcgtccgcggacgcgtgggtcgacgatatcccgggaattccggaccggtcc

SEQ ID NO: 139838 - DNA, 977 bp, Homo Sapiens
gggttttggcgggcggttggcgttgcgcagaaggcggcggcggtggtggcttgtggtgcggcctcaccatacaggaacagggcagacgttagcgtgagtgatcactctcaatcccggggacctggtggccttagtctttcaggtggaacggtgtgcgacatgggaaagaaaaccaagcggacagctgacagttcttcttcagaggatgaggaggagtatgttgtggagaaggtgctagacaggcgcgtggttaagggacaagtggaatatctactgaagtggaaaggcttttctgaggagcacaatacttgggaacctgagaaaacgttggattgccctgagctaatttctgaatttatgaataagtataaggagatgaaggagggtgaaaataataaacccagggagaagtcagaaagtaacaagaggaaatccaatttctcaaacagtgccgatgacatcaaatctaaaaaaaagagagagcagagcaatgatatcgctcggggctttgagagaggactggaaccagaaaagatcattggggcaacagattcctgtggtgatttaatgttcctaatgaaatggaaagacacagatgaagctgacctggttcttgcaaaagaagctaatgtgaaatgtccacaaattgtgatagcattttatgaagagagactgacatggcatgcatatcctgaggatgcggaaaacaaagagaaagaaacagcaaagagctaaaggaggggatggtctctgtcatttctctttgtacataatacattcacctccctgcctcctctcctttctacccacccctttctatcctaaacacatccataaaaaatgtgcttatcactgtgctccacaggagaaatgttggtattggttctcttgttacataactgatggtctgattaatgataagtgtctctctgtgaagaccaggcatttacatactgagtgtaatacccaccaatttt

SEQ ID NO: 139839 - DNA, 817 bp, Homo Sapiens
atattagcaaaacaaaactgttttatttatcaaagacaatgaaaaaattagaaaatacagaagaggttataaagcataataaattttattttttggaaatggaaaaatgtccctgaatagttagatgtaccttttagtagtaatgtctaataataaataagaaatcaattttataaggtccatatagctgtattaaataatttttaagtttaaaagataaaataccatcattttaaatgttggtattcaaaaccaaagatataaccgaaaggaaaaacagatgagacataaaatgatttgcaagatgggaaatatagtagtttatgaatgtaaattaaattccagttataatagtggctacacactctcactacacacacagaccccacagtcctatatgccacaaacacatttccataacttgaaaatgagtattttgcatatctcagttcaggatatgttttctttacacagttaattccttaaagtcataaagcaagaagctattcatagtacaagattttatttgctaagctttacaaattaaactctaaaaaattattacaatgatactgaaagatattttattggccttttaaaagacaaacacaaatgagaattatcttatttagaaaattaactttgaaaattatcttaaatgaaataaatataatatctaatacgatctcttcctgcaagatctcttaacgatgggcactcctaaaaatgcagcttcccatctgaaaatccctaaaactagtatgtcccccggccgtaatggccgaattcccgggcatatgtccggtaccgtcgactg

SEQ ID NO: 139840 - DNA, 1064 bp, Homo Sapiens
  misc_feature (760)..(779): n is a, c, g, or t
  misc_feature (899)..(919): n is a, c, g, or t
cagtcgacggtaccggacatatgcccgggaattcggccattacggccggggatagtaggaaatggagtacagaaaggcatacagtattatgttacagtggagtgctttcaagagcatttcgtaggatctgtccccatccgaagaggctttgtgaactgcctgctgaatggaaggaaagcaactttaaaacatttagagttttgctgagtatagccaaatgcctgttctgaaacttataggaaattggaattttgtttaaaattttacactttaaggtagcaaatgtcaattattagaccgagcatattgtgaagaattaaactaaaattaatacgtacagttttctctaattaggtgactgttcataatgggtatatttggaatttagaagaaataattttgtagtaattgtggcccttatgtttaacagataattcagcattggcgtatttgcttgtcccaatacaagaatgccaaaggaggaaacaggaaaaattgccgtccattttaaaaatttaggtttgttgttttaaaccataattgttctcagaacttttttggaacttctaattttgggtcatttaatttaagaatgagagtcatgatgttttgatttatgaaggtgaatttaatgcaaaagtgggtaacactacattccatagcaaagttttttacttaacttttattaatttttaatagccaattatgtcctaattgtattttggggaatgaacagcagcaaatactgtaaatgtacagnnnnnnnnnnnnnnnnnnnnggttatgtatacaaaagttttaactactttttggtgtttatgaaaatcatttagttgacaaggtgcctatgccattgttaaattttctttaagtaatttaacaacagatttgctaatttnnnnnnnnnnnnnnnnnnnnntcttaccagcagtttgtaaaggtctggaatcacagttggcatcctttattcaggtctcttctctccaacgtacacttaaaattggtgccgagcagggatataacctgcagttaagtgaaaagaaaatccagcctccccctccaaa

SEQ ID NO: 139841 - DNA, 258 bp, Homo Sapiens
ggagtggggtgcagtttattttatgaaatgagaacttttttcaaaacaagacgctatctcccctcctcccaaacacacatatggcacaataaatcagcatttaccacttctgttcatggggaaatgcttggaaatctctctctaggttactctaggaaatgacaaagttgcccttttcagggatatacccaaacagctagcaccaggccacttttgatctgtgatgtctacaactccaggccaaatcatcatacagat

SEQ ID NO: 139842 - DNA, 730 bp, Homo Sapiens
ttttgattttgagtgcagaactttattacctaggttagaaggtgggagtatgcagcatttttctctttgactcctaaccacctgtgagcttgatggaggagaagggagagagagatagacatcctgaacttagcggctgctggtgttaaactgctggtgatactgggctgtaggttgattggtgtagattactgaattcaggtaatcctgctgggctttttgctcattagccagctgctggttgaaggatcctagacccctttgaaatacagcacacaattccctctcctgctcttctagctccagcactgcctgggctgagctcatggtctggcttttccattcagtatccagtgttttctcagcctgacggtgtgcttgcttcttagagcgttgtacttcctgctctttcctgatggcagcttgctgctctggagtcatgcccttccagcaatagggcaggacccggtagggagccatagggtgttgggcgacctgggggttttcagtcagtaggtcactcgtgctctggtgctggatctccgcaaggttggccttctgttcacgctgacgctcacagcgctgacgcccagcctgcacagctgcctgcgctttgttggcgttggccatggcacacatcatggccgcacgacaggactcctccagcctggccaggtgggtggcctgtgcatccatggcgaggcgcactggttactgagcgcatctgtat

SEQ ID NO: 139843 - DNA, 502 bp, Homo Sapiens
tggacttgattttgagtgcagaactttattacctaggttagaaggtgggagtatgcagcatttttctctttgactcctacctgcctgtgagcttgatggaggagatgggagagagagatagacatcctgaacttagcggctgctggtgttaaactgctggtgatactgggctgtaggttgattggtgtagattactgaattcaggtaatcctgcctgtgaaagaagtccagaggtctcagctgacatgctttccctctctccatggttcctcaccatccctcctctccctcccttggcatttatctccaccactaccacctagaactcactgggctttttgctcattagccagctgctggttgaaggatcctagacccctttgaaatacagcacacaattccctctcctgctcttctagctccagcactgcctgggctgagctcatggtctggcttttccattcagtatccagtgttttctcagcctgacggtgtgcttgct

SEQ ID NO: 139844 - DNA, 637 bp, Homo Sapiens
cagcatgggtcccaacattagcttttcttcttggttatatcatctgccaaaaatagagaacttatgatctattcatgtgtgtttcaggcttatttgggagaactaatttgaacttaatccccacttcatctaattttagcaaggtaacagttgcccagggcagtacctgaattaactgtccatttcagtacatgtcaagtgcctttgttaggtggagaagaaatgtctctagaggaatataaatacctgatttcttgtcatcgagattcttgtactgttaaatgaatattgccttttactgctctttatggcttattggaataggagctcatttaagattgatcttggagagtttcttcttgtgattttagttcataagtatgtcacctttcattttatagtgttcatcattgagtaatggattaagtgaaaatccaggagtatccatctgcagttatgtgctgaggtgataattcatccaacatatttgttagcataaatattatgcttcagtttctgttgcaaattggtgattgtgaaattacagaaagtgattttctagtctgctttttttgtttaattcttgtaatgtaagcaataaatatggagtgtcagtagtctccttcccccccaaaaa

SEQ ID NO: 139845 - DNA, 604 bp, Homo Sapiens
tttttggcgcttaaaaaatatttattattgccactattcattacagatgaaaaaagttttgtacacaaagtcatggagcagcagcagggctgggtcagcagcaccccagcagccataatgaagctggatcccattcccagcccctgtgcagcaggttctagccctcaggaccattcagacaccttcactgccatcagaaactagtataggaaataattgggggtgggaggaaagcaggagtgaattcaataagggcttaacaagcaatctaatgaaagcaccaaacctaaacaatgatttttttctctgaggtaaaaatacgcagtttcacaatcacccccaaacatgtaaaagataaaaactttccccaggaaacgaagagccaaactttgagttttacacaagcaaccgggagccaggcaggaacttgttcaggggccacaggttgctctcgcccacgttggaggtgcgcctctggcattgcttgcagcgccgatcttctcacactggtctaggagaaacagcttgtctgaagcccgttcagaaccttgtcctccaggtctcgctgcttcttcatcgcagcatcctttcgcagtcctcctgt

SEQ ID NO: 139846 - DNA, 1035 bp, Homo Sapiens
tttaaggttttcttacagttatttttattatttagttttaatgaactaacacaacgtaggagggaacgctgggttggggtttacttgttacatgacctcaggatgatgtactacaaacttcacagataggcacacctctttcactaattatttttaataaaacaaaagatcaaaaatcagcatcaggagatgacacaatacagttgagactatggaaagcaactatttccaagctgggcatcataaaatacatcatcaagaactgtgaacagatttgctaaacaaaggaaagcctcatccctttaaccctccacagccgacatcgggagtctcttggggtagaacatgaagtgaaaaagaagtggatggccagaatgctgtacattgtcccccagtgacctgccacagagactatttttaaagacgcatttatctcagcaggagtgacggcatttaagaagtagcccggtactcaggctagacaatcctgcaaaagtctgcagagcttggctgcaccctttacaaagacctgagtgatggatgagatgggaattgcccttgattggctaggtggctggtttaaagagccataaagataatgcagaagtgagatcttggaaaccaaatggagttagcccccaaattattgcagccaccccagcactccaatgttaatccaattttaaatttacaagatccatcttaactagaaatgcaggctctaactgtcctgcaagttttttaagtggtagctgctcaatgaattgtattatcccattaaagaataatgttttagatgtggtaatcccagactcacacaattctcttttatgaacctagccactgtattcatatggaaagtaaattacagctatattacatcgagcctttcattattgacagagcaataaatgttagtactcctataaaacactgagagaaagattaatacacagtggtatatatatttggaggaatcagggtgtccagtcagagtcaatatgtcttctctccctatacagaaaaaaagggagg

SEQ ID NO: 139847 - DNA, 447 bp, Homo Sapiens
  misc_feature (248)..(248): n is a, c, g, or t
ttttttagctgggtaggtctgggttctaatccagattcttttattatctaagcaacctcaggcaaactctttaaccttcctgcatttcaatttgtcatctccaagtggggaaaaaaatctgcagcctggatttgttgtgaggactcagtgaggtcgtgcggtgaggtactggcacgttcccacggggttacctgggtgggaaggcatcttgtcaaatcaaactcaagaggaaccactgggaggatgangggtttgtggctctgcccaccctctctcttttccagtattctttgtcttttcgtcatgttggtttctcccagctgggagctgtcagaaacgctcagaagggggggaaaaggcagcctttcatcccctaagcttgtcatcctcagctttttgccaatgctcagttcttttttccttcagtgatgcactgcagcctcgtgc

SEQ ID NO: 139848 - DNA, 743 bp, Homo Sapiens
aagatgccatactgtttttatttgaataatagtaattacaggattgttagtttatgttcattctgttttcaagaaataattcttatctggtgacccattaattaatttgtaatgaatttccatcaaactgtttgtttgatgaatatcaatgttctgagaatcagttatcaagtatgctgtacaatcatgagataaaggtcaattgagaaaaatactagatgtagtcttggaaatttttgactagtgaaatcacttcattcaagtgtgattaaaagttggtcattaatttagaactaagaaataactattaaacaaacagcttgtatcaggaaaacaaattctttctaaacaatacctccatttaatgacaagaaagttctcttactatgtagctatcttggtatttttcatcctatgtatttctgccatgtagtcctcaattttgggaggtgacattttcttttctaattaaattacttccttcctataaggaagttcatagggcttggtttgcttatgtagtttctcttctcttttcttcataacttcttgaaagtgatttttctctgctaactttttatctttaagttcttgggccttgcatattgcatcttctttttctcggatctttagctcttcctgccagtgatggtcaatgatttttgccaactctttatctgccttggtgaagaaatctggatatggaaacatgggaatttctgatacagaaggatgttccctta

SEQ ID NO: 139849 - DNA, 837 bp, Homo Sapiens
aactgagacaagattatatcttttaattgatctaaagcgttgtaaataaattgttctcgacatatctagacaggggttaaagggtttctttgacacattcggaaccgttcacccatgacatgtttccatggctcacccttggcatccatcctcggtgttagcagcagcgttccctgcctcctgcaggatgacttagaaatctagtgagtttcttggtgtgatgccatttttattgccctttctgtgatcaaatcatatttctgtacattttcagtggtagaaaaaaaaggttttaaaaattgtatcctagggaacagtttgccataagtcagaattttgcagtttagctcatagatcttaattggtttttctctaaaatatgaattttataattgaaggaccacaatttgtttaatcaagataggcaacgctgcagttcctttatgaagaggcttttctgtcgtcccaggctagcagagatggatagcttctttgtcagcaatgtgatttcacttattttattgtcttattttaaaccctgtctccatgacttcatttgcactttgacagagcagaggcagagtatttgtcttatatttctcagattataatattaaaaaattacaatcaatttattttcattaaagaacgtgagtctttttagcattcctttctgcttatccttctttccttaccctttgtccttttgtttccattagttttctttcgtcttgtattccttgccactttattttgttagcaacttctagatgtttatcttcatggatctatgattgacctcctagtaaaattctaagtcttgcctttcaaaaaaaa

SEQ ID NO: 139850 - DNA, 934 bp, Homo Sapiens
  misc_feature (115)..(265): n is a, c, g, or t
  misc_feature (461)..(478): n is a, c, g, or t
ccggtgttaatcggcacgaggggaggctcccaccaatagccatgggagtgtgccaatcttgaaagctggtccttcaattccagccaagcattcacatgaccgcaatcctagctgnnnnnnnnnnnnnnnnnnnnnnnnnnnnnnnnnnnnnnnnnnnnnnnnnnnnnnnnnnnnnnnnnnnnnnnnnnnnnnnnnnnnnnnnnnnnnnnnnnnnnnnnnnnnnnnnnnnnnnnnnnnnnnnnnnnnnnnnnnnnnnnnnnnnnnntatatttattttgtccaggggagtggaaaggcgattacagagttgttgagccccatagagtcctagtcttgcttaaagaaatataccagttctttctaatacagaatccattaagttcgttggttgcaaacaatagaaaccaactctgcctcacttatgtttattggaggccataagagagccacagcatctaccnnnnnnnnnnnnnnnnnncaggttttggaaaagacaggaactagctacaggagctaatggccaatcttgtctgagttctttgatggcgacacatgaactacagccgttttgttgttgttaatttctccgtgttttcccctcagttttggatgactctgctcaaggttcagattctgaggagcaagtatctgttgggctatctgaggtcctgctaccattccttggccagtaataggtagtttcacagggattatatgcaatggaggaaaaggtgttctcaaggaaaactagggagctttctccagaagatgatgtaatggcagaaacaacaggtggttgaccacagaaggggacaataataatacttgtaatttattgtgcgcttatatgagcctcaccctctcccaggtgtcagataatgctcgtaaatgccttagtccatcatctcagtaaattttttttataacactaaaa

SEQ ID NO: 139851 - DNA, 732 bp, Homo Sapiens
tcaaggacgtgtttaggaagcaaagacaaaccaacccaagtggtactgaagaggacaagatgggaaggacatttttattttccctaatcttcaggcaacctcaccaagctggaggtcacatgtagctgagtgtgaaaccaagaaaaatacgaagcttcaaaagtactgtgcgttgtatttcttcattctctggcaggctgggagtccaaggtcagtctaggcaggagggctgcttggcctaagcagtcacacaattttcaccgtcttgagcatatctgacaagacatacgtgtcatcccaacccctcccaggcttcctcagggtccgctccaaagcctgggctgtttctaggagctctggtgtggcaagtttttgctcagggtgcagctgacagaacaggatctcattcacttcaccctcaattcgccggacatataggagggggaacactgccttgagcccagccagcactgagtcttttagccccaagtctcggcacacaaggttgagaataaaaacacctatagggtaggaagaaaagtcagaatgacttcacatcaggagacatatgaaagacaaggatcggctttgaggaaaataccaattcctgtcccagggagactggtggactaaaacacacggtggtgatgagtttgcagagaatacacagcatagaaaggcagatggagaaaagcatggggagcatgtgagccataaacaaactccagcctt

SEQ ID NO: 139852 - DNA, 1015 bp, Homo Sapiens
  misc_feature (936)..(952): n is a, c, g, or t
tttcagggagatttgtcacattttattcagtatttctgctgcactgccagcctagggatgcacttgattcccaagaaatgcaactgtcctattcgcagagccgtccacaggtacctaccccctggactgcagcaactttattaccttaactagcacagaacagaggttgatttaaactccttacactcacttctcagatcaatgaatgggcaaagaaacacctcatggctctgggaaggcatgctgagacccgtttttgcaagtcctgaggaatggaagaatatagctgccaggtatcccaagtctagggcagggagggtagtatcggcatcactttcactgcattctgttggtcaacgcaagtcagaggctcagcccagatccaagggcagggaagaggctccatcgtgtagttgggctcacttggaaggtaatgggaggagttggtggctgctttaagacacataccacatctagatttcaacctccagaaaagtccaaagatgcactcacaggagcccgttagtcaactgaagctggttcatggctctcttcttcaggtggagactaaccaactccctgacctccttcggttaagtgctccttcctttttcctgctgcctggaatgtctatgtgccatctggagctatggcagccttcttgcaaccatgaggcaaactctatgtgcaagagcaggtagctagaaagagcctgccagccctgggcttatatcctgcttcccagggagcttaaagatagcaaaacccacagccattttcatcaaatgccaggaaattcttaggctgggattgttgggattgtttgaatggttgagcgtgaaagacttgttataatgggcttgttgaatacggtgaaagatgagatggcttttagctgcctccactccccgtgtcccatgctccatagatgtttcnnnnnnnnnnnnnnnnnaatcattttttggttatgccaggtgtctcctgtgtgtccctccagatccctctccagccctag

SEQ ID NO: 139853 - DNA, 404 bp, Homo Sapiens
tttaacatcattctttccatctttattaaaagaccctaagcacaggacactctagttgatccctgccactttcacttaacccatctattcaataagtatttattgagtgtctaccatgtgccactcaacaaagatccctgcccttgtagaaattaaattctagtggatattgtgtaaatctgaagaaattgtaggtacccgatctctttacagaatggctttgtaactagtttgggtataatgttgggaggacaggcaatggaggaaagaggaatgcttctaacagttttgccattattccaactttccttcctttctcaacttgcctaagtgtttttcccagaaagaaccagagaggcagctcggaggataattttgaatcatgccctattgttttgggcatt

SEQ ID NO: 139854 - DNA, 608 bp, Homo Sapiens
atcttactctttctgtaccgatatatcaaatcacatgaaatatttaaagtttgaaaattataattacctataaagctgtgaaaaatagaagtataatttgaaaaaacatttcacttatcagagatttttatatttatacaaaagattactaaatgaaggattgctaaatgtttttggttcaattacataaaaattaatattctgggtctgatctgtcagagaataaatatcaaatctaaatttaatgtagagatacatactatttctccatatgaattttaagatattttagtgcttcaagactgctgaaagcaatccagttgctcctgtgctagatggtagccagagaattttatagtaatggaggttagcccttaatctcttcattgcatttcatttctgtaaatcagattaagtccttaatattattttaaattaaaatttgtgtgtaattgccattaaattttcaaaatgtaatttaaaaggattaaatactcatttaataatttaaaataattattgtataatatctacatttggagaattttgaactatcaagcatatactgtatacagttagaaagttattaaatgaacattttactcatt

SEQ ID NO: 139855 - DNA, 629 bp, Homo Sapiens
  misc_feature (331)..(343): n is a, c, g, or t
tttagaaaaaaatttgagattttattcagatttttctattagattgagccactaatgttcggtaaggggcacttgatggttaaaaaacacaactggcatgataaaactacactaaataatatctactttatttgaacagtcatatcaagaatggccctaaatttaatcaaggactaaatttaatgaaagactctgacattaaagactctggattgtttgaaggtattttgcctgcaggtgagactggttttgagggcacagaaacgtagcctgaatgaaccattcagaactcatcatgcatccaactgaacacgtttcatgcttactcaannnnnnnnnnnnnaaatgcaacaggctcagttttctcacattggtgcatctcttcatgctagaactgcttatgtctacagagtccctgaagaagcaaaaatcctttttttagcattaaacatagcatatggagttcttcctcagctcttggcctatcgttgtatctacaaaccagagttcttcataaaaacaaaggcagaagaaaaagtggaataaaaatattacttcatgttcctcctttctaaattactaacttttgttatactggtactgatattttgtcccacctcgtgccgaat

SEQ ID NO: 139856 - DNA, 1180 bp, Homo Sapiens
  misc_feature (76)..(110): n is a, c, g, or t
tatagatcactatagggcgctactcggcgttacgaacgacgagcgcagcgaagtcagtgagcgaggaagcggccgnnnnnnnnnnnnnnnnnnnnnnnnnnnnnnnnnnncagtcgacggtaccggacatatgcccgggaattcggccattacggccggggatggtggcagccatagcatgggaggaaacttatagaaccattggcctatattgggttggatctattattatgagtgttgttgtttttgtgccaggaaacattgtagggaagtatggaacacgaatttgccctgcttttttcttaagcataccatatacttgtcttcctgtctgggctggtttcagaatctataatcagccatcagaaaattataattacccctcaaaggttattcaagaagcccaagcgaaagacctgctgagaagaccatttgatttaatgttggttgtgtgtctcctcctggcaactggatttgcctgttcagaggtttgattgctttggattgcccatctgagctctgccgattatatacgcaatttcaagagccctatctaaaggatcctgctgcttatcctaaaattcagatgctggcatatatgttctattctgttccttactttgtgactgcactgtatggcttagtggttcctggatgttcctggatgcctgacatcacattgatacatgctggaggtctggctcaggctcagttttctcacattggtgcatctcttcatgctagaactgcttatgtctacagagtccctgaagaagcaaaaatcctttttttagcattaaacatagcatatggagttcttcctcagctcttggcctatcgttgtatctacaaaccagagttcttcataaaaacaaaggcagaagaaaaagtggaataaaaatattacttcatgttcctcctttctaaattactaacttttgttatactggtactgatattttgtcccatttcactctcttctcatacgtgagtacttaagaatatgtacattcttgctctgcactgtatgtgtgagctatatggtattgtgtaaattttttttgaaggaaaatggaaattcttgagaaacagtttgtttaaagaaatatattcaaaatcatttgtgaataaacttgatcatccatctcaatattgtttgacatataaaataattataagt

SEQ ID NO: 139857 - DNA, 658 bp, Homo Sapiens
tttaaagcactacgtttggaacatctttttctacatgctgccttcacctaagtttagctgaggagtgatagaaacctgtgtgtttttcctggtgtgcttctgggaggccaagtgggcaatgaaattcgattcatggccttctgcctggtttgcatctgcagctccacttccgtgttcctaggaaatccaagccacaaaagaatgaggtgaaagaagctattacaagtccctggttactgtgctgcattgaatacaacttctctcactgctgtcctttattctcagtcatataatcactcctgcctacctgcctgccctggaactcaccgtaactaaggcctggcctacaggcagaaacaggagtgtctaggtacagaccttatgttaacctctcaggggcctttgtaaggctgcttagttctttgcaggaatattatgtctcactccaaagacaggacagacctcaattagaaaccaggcttcatcatcaaccagctatgtacacttgaggttgtcatttaactttactgaggcttatttttctcaaatatacaatgaagaaaatagtacaatatcatctatctcatggggacatagagaggactttctgaagtactgaaaatgcttagcacctaatggggtgctcaatgaatatttg

SEQ ID NO: 139858 - DNA, 768 bp, Homo Sapiens
gaagagaaaacaggacggtttaatttgtggagtcgagtcgtttgttcttaattatgcactcaacatgcaaattatattcacctcttggtacagaaatggcaccgtcacttccctgggacctttaatccagacagaattattcttgggcacccttatctgtgtgtctaccaacaactgccgtctctcccttcttacagcaatatgtaaattctcttttgttccaagcaactgggaaatgaggtccttcatccaaaggagtagccatttccagtatagcaccactgatttgtcaatggatttgataagatttgatacactgacatccagatcaagattttgcattatttatagacagtctctgatgatcccaaaggcactttagaatctggcagtgcctcagggtcactgattttcactgggcagaattaagtgatatagaaggtttgctgagtctgtcctgaccctgggtattcactctgaagagagtttatttgaataaggttttgacatatttggtctctatgtctatgtaggctcaaaatgaacagggagattcattttgttcatccatagtttctaaacctttggtagtggaaatggtttacttgtgtaaagaaagttaacaatactaacaaaactaatggtaaaacacagggtgtttggatcccaagaaaacaggagtttactgtggctagatgtcaggctgactgcacataatcattagctataattaacaatgcttccttcgaagactgggcttctgctaag

SEQ ID NO: 139859 - DNA, 371 bp, Homo Sapiens
  misc_feature (305)..(305): n is a, c, g, or t
  misc_feature (320)..(321): n is a, c, g, or t
tgtcctttttaggctttttagatttgtcatgctgttggggtgtaaaaaagtcttcgtgatcttttttgccggcttcatagccattttctatttttgggacctgcagtaccttgccatcactacaattaagatgattagaatcaccgtcataatgccagcaaccacgccaatgacaatactgagtctctgtttgctaatttcatagcttgggtcaccatctatatcctgggtgagtggggatgtgcaaacttctagctatctgggagtcaatccgcagttgcattataaacactttcattgacaancacgtgcccagagtnngtggtggactgggaaggctgcccactgtcattcacttgcaccacaacctg

SEQ ID NO: 139860 - DNA, 1529 bp, Homo Sapiens
aaaaggagaaaaaatctttcagtattgaagaccatgcaaagcatacagaattcattacaaagcagtagtttgtgttgggattactgactcataaccaggtcagaaattttattcagataatctgtacctcatcaatcagatgatgacaatttacttcccaggtctcatactcacttatgttggaattaattaatagcaggtgttaaaggacccaggcttcattacacaggcttttcatgtatgcaggatgactcaatgttaaagcatttaaatggaaaccaggggagttttaaagcccgagaaaccacacataatcttttgttgagatgagtttgctgtactgacgctgcactttgtaaacagattaccagttttttacttgtgggtgtgattttttaaaatagttctttatatataattaaaattaggtttaaattttcaaaatatgagactatgctataggcagtgcttgcttgaaaagtctcatttttaaatctccctggcatgaggtgcccacttcccctttccaaagcaaccattaaacatactttgtttctactattggtggagtttttctatatttaaaaatacatatatatttcagaggatttttattttgctttttggcatttcagactttgatcagtgttaagtgcacttgtattgctttttaatctgttaattttttaaagacccaagcagtcattttgagttatatctataaaaattataaaaggatttttgaaagtataaacaaattgtcagtgaaataaatgagattttggaataaagtgagaatgggagaagggatatgttgtgagcatataccttcacagttcttaatacctgttttgtaatcatgatattcagtcaaggcattatggtttttaatcttgaaacttagagaaccctttgaatatttgcttttactggtgtacagtatgagtggaatatgaactgtacacataattatcatgttgatataaatcataatttcaactagatcaagacatgttaaccttttataaatttaaagtcaataaagcacctttttaaaggaaacactgcaactttccttaacagcctgttaataaaggctttgtgacaagctctcaaaaaatgcatttctaaataggaggacatcaatgtattgatgaagagaaaaaactagtacttagttgccacactcatgcttacatagaaagagagcccaagaatattagatttcctcatgatacaagatactacagtaacaggctttaatttaggaatccttaagattttgggggtattatttggtgactctcctgaaattgtaaacttgtgcttctgtgtccagttttctaatgagtaggttcgtagcttgattgaattaataattgtgagcccatagacacaagggaagtgagaaacagtgctctggtgacatgataaatatatgtgtcaaccaccatttcagctattaaaaactcctgttatctccttgtttgaatttcaggtcattaaattgtataaccatcatttgaaaa

SEQ ID NO: 139861 - DNA, 942 bp, Homo Sapiens
ttttgagttctgatttttattgtgactaatacatgaggtgcattattaaggtttgacaacatggtgactgcctataaagacgtctgcaaccagtgcctgcagccttcattccaaatgaacattcttgtgatggctccaatgttatagacaagcattaacagccaaaaagaaaaacagaaatctccttatggtgtgaaagtcctctcagctgcagctgcccggacgcccagaagagccctcccagctgcagagggtgatttcagtccatgtcgaccctcctgcttgtctttacagcagaatgaattctcttttgtctcagcctttcccgattcatgttttctatcctgattctatgaagtttaacatcttcttttgttggctccttcggtgtctggctggcctcagtgatcatgtctcgaattttctgcaggcaatctgccagattccggaactgatagcggctgctctcagaggtgaggatcaactctcctaacctgttgatcttgtttttatgcgtgatggctatcttctgccgcacgggctccgcgatccactcggcagttgccaaatggaacctgacttctgccttggaattcactttgttcacattctgccccccaggaccactactccgacaataagatattgtcaagcgatctagagggatgtcactgtcggcttgctttgcaccattcgggaccctccaggcggtgtccgagccctgagattcggggtagagcttgtccaggctgtagatgctcttgaactcagtgccgtctttctgcttgtgcagcgcccggcgtgggcaccgtgcgggcggtgggagcagccagactccggctcggctcaggccccagcgcaggcacctggtggccgccatgctcaggtccggacgcgtgggtcgacgatatcccgggaattccggaccgttccagcctcttg

SEQ ID NO: 139862 - DNA, 607 bp, Homo Sapiens
gtttttatttaggaaattggaaataatcgaaatatcggtcaacaggtaaataaataaactgtggtatatccatgcaatacaaaatgtggattattgatgtacacaaaatgggtgaatgccaaaataattatgctgagtagaagcacctccccccacagtacttgctctgcgattccactcagataaaattctagaatatataaattaacctttagtgagagggagcagaccagtggttgcctgaacatggaggacacgagggacggtttagaccggggtgtgaaactgctgttggtggtgatggacatgttctggcgacagcttcacaggcaaatgcatcggtcacttcacgtatgtgcagttcattacctgtcagttacacctcaacagagctgttttaaaaagcaaggtggggccggctttggtggctcacacctgtaatcccagcccatgaattcttgtatatatgtaaaaacccttcaccactcaccttccttgacagacaactaatgcattatcttaaaaacttagtgtacaagagcaaagaatcaagcatttatcctgcccttcctatatgaactgtaccactgggtaaccagataagtat

SEQ ID NO: 139863 - DNA, 711 bp, Homo Sapiens
aggaaagtggagttgttttatgacagttgaatcagacgtctcagtcagtccctgagggagctctatggttgggaagattctatagagatgttgcaagtagaggctggagtccaggtgttggtactctccacccttcattgaccccttgactgatatttggagagagacttagttatgtgccatcatcaagcaacacctttggcaggcagtggaatgatgacctccgccattgggctgggctgtggaacgaccacagcatcgactacagcccatgccttgcaggcctcagatgggcttgcttcacacaggatgctcccctcatttgggaataacttctccagggtttggcttggcccttttccctagggaggtgaacatgaggcagggtagtgggacggtgtatggcctgcatgactgcagctggctttgaagccacaactgatgctcatggtcttcttcatctactatccattctagagtaccctcagtctcagccaccatgtctgccgttctcagtgacctggctggtcgagtaacagacctttatccctgaggattgtttctgagcccatggtccccgtgcccttctcagactgtggaaattgcatgtgtccatttaccataaaaattgggcagggaattattaggagacattcaaatggatcacctgggtgccaaatatatccttctctgttcacagtgtgtaagaac

SEQ ID NO: 139864 - DNA, 482 bp, Homo Sapiens
tttctttaatatcttctttaataagacattacagcacacaactgagcccccagtgtgtcagttaaacatggggatgtatatccatgtgaagagaatggaaacaagtttaatcttaaccccattccttttggcaagtaatagaaatacagcatacaaatggaccaattctctctcagtgttattttatcaagtctttgaagacaccataacagttttataatgaactttgctgcaatctgttaaagaatcttcaaattaaattacagggatgtttggtttttaactcaaacacagtaaaatggggattgtactaataatcccctcatgaagtataaggatgattatgctcatgtaagatcaatgcagctatttccctatcactgagatatagtgttaaatatggtgtcttcagctgcttataaaaaagggttaaatacaagaacaaaaaaactttcatcctgaattagtcactaaaacaaacg

SEQ ID NO: 139865 - DNA, 732 bp, Homo Sapiens
  misc_feature (643)..(665): n is a, c, g, or t
tttaacattttaatttcattttatttttagagtaataaagccttctctttatggcaaatgatacagttttctagataaagtagtggtctcaagtgtagtttacaagcaagtcatttaataataaaaatatagcttataaaaaaagaatacttagatgatttaaggaactatattaaatgaataaacgttcatggggaaaattatgactatgttatagaaatgattgatatttgggaatcattaatttatcccaactctatatccacgcttgatccctttttaccaccaagcctacacctctctgtttgcatacctcctgtgacaggaggttcatcgtctctgaagactgtaaaaaagcagcatccttagtttaaatgcccttctccgttctcctgacctgtgtgccctttgcagtctaactttgtgatgtcctcccaccgagggcaaagcataatttcccatacccggggttgagcatgtgacttgtcttgaccaatgggatgttagcagacatgccagggccagccctcaggaagaggataagagacacccaagtcaccccaggcaacctagctgagatcagaggaacccggcagctgcatgagaaattaatgtttttggataccacaggttttttatgatnnnnnnnnnnnnnnnnnnnnnnntttaagtgcagcaatagctaatggttacagacactagaagagagagtaaatagaacacaggcaggcc

SEQ ID NO: 139866 - DNA, 514 bp, Homo Sapiens
tgagctaccgcgcccggcctatttacttttcttactaagctggggatcaccgtcgccctcggcttggcaggaaggcgggggtaggggagcggtgggaaaggggggtgggcgacgactctgatagagggaaaagaggaagggaaagttggggcttactgcagggcaagctccttaggagaaggtggggaggaggaaggagggaggtccaggcccttcttccatcccacgtcctccacttcccaaggtgcaagaagaaaagaggtacagaacacccagaggtgccctcgattccgtcttgcacttgcccttctcccaccgtccagcaataaagcgagagaaacaagtgcaggaaactggccggcagtcatgggagaagccaaaaagacaggtgagcagcgcgtccgcctcccgcgcacaggtgagggctcacttctgcctgtcggcggcggcacacacaggaaagagccaagcgcgtgcacgcgggcccgcccctaggccttgcggcggcttcagc

SEQ ID NO: 139867 - DNA, 1125 bp, Homo Sapiens
  misc_feature (222)..(222): n is a, c, g, or t
  misc_feature (1095)..(1095): n is a, c, g, or t
agagggagcgttttaggatgattttctaagattctgatggtcgattcaggttagatcaatacagatatcttgcttctgttgactattagtcagagggtagacagtcccaaacaatccatctgtcacacccgatttcagtttgttagttttggtcatctagaatcattaggggcttcactcccattctccaactgctttgctggcttcctctatctttttctntttcttcttcctttttctttacattatagataacttgaaaaaggtctttaagatcaacaactaatggttcagcctgttgcccggttttttatggcaaaaaactgatgctggccttctcctccacacacgtaaccaaatgcccggttgtctgtcacatcacgggcaatgaaagaaatcttatttactggatgttcatgctctattaccccagttttctcatcaattatttttatcccagaaagggaaatgttgacccagatcctttgtttgtgttgtccctgagaccgaccagctgccgccattccctttagtttcatcatagagtcttggctcattttatcccctcttgcatctggcacatcatcaatgccaatcagcttggccttatattttacaccatcgcctttgaaccttgctaagagatattcatctgtcttttcagggcctttctttttttccttctttgagggtgcttttggtgcggcctgttggtcgggctgaccattggttgcacttgtttctacttcgttagacatggcaagaaggcaggcagcaaacctcagtaccagtggacacttggtgacaccaggcgatcccgatggagaactctcaaataaacataacctcccacagacaccggctagctattgcctccgtgaagcgagcatgacttccccgcgcccggagcctccaggctacagcgcagcggatgcggcgggcctcgcttaaatagccgccggccgggagcttcggagccgcgcggccactcccggcgagagatatggttctaatcagatgctggcagctgaggactccccaggaatgtgccaggatgtttttgctgcctgggcttggtaactccccctcaacgtngtctgcagagtcttccaaacttaactgttt

SEQ ID NO: 139868 - DNA, 899 bp, Homo Sapiens
  misc_feature (173)..(173): n is a, c, g, or t
  misc_feature (355)..(383): n is a, c, g, or t
  misc_feature (480)..(480): n is a, c, g, or t
aaaaggaaaagtttggaggatttggcaagaaaaaagggcattttttcagggccaaggaaaggattccttgaagggcgtttggtcgaaggaaaggagaaacaggagggtgaatggcgttttgttaaagaaatggattttcttctttaaagaatttctggattggtgtcgatttncagagtttagatccactaacagggatatctttgctttctgttggactatttaggtcaggaggtgtagacatgtccccaaacaaatccatctggtcaacacccgatttcagtttgttagtttggtcatctagaatcattagggcctcactcccattctcaactgctttgctggcttcctctannnnnnnnnnnnnnnnnnnnnnnnnnnnnacattatagataacttgaaaaaggtctttaagatcaacaactaatggttcagcctgttgcccggtttttatgggcaaaaaactgattgctggccttnctcctccacacacgtaaccaaatgcccggttgtctgtcacatcacgggcaatgaaagaaatcttatttactggatgttcatgctctattaccccagttttctcatcaattatttttatcccagaaagggaaatgttgacccagatcctttgtttgtgttgtccctgagaccgaccagctgccgccattccctttagtttcatcatagagtcttggctcattttatcccctcttgcatctggcacatcatcaatgccaatcagcttggccttatattttacaccatcgcctttgaaccttgctaagagatattcatctgtcttttcagggcctttctttttttccttctttgagggtgcttttggtgcggcctgttgcctcgtgccggaatcgccacccaggcctcgctaccttggaccg

SEQ ID NO: 139869 - DNA, 640 bp, Homo Sapiens
  misc_feature (44)..(45): n is a, c, g, or t
  misc_feature (499)..(519): n is a, c, g, or t
aacatttcatttgctttccactcactccaccctggttctgttgnnttgttggcttagagtttaatctgttgctaaacactgggaagtctgggcttctcgggtgttagtgaggagagagccaaggtgggtctggggcagtggctggaccaaggcctccaaactgtgccctgtcctacatgcagtgcttggtggacatggagttggcatacccaaaggatgggccatactgagggaaaatgaaagtcctggtgtcctctgctgtattttggggtggcttcgtgcattgggtcagggttgcagtatttgggggcttcgggacaaaaaatttagagtagagcagtgtccttggctttggacagacaggaggatggacagaatgaccaaggaaacataagcaacatttgtggggtgtggtatatctgggtgtgaggatgagtgtgtgagaggggtggagggctccgtctctacctttgtttaatctgcttactgagttattggnnnnnnnnnnnnnnnnnnnnnaagaaagcctttccctggctgcttatcgccccaaggtcagctgtgctggctgctgcaggttcagttctgggatacccagggcagtcttcaccaggcaggaggagcgagggaaaggcttctt

SEQ ID NO: 139870 - DNA, 915 bp, Homo Sapiens
  misc_feature (84)..(99): n is a, c, g, or t
gttaaatcttatttgctttatttccttggttcctctaagttgtaatctcggagttaaaaacagctttagaaccccgcccccccnnnnnnnnnnnnnnnncttttgagaatttttttcaaataaatgtccattgcataaaatgggtctgtgactggttgcttctacatctgcacccaacatctggcccccttcagaactctgagtggacaggatcaggatttgactcaggaggattagaatgtgaagaatccgtgtttgagggattcagttctccaactgcctcaaagggtctcaagtttgcataagtcacctcctgggccagctgctccagggaaggacggcctaatatcagatttcgaagtgagatacaagtcatcaggaagctgcggcgaaagacatagagctttcgcaacaagaagcggaagaatcgctcatggaaaggagtatttcgccggcgttcaatctcctggagcctttgttggcgtctaagaaaggtctgaaccagaggtgttggctcagggcccccttttacttccccttccaacagaggctgcagctctgggggtagaggccctgtttcacttccattctccaccttttcctttaattcttgcagatatgccaggtcttgctccagtgcaagctctgtagtgttgacatagacgtacatgtagccagaagggctaggtgatgtcgtatacaccttatggtactcaccagcaggcaactgcattttttctccctctcgaagagtctggttcttctgttctgccacaagctccacagtcacttccccctgccgcagctggatgctagtgttgcccacggtcttcactcaccaatttctcccagtgcagtccaggggaatctgccatgaagacctggcaccatggagcacagctcctctagatcact

SEQ ID NO: 139871 - DNA, 604 bp, Homo Sapiens
  misc_feature (15)..(15): n is a, c, g, or t
  misc_feature (87)..(87): n is a, c, g, or t
  misc_feature (604)..(604): n is a, c, g, or t
ctgattgacactttntaaaggaagtgatgtggaagttgttctagaagttagatggacagtgggagcacattcgtgagtggggcttgngagagctcaaaagtggcactttgattttaggctgggcaggcagaagtctcacagtaaaatatatttcactagacgtccaaaccaacactgcattgtagtaacctcttctgaagtaactggttaaattaataactggtcccataagtcagggtcaagccacatttataacccattcgggccggccatgaagggttctgactcgacattggtatttaaatgctgttactttcccaatgcttagtagcacttgagactttatttccatcgacaaaaactaagaaggccacagaagtagcctaacagtcctccctggtcatactcgtttcaaacaggtctgcctgtctagacatattcaggcaggaggttgcttgctgctatcttgaaaaccactggaagattcagcttcttggggacctcagagcccatattcatatggaagcccacccatataagcctcacagagcaaatcacagcaatgttgaagttgttattttcaagtgcttatttcacgacattn

SEQ ID NO: 139872 - DNA, 348 bp, Homo Sapiens
ttttattagaaacatttttatttaaattcagacaatagaaaggtatacagaaaaaaattacagaaacttgcaacaacagtatgcaacttggaaaatttattagtaaagaaggaggggaaaagttattcctaattttgccaagtactgggttagtccttaatagaataatttatcagttcagcaaagtatacccccttgctggtgtcttttgagcagacagattaacaacgtcattaatctactaaactgatatctagtaaaaccttccaaagtaaaatagtcaaggcagcatttccccaacatttgagatacaacttcggggaactgaaataattacagtagaaagtt

SEQ ID NO: 139873 - DNA, 655 bp, Homo Sapiens
  misc_feature (481)..(481): n is a, c, g, or t
cagaacctgcgatatcctgaggattgctgagaaaaggcagagggcttgatacaaagcatgcttgaaaaatgcgatcggtttctctggtccccagcaggcctagtgggagaagattcagcaggatgtcatgacatttttgggaaaaactaaatcatgctcctgaaccttctgaacgcatttggttattgaaggaaagaacaccacccccaaatcctgccatcttattggggctacttttgtcagtgtctgtacccttggcatcggcatctgtgactctttatccatgacctcagtgtttcttaaccaaagttgtactcagcatttcttaaccaaagttgaattttgaaaagagtcagtccttgtttgctggaattagaatgttaatgtcctagtattattccgaactacagtattaactgcttgttgctagtggattagacagattcttttcttactgtggcttccatgttgggagcagaangcttttcatcctggtcacatgaagacagatggtattattgactggagttgaattatttttatatcttgtctggcacaatatggaaattaatgaaataagacggtgtataatggaattaacacccaaaataagtagaacactgaagatttgaatttgatatttaagtaaaatggg

SEQ ID NO: 139874 - DNA, 696 bp, Homo Sapiens
  misc_feature (87)..(87): n is a, c, g, or t
  misc_feature (606)..(606): n is a, c, g, or t
taaataacaaattaaaatcaggctgttgggcgagaaggtaaaacaacaaccccgcacgagtgcactgtgagacctaaaggccttttntgggtactgtgtgcttaggtctctaagggggtcagggcagctctttctggggtgttttaaatcctttgttcaggccaggagaagtctgatgactcactcaccttgctctgcaaaacaagaatttgttgagcccgacccctccaggtccctggcgaggataggagctgctgaacgttgatgtcttccccaacctctctggccaaaaccttctgtgccatccgcagctcctgcttcacagactggatctggtttcggaggtcactcatcttcaagttggtggccaccagcctgtcctgcagggccttcacctctggggtctccagcaatgctctgtctcccatctgggccctcggtggcttggctcctgcgtcggtggcccccttggctgacagcctggtcagggctgtctgcagttcccgctccagctcctggatgcgattggtcagctgcttcaccctggtttttgcaccctctgattctgccatcaacagccggttcttttttgatagctccacaatntttggtggcgaccacgtctccggctacaccggctgtccctgtgaaggcaaatctgtcctcttctattttctttttgaggtgtttgatttc

SEQ ID NO: 139875 - DNA, 401 bp, Homo Sapiens
ttttttttactttgccaaagatttaatatccacaaatgtacaatgctcactgggaaccaaagtcaggcatggggctgggctttaaggagcacaaacaaaaaggagggactagaaaacttcagaaaggtattggtgggggatgttgcggggggacaggggacagcgaggatgtgggatcccgagatcatccaaatccctatgtgtagacatatgtgtataaaggcctttaagagactcaggctgatggggtatctgtaataaatcaaacataatataacagcacgtcaagtgataaggggactctggaaaaacaagcagcaaaaggatcagtatcaaactccacagaaattcacaaacatcaagacaccaagaaagctgcattcatttaaatcaaggtgaca

SEQ ID NO: 139876 - DNA, 662 bp, Homo Sapiens
cttgctggcaaaatttatatgaatcagagattatttttaggtctggggtttatattagaaattattcactgtcattcaacaaatatgcacaaagcacccactagataccagggatacatgggcaaacttcctgtttctgaaaatgctgccaagtctcagttcctgagcacttggcgccttttactttgggccctaggtagaaccacagatacaggtagtactgatggacatcttcttgtcatggctgaagttttccggggaatggttctttgaggagctaccttggctgaggctctcttggttgaatctctaagtacaagagcataagacaaggcttcccgttgagtaatatagccaagcagctgttggtgctgaaggctgtgaatgtagcgggtctgcagggcctcccactggggcctggagttgtaaatcctcataatgctgtaaaagtagcgctgttgcccttggttgagggcctttagtaaggaagtgtcatagatggagggaggaactcgaataaaaggaagttgtggaacattccaaagcttttgttgtcttttccagttttgtcccatcgtttatcctataccctatactgtagttcccccacttttaaaagctgccattcctattcagtgtagttttcttacgcggcctcgtgc

SEQ ID NO: 139877 - DNA, 606 bp, Homo Sapiens
  misc_feature (185)..(228): n is a, c, g, or t
cacaagaacgaaaacacttgtttattaacatgcagaggaacatcagctcaaatacactccaggaaatacaaactgaaactccgttgatatgccattcttcctgtatcagattggcaatacttttctggaagacaatttggtgacggaaaatattttcttaaatgctttaaaccctacatatccannnnnnnnnnnnnnnnnnnnnnnnnnnnnnnnnnnnnnnnnnnnttacaggcgtgagccaccgtgcccagctggtattctcaaattgagacagcttcctttgaatttttctactttatgaaaagttgctatgtataaatactgtaattctagcctctgctttactgaagccttttcccccagtaaactgtggagtactcacaggttcacaaagaagaactgaacctcaggtaagctataaaaagaaacaaagcaactgtggtgttacttctgttggaaaatttaaaaaaagcagttatccaactttcaattccatttataaaatgtaaaaattcaaaagtatacaacatagttcactgatatcccaacaattcattgccttttaagatcaaatagctgattacctgtttctaaacttgaatt

SEQ ID NO: 139878 - DNA, 758 bp, Homo Sapiens
  misc_feature (705)..(705): n is a, c, g, or t
  misc_feature (733)..(733): n is a, c, g, or t
gggtcctcatcccctgccgtgatgtctgcaagtggctctggctagaagtggtgctggtcgcagggctgtagatgagggtctcttctccagcctcttcacgtggcaggagtgacagcacaggtggtcctccagcggataacagcggtggccatcttcatcattgagttcttttatttggccgtagcacttgtctagattttgcttagccgacttcccatccagctcagcctgtctcttcagctcctccaggctcgcaagcttcgctttgaactgggaacactctgcctggtatttctgcaggttctgatccaggaatttgttcttattacagttttccgagttggcatctcgggccagtctgagctcctcttccaaaacttcgatcttggtatttttcagcttcagatcttccaaactcttcagcatctcacttaagaacctgtaatagtctccagatcttgtaagtagttcaatgtaccgagcatgaacatctgcagcctcttgcagaatcaccccagaaggggactgaatcatggtcctcttgataggtatgttcagcagagtttccagtcctgaggtgtatgaggccagctggagctcataatccttaattgaattggcgcaaagttcagcaattttttgtacttcctctgatttgtctcgtttgccagatatttcactgtgcaagttcttctgctcattcanaaaccgcatgactgtgttggaatctcanatttcatggattctaaggaatcctg

SEQ ID NO: 139879 - DNA, 251 bp, Homo Sapiens
tttaataatttggtatttattgaaagtcagatggattcttttgctttctgaggggtgaacacagaagactgcaacaagaaccaaatgacatgcaaggatttttcttaattatgctgtactctcagcatcagatacattcaaccataactgtatcttcctgagagatggatttcactttcatacgttaatggatggagtctacaaatcagtgaaaaaagtttttgttaaaataaagagcaataaaattatgt

SEQ ID NO: 139880 - DNA, 474 bp, Homo Sapiens
gtatttcaattatacctcaataaagatatttaaaaataaaatccctcctggtacatgattcacaccctgtactctggttttagtattcttatacccaaatcacattaccaaaggttttccatattagccatacacattatttttctcaggaatcactttagcatccattaataaatgtgttttttctattcccaaagttttaagaattcagtcagcaatgaatacttgtattattcaacagtaaaatttatacataacatgtatgtggcaaaaatatactaaggctttgtccttatgactaagttaattaagtagaatgacagatttttagatattaaaacagtgtatcatttaagatgtttgatgtctaagccagctgatggagaagaaccaatgcagtatcccttctggagagattaagattttcaaggtcctcaaaaataggtacagagtggaataaagtttaaaaaaagg

SEQ ID NO: 139881 - DNA, 658 bp, Homo Sapiens
tttattgtgattttgacatttattaaaaagtatttgtcatcagtaaccattttggatacttgcaaatattacagtaaaactctgccttaattcacagggcaggagtagaaaatcaattatgtaaaatacagtgttccatttttgcaacattaaccagaaacattgtttatcagtttgtactgatatttaaagtgcacacatgggtacatatacacacacacaaagctaaacttcagcagatggtataatgtatagagaccaaacgttaagaaatgcagcacatctctgctcaagatggaacaaagggtgggaactaaccccaatagggttacaatcaaattaatgttatttcagatcatcataatgcttattgttctacatttcaaatatttacttgaaatgattttattaagattacttgcaggatttctcctccaaatacattttaagttttaaaaaatgcgcttaaaaatttcaaaccttttacctttacatacttttagttatttagcaaaaagtactgagcacctacattgcgttatgaaatgtcctagttttgtagactagcaatgaacaaagtcccttctttcaccaagcttacattctagagaacatggatttaggcatgctcatcactgtacttttattaaattcctga

SEQ ID NO: 139882 - DNA, 637 bp, Homo Sapiens
aggtggagaaattcaagtctaatcaacacttctttattgaagagaccacccctgtgtatagactttggagtggccctgggggagataagtgtgggtgggagagaagatcccaaactaccaaaagtttgctccatgtcacaacctgccctaggcctccaggccaatgtgaacagacaggcacaaggttgagcaggatggatggtaaatgccaagctgggtgcagtgacaggggcagtggcagtctgggtcgacctcccataagaaggagtcacaaggagacattgaagggtgggaggatttgaagaagggaaaaaaagaggttgtcctgaggctggagagctgagcacagtgtggtgttgacagggcctggcctaactggatgtcaacagtgaagtagaggggcatcatgggatgtcaggctggaaagggcagtgcaggtcccacacaacaggcaaaagctctagctttggcctggaggcagcagggagctcctgcagttctaaactggggtgggtagaactcttgtccccaggtatgtccatggctagtctctccagggcctggatggtgggggcaacccctctttggttccttcctgcatagccaccttagaattgcctctgcttctcaggtcttt

SEQ ID NO: 139883 - DNA, 1386 bp, Homo Sapiens
  misc_feature (424)..(475): n is a, c, g, or t
ggcagtttaatataatcaaaagttatagctctaaaaaatatgatagtagaatattaaacctcaggttacgttaggtttgttaactcttgatttgctttgagtaatttttttcttcaaaagccacattccaagaagatgccttaagtatcaatgagctatatttgaagtacatcaactctgtttaaagctgtccaacaataaggacacaagcagtaaaatatctgaagcatgaaacatgtaatgttgatgacttatgttttagatcatcaggaataagattaacgaagagcaaagtaaatttaaaacaaggaaagggaagatacatttattaaaaataaaaatagtacacaatctctgataacaaaaaaagcatttagggtcaaaagacatccaacatacattgtaacaatgcacacatattaannnnnnnnnnnnnnnnnnnnnnnnnnnnnnnnnnnnnnnnnnnnnnnnnnnnctattttggcttccttctgctgaaattcgcctataaacataccacgccagctagaccagcattccctttcacgtggtctgtacaacatagtgactgcacgatgtgagcaattactttgatgaacacattgtgttttgaataaaattgttggttcctgtatggatgatccggacataaatgccatggttccatttcacagaaatattcataggctggaagagcagtgacaaccattttccagaatcttcagttttaacacaaaggcgcagaataaactactaaatctagatgttttcacattattttgcatgagtgtcaaatactatgtaaaaattaacgtaaaatcttaagttggccaaaactagtgtctctaaagatcaaaattcttcactcttttagcatggctgataaatcttttctgcctttgtcactaatgcttgtcaaaccaaagaactttgcaaaagaatatgcactgctgaaggaagacagtaccaaaaataccatattgaacttcggtcttaagacacacacagttcctgttggatactggactgtgaaagtttattatcttcagtcttttcatgtcctggagcatggcaagtagtcttccgcttaaataaccgaagactcaatcgaagtaattcattgtctaccattggagcactcgtgtaagcttgttttatggtgcccttctcatttttaacaagctgctttcgaattgcagaatcccgtctgaagcacaacgccttacaacatgggccaagattactaagaagacttgctctttcttcttttcgtagtaatgcagccatattgagagcccccaattcatgttcaaagagattgtctgcatctttgggtcccggccgtaatggccgaattcccgggcatatgtccggtaccgtcgactg

SEQ ID NO: 139884 - DNA, 910 bp, Homo Sapiens
tttctgttttttctggtggcagggggtggcgttttaaacttgggggcttggaggggctgaggtcaaagggcagcgggtctttcactggctagaaagggaatagaaaggctgaaggaaaaccatatctggataaagtttaagttcactgagcatgacctaagactactgggagaaagttaatttccagcactcattttaccaaacctatgtaaccctgatcagggatccctgagttagctccagagctggaacagacagggcaaagggactgagcctccaaccctgagcagtggccaggcactcgacatgacaagctggaagagcctgaagaacgagctctcagaggagaaagaagggaaagagcctccacgactcctccagacgctcagtccagggccgccagggtcagccaccctccccgctgtctctatctgtggccctgccaccagtcactcaacccgactttttggtctagagtaagagcagcagctgtaccccaatggcacagcaaagcaaatccccctacaggcaccatgcaaggccagcacaggcagctcagtgaaggcaacagactccagtgcaggtccacaagggccccctgcgggagcgcctgtctgcaggatgcggggcagagggaactgaattggaagccaaaggaagagggcagctgggagcaggagcccctagcccttttcagaatagggcaaaggtactcagaacttctgactctgaggaagaggtacaagacctcctttcactgcagaagtatcccaggacttaagccatgggaagaattcacaaccttgaagtcagaagtgaaataaactgtgtggtgtccaatgaaggaggatgcctccagagcagaaggaaatggaggggtgggggtgtgggcaggaatgcagaacaggag

SEQ ID NO: 139885 - DNA, 688 bp, Homo Sapiens
  misc_feature (68)..(98): n is a, c, g, or t
acatttatgataactttattaagtctgaactctgatgtaaagtgggatgcgagcagatactaacggcnnnnnnnnnnnnnnnnnnnnnnnnnnnnnnnctcaagtatgaatgctttcatgtacagtcaggtgtgagaactgggtgaaggctttgccacacttttcacacttgtagggtttctctccagtatgaattctcttatgtacaataaggtttgaggactgggtaaagttttttccacattcgtcacatttgtagggtttctctccagtatgggttttcttatgtttggtaatgtctgagaaccacatgaagactctgccacattcttcacacttgtagggtttctctccagtatgaattctcttatgtacaataaggttggaggactgggtaaagttttttccacattcgtcacatttgtagggcttctctccagtatgggttttcttatgcttagtgaggtctgataactgcttaaagatgttgccacattcttcacacgtgtagggtttttcttcagaatgagttctcttatggttagaaaggcttgagcaagttctgaataccttcccacattcttcacattggtagggtttctctccggtgtgaatcctcctgtgttcactgaggtgtgaggactgtgtatatgctttcccacattcgtcacatttggatggtttctca

SEQ ID NO: 139886 - DNA, 419 bp, Homo Sapiens
atgactaggcagccattttttcctgaaatcatttgttgaaatcatttctctcccaactgactagaaatacctccttaatatcgtaaattctcaagtgtacatgcatcttttctttagactcatctgttgctttgatctttttgtctcttcctttaaaaataccaatctgctttgatattacgttttctagtaattcataggacaagtccctcttcatttttccttttcaaaattttcttgaatataattgcattatctttgagataaaatttaacataaactgttcatgcttcattaaaatactctttttgggatttaaccattatattttcttatattttgtgactggtatgtagatgagtgtttatgtatctggccaactttctaaatttattaattttaataaattgtttcacttg

SEQ ID NO: 139887 - DNA, 579 bp, Homo Sapiens
  misc_feature (202)..(460): n is a, c, g, or t
tttttttaaaatggaataatttaagctttattactaacatacagataatagtatctgtatatatttataaataaatatacacatattgggaatacatgcccaaataccatttattcttaggtgcataatcaaataaggaaggctgccattgctttcacctgctaagtgggtctccaagcccctcttggggaccatgactagnnnnnnnnnnnnnnnnnnnnnnnnnnnnnnnnnnnnnnnnnnnnnnnnnnnnnnnnnnnnnnnnnnnnnnnnnnnnnnnnnnnnnnnnnnnnnnnnnnnnnnnnnnnnnnnnnnnnnnnnnnnnnnnnnnnnnnnnnnnnnnnnnnnnnnnnnnnnnnnnnnnnnnnnnnnnnnnnnnnnnnnnnnnnnnnnnnnnnnnnnnnnnnnnnnnnnnnnnnnnnnnnnnnnnnnnnnnnnnnnnnnnnnnnnnnnnnnnnnnggttattgtctacactgccgtgcaagtggggaattaggtgcagacagctgaaataatgaggtattagtcatgagtggagctgcgattcagaagtcggttctttttcttttttaaaaata

SEQ ID NO: 139888 - DNA, 655 bp, Homo Sapiens
  misc_feature (599)..(599): n is a, c, g, or t
  misc_feature (632)..(632): n is a, c, g, or t
atatttcttttaaaaactttattttcaatttataaacagtaaaatctactcttttggtgtacagttatatgagttttgataaatgcatacagttatgtaatcacaccacaactaagaaacaaaacagatacatcactcccaaaaatttcctcatgctatatctttgtggtcaattcttttccccaacaccattccctagcaaccaatgatgttctccagacctacagttttgccatttttagaaggtctatgaatgtaattttataatttgtatgtaccccttggaggctggcttatttctcttagcacaatgcattttaaattcttccttgttgtgcctatcgatactccattccttttttattgctgagtaatatttcattgaaagatgttccacgatttgtttattcattcaccaatggaagaatgtttgtttccagacatttgagattataaataaagctgctatacagattcatataaaggttttgtaaacataagttttcatgtctcttgggtaaatacacaggagtgagattggtgagtcatgtggcaagtatatatttaactttataagaaactcccaaactgtttcccanagtggttgtaccattttgcattctcaccaacantgtatgcaagtttcattgtcttc

SEQ ID NO: 139889 - DNA, 684 bp, Homo Sapiens
aagcctacaaaatagtgtctaatggtttattggtaaaaatccaaactctagagtttatggaattcgtagtttggttggtatattaacactccatcttaatctttgctgctattacaaagaatgaggaaagctagaaatatctataaaaataaaataccttaaaaccgacaagcaaaatataaaagttgcatacaaattgccaataaatataaacatcacaatagaaaaattaatcttaacaaaaataaactcataattgctattaagacattataaaaacaaaaaagtttaatgtgcatgtatatttgcaaacagacacagtacactccaaacaatataattttactatcattattatataatgcagcatacaaggttactgaggtgtggtattttttgttgttgttgttgtttgcttttagtcttcttttctggaagaatgctcaccaaattcacaggaaagaagtgcctaggtgatcatttactgctatttactgcttcctggtatggagcaaaattgccctctggtaggtaactacatttctaattagtatgaaaggttctactattttcctttcttttgcttatttccccttaagcacaatttgcagaccctacttctatttaactgatcatacccttttaaatgccttgtcatcatttttcatagttcctgcatcctag

SEQ ID NO: 139890 - DNA, 701 bp, Homo Sapiens
attggtttgtgttttgaacgtgtcaacatttattgagtatttaccgtgtagccagcactgttttacaggcactactcaatgtggtccgcacaatgaccccacgagagaattattaacactcattttaaggataaggaaggaaccagaagcactgagaggtgaagccttaggtaacaaagccagtaggggtgagaccggcatggtgatttctttaggggagggtataagagtcctttgcgaagagaaacatttcactttcaaatgcctcagcacctgctgcaattccaggctttggtttgtacttgtatctcagtcacagttattttatagttaggcatatgaatttaaaatgaaagggagaaatactaaagatttgaaattttagttatgtgtcacctcaagggaaagttaattatcatttttgtcggcaacacctacacacaaattgtgactccagtaataaaatgagagcttagaaaaataagcacccagggctgatgaaaataatgcatttgtctcagggcaggggctgaatgtgaagccaactgttcttagagagaaacatgtcaatactaaatcttttcaccagcctttgatggatgtgctaatcttctcaggtcaacatgggctcaccctggcaatgtactgtaataacttatttaaaaggcagctggcttttataaatgacctgctccatcagc

SEQ ID NO: 139891 - DNA, 589 bp, Homo Sapiens
catgaagagatgggaagactttactactagatcaattgggtaacaaagtaatgtggctgctagaaacattaattcagtgtgaggccgtatgaatggagtagaatcctggaaaggagaggtgaaggttcagctttactcccaacaaggttcatttccaagagtcctactttcagaggggcgttgttgagctggtaagaagcaaacagagaagagattccacatggtgagaacccagaatcctgtcctgcaaggaacagctgaaaaactcggagtgtttgtcctggagaaagaagactctagagaaatgagagatgcctttacaattctgaagtggctccaacaaggaaaacagagctggtcaggtcatgtgtgaaacgggcaaggcctgcaccctctcccagagtcaagcagctgaatgcaggccccaccatttaccagccattagggatggaatattcttcaaactgcaacacgtcagacacaactggggcctgagtattgcttttctgtgagagctagaggtagaaagccattgggagggagatgtcagctcagccctaggaagaattttttctttttctcctcgttc

SEQ ID NO: 139892 - DNA, 568 bp, Homo Sapiens
acattttattaataccaaggtgaaaagtggcctgtgcttatactacaaggatctcatatgaatgcagtcctgattgttcgacacagcaagaaaattcactttcacagtcaacaagtcatcttactcagtagaacacaaagtaaatggtttataactccaatatttgcaaggaaaatacagtacaaattactaaaaaatactaaaatatagaattgtgttcaggcatctccactacatcaatcgcagcagtaacctgaaatttgaaacttttaataaaaagttcttaaatataaattatatggcaaatgtacagtacattgctttttttcagtctctttttccagtgttttgcagtagaacagggttcctaccatcacctcccttaggtttaaaaaacccaaaacacaagtctgctgtgagtccttcagcatcatgagtgtgagtgatctgagtctggaataccactgtctctgtagcttcggttactactgctttcactgtgattgtttttgtacagattcattccattaggaggaaatatggtgtgtattacaaactcctccttcga

SEQ ID NO: 139893 - DNA, 601 bp, Homo Sapiens
ttttttttcactgtttttatcaattctttatttaggtaacaagttggttatgttcactgcattgtatgaaacatcacaatatcatactgggaagtactatcagtacagggttggatcagagtggacagtttgaacgataaaccattttgcattcttcattccctatcttttaacaaccccccaaacccagtaaagggacaaacagcttttcacatcatcatgtaaagcactttaacttacaaggctaaaatctaaagaataaataaaatatattgtggcaataattccttttagaccaaaaatcaggtgcacaataaatcaaatgatcaggaaagctgtctgtatttaaatgtgtggctctccagaaacagcttcaggaaaacgttacagaaaataccatgaattccatttcacaaaggaccagatgatgactcattttaactacacacaagggcaattacatcctgctgaaacacaatttaaacatacaggaaaatgtttacaaagcatccacaacatgtaaaccatgtacaaatggatacattcattacttctcctaacccagaaacttctttcagataaatactttactccctcgtgc

SEQ ID NO: 139894 - DNA, 1023 bp, Homo Sapiens
  misc_feature (356)..(529): n is a, c, g, or t
gcacgaggcggcacgaggcctcgtgccggcacgaggctaacgtttattgagagcttatgtgttttagaaaacttacaacgttttatgatctttacacataaaaactcagactaggttagggtgtggcactcacctctggtacagaatttaagaaggttcaaaaactttggtaatagtaaacaatattttcaagacttaaaaaatattttaatatccaaaataatcaaattgttaaactacatcctgcagaccggcagcataattttgtaaataaagttttagtggaaccagggtgttgaggtcagtaagctcaaggcacaagtgcggggttctagcctcttcaaaattttatttannnnnnnnnnnnnnnnnnnnnnnnnnnnnnnnnnnnnnnnnnnnnnnnnnnnnnnnnnnnnnnnnnnnnnnnnnnnnnnnnnnnnnnnnnnnnnnnnnnnnnnnnnnnnnnnnnnnnnnnnnnnnnnnnnnnnnnnnnnnnnnnnnnnnnnnnnnnnnnnnnnnnnnnnnnnnnctcctcaggggcaaagacccccagttctgtgatgatgccaccagtgatgaggtcgtggggggtgacatcgaaggcaggattccaaactccaatcccaggtgctgcaatccggaccccattaacatcggtcagctcctggcccggtcgctcttcaataatgatctccttgccggtctccagacggaggtcacatgaagagctgggggcagccacgtagaacggaatgccatggtgcttggcgaccaataggccagctggtaggtgcccaccttgtcgggctgtgtcgccgatggcaaaccacgcgggtcagctcccacgaaccacaagcgtgacacgcccctatgggccaatggccagcaggcagcatgctgtcgggggaaaaagggtagcggggatctagtcatagaccagctcacaggccggagccgagactcccggttgtaaggccaagacgcatgagcagaagcgaggactccaagcagccaggctgtgcg

SEQ ID NO: 139895 - DNA, 1166 bp, Homo Sapiens
taaatatttttcctaacccggggaggggtccaaactttttttaaggggcctttttttaaagtagggaccatttttgcccaacccaaaggttaaagccagaggggcttatggaaaataccatttttctggaaggggtaaggtaaattggttaataagagggtataattctgtaagccaattaattccaaatataaataggttataagcccaccactaactccagtctggtgaaaagctttctcagctaaaagtagtttggagataagggttaaggggaaatgagaagggggtgggacagggcagttttccagtgggaaaattatttatgtgccttcccattgtgatcatccctgtatgtaccagtccgttgttgcagaacggtaaatcctttccaagtatgttatactttatgtagcacagtaaaaattatttaagtattactaatgcttcatttgcatttgtatttagatatacacataattatatatgcatatcaaaaactataaacagaattttaaaacacttttatctcaattggggaaagttaacaggtaagacaaaactacgtactacagaattttttaggatatctaaactcaaggtaaaaccaatagaaaacatttctacctctttagtaaatggcttgtgtgaaacctcaagctctccctcattttttttacagatgggtttgtctgatgaggattgtgatccaatgattgtttagcagcaattttaccaaactgtaaattcttttattaacaggcattataaacagataatactaatcttatttaaaaaccatgagtgccacactggtgaatatacagcttatgaataacttaaaaagtatttcccattttaaaaggcaaacccagcatacaaaaacctatactaaacaaagaagctataatatggatacatgattgatgtgtctaaaatgatatatacagtacataatgttaattatatgatcagtacatttttcctatgattcccttcatgcttcactttccccagaaactgaattctgtacttcctcttctaaaattggtacaatcaggttatccttggacatcaaattgtatttcatcacaaacttagtaaacccggacgcggggtcgacgatacccgggaatccggaccggtaccagctgctttttccaccg

SEQ ID NO: 139896 - DNA, 1003 bp, Homo Sapiens
tgggttgtcggtgaggccgtgatccgaggagtgtcgacagccagtttacccaactggaattcttttattaacaggcattataaacagataatactaatcttatttaaaaaccatgagtgccacactggtgaatatacagcttatgaataacttaaaaagtatttcccattttaaaaggcaaacccagcatacaaaaacctatactaaacaaagaagctataatatggatacatgattgatgtgtctaaaatgatatatacagtacataatgttaattatatgatcagtacatttttcctatgattcccttcatgcttcactttccccagaaactgaattctgtacttcctcttctaaaattggtacaatcaggttatccttggacatcaaattgtatttcatcacaaacttagtaaaccgatgacacaaaaatgtttcattttcatattcatcaaatatctgccgatgatgaaaataagcatgtgaaaatattctgtaaatcctacggcatactgatcctagtttcgctacagatgattcctttatgctaaccctgctgggaaaatatttattgctattcagaagacatgcagcaccatcaagtgtgtgtctagtatagtctatagcaggacactcttttggagttttatgagctgcacaaagaaaaatccattgttcagttgctgtcatttgagtgcaagtatctggatggcattcactctgaagtttgacagcaagtccatttagctcaaggcagaactgccttaaatgttcatacttccacacaccttcatcttggccttcaggtggttcaagaattttgtcaatattggagcaatctgctcttatgttctgttgaatatactgttgaacagctagtgtactgtccatttcatcaaaggattcatcaggccaattatagaaatcctgcgccttggtgcccggcctgttccgcctcagcactgccgtcccctccgccatgaccatagtgccagcgtctccc

SEQ ID NO: 139897 - DNA, 655 bp, Homo Sapiens
ttttctttctaacttctttattaactttattgttctaatttgccttccagctacagggctcatttattattctaatttgctctgtctacggaatttatttaaatttagcaaattattaggaaattaacatgttggtacttaagtcttccttctggaaatgtggtcaaaaatgacagcttgtatgtagagttctgtcaggatagtgattctagtagagttgtcacctggctgcgcctttgggtccacattaagaatttttctgtctcttttgtatctgaaaagtaagccttctggattatcggcaatcacttgatagttgggacttgaattactaacagcaatatcagcgtcccagttgtaaaagcttatatctgtaggccttggaagaagtcttttttttccagtaaagtagacttcaaaatcttccgtctttagcctgtgggcatagtcgatgtatcctgatatctcttgcccatgagaatttctgtcacgaataaagatcacggaactcagttttccactgcgattgtcttcttctctcattgccagggccgtcagaaaattatcttgtaggtctttaccagcacttgttagcgtcttttgctgagctctttcagccagtcttgcaatctctatagccgctttccttgcttca

SEQ ID NO: 139898 - DNA, 702 bp, Homo Sapiens
  misc_feature (690)..(690): n is a, c, g, or t
gtaactgtgaaaactatgtttattttgaatacaaatcttgaattatctatggatgagtttgaaataaatcatagaagagaattactttttggatttttaatccaggtccttgtgtgtgtatgaaatacacacatatcttccttattagtcatggaagggcaaaagtggaccaaaaacaggtcagctaagacaggcatgtctggcttctgggctgtagctcagcatgttgtaggctagagtccagtgaccttcactggcaggctgcctacagtccatgagaccctaggcagtcaggcactgagctctgtcctccagctgaaaataatgaagagcacacggcttctccccggtcatcgtcagggtgactcaatcctgctggaagccctgagggcgcacatgagagaaatgcttttcaagggagccaaacttgatctataagcttatctcagggtatagtccaaataacacttatgactccaagcataggcagccatgcttactactctctaaagaagccagtacttctgatgaggaattgaaagtcaagatgggagctctgcttttgtatccattccccataatagagttcagcttatatgttaaatgaattttcacataaatttgtccacttgaacttctgcttctttttgatagttgcctagagatggttctggagagtaggttcttttnccatcgtgatca

SEQ ID NO: 139899 - DNA, 664 bp, Homo Sapiens
atagttaggtaaaggaaaatcaatgttttctttaatgctgagaatttttgttaatatttctgacatttcataaaacatcttttgttgacattctacaaatgatagcatccaataatgtcccgatactttcttcttgtgaagagagtttatatatctttttgacttctgtaatattcattatttcaggaagatttttcagagaaacctgatgaccttctacttgagatattaggtattcttgatttatttgtttttctccctcttcaatgtaaacaattagaattgaagtgtcatttgctgagataccaaattttttcaaagcctctgaaatattgttatttggggaaaggttgaaaataatttcagtagatagagttcttgtcttcatttttcccagtttgtagaggtgaactgctttgtttgctgccacaagtatctgaaatggatcaacaatcactgtaggatttatcagtgatccatcgatggtgccttccatggcctttcttctcaagtctcccgcattttttacatctttaaataacagaagggttaccctgcattcgggaaataggtccagctgatgtgttaactgcatttcacagataagcaggattcatccggcccccagtgcgtctcggaagagctcccgctccgaaacaacccc

SEQ ID NO: 139900 - DNA, 581 bp, Homo Sapiens
ctgaaacataacttggatccacaatgttttctctcataatttattaactaatgtgaaatggaaggtgaaagaggaattatgaacctctgaagcacatggttttcagtgagaaagccttgatccagcaacacaaactgccaagcactgtgattaacttaaacactgggtgcaaattggatcaaaaatgtagtcaaatgaaaattttgttccttcagatcgtgtttattccacatgccagaagttgtttaaagttctttaatcttgacccacagcttatttcttccacagaataaccccaatacacataaaaaaccaattttcgcaaaacaaaagatagaagatgaacaacatctggcgatgtagaacccggaaggtccatgatcttattcaaagcatctggattctttggattcggggaaggtccacgttcagtatacccacataacactcctaacagggactggggcagggataagtggcatgtatgactactaacagaacagacaatacaaatggccttacctcacctctgctgccaaatgagttttggtgtccccattcctccagacaaaaaaataaaa

SEQ ID NO: 139901 - DNA, 216 bp, Homo Sapiens
actaatagctactatttattagatagtctgcaaagcactgtgaaacattacatacattatctcaattattttttatgaaaaccctatgaggtggatatttacgtccacgtctacagataatgcaagagtttctgaaagaataagctacaaacccgtgacatgcaatttacctattaaatgaatctaaaagtttaaaaaagccgggcgcagtcgtca

SEQ ID NO: 139902 - DNA, 931 bp, Homo Sapiens
  misc_feature (55)..(55): n is a, c, g, or t
ctaagagtcacgaatgtcttagtgttaccctcccctagtcaacagcagaccagcntggccaatgcctatgggtggcccctctggagtgctcactaacaagggtgagtgctctcgctaagaagtgtcccccgcctaatcatgtgttaataggatagtacacgttccccaggcccataacagaggactaaaatctctgaattttaaagacacagatgactggcatattttggataccagtatagctatatcaaatagacaaaaacagcttcactttagcaatgatcagattgttaatctacagattttattttttaaaatttggatgtaagtagagactttcagtatttgttttctcttgattttgaagtcatttcttcttctcacgtctgtgacaaatggttgaaaaggagtcaacatggccccaactatagtgccggaaccttttcatcattctgaggctttgccccacacatggtcctcactcatatctgtcaccttctgaagcctagatcttgttaacccatcaggtgcagtgtcagtttcaaatcaaattatcttccactattttcatctgtattgaagctgagatcttcagggcctatttgttcaccatcaggaaaactggaatgtgtatcttcttcaggggcagctgaagctccttcaggtagtacaggctgtaactctccagtttcagaattattttccaaatcagtcatctgcagtccttccagatgacctcctttagcattagcccccaaggtgaccattttcctccttttctcaaccgcaggcaagccactgaaaactgcaaccacaacagcatctgaatccaaagctttacactgccggtcttcagtttttggcagaatatcaccgatactgccatgtatcaaggctcggggagaactgtgcctgctccagactgagagct

SEQ ID NO: 139903 - DNA, 686 bp, Homo Sapiens
ttttttaatgaaccgttgcagaggtttattgagatcattaacagagtggaattcagcacccgccacagcagccagccatggggtgcccaagaggttggttcccgttgccacttgaaatatgcaaacaggtagctagaaaccatctgggcttgacaaagtctaatgccttgaacaaataagcttatccctctgaaaacaaaatggtgcttgtaatgacccacgttaaatatgttttattggccagttaatcattgtggttgaatacttgcctaaggcggtaagaaatcaaataagtaaatcctaaaacaggaagaaaggaatcatattcattcctgaattcagaaaactaaatgaacaggccacaggtcagaagtggtgggaagcaggcccagtggatacctttagacacatgtcctagtagggatgctcgggctttgcttctctgcggacggggctgtgagtctcagaggctccatctgcattccggggcaggggctaggctgctgagtatgccttggggtactgcagggcagtgctatgccaccacctgacgtggcagaaggctggtaggatgggctggcctgaggatggccctgcctggcagaggagtggactccagtggtcgagcttgggctaccctgcccgtctctggagacagattaagtggtggcaagaccttcctaagt

SEQ ID NO: 139904 - DNA, 1105 bp, Homo Sapiens
  misc_feature (302)..(318): n is a, c, g, or t
  misc_feature (571)..(585): n is a, c, g, or t
ccttcaaaaaaacacgtcaatataatgcaaaatgaaaatcaagggtatatggcatatcattctttttaaaaggtggtttcttggtttttttccccctataggacacactaatttatttaagccataatctcttgacattaaacttttaagttcactctgtctgtaaagtatactcagattccctgctgaagtgcaatgactatgctgaaaaacttagaaacagtatgagtaaatttcacacaattactaatctcctaagaatgtacaatgttatcagttaggaaacaattgtgcgaaagtcnnnnnnnnnnnnnnnnnaacttggtgtgggtggaatagcaagtttctgatctaaaacaagtaatgcattgcttctataaaggtgacaacatgtaaggcagttcaaagaatgctgactaaccaaacgaaatgcagttattggattatcttgctattcatatcagcttaacttgttattacgcattgctcttaaatctgtacagcactccatttacacagagtaaccccactcttgattaatctgttctaaagtgccagtattatttacacnnnnnnnnnnnnnnnagccaaaagtctggccagttgtggcatcaggtgaagatgtcatcccagctctattatcatttacattcaccaagggaaattctgaaaattcagcacttgtccctggtccccgaaggttcacctgtccattggcagtgctaaattgagtagctattccagctcttgatccatgatagggagcacggaagggctgttcaaaggagctcatttggtaagcttggtggacaggctgggcctcagctttcttctgagaagtcacttgatccagaaagtcctgtgttgatgtggcagaagcatggtttgtctcatcacctgaaaagggaaatgagtgctgtgaatcaccaactattagtccaaagtgggacttatctggagttgttcttagtggagaattcattcctgatcgaaagctattgatgggcatggtggcataaacctgcttgtctatggaagagaatgctggctgatttgggagggtcctgttatcagtcacaaagttaaagctcgggctattcaaata

SEQ ID NO: 139905 - DNA, 543 bp, Homo Sapiens
  misc_feature (193)..(204): n is a, c, g, or t
  misc_feature (360)..(377): n is a, c, g, or t
atttgaccaaaagtcggtgctgcacttgacgcagtgtgttttaggtgtttgtctttgtacttttttgtgatttttgaatgcacgtgcgcaggaagggctcctcttagagaagcagtcaaactgtgaagcactaagctgaccctgcttcaagcaattttgtttttacaactgttcctttcacaagcaagccttnnnnnnnnnnnngacaacttcctttttcttcagctcccacaccccatttttcttagcagactgcagtcaatccacattcaataaaaagtatataatgcccatttttatatgcacgtttttaaacttccaagttctgaaaattgtttactggttatctctatttaaggnnnnnnnnnnnnnnnnnncattttggattttcatatgtgtctgataagtggttgaatagtcgtttggcgctgttgtatggtgtgattgtcagtgtatggtgtcacttcctatagccagccagcatactttgccttcccctatagcacttagctgggcattactttattatgacatatgtgcact

SEQ ID NO: 139906 - DNA, 1125 bp, Homo Sapiens
  misc_feature (1010)..(1044): n is a, c, g, or t
ttattggtgctcgctgtttgactatgtgcttcgtgcctctgattgggagtgtgtgtttgtgtagagcttgcttgttagggtctcgtgtgggtacctcgtgtgctggaaccgggtcgtcgttgccgtcgcgttgtctgcttttttcttatgggagcgcttcctggcacgtgcattctattgtcgcctttggtgtcctctccttccctttactctttgcttcaatgccgtccccgacttttgtcaaattcatatattttagtcaaattaattattgctaagcttgtctacatgatataagcaggtattgcatattttcatatatctgggggaaaataaaggaagactccaaataaattgtaaaatgcagcaacatccaaaatactgatattctaagcatctacagatctcagaatagcactgccaccgaccgtacaggacaataaagactactcctatctgcggaacaactagctttctatttagttctagatgttgaaactgacgatggctgacataaaagtcacatttaccaaaagtgtctcccaatgcttgactagggaaaaacccctttcaatagaggagcatgtgcgacaattccacaaatatatcgctatccagggcaaggcacattgatatggaatttttgttttcgtgcaaattaaggaaaaaataactattactaatctacattgtttcggggagaaagatgaggagcaaagtgtcttcccaagaatttcagttacttgattgtataggacagtagtagaacccttctgaagggctgaaaaacatagtttaaaggcaagtgcctagagtagggattacaatattgtgtcttaatgcactctactttatcctacattaactatataaaaattagttactaacactagaacatgcagagactttctctgatcagcagggcttgccaaccagaacgtatatatatgtatagtatacccggccgtaatggccgaattcccgggcatatgtccggtaccgtcgactgnnnnnnnnnnnnnnnnnnnnnnnnnnnnnnnnnnncggccgcttcctcgctcactgactctctgcgctcgtcgttcggcttcaacgagctagcgccctatagtgatctatcatttt

SEQ ID NO: 139907 - DNA, 414 bp, Homo Sapiens
  misc_feature (45)..(45): n is a, c, g, or t
gagaatcatcattagtcaacattttattgagtgccacacactgcntggctctaagggctttagaggtatgaagttgctgacttctcaagtccatgaggtaggtgctattaccatcccattgtacagactagcaaactgaggcacatggaggtgaaatcacttgcccaaagccacttagcttgggagtgacagagttcagatttatacccaggaactttgcctccagagtctgtaatcataacaacctcaccatattaggtactacttgtgtagagtgaaaaataaatgacacacacatgcatatggctggtacataacatcaaatgtgcctgggaagacctgagacatccatccatgatctgagtgtaggagaaagacttactttccaccgtacactctttagtacctgatgaa

SEQ ID NO: 139908 - DNA, 663 bp, Homo Sapiens
tttttgctggaattttttttatttaaataaaatatacaatacggcgcatttaccggtttctgttttaaaagtggatttgaaaattccttgtaggtgactgggtgtgggagggcccattgcctgcacctgtctgtcccagtctctgcagagtggccaggttgggtcagagctattataaaatgcatgtgtgtgtaagtagagaagagggtggttaggccaggctctgatggcaagggggctcctcatggccctggaccctccaccttcacccctgctgcctccaggacaagactgtgggtttggatcaagtcctgctgcctctcagagctgccttccttaaggggaaggggtgtgtgcagaactcaggttgaggctaagtccttccagttctcagaactcctgagccagcacagtagagaccagtactaggcggcgtctagtctttacctaagatcccaggaaccttcacccacttctctcctggagtactgcctcccactccctgcagcccatctatggagaaatcggtttgtctcacatcccaggatagctcaaggcaaaacccgatcttgccaacattctggcttggagcatggaaggttctggatggataatgtgggaccagcccttctcattatttggggattgcagccatacctgctc

SEQ ID NO: 139909 - DNA, 691 bp, Homo Sapiens
gaagggtcaagactgaaatgtattgtctttactatcaagaactctactttcagttgtttctcagacagttaatttcagcttcatagagatttctgagcaaattaagaaacactgttttcctgggtttgttttgggtatatgtcattatagttatgttatttcttgttgaaatttataattgtaggttttttgtattgttttagtatttaatggtgtataatgtgttattacattatatgtagttataccaaaatattgcctgaagataaatcatgacaaggtcccctgtttattcctgtgttacagacgcatggaattgctcctgtagatttgaatttttgtttcatttttttctgtcccacccttcactctctctgtttcagaacatttttggtagaagtgctatccagaagtgaacttgtcaaaaggcaagtagcatgaaagaagacagaagaagcaaaaggctaatacagtggataatttctgagcacttgaagtttcttcaaatgtgcaagactgtgtgtcttcctattagatgtataaattggatatttcatgcctaattaaatgttgcgttggattgcagtgcctatcatacagtgattggagtaaattgaggcctaatcctgaacacatatagagcatattgttagatatttttcctgtgacatttgaagttattattctccca

SEQ ID NO: 139910 - DNA, 341 bp, Homo Sapiens
gtagtaacatccagtattttaatatttatgcttgataagtcatttaagttgaagactctttatgtattaatttcagcaagtaacataaccacacagaatagacaatgaaagcataattagtcattatacacaattataatttgataaaaaatttcaacatatacagaagtataaagaatgtgtatctatcatgcagcttctacaattatcattccaactcctcgtttctttgatattgccaacaatttacaccctgccccaattccaaatttggaaacaagtcccagatattaatataatttcctcttcaacatttcagtatgcctgagagattcttgttt

SEQ ID NO: 139911 - DNA, 892 bp, Homo Sapiens
gcacgagggtgatctctgctggacaagttgcataatcttttccttaaccaacagatcattgatctccttttgatgtaaaaagtaaagtatgactctcttgcaacttctgggagtttttttgtagagcgtcagtttccttcaggtgatatgccagagcttttctgaagataatcattctctttaaaaacatttctttccagcatcgttcaattgcacaatagcctcatggtgggctctctctgctagcattattatcttcttttcagcctcttgttctagtcggtgcttttcttcaaaaaatctgctttccagtcttctaagagtctcctgatgtatccgctctgtgtttcttaaattctctttcagatcatctaactctctctccacttggatttttctcttctggaattgtcttactgctttcagctctgtgtgaatcatgccaatttctttggctttttgatggaactgtccctctagttcattaatttgcctggtatacttttgttccaatttatccttctcctcttgggctttttcctttgtttcatttaattgctgtttcagtttttcaatcatattatctttctcctgatcctgcttcttcaggtaacttaatactgacattatgtctttctccattttacattgctttttctttaagtcctcattactttttgccagtatccgtgaagtatcacgatacttaatcctagagagttctgtgacttccaacctggcctcccaaagggaggcattggccttggctctgtccaccacagattcatctgtttttattaacttcttcgtgtctttgcctttgctcttgcctttctttttgtcctttcccttcgacggcatcttggcttccccaggggctccgctgtcgtag

SEQ ID NO: 139912 - DNA, 528 bp, Homo Sapiens
gctataatttggtaacaatcttctaatcttctattaagataccaaatggaaggctgatgtttcagaatgcatataaatacacttatgttctagtaaacaaaacattttaaattaaccctaataatctgtaccttttcttcaaaaaatctgctttccagtcttctaagagtctcctgatgtatccgctctgtgtttcttaaattctctttcagatcatctaactctctctccacttggatttttctcttctggaattgtcttactgctttcagctctgtgtgaatcatgccaatttctttggctttttgatggaactgtccctctagttcattaatttgcctggtatacttttgttccaatttatccttctcctcttgggctttttcctttgtttcatttaattgctgtttcagtttttcaatttcgtgtctttgcctttgctcttgcctttctttttgtcctttcccttcgacggcatcttggcttccccaggggctccgctgtcgtagttgcccagccgcggccgca

SEQ ID NO: 139913 - DNA, 414 bp, Homo Sapiens
aaatgtgattatacttctctttgacttgtcagcttagctttagctgatacactctggtgcccaactattattgtatcagtgaacttccactttcttttccttttctctcaatttttgttgtatcattcctaccttgtgaggacatataatatttacattctgttgtcatcctcacatttcttagttccacagtttaaatgtatttgaaactcaaaacattcccattaatctcttggtcagctgaaattaatgatttaatagtttccttaaaaaagactcatggaacaatttccctaaatttttgccatgtcaaatatgtttatctgtagcctttacacagtaaaaacaatttggctagataatacaattctcagttcatatttttctttggaatattaaagtattgctatagag

SEQ ID NO: 139914 - DNA, 494 bp, Homo Sapiens
aaagaaaattgaggttctaggattttcatggtaacaagctctggtataagctaaggctggcaagttcagatactaaaatattatttgatcatatcttggatccttttgaaaaagttaagactatatgaaggttaattagaaataagtatgaatattaataaaatagcatttatcttatttctctattttatgttgtgacttaacctaattttatttttttaacattttcttatttcttataatatgaatgctgatatttaaaggtagatctatgtggtattctttgtgtttcttaattgtttaactcttaagattatttgtgatctggatttatgtatttgttagatacatacgaattgttaaaatggaatgcaagtttttcaaaagcccaggtctaaatgtaatggttggtttattgttctataaccccagcccatcattttctgtgtaaatcataaacaataaacagaatatactcggtggtcatttctaat

SEQ ID NO: 139915 - DNA, 1139 bp, Homo Sapiens
gttcttatacagtgggatatttaactccaagttctgtcctgggtttgtctatttcatagtgatctctggtctttcctccccaccttccaggtttgtggctgactccttctgttgccctttgccttcttcctgtgtactgatcagctcctccattccctgcctcctagaaactgatttcactccagactggtgtggccacccttgtcttcagatgagaatggagtctgaatgggcttcctgagagcgagtgcgacccgttcctttgtttccttgcaaccacccttggacctgactcagctaacaatctagccctgggggaatgtgatctacctgatgcgaccctgagttctccccagagcctcctcctgccccaccagctctcaagtaccttttctcctggactgtgtggacccacccagctttcttcctccctgttgtgtgtcagattatgccttgcacttgggaaagctcttgtgagactctcccaaggtgctgtatttttctacctcatggagtattctcccagaaactgcaatgtatttttttaggggagtatctttaacaaagcagaatgattcttctaagtttggcaacaagaaggcttggatctgagtcttctacctggcaggatgccaatcctgtttgttgtccgtatgtcctgaaaacatgagggactggcagatgtcattttggtctaaagagctgacttgtttgaaattcagccttaaattaagctcttagttgttcagcttggggggcaactttgatttttctctgtgttgtagtctctcatatttactcaaggagggaccaggatgatacagtcatctgaggttatgctttgcaaaaggctgacggtatggaatatgtttccatgtctgagtcttagaaactggctgctcattgttagaaagtgatgctttgtgagactattgtcttggggccaaaaataatcagggattttaaattgggcaagggacaaggtgctagaatcctaagctctggaaatatttcatgacactggtgtattcactcatgtgttccagatgtattctaattgtgtatgaaatgtatgtacacataagtgtgtgtgtctcaggaagtaagaaaataaaaatggaaagctattatggaccctc

SEQ ID NO: 139916 - DNA, 964 bp, Homo Sapiens
ttttttacatctgagagcagaggctttatttacaatgacattcaaacaggatttagcaaaggatgcctcttcctgctcgcatcttagcagcatgggttgtacttcataaacagaaaagagaaatatcctgggagcaggaagtgaactcttttctcagataatgttctctaaatcccaacacgttccatgctcccggctcttagcaggtagttggtggacacttggttatagcagctgggtgccagatgcctgcatctcactgaggaatgtgttcagggaagatgtcaacactggccgggaaaaacatcaggctttcacctcactcatggcctccataaggcgagcgctgtttgtgactgctgtcgtcaggaaaatgaacctgtagcctttctctctgcccaggaaccggagggctgagatctcagagaatgtacaaccacccaagaacaccaccaagatgaggcgcagggactcactggaagccttgtcttccttagtcatatctgtgaatgcaaagtcactgcagatactgtgttttcagagatcggtaatccttggggatcaaaccattctcagtgatggacaaaaggcacatgaggcgcaggctttctataggcgacacctgccggtctatgtgttcctcaatgtagctggtgctctcccggatgttgaacccctctagcagtgcatgctcagtcttgattagctcctggaaatcctgcttggttttcttcttcatgatggattcacaggccccaatatggagactcagcaggcggtgctcctgtttcaggcccttgagctcctgggacacgaaattcttcatctgcttaatgtccatgcctctccggcgatcatactgggcctgcaagttccgggccttctggctcaagaagccaaagacattggagaagtgctcgttccgaatctcattaaaccccttgtcctcggcattgagtagcac

SEQ ID NO: 139917 - DNA, 689 bp, Homo Sapiens
tttacatctgagagcagaggctttatttacaatgacattcaaacaggatttagcaaaggatgcctcttcctgctcgcatcttagcagcatgggttgtacttcataaacagaaaagagaaatatcctgggagcaggaagtgaactcttttctcagataatgttctctaaatcccaacacgttccatgctcccggctcttagcaggtagttggtggacacttggttatagcagctgggtgccagatgcctgcatctcactgaggaatgtgttcagggaagatgtcaacactggccgggaaaaacatcaggctttcacctcactcatggcctccataaggcgagcgctgtttgtgactgctgtcgtcaggaaaatgaacctgtagcctaaggagtcaaatgcagcagcagaagagacagcacagatcttaggccccaacggcaacccatagagcctctccagttccacagtccccacgggatcacagcaccagtttatagacagagacgtgagtgccatgctcttgggcaccactgctttctatgactggtataactgggctccctgctgtggccgcccagagcttaagctatgggcaattgtattctgaggccagtagaaaaaaattccttggccggacaacttcgctgggtattgtttttttcctcagaagggagttctcttcggccgta

SEQ ID NO: 139918 - DNA, 477 bp, Homo Sapiens
tagaataaaatcaatttaataattttttaataagtaaaaaaatcttgtagcatgcaaaaacttaccagttccccaagttttcattaccctgtctcatatttagtatatgtgctgcatctggcaacaatgatcatcagaagcctaggacagtataatattactaccataaatcataagtaataggatgattttagcaaaactctcattttggttttctagaacctacctccaggctacttaagtacttaatttctttcaactcttaattctatgtaaatctacattactagataagataatggtactcagaaatgtattacatccattaagctacctgattggctgcaaaagctggagcagtttctttagaagtcttccacacaaactgcctttgatattcagaatttctcaaggcattatatgaaggaacaacagtcaatccagctttcttacgcagaagtctatccaactgttcaa

SEQ ID NO: 139919 - DNA, 640 bp, Homo Sapiens
atgtactttaaaatgtgagtttgagttcttctttgtggaaacttaagatgtggtgtaaatgattctttccaaaattgtccagcagcttgaatgaggcagtgacaattctgaggtggtttattgggagtccttctacatttctcttagataactctgcactctgggtggctattgtgtagccttactgccccagagtgcctgttagccaaatatttcccctctgataggaatattttctaagaatcagctgataacttgcgtgctggaccttgttatctgtgcccctgggagacacacgttttcttggttttgaaaacctgaaacacaggcaactttacattttggggaattagctgatgcctcctgaagcctgaggaggtggcggggaatatgagcggtgctgtctctctcaaaagtgccctttagatgattccccctcctagggctgcctgcaggggctgtaggcttgggaaagattgtgtaggtgacagtgaatcagaatgaagtggtagattttgtgtagatgcatttgtctgctgtaattttttatatatatattaaacttactgtaactgtacagttcatttctgttgtaaaacatcattaaaccatcttccaagtgttttcacattgaaaaaaa

SEQ ID NO: 139920 - DNA, 698 bp, Homo Sapiens
actgtttttatatgcaccaatacctctctttaatatataaagctctacaacaaatacctctaataattttacaattaaattaggtccatacttctatactactttggtctcaacatttttaaaacatcaattaattttgaaaatttacaatttaacaacatgatcctatcaataacaagcacattttgtagtggattaaagacacattcaaccatgcaatccagtgttcaataccttaatgataaatatcattgctgattgacttttattttgaaagatgattgaaaactggaataatcatctgagactcacagtgatcacaaacatgcagaaaaaagcatacaattctattcttcctgaaggaatgttacaaaatgcccacttttttatatagggtcaatatgccaaattacttatatttttcaatccatcatcttctaacatttgtcacttaaatttttcttaaagtaccaatgttcctgtaggttgtaacagaaaatgaaccccaactctttcagtctttaagacctcagtcacagtcccacactaatagctgccttttagtaaaatagtgacatccagtggacacatgaaatatttctcaaattctcatatttgaatcataaacaaaagttgcctctttaaatccaacaattttagtatgagttcctacttattttgatggaatctacagattc

SEQ ID NO: 139921 - DNA, 653 bp, Homo Sapiens
ttttctgagtaagaacaggctttatttgtaaaaccactcgtgactctttacaaagcaggatacacagaagggaaaaaaatacacagtgcaaaatggatgttctgagtgccacaaggatctgctgaaaaaagccaaagatgtaagatggctgggtatatatgagaatgaatatttcactatattctgattcaattaccagtctcagtggcccaggatgagcttttggtgtggtcacatggccaacatttggataacaaatgaggaataatggtaccgcctcactagtgcctgagaacagcatgttctggaaaatgtctctggagttagagatgtgttagctttttcattacagatggagaaatacaatgtttacacaacagtccaggggtggggtcaaaagttggaaggtgtcattagacgcagccaaataaagtgaagacaacccaggtgactggcagccctgacttgtgcgtgggcgaagccttacagattcctgggcactctgtgcctgagcttacctgatgttcttgtgaggcgggtggcactatcctccatgtatgtcagtctaacaagacggcctgtaaaaatgtcatctatatgtgctatgtatgtaagcagttgtacccagaataacattaatcctcgtgccgaat

SEQ ID NO: 139922 - DNA, 858 bp, Homo Sapiens
ttgtagaaatttgtatacactaagtattttactgatggaatccaaatcaaggtggtccacattacttaaaaatacgttattacatctttctaatagtggttgataacgatatctaacatttcgaagaaactttgctatgctttttgcaacgttgacctcagaagaatctatggtgtcaaaaagaagttctgttttgttcaccagttgttgttgaaaatgtcgtgatattaaagaagatatgttgaccatcaagacagacaaggaacttaagtcctgtgtggtttccaagttcctatgaacaatatcagctatttttcccattaatggactaaaatacaaatgctgatctgctaggcaagaggaaaattctgagagcagtttaatatcaaactgttgtgtgacgtataacacattcaccagggtatcgtcattcattaatttgaatttatttgtagctaaattatgaagagtaagaaattgaggatggtctctgacatactcagcattttttaacaggctggtcttctgcttttgaagcttccaaagcatatcaaatgcacatcccacttgcttttctgaaagtactggctttgtttctttcaataaaaccaacacatttgctcctcatctgtgacacttattcatctgaataattagtggttcacaactgatggctcgaaacttgaaacactctccaggagaatggacaaatagctcttagacgaagcatatttgtaaccaatgactctaggaaaacaggtgtttttttcatttatatcacaagttttcttcggacgcgtgggtcgacgatatcccgggaattccgaccgtccgcctgctttttaccgctgttaaagt

SEQ ID NO: 139923 - DNA, 391 bp, Homo Sapiens
cattttaattgcattagcagtgatttaatttttttagatgctaaaccttatgggtgaaagtggattaaatgtagccaaatgcaacatcaaaatcttcaggcacaaaaacccattaactttttaatactctcagaagatgaacctaatttcaaatgaaagctgcctccagaatatattgttaagcatatcctagatataattcattctagcaaacattctgtagaaattcacataacattttactgtactaaaagtaaattgcccatgtaacaaaaactatcttttcataacttcaaatgaattttaaaggatgactgaccgtccttggaagagaaacagtaaacaaataaggtttatagcaatgatgtatgagttagaaattgcagttcca

SEQ ID NO: 139924 - DNA, 785 bp, Homo Sapiens
ccacacttcagcctgaatttttctaaaacacagttgtctcaagcagattactccacacgtttttccacactgaactctccagtccttccacttccttaattctgcaaatggagggggtggggactcttgggaaactactcctgtaaaattgaagttgaaggtaggcgtgggctgaggaaagaggaatcagattaattctctgggttgcaaagaggctattctgcaagccccttacagtggccctgaaagctcaataagtgttttgtacctcttgtaaatgtgccattgtgtgaagcattaaacccaacatctagaattcaggattcatccagaataaaaggatgtaaaatctttcccaacagaagagtgttacttttggtcagacaacttcatgggttcttactgcacattaaattatgacttatggaacattgcaatatattctcggtccttaagttatgacttatggaacattacaatatattctcggtccaagtgagtaagttctttgctttatgtgaatccaataaaaaatccaaagaattttaatttggagttgatgtcctctttacaatacatttataatattctcttaaatacagacaatttttcacatttaaaaggtgagttccatttgagtttagaaaaggaaatatatatatacatgcttgtatatgattggaaaatttcttgaagaataacatcagaaagtattaagttttgcttttgaagagaaggggacttttcatttatacatggcttgactgcacatgtattaattttag

SEQ ID NO: 139925 - DNA, 661 bp, Homo Sapiens
  misc_feature (162)..(224): n is a, c, g, or t
  misc_feature (433)..(462): n is a, c, g, or t
aaataacatatttattgattcacataagtatgttttcttcattaatcgtctggagaaacccacttgtcattaatttgttttgggctaggttttcaaacttaccaaattgctttaaaaaagcaatttggaaggtaatttgataggctttccaacttaaccaannnnnnnnnnnnnnnnnnnnnnnnnnnnnnnnnnnnnnnnnnnnnnnnnnnnnnnnnnnnnnntagtttttgttaaggcaaatgtcttcccttaatatccaaatattgctaataaacggtagaagatgctttggaaattaaaattatctcgctgttggttagacttaacactgttaatcttcagccaaatatcacatttggaacaaattattttcttttttgttgtttaccctatcctcaacaacatttttagtttaaattattgtagagannnnnnnnnnnnnnnnnnnnnnnnnnnnnnccccaaaataataaggtgcaaagctattttatgcttaactgttgctctgtcaaaacagctatgcagtggagttgcatttgatgttctagagtttgattacatgcagagttgtatatagccaaaacttctcttatcaaactctgttatgtaggcatatttatatatacattaaagactgttgtactgtgtctcaaaaagt

SEQ ID NO: 139926 - DNA, 792 bp, Homo Sapiens
  misc_feature (82)..(116): n is a, c, g, or t
  misc_feature (641)..(695): n is a, c, g, or t
aagatgtaatagatcaactataggcctactcttcacaacgaacgacgagcgcagcgaagtcagtgagcgaggaagcggccgnnnnnnnnnnnnnnnnnnnnnnnnnnnnnnnnnnncagtcgacggtaccggacatatgcccgggaattcggccattacggccggggtcaaaatgatgtatcaatggttcttttttagaacaagttttcaaagcataaaaagaggttgagagaaataacatatttattgattcacataagtatgtttttcttcattaatcgtctggagaaacccacttgtcattaatttgttttgggctaggttttcaaacttaccaaattgctttaaaaaagcaatttggaaggtaatttgataggctttccaacttaaccaaattttttattgtaattcttggatagtatttttgtctttttcaattcatttgtctttttcagtatagtttttgttaaggcaaatgtcttcccttaatatccaaatattgctaataaacggtagaagatgctttggaaattaaaattatctcgctgttggttagacttaacactgttaatcttcagccaaatatcacatatggatcaaattattttcttttttgttgtttaccctatcctcaacaacannnnnnnnnnnnnnnnnnnnnnnnnnnnnnnnnnnnnnnnnnnnnnnnnnnnnnngctccaaaataataaggtgcaaagctattttatgcttaactgttgctctgtcaaaacagctatgcagtggagttgccattgatgttctagagtttga

SEQ ID NO: 139927 - DNA, 1421 bp, Homo Sapiens
  misc_feature (125)..(125): n is a, c, g, or t
  misc_feature (615)..(679): n is a, c, g, or t
tgcgcagggtcagcaagcgcagtacgagtgagtgtcacgtactcccccacacaccctcgggcgcgaaactaggcagcagagcgaggcggcgggggcatgtgtatttacacggagtcgacggtctncggagcgcggccagcgcgggcgcacggacgccggccgacggaatcgccgccgcggctgacgtccgcggatcggttggttgtctagcgccactggtggttggccggcccacggggtggtttattttggtgcggggaggggaagcgacctaacaggcgtcgctacacgggcgatgtattgtgcacgagaacagaaggaggagcggctggtgggcctcctcttgtcttgtgcggggcacgcggcccaacatggcgtgtcttttgagggccttcgtgggaggggggagggggcgggagcccagcgcacgcgttttgccttgtatgcgtggcgtcggggctgcggtattcgggcgctgggcctacccctgcctggcgggtccggtgggtcgcactgtactccgcggaccgggtctcggcgggtttgtctctggggggagcatgcgctgatgttcgtggtataggtgtcagttgcgcgtctgttgtctgtgtccgnnnnnnnnnnnnnnnnnnnnnnnnnnnnnnnnnnnnnnnnnnnnnnnnnnnnnnnnnnnnnnnnnccaattacttttattgatcttacagaatagtgtcttggtctctctactgcattcaacaacaccaaaaatctacaacgctggtgtcaacagcaataattactaaaaattgagcaagcaatttatgactatccgcaattatggaaaatggattcaaaaggcatctgctgcaataacaatagtatttatgtgtgttaagacacaaaaagccaacataactttagtacctcaggcatttttctaattgtgatatttatacaaattttggaaattgatgagtacactgaccagtcaccgataatcatgaaaaagaaaatacacataagtgcctatttagctaatactgtgtttaactctagcttgacattgtgtgatactgtaatccctttcaaagcactggaaatcactcacatttgcctcaagcttttttttaaaacagaagaataatctgatgaagatgcccttatttcagaaactgaggtcattactatctttgcttgaaacattttagaagagttgctgaacaaaaagaacactcaatcttagtctactggataaacagcgacatctagtggtcattgtatccctaaacaaacaccttaaaagcacaaactcaagtatccatgaaatatatgaaattgccactatctttaacgtatttccaaagaaactgtacaaggaaattataaacacattctagaaagattcgctatgattcaggaataatcctcgtgccgaattcttg

SEQ ID NO: 139928 - DNA, 592 bp, Homo Sapiens
tttacacatatccataattttattaccatgctaatataactttttcttgttatctataaacttataacaaatccaaaaacatagtggttaaaaacaatttattattatcattcacagggcctcatgggctcaatgaggcagttcttaattagagtgtctcaaatggtggcagtcagagggcatcttttttgcccatgtggttagcttgggcttcctcacagcatgatggtttcagagtgctcagacttttaagacagcatctggcatccttcaaagcaagtgttctaagagtcgcaggcagaagctgcaaggacttcttaggagctagcttcagaagtcacacggcatgactttagtagtattttaaaatactcaatcagggctcctccagaaggtgtgcacactcaatcttcatttatcactcttcgtgtttcatctctattgttatgcatttcaatccctctgtgtctgttttttccgcttgttataatttatttcctcgctttccaaattataactgcatccagaacaaagatttcgtttcccactatttgtatatttcaaaacacgcagtgctctgaatgcaaaggga

SEQ ID NO: 139929 - DNA, 573 bp, Homo Sapiens
gaagacagagattttggttacagtgtgggcctgaatcctccagaggaggaagctgtgacagccaagacctgctcggtgccccctagtgacaccgacacctacagagctggagcgactgcgtctaaggagccgcccctgtactatggggtgtgtcagtgtatgaggacgtccagcgagaaatggtaatggaaccgtgtgtaggatttcctcacacagatagcacatacgcggaggggcgggatgacgtctgaaaatggaaaactacagattaagaaggaaaaaatccaatcccctccatctcatcaccccagttaaccattgttaacatttttatgtagaacttttctgaaatatttgtgaatttaacatgagaactgttaaaatttgtgaggtaaattggattctatgagatatgctggactgagatattaatattaactgtctgctgctgttggttaggaactttgttgattagtcatctccgcctttttaaaatgcagtgtaacctgcacatcttttatgttaatgaatgcaaatggccaatgagtgtataaatacttttcagcatcaaag

SEQ ID NO: 139930 - DNA, 745 bp, Homo Sapiens
gtaactgttcgctcgctatgtgtgatctgcgtgtgattccgacaagcacacacgatctttcatcttgtcattgtaacagagtggagctgacatcacagcagacagtggtaaggacgttttgcttgcagaagggacataatcacatattcctctagcaaatttctcagcgtcttctctggtagacacagctttaaatcgggaccctttgatcatcttgacagcttgcaatgcttcctttttattttcataaacatagatcctttcatttctcgctgggacgtcctcatacactggacacaccccatagtacaggggcggctccttagacgcagtcgctccagctctgtaggtgtcggtgtcactagggggcaccgagcaggtcttggatgtcacagcttcctcctctggaggattcaggcccacactgtaaccaaaatctctgtcttcagaaaaaccagcctgatcagttgggttcccttcagctggcttcaaaatcctttgtgggtcctggctgagagctgtgacacctgcctcatggtggtagaaagaagacagccttcctccttgctccagtaaagcctgagccaattttttctcaaaaatgaaccttgtagttgatgtaatgggtccacatttcaatccggctttgacgatttcttctctaaggtcatctggattcagaagtttcaatcgagccaacagagcatccattgtcgtttcacctgaggcgggggcggcggccgca

SEQ ID NO: 139931 - DNA, 1170 bp, Homo Sapiens
  misc_feature (218)..(231): n is a, c, g, or t
  misc_feature (252)..(344): n is a, c, g, or t
  misc_feature (367)..(378): n is a, c, g, or t
  misc_feature (450)..(462): n is a, c, g, or t
  misc_feature (483)..(503): n is a, c, g, or t
  misc_feature (510)..(524): n is a, c, g, or t
  misc_feature (532)..(574): n is a, c, g, or t
  misc_feature (576)..(581): n is a, c, g, or t
  misc_feature (583)..(585): n is a, c, g, or t
  misc_feature (590)..(591): n is a, c, g, or t
  misc_feature (595)..(642): n is a, c, g, or t
  misc_feature (645)..(647): n is a, c, g, or t
  misc_feature (649)..(649): n is a, c, g, or t
  misc_feature (652)..(675): n is a, c, g, or t
  misc_feature (677)..(690): n is a, c, g, or t
  misc_feature (692)..(694): n is a, c, g, or t
ctgcccccccttgtgttctcccccgcgggggaaaaaatatttattttccaccgggcgccccccaacgggtgtgtgtatatccccccgcgggggcgattatacgggttttccaacacccccgcgtgttggggaggggggtcttcccccctcgccggcggagagaatgttttatataagatattacccacaccctctcttccccataaaaaaagcccccnnnnnnnnnnnnnntaatattaattataaatgagnnnnnnnnnnnnnnnnnnnnnnnnnnnnnnnnnnnnnnnnnnnnnnnnnnnnnnnnnnnnnnnnnnnnnnnnnnnnnnnnnnnnnnnnnnnnnactgttgttttccccccgggggnnnnnnnnnnnngtgggggggaaaacaccacccctctttttgttgggccggtgtttcttttgaagaaaaaaatattaacccacnnnnnnnnnnnnnccttgggggggcccgcgcccnnnnnnnnnnnnnnnnnnnnnttttttnnnnnnnnnnnnnnnccccaaannnnnnnnnnnnnnnnnnnnnnnnnnnnnnnnnnnnnnnnnnntnnnnnntnnnttttnntttnnnnnnnnnnnnnnnnnnnnnnnnnnnnnnnnnnnnnnnnnnnnnnnnttnnntnttnnnnnnnnnnnnnnnnnnnnnnnntnnnnnnnnnnnnnntnnntttcagttgtcaaactactaacatctttattttgtcaagatatttaacaatattaaaaagttcagatttcttcatggtcatgtcttttaccagcttttcaaagattcattcagtagtagaaacagccaaatgctgctacaacgcagaataaactgtcattcatgaaaacatcatgagtatagttgtcagtgtcagcatcccagaaacagcgagaagccatgaatactccttcacctctttgttctccaatcactacttgcaccaccattttgtatcggtcaaatcccatttcttttaatttatctttaatgttttctgataaatgttttgtaagctgaggcatttcttctggagaatattcagcatttgccagttcctccttgagcacagcatggatacagtctttaaccacagagggcctgaactttttaatattgttaaatatcttgacaaaataaagatgttagtagtttgac

SEQ ID NO: 139932 - DNA, 334 bp, Homo Sapiens
aaactactaacatctttattttgtcaagatatttaacaatattaaaaagttcagatttcttcatggtcatgtcttttaccagcttttcaaagattcattcagtagtagaaacagccaaatgctgttacaacgcagaataaactgtcattcatgaaaacatcatgagtatagttgtcagtgtcagcatcccagaaacagcgagaagccatgctaaaaaatccaagattgaagaattatcaacaatctaacaaggacctaaacgacacatatctgccacgagaaacagtgttccttaatacattctcatagatctgtacttccaaacctttcacag

SEQ ID NO: 139933 - DNA, 611 bp, Homo Sapiens
tttgttttttaaaatcagaatagaactttatttgtggattcaagattttaaaaaatgattttacactttaaagtgtgcaataaattttgatacatcaatcttgatatatatatttactgtgtcagaagattttaaaaagtcaaatagtttataatcaaaatgaattgtgtttaacttgatacttatatggaataacttcagcattataaataaaaacccaaaacaaacaccatttaaatttgagttctgatgaaatgcatttgtaatacaattttgttaaaaatttttaataagagattgtaggctaaagttatatgcttgtaatttctagaaacatatgatgtccttgctttatgaaaatgatcctactgactgtcccgcagtagaatgcatttgagacacttttctatctgggataaggggctgtgttgcttgatacatgtttcttccagaccacgagcccctagtgggagatgaaggggatgaaggtctgcagctggggactggtggcagttgagtctggtctcatttaacatcatgttctatgagtcacagaatcatccaaatgagtatcagccagatacaaagaaagctttgtattttctcatgct

SEQ ID NO: 139934 - DNA, 533 bp, Homo Sapiens
ttatgacagtttttgtttaagacagatgtttaaatagcacagacctattgtgcacatctttaaattatttcagctggcagaaaagaattgcatttaaaactgaaatcaaggcctcaatacaaagattatcctggctcttttctatctctgtgggcctaattgaaatatgtactcttattttagacacgcctctgttaaaacagaccaggttttcctggtctcagacctatgatgacttgtccctttgatgtcactactgtgaattgaatataattagtaaaaatagacgatgaataaataacactttatagtaagaaaacaatatattttggccatctaaaaatgagaattataattatatgaattataatttaaactgtttaattttgtttaatgtgtatattgaatcttccaaattgaagccattattctcaattaagtactacaactatgacaatgcttgacctacatttctaaaataaaaattcacattttttgataaataaactacagttttaccagaaattactatc

SEQ ID NO: 139935 - DNA, 617 bp, Homo Sapiens
taacagtttctaaaacatttttattgtacaaagttcaagaagccatttacaagccaaaaagtatcagaattaaataacacataatttttatagacacatttttctgtacaaagggctgatctttataggaattttaaataaataatctaaaaatcaatgtcactgattgcaaaataggtctctctctcgaccgtctcaaggtgacatgcattctatgcagccaaaagatgaggggtttgacatctgtgacgagcccgggcagtgagtctctggcgaagatttctcactttcttaataagattctgtcccgtggtgtcccattctactgctcttctatttaaagaaatctgtgttgagggatccatttcagaagagtcatttaattgtgaggttctaggcaaacagcttgagtcctgttcattttggaacctgggttcttctttatgacatggattttcagcatgttctacagccgcatttatctcttgctttaaaaaccactttctagacgcatctgaaagagcagaagctttctttgctgatctcacacggaactcttttccttcagcttccttccacttctgaattttctggctctgggtttcacctgcttctat

SEQ ID NO: 139936 - DNA, 1025 bp, Homo Sapiens
  misc_feature (41)..(64): n is a, c, g, or t
  misc_feature (91)..(92): n is a, c, g, or t
  misc_feature (138)..(179): n is a, c, g, or t
  misc_feature (194)..(330): n is a, c, g, or t
  misc_feature (332)..(332): n is a, c, g, or t
ctgggggtaggaaaattacccacgctgttttttatttctannnnnnnnnnnnnnnnnnnnnnnnagccgcggttctgcgcccccgctttgnntcctccccctcatgggggggccccgccgcccccccacggaaaatgnnnnnnnnnnnnnnnnnnnnnnnnnnnnnnnnnnnnnnnnnncacacaattgcatannnnnnnnnnnnnnnnnnnnnnnnnnnnnnnnnnnnnnnnnnnnnnnnnnnnnnnnnnnnnnnnnnnnnnnnnnnnnnnnnnnnnnnnnnnnnnnnnnnnnnnnnnnnnnnnnnnnnnnnnnnnnnnnnnnnnnnnncngctggataattttttaataaagtgaggtttacatcactgatatttaagaatggctatatgcacaaaagaaaacacacctttttggttaaggggtgaggaagttagagaaagcatgagaaacagggagcatgtggggtgaggcggggcaggagtggaaggctgcaggcacccccagctcactccctgcctgcggcagcacccatgacactacagatcaaggggttatgaatgacatggattcagatttctttcattctagacttcaacctagccttaaccttttgtttcagcaccagtctaacagagcagcgcaggcgtttctcatccagcagcaatgctacttcctcacccagggcaggtgcatgggctgaccctgacgggagcctccaggaacactgccttgagaaggcaccaccgaggggctatgaggtccctgaagaccaactggtgcctgtgatctacaaacagacaaatatttgacctttgtcttcaatgacatttacatataaatagacataaataaaatcctccataatttactcttaggtctaggaagatgtggctgtgtgcggttcctgattttcacccaggtctcactgcagcgcaggacataatgaagaagtatcacacacacatttaaagtaaaacatgatacattcacactgttgactgagactgtagtaaagatcactg

SEQ ID NO: 139937 - DNA, 696 bp, Homo Sapiens
  misc_feature (620)..(647): n is a, c, g, or t
tgctttttcacagatgaagaaaacaacactgacatgcattatctcccaacaccaacctcaacccagccctggagtgtgagcagagccagcagcatttccagccccgcctctggaggaaggagaggaacctgagactcttgggtgacctgaggcgtctttggcagcaccagcaaaagagcctggccctggccgcccagcacaggtgctcagtccctcctgactgccactgctccctcaacaccaaagcacagggtcgcgagatgttgggagagggtcggggatgctgggctgggagaggaccgggggcctgtcagaagccatgacatgatgcactcaccgctcaggaggaagctactggcctttgagtgaaatctataagaatgaactctggagatgtatcgtacaacatggagtctacagttaaaaactgtattgtatactggaaaattgctaagattagatcttccatgttctcactacaaaagcataagtatgtgagatgacggacgtgtgtgtcagcttgatttaatcattttgcagtgtggcaaagcatcgcactgtaggtggtaaatatatatacagttttgtcaattataccttcaggaagctggggtggttgnnnnnnnnnnnnnnnnnnnnnnnnnnnnaggtcagtgaggtgctgaacatggtgcattaaacagcattttcattctt

SEQ ID NO: 139938 - DNA, 897 bp, Homo Sapiens
  misc_feature (575)..(671): n is a, c, g, or t
ttgattttaattaagtttattaagtttagtcacttaacattatataggaatcctctgaaattctcagagatctgacagtctagcagtgcgctcacagtagggcttgaacactgctagtaaaacaaaagccatattcctaccttagatctagtatttagccagaaaaacaagtgatgcccataagaaccaaccagagaacagtatctggtactagagtttgaaatcacaagggacagcctataacagtatagtattgatgaagaatgtttctacccaattgaggagtcagctaagtagaaacagaccaaaaggcaaggaagaacagccagcaagccgctcatacctgcccaacagcaaggtggatagagatgtacgttagcatggtaatgacaggaatgaaaaggaaagaatctaaaacgtagtgaagggaggaaatggtagctgcagcgtgcctgggtgcaagagagagaaaagccagaagtccaagcttctgccacacctgtaagtccctggggcaggtgtgttatactgacctagaaatactgtggttttaagagctgggtgtggtggttcannnnnnnnnnnnnnnnnnnnnnnnnnnnnnnnnnnnnnnnnnnnnnnnnnnnnnnnnnnnnnnnnnnnnnnnnnnnnnnnnnnnnnnnnnnnnnnnnatgtgcgtcttcacgtgcactgcccagcatgccgccatcaaccagggccaggtatggacagctgaaagcccaggtccctgaaggcaaggtgaccatttccccaacacaggagagactaaggaatttcaggtaaaaatcagatggctccaatcctccgatactaagagcccatcgccccagttcccaggagttccgccagttagactttttcccccatggcctcccc

SEQ ID NO: 139939 - DNA, 842 bp, Homo Sapiens
ttcaaaatagggatttattataaaaactatacaaactttttatcactcacaaatgatgaaaaattttaaacaattagtatcctccctccaaaatagtgtgttctgtctttacagtcttcactggcagtgcattcagatagtatagaaaataacaaacattccatataactttgtccctacagtaaataattttttaaaacttttcatcaagtttcagtgttactgaagttaattatagacagtaaggattacagaataagcagtaaatggtcacctgcactgtatttttcaaagcaaaaattgttttatattttctatgttgttttatcctgccccaaacacttaaagcaaaagttaaagatttttccagttacctgaaacttcaaaaatctattgtactttgaaaaaaactttaaaaagcagcatcatttaaatagtggttaactcataaacgtgtatgcaacaacattccacaaccctaataccactcaggcctgcagagtcaccagctcacaataaattcagtgctctgaaaaagctggggggaaagcccctgagtagtaagtatgcaacccagggtgtcgggtgctttcttgtggtgaaacaagggtgtcaaaactgaggggactctccaaggtcctaatgaaaagcagctcctctaaacacctgaatcctttttgactccattctcatcactttaaggatgaagcctttctgtacaaaggctttgtacagaaattattaaaaactatattttacactaatgctaacagctaattgagcagaaagaactatgaagtacaaatttttctaaggttttcttattaatggcaatacagact

SEQ ID NO: 139940 - DNA, 1400 bp, Homo Sapiens
  misc_feature (321)..(342): n is a, c, g, or t
gtattgtaagatttctttatttacagtacacagtctcccaaaggttcaagcacttatcttttaaataacatgtccatcatataaatagctagaacccaagtagagcatatataccataccttaagtactttcaatatagtggcatttttcatattaaattaaaagaggctactatgatttacacaagtcatttccctagtttaaaattccacatgtccaaagacataatgtacatttttgaccaaactgacacagcagtattaaactgctaatgattgtagtttttattttttctataatacactgcacctgtgttacccnnnnnnnnnnnnnnnnnnnnnncattgccctagatggtttgaatactgcataagtcagtatattaacacttgaggaataatgaatggcctggtccgttttatgatcaggctcattcacaacagttttcactcttcaagctcagcaaactcctacaggtaattactttccttggcagttttacacaggatcactgcaaatgggtaaaatgtcatgaagctgatgaccacaatgccatcacaaaagctgatatcgatataaccctactatttacaatacctaataagagccaaagctagaaaatcactcactgctaaatcatggaaaaaattatagtttgtaggaaattttgaatatctataaaatattcaatagactacaaaagagcttgcaacagcttgttctcattatttttcttaggtcagaattagaaaaaagtaaatcctattttttaataagttttgatggcatcaaaaagcttcacatttataaataagatttttatacaaagcaacatgttactgacatagttttctcttgctactatcaattattctcgggactcatgttgtatgttaaggaaggaagtattaagatttcttcctcattcctaaattttcagaatatactctaggccttgaaggaaagggaaacagtcattcaatacttaacactgagtagtacaatatttgaaatatatctatgatagtggcctaaacaagagcagcaagggaccagacatatagttctaccactcaatagaaataaattgtatatttccccttcattaatactgtccaattttaaaatgagagattacctttgcaaggcagcaactattgtttcagaatgtattatattgaaaatttttgccacaaagttacctactagactacagtactttaaaacacagttgttcaagtcatgggcaaggaaaacaaaatcaacaggacagattattgtcagaagccattcctgtggagcattcctgctatgcacatagaattgaaactaaaaacaaagaaacaacctaatcggacgcgtgggtcgacgatatcccgggaattccggaccggtccagc

SEQ ID NO: 139941 - DNA, 1046 bp, Homo Sapiens
  misc_feature (18)..(18): n is a, c, g, or t
  misc_feature (33)..(33): n is a, c, g, or t
gatgtcagagcccaagcncaggaccagctcccntagaggagataaagcagcctatgacattctgaggagatgttctcagtgtggcatcctgcttcccctgccgatcctaaatcaacatcaggagaaatgccggtggttagcttcatcaaaaggaaaacaagtgagaaatttcagctagatttggaaaaggaaaggtactacaaattcaaaagatttcacttttaacactggcattcctgcctacttgctgtggtggtcttgtgaaaggtgatgggttttattcgttgggctttaaaagaaaaggtttggcagaactaaaaacaaaactcacgtatcatctcaatagatacagaaaaggcttttgataaaattcaacttgacttcatgttaaaaaccctcaacaaaccaggcgtcgaaggaacatacctcaaaataataagagccatctatgacaaaaccacagccaacatcatactgaatgagcaaaagctggagcattactcttgagaagtagaacaaggcacttcagtcctattcaacatagtactggaagtcctcgccacagcaatcaggcaagagaaagaaataaaaggcaaccaaaaagaaaggaagtcgaagtatctctgtttgcagacgatatgattctatatctagaaaaccccatgatcttggcccaaaagctcctagatctgataaacaacttcagctaactttcaggagacaaaatcaatatacaaaatatggtagcatttttatacaccaacgacatccaagctgagagccaaatcaagaatgcaatcctattcacaattgccacaaaaagaataaaatacctaggaatacagctaaccagggagatgaaagatctctacaacaaaaattacaaaacactgctgaaagaaatcagagatgacacaaatggaaaaacattccatacttatggataggaagaatcaatattgttaaaatggccatactacccaaagcaatttatagattcaatgctattcctatcaaactaccaataacattcttcacagaatcag

SEQ ID NO: 139942 - DNA, 1870 bp, Homo Sapiens
  misc_feature (1770)..(1809): n is a, c, g, or t
gtagatataacccgtgttaaaaaagaggctggtacggtcggaattccgggatatcgtcgacccacgcgtccggggtggaaacaattcctctgagaatgggcttttataggtatttgcctggtaatgtattcattcatgattgcccatattcttgaatgtcttcattccaatggggtcaggtcaactattatgaaaataatttttatactttatatttgtaacttaaggaatttatttctccctttactacagcatgtaaattcagctcaaattgcatgatctgaggatttaaattcacaaaacctgccactacattctggtttacattagttacttcatgctggctggggttagtgaccatttgcatactcttttaaatcaaggaggctgtagtagaagcagttttaagattcttgaaggcaaaatttgaaaaacagtgaatacttctaattgtttccttttagtgccagaactaaggacattgtgaagcacttgttagtaaacttaaccttgaaatgtcagactggaaggagtttttatagtctttgtgcatacttctaggtattacagaaacagtctgtaaatgacattttaagatgcaaatttaattctgttcacagctgatttatactgatttttgctgccttcaaaatactcttttacttcttttagctaaaatggttgtctttcatttgccatagaattccaaacaatactatcttataaaatagtactgttgaattattccaagcctccctaggtttgctctcaaatgtcatttacagattgggctaacgacctaaaatctatatataaagactttctgaagaactctgtattatagcaataccaaacgagtgctgtgtgtgcaaacagtctggcgttgctttttatgttgatatttatcctagaacactgaaagagaatatgccagtgataactcactttacttcagtcatttcaacacagaaaatgcttctctagcatttttcttttgtagtgttaacattttgaaattcatgtttcagaggcttcatcatcacagaatttactcttgctccatgaaaaaaaattaaataccttcagaggaatatttaagttgtaaactatgaaacttgagaaatcctcttgagataaaaggctgccaaatccagtattataaagtccatggtcatatgtgcctgtgcattaaaggaataccagatctatgcagtatacatttttcaggctgaaattcaaggggaatcattctgattattcttactacaaatggagatggctattatgaaacagcatgagcatgagccttttatcttttatacttagtgatatactttgcttgaaaatcactcagcaaagtagttcacatgatgtgtatcatatttgaagtgtggtttttctcaaaatccttgactttaaggagctcatttcctgaacaaaaaggtttgctctgtggaaaaatccaatcactgccaggattctttgatttctgtactattttgtataattgaatttgttcacttctctcacaccagcaagtgttttacaggtgccttggattaaaacaaaattgattttaaaatttttatgtaagtcattgtgtctatgatgccacttttaaaaggaaaatgcaattgcgtaatggcttatatccttatttaatgtacctatttgtgttctaataattgtttgaatgttttattcagcttaaaactttaccatgaagtcataaacagtaaacaatgttttgttatgtattaaggggatatnnnnnnnnnnnnnnnnnnnnnnnnnnnnnnnnnnnnnnnntggcgcctggtttcagacaacctgaatcaaatcttaggggtggggctttgggatgtcattg

SEQ ID NO: 139943 - DNA, 1138 bp, Homo Sapiens
  misc_feature (1019)..(1033): n is a, c, g, or t
  misc_feature (1047)..(1064): n is a, c, g, or t
  misc_feature (1127)..(1127): n is a, c, g, or t
attggaatatcaggtttactgaaggaaaaagatacattgaaaatataggaacatacacataaaagacaacgtcatatttaaagtataatcacaataaagagaaagggagctgtaggtcctatggcatccattctgatgacatcccataattgttccttatattccattgtgaagaaggggcagaaaaagattcatctgtccttcagatgacgatacctgtcatttttcttttctaccttagtcacttggcagtgttggtgcatttgagcagatcttcagtcatgaatggaaggaaagaagctcacaagtacagttatggtcaaatgaggtagaaacagtcatctgttagtagtgctgaaaccacactcctgaccattttcttctttattattgttttcacttagtaattcaacaaattgtttatgcccacggtgttcaaaatgcacagcagtaccagatggctggactcagataagatgcacacaaaagtgataaattaccctagattcgacattttcctatttaaggcttgatggaattgtcatcagagaaggtaaacagaatcaaagtaatttagttggccatgccctagattttaagattttgagctatatgaaatggaaattaagttttgataatgaactctagcttctgagacaaggtggggctatgtaaaggcttctttgtgacaagatccttctaagaatggcatttaaattaaatgtaaaaacactgtagatcttcagatattaatctgatagaccagattcataaggtgttggacacctttgaaagatccttttactagaacatgtggcatacagtagtggaaaagaaccgtaactcctcaagatagatgagcaggggcaaaagtgtgtaatcatttggaggcagaatacagtgtggcttatgtcctcacttgcaccttggaaggggaaaaaaaggctagaatttcttgtcttgtgcatggtccggttaggagggctagttcacctgttctctattgagatagattcaannnnnnnnnnnnnnngagatggggtctcnnnnnnnnnnnnnnnnnntggccttatcgcggccgctccaacatcagaatggtaaccctcgtgccgaatcggcgcgccgtnacttcatctct

SEQ ID NO: 139944 - DNA, 1018 bp, Homo Sapiens
ctagtgatgtacaagcacttgcacacattttattgtacaaaattccccagtactgctttaatagtgaaaaaaacacacacacatacaaaagaagtttcaacacggctcgtcgttagaattcaaagtcttctcctgccatggcgagagcccaggcgaacctctcccgctgtgttttgctgtagatcttctccactggcaccctgaaccgcttgcaccaggcaatgctgatcctggggtccaggtagttgagcttggacgtgcccagggccacctgcttgttctcctccttgtccgtggcctgcacactcagctgcgccagctgctcctgcagcttctccaggagccacctcttcttctccaggacactcctggacttgccatccccttgggctttgtgctcagccctcgccctcctcagctctgccctggcctcagccacctgctccttctttgcctggatcttcgtctggagattctgcatcgacttctcgaacgtactgggggttgctcgctgatggttgcagagaatggccacgactcggttggctcggttgtaggataagatcttagctgctatgctgtcctcggcgcgcgtcagggcccgcagctgctcctgcagagtgatggaggcgttgtaggtccggaacaccttggccgtcagcccgtccatcagctcctggaggtgcttgttcaggctggtcgtggtcagcctgtcgaagaggtcgtcccgggggtccttgttctgccatacacgagctgtaagttcttgtacagccggccttttccaccggcagctctgttagtagtagcggatgcagtcccttccccaggaagatcacattccacccatcgtgtttggcagcatcggctccgggtgcagctggcacttgctcacccggagggacacgcagcccggtgttggcgctacaggacccttagaatactgcctcaggcagtatcgataataagggccgccgggatgttctaccgaatagcacgaggaggatccaaacgagaa

SEQ ID NO: 139945 - DNA, 1397 bp, Homo Sapiens
tttctgtccataaaagtaatgccagtacatctttaatattaaagaaataggctataaaaaagttcagtctcagaattggtttttaaaggctcatttgtgctcctttgtaggtgcgtaataaagttccatgggtttgttcactttccagtatttctcactgaccaattccaaagaaaaagagccatttaatacagtgaactggccactggctgttgctatataaatggtatactgcttctcactggctgtatcaaggttcatctggtttgattcacctttgcttcgaagttcttctaaagctaacctcacagccagatacttggataagtgatcaccagtggcgttaccaggaagtctttaatgtatctccgtctgtgcactgtcatctttttgccataagtgtgggatgaggcctgaatactaagttcaatttcactagcacccatccattactggatcaattgccattgctgcattgttattatcaagctctagcccagaatcatcagatgttttggtccgtttgttactagggcctgcttcctgattgctatgtgtggatgcattactgcagtgtgaactgtcaccattatcttctgctccactaccattttcaatctgttgtttcttgcctcgctgcagtctgttcatggcctgtatcttcagtccttcctcaatgctgtgactgagtgcttgctgattattgtgcttgttgatcctggctaatactctctcttgatgagcttcatactcatcacgacttggataaattttgctgatgagtgcatcaaagtttgggtctggccttagtgatcttttggaaactagttttttccgacaggtaggacattctttgttgccacttctaagggctgtgatgatgcagtctgcacaaaaacgatgtaaacactcctttgtagtcatggtgttcttcaacatatccaaacaaattgggcacattaattcactgtgtagacttcgaggtgaaaccacaatttctaagccatctgttattgcctcctgaggtgttcgttgtaactcatataaactgagttcccatgttttgcttaatggttgagttccgtttgtctgcacagcctgagacattgcggctcctgccccagcccagggctccgctggccgcggccggagcaagactctggtatcagctgccgcggacgccggcgccgccgcacaatatggcgagcctcagcttccgcaatggagctcgggaaataccacaagggcacgctctatacttcatgagagcctgaggggaaccggctcgccggcgctcggggaggccgggaaggaccgaacgagcgaggggcggaggcgcgggacgagatcgtgcacggcgccggggatgcccgcggcgcgagagggagggtgcgccg

SEQ ID NO: 139946 - DNA, 748 bp, Homo Sapiens
  misc_feature (629)..(629): n is a, c, g, or t
  misc_feature (652)..(652): n is a, c, g, or t
  misc_feature (709)..(709): n is a, c, g, or t
cataccacagcttgtttattttagataccatttcatttcctgttgtaaaaaccagaggaagtagaaactcatcacctagaagaaaaatattcacttggaattaccacagaaagggttatttcaactgaatgctgctttattcaaaatcaggtatttgtcctcatgaggaaaccatgatccgaggtaaatgcaatgatggtgctgttggccagctgaagatcgtcaaagcactcagaaggcgccgacctgtgtatccaaatatgacacagaggcaaagtagctctggcggattttccgctgaaagtccacaggaattggaccatacggcacactgatgtttaaggcttggacgtcttcccgttgcctgatgtccatccaggggttgtaggccacagggggtaggccatcagggacctcgggatcgggggccagggtgatgttctccaagggatacaacttctgaaattccttggggtatctgaaggggatgtgtggcttatgatacccaacggccaggaagaaaggactggatgacgttctcatcttttccaacaactgtatggcttgctcagtgctctgcttgtcaggcaagatgccctcgggaacatccagcacatccagcaggctanagtcaggctggcatggagttctncatctggccctcgacatgtcctagtgcattcatacttcctagatgaaggatgagtangtggaaagacagctatacggagatcatcgtatggttaga

SEQ ID NO: 139947 - DNA, 1483 bp, Homo Sapiens
gagacacaagttccaccaaagttcatggatgcctgcctggctcccatcaactgtgaggcggaaatcaaaaggtcgaggggtaagggaaaagcttctcgcctgcctccggaagtgaagccgtccttccagggaacatagaatatcaggggaacatgtgtagcaacatcaaaattgctgtatttggcccattctccatgttcacctagagccccacccatgatccgaggtaaatgcaatgatggtgctgttggccagctgaagatcgtccaaagcactcaagaggcggccgacctgtgtatccaaatatgacacagaggcaaagtagctctggcggattttccgctgaaagtccacaggaattggaccatacggcacactgatgtttaaggcttggacgtcttcccgttgcctgatgtccatccaggggttgtaggccacagggggtaggccatcagggacctcgggatcgggggccagggtgatgttctccaagggatacaacttctgaaattccttggggtatctgaaggggatgtgtggcttatgataccaacggccaggaagaaaggactggctgacgttttcatcttttccaacaactgtatggcttgctcagtgctctgtttgtcaggcaaggtgccctcgggaacatccagcacatccacagggcaaagcaggttggcatggagttctccatctggccctcgacatgtcttagtgttttcatacttctcagaggaaggatgataaggtggaaaagaccagctatacggagaatcatcggtatggttagaagatatcccagggtgaaagacttttcccaccgacatggtcacatagccattctccttgaagtactgggggatggtggagaagtttccagcgtgcaccctccagtaggagttgaagtcgtacaggcgggtggtgtcaggtctcctgccagtgaggaaagaaacgcggctcggggcgcacactgcttgctgcgcaaaggcattctggaagaggaggctgtgggatgccagttggtcaatatttggggacctcaccagcttatccccataacagcccagggaggggcgcaggtcatccacgatgatgagaagaacgttcagagcatctgtggtcgagttggcctgcgtttcggatccgagggcgacgcagacggagctcagaaccagacccagccagagaaggcctcggccggtccggggtggcggcatttcggcttcgacgcggccgcttcagagcggcggggacaggctgcagcaggtggcgcagttagcagccgccgccgcagccacagagacctcctcggtcgggaacccatgaagactgcgcaacacagccgccgcccgggcccgcaggcccgggcgctggccgcagcgcgagtgcgtccgtgcgactcttccctgcgtccctcccctccggggcccccggaccgtaatggccgaattcccgggcatatgtccggtaccgtcgactg

SEQ ID NO: 139948 - DNA, 728 bp, Homo Sapiens
gctgggtctggttctgagctccgtctgcgtcgccctcggatccgaaacgcaggccaactcgaccacagatgctctgaacgttcttctcatcatcgtggatgacctgcgcccctccctgggctgttatggggataagctggtgaggtccccaaatattgaccaactggcatcccacagcctcctcttccagaatgcctttgcgcagcaagcagtgtgcgccccgagccgcgtttctttcctcactggcaggagacctgacaccacccgcctgtacgacttcaactcctactggagggtgcacgctggaaacttctccaccatcccccagtacttcaaggagaatggctatgtgaccatgtcggtgggaaaagtctttcaccctggtactgctccatgtccagagtctgggttctcttggtttgtggtgtctgaatccagcattcccatcctggggatggggctgtctttgcagagccctcttctggctgggcgagtccttcgctagtcagtgcttcctttctaaaaaaccgacttgtcaacccagccacatgttttcacccaaagtgaaaaagggtagaaagaactttgcttcctttcagaaaccactgagggtgtgctgttgggtccttcagctcctcgggtggtagggaggacacaggctggggaggtggcagtgttgggtggagtccagctcagggccccaccctctccctgcagggtacctgtca

SEQ ID NO: 139949 - DNA, 1156 bp, Homo Sapiens
gtccaaggtagcgaggcctgggtggcgaattcggcacgagggcggaacgaagaatgatttctaagcgcagttccgcagcccactcacctcgtcggctggggccacctgctctgggagtttcgatttcccttcccgcgactgcacctccacagacatgggcaacgccttaccagagcaacacctgtgtttgttgggcgggaatgagccttgcactgggcagggctcagggcccatcgcgtgcagcgaagcgcgggtgatttaaacccaagcagcgggcgcctagaacccgaccggatgctccttgactttgcccccggtctccggactcctctgattggacgtggctgcgttcggccgcccaatggcgaggcagcgcgcggcttcccggaagtggcggcgcggtcagggctggccttggcttcagctgcggttttggggtcccggactctgggatcggcggcgctatgagttctttcgaggggcagatggccgagtatccaactatctccatagaccgcttcgatagggagaacctgagggcccgcgcctacttcctgtcccactgccacaaagatcacatgaaaggattaagagcccctaccttgaaaagaaggttggagtgcagatatctattgaaatcgagactcctacccagatatctttagtggatgaagcatcaggagaggtttttatttcagggcaataatggaactgtcctgtacacaggagacttcagattggcgcaaggagaagctgctagaatggagcttctgcactccgggggcagagtcaaagacatccaaagtgtatatttggatactacgttctgtgatccaagattttaccaaattccaagtcgggaggagtgtttaagtggagtcttagagctggtccgaagctggatcactcggagcccgtaccatgttgtgtggctgaactgcaaagcggcttatggctatgaatatctgttcaccaaccttagtgaagaattaggagtccaggttcatgtgaataagctagacatgtttaggaacatgcctgagatccttcatcatctcacaaagaccgaacactcagatccatgcatgccggcatcccaaggcagaggaatattttcagtggagcaaattacctgtggaattacttccagaaatag

SEQ ID NO: 139950 - DNA, 651 bp, Homo Sapiens
cttttttaatgtttgtgtttattcttctttcacagggcaacaatttttatgatcccaaagcaatttcaccaaattttaaatacagttatgactctcattcagttcatttatgacacagatgactattatacagagatggtactcatttagtaccctggccctaatacagggctgtccctgtaatagaataatgctttgcttcttttggaatctgagggaagtatagtattttcccttttgccagagagatcttttgtctctatggagtcaaaagtgggaggggtgggaagagaggttgggaaccaggaaactagccacagtattgagtttcagccaggtgcatcagattgagaatgtaatgtccctagtttattgaacaagagcagaaaaatctcttggagttcaaagcaaccatggtgttgattttctcctttcttgaaaacaagttttgaacttagactgtagaggttggagatttagggggagaagataaccatttaggataatccataaagtttaggacttgacttagttgacctagttaattttagaactaggttgacctagttaattttagaaaatttaacactgctacagtacaatttacacttgaacatttgatttcacttttttttagagctgcatttttgc

SEQ ID NO: 139951 - DNA, 1206 bp, Homo Sapiens
  misc_feature (904)..(912): n is a, c, g, or t
  misc_feature (1084)..(1118): n is a, c, g, or t
ttaccagtggtttgcaagcatggtttcctggatctcacagacgttgggcttttcaactgcagacttcaatgctttgtttccaggtggcaggagaaacatcacatctcattaccaacaattatttccctcaaaggtaagtaattgtatctaacttcaatattcctttccctggccaaaaattttacacattgttataaaaatcttctttgtattcatcactgtctttatattaattttctgagtttcttcatttcctaaaatgtaaccttcaaccatcatttttcatcctcatcattctcagcggtaacagcccatttaaacaaacttttggacgtttaaaatatcagtggccttgtaaataactggataatttcttgaccaatcatcacatgttatctttttacttcctctaaatttgttgcacatatcaaaagctttgttcttgatttttctttgtcactgtagaagtattttaatgtgtcaaaactttcatctgcatgtttctttaatttgcagtggattgattattagctctttgttccaaataactgtcactcattttaaaatctttcccaaacacaggtactatttctattctacataatgggagaatgtgccagtaggagactgcctggccaactctgaaaaaaatgctttaacaatatgccccagctagaatcacttttcctttatttccacaaatcaaattcaaaatcaaactcattatggtataccttatataactcgatcatgtttataaaattagcattctttggatagtaaaacaccagttaatacttaatttgtttacccatgcacaaaactacctcccgagattagactaagtccctttaaggattttaggtctccattttgagatgttttgatttatagaagaaactgnnnnnnnnntctagaagaagtcgttttcctcctttgtaaacctgctgcccagaggccgacgacgcatgcaccagcaaggacaagcccagtcttttcaagcgacacctgtcgcctggccttttccgtgccccccggccgtaatggccgaattcccgggcatatgtccggtaccgtcgactgnnnnnnnnnnnnnnnnnnnnnnnnnnnnnnnnnnncggccgcttcctcgctcactacttcgctgcgctcggtcgttcggctaaaaccggagctagcgccctataggtgagtctatacatcttt

SEQ ID NO: 139952 - DNA, 986 bp, Homo Sapiens
  misc_feature (33)..(33): n is a, c, g, or t
gcccgtgttccttgaataaataaaattttttanagaagttttcttcccattttccttaaaaaatggtaaccctttcaaacccatccattttccatccttcatcctttttccagggggtaacagccccatttaaaacaaacttttgggacgtttaaaatatcagtggccttgtaaataactggataatttcttgaccaatcatcacatttatctttttacttcctctaaatttgttgcacatatcaaaaagctttgttcttgatttttctttgtcactgtagaagtattttaatgtgtcaaaactttcatctgcatgtttctttaatttgcagtggattgattattagctctttgttccaaataactgtcactcattttaaaatctttcccaaacacaggtactatttctattctacataatgggagaatgtgccagtaggagactgcctggccaactctgaaaaaaatgctttaacaatatgccccagctagaatcacttttcctttatttccacaaatcaaattcaaaatcaaactcattatggtataccttatataactcgatcatgtttataaaattagcattctttggatagtaaaacaccagttaatacttaatttgtttacccatgcacaaaactacctcccgagattagactaagtccctttaaggattttaggtctccattttgagatgttttgatttatagaagaaactgaaataaaaatctagaagaagtcgttttcctcctttgtaaacctgctgcccagaggccgacgacgcatgcaccagcaaggacaagcccagtcttttcaagcgacacctgtcgcctggccttttccgtgccggagggcgcgagtctcacgctgtcttttaaatgcgtcacccaaatccccacccctatctgtaccaggcgttccgcactcctcccagtccccggccgtaatggccgaattcccgggcatatgtccggtaccgtcgactg

SEQ ID NO: 139953 - DNA, 551 bp, Homo Sapiens
ttttcaagctgaagaaaagaaaatcttttttatttccaagggtggaattatctgcccttggtattatctaataccttgtattttaaaatataagttttttgttttccaaaaaactcaacagacatcacacacagattttacagtaggtacaagctctagcctggcacacaacacagccagcgtcttggacaggggtctgccagaggagggtagcaaaagccaaaagcccagaaagtattctgcttcctttgtcctcttccattttagccaggcaaggagcattctgtgtcttatatcttcttttccctgtggcgttcatttccaattgcagaaaggaggtcatatgaccagattctttccttaaacagctttccagctgagtacaacaaagacaaaacaaagcaactctgctcctccacaattctgctcttccatcactctacattgcaggagaaactcccacaatagctttttcctactgtcagagaggaagcataaaccaagatttccaaaggcaccactggttggttcccaggtgccctagagtagga

SEQ ID NO: 139954 - DNA, 755 bp, Homo Sapiens
aggtcttaatacctggccaccaacacagtagaggaaacagtttttaaagtgtcaaacatctcttcaaatattcatacgcttaatgaaacattcgcacatctaaaaaaggcatgcaatttctattgaaatcctgtgtgcctcttattctaagcagtgggactattgacccacattttaaaataaactatagaaaaggaactgtaacttttacacatttttaaaagacaacatatcagaaatctgagaaaaatatagaccatgtcccccaaaatgtgaaaaatttaagagtaaaaaataagatttgtgtcccaatctaaatgtttctgaggattaaaacacctcagtatttctgttttacaaggcttcgtccagatgttagggcccaaggaccatggtcacctttacttttcaaataaaactgcatctctcatcctaatgattatggaggacttcctgttttcagccattatcacacactgttgctctttactgtgatattggaatgccctgcaggtgaattctttgtcctcttcacattttgctgcacattcttctctgcttcctgcccccagctgcttcttagtgacactgaacagtgaaggccctgggtattcacatagtcatccaggggctctccttgacctgatttcagaaataaaggaagtagaagaaccacttccttatgttccattttgggactggccccccggccgtaatggccgaattcccgggcatatgtccggtaccgtcgactg

SEQ ID NO: 139955 - DNA, 1021 bp, Homo Sapiens
  misc_feature (79)..(113): n is a, c, g, or t
  misc_feature (547)..(618): n is a, c, g, or t
gaatgtatagattcatataggcgctcctcgttataccgaacgacgagcgcagcgaagtcagtgagcgaggaagcggcgnnnnnnnnnnnnnnnnnnnnnnnnnnnnnnnnnnncagtcgacggtaccggacatatgcccgggaattcggccattacggccgggggggattgggacacactttctgggcactgctggccagtcccaaaatggaacataaggaagtggttcttctacttcttttatttctgaaatcaggtcaaggagagcccctggatgactatgtgaatacccagggccttcactgttcagtgtcactaagaagcagctgggggcaggaagtcctccataatcattaggatgagagatgcagttttatttgaaaagtaaatgtatctttcagagtgcaagactgggaatggaaagaactacagagggacgatgtccaaaacaaaaaatggcatcacctgtcaaaaatggagttccacttctccccgcagacctaggtcagacttttcctttcatctttgtgttcatctactgtaaagnnnnnnnnnnnnnnnnnnnnnnnnnnnnnnnnnnnnnnnnnnnnnnnnnnnnnnnnnnnnnnnnnnnnnnnnttatgtaaaatggtgcagtatttgcatataacctacataccttctcttgtgcaatccctaatataatgtaaatgctatgtaatcgttgttatactgtattgtttttatttgtattatgttttattgtcatattgttattttctctcatctttttcaagtcttttccatccacagttggttgaatttgtggatgtggaacccatggatacagagggccaactgtatttaggataatttcatcacttttaattcaaaccagaatatgtgaataagcagacagaaagaatctttttgatgtcgatgttcaactatttttggcaccatagtagaacatggttgctttctattttttcttgggtatggaggtttcttgaagacctagaacatagaagaatgcctagtt

SEQ ID NO: 139956 - DNA, 310 bp, Homo Sapiens
  misc_feature (184)..(259): n is a, c, g, or t
ttaactaggcattcttctatgttctaggtcttcaagaaacctccatacccaagaaaaaatagaaagcaaccatgttctactatggtgccaaaaatagttgaacatcgacatcaaaaagattctttctgtctgcttattcacatattctggtttgaattaaaagtgatgaaattatcctaaatannnnnnnnnnnnnnnnnnnnnnnnnnnnnnnnnnnnnnnnnnnnnnnnnnnnnnnnnnnnnnnnnnnnnnnnnnnngagagaaaataacaatatgacaataaaacataataccaataaaaacaatac

SEQ ID NO: 139957 - DNA, 295 bp, Homo Sapiens
tgcaagtttatgaatagtttattacatttcagtaagtgtattgtgaatcaataaagcaaaagttaaggacaatgagctcattaccaagccagttattgattctctggttccaaaatagaacagtacaggaagggtatagagaaaataggatttttcatgataaaaattttaagcatcttaggaacacagacctaaagaaactataagacacaacggaaatttcagcagctacttaggatgtttatttatttacctttttttgccaattagaattagttatttggtttttactctt

SEQ ID NO: 139958 - DNA, 813 bp, Homo Sapiens
cccactctcctggccatgatggaagtccatgagagcaagcatctttgtccgtttggctcactgttggattccctgttttaaaaatatcacccggcccagcaaaaagtttggaaaccttcatctagaaagtggtctagcaaagtgtggtccatggatgagtttgatctgcaaactgcttgttattggttcatgacaaggtctaccaattgcattttgagagctcagataagcagagagcaatgcaatttgtcacagaaggatgattatgtatatgcactgtcatgtctatttccatgcctaactcaaaggagacacaaggagaaagtgagctcagcctggataaattggagattgtgatgacttctaggaagcctcaggaacagagaaacaaagacaacactggcctgctgctctctgcaatggtgggacccttgtgggataactgttttaggaatgaaggtgtctaccctctctagaaatgaaaatgcaagtttggctgtggttaagtattggatggaggcaaaaagaaactgacatattttcttcttttcaattgtttgattcagcctgaagggcatggctgcttaatttttttctccagagataggtggacagataaagacaggaaagtaacatccacagactgccctctgtgaaggtgacagtgatgaaaggaatgcttgatctgaacactggtaaataaagtgaccgcatatttccctagccaggagagcaatctggctcaaaagaaacgagaacaatgacattactgccaggctgctcctaagcctttggctattctgttcagtgcac

SEQ ID NO: 139959 - DNA, 865 bp, Homo Sapiens
cctattcttcacttcttttttcactttctggaactcctctatatatttatactgtaacatacatacatacattcaaaaatatttattgcatagtatttacctggcactgtgatatatgcagggtattcaatggtgaattctctatacatatggctcttaatctcatgaagtttaatttttaaacagatggtgttctgggttttctatgtctttaagagatacatctatgtcttttactgtaacttccatcttttttatcttttcttgtaagctctggaagtatcttcagctcaaaattctagctcagtaatttgattctcagccatgtttattcaactaatcagcctaaaacagagtttattttcacaactgtttatttccaagatacttctttatagcaacttgcatttttaaaattagtacaataacctctaaaatatttgaagattatgacatataatatgatgaggattacatatgaaactattataagtagtagtaattattattccatataatactaattatacttggtcattttttccccctgaattgtttccccaggaattctttctgcttgttaagtttgctgtgtatttttcatgttgctcttttccttaaatatttgctgtttctcatttgtctacttgcaaatgagagcctaggagtcaacaaactttttatataaagggtaggctttaaggcccaaacacagtatctgtcatatattgttttggtgttctacaaccctttaaaaatgtaaaatctactaagaaataggtagtggaaggcctgtagatagcagttttccaaccaataaatttctcagtatcattatctggagtttattttctgggcttgagtg

SEQ ID NO: 139960 - DNA, 890 bp, Homo Sapiens
ctggggttatttttccccttttttagttaggagaagggggtttttttccgatgtttgttcaggggcggttttttgagattccccaccctccgggtgaataggccccccttagatcttccaaaaagtggtggggatttacaggtggtgagccccccgttgcccgggccacattaaggtgatttttatatccaagcatccccattaagtaattatatcaagttagttcacgttgttaaatatgccagtttaatattatattaaaagattagttgttattcagtgagtgcaggaaaagtttacatacctttaccaaatgcagaaaagttttaaaatcagtcttcaaaatacaactggaattttccagcccagtcaaaggatgaactttactgtgggattataaattagtattatttgccaggatacaaatactagatttttcactagtccagttcagataatattttgctatttttacaagatcaaatgtatgtcatcagttattacttcagtcatacagccaactgttcaaatggatcatctgttaacataaattgaggttagcaacttagtctgttaaagcttgcactaaatttaacacataacttacattttcataattttataggtgccatcagatatatgtgtgttaactaaatgtatacttcagtcccttgggaggcttcacttatttgcatttccaatatgaactggtattaatatatttgcccatttataaataacaggaacaaaaagcccaagagatccaacaattgaaacgaaaagaaaagtccacagaaacatccgatcaagaacctgggctatgaatttccaatcttcaacaacctcacggacatcatttcggacgcgtgggtcgacgatattctgaaatt

SEQ ID NO: 139961 - DNA, 813 bp, Homo Sapiens
  misc_feature (111)..(111): n is a, c, g, or t
ccggtgtgggtctttttgagtttaccctatttagggttctttgagcctcttgaatatctagattcatgtatttcatcaaagctgggacattttctaccattatttcttcanatattatgtccctttctctctttcttctccttctgggactcccctcatgcatatactggtatgcttgatagagtcccagaggtcttttatgctctgttcatttttcttcattctttttcctttctgctcctcagactgtataatcttaattgacctatcttgaagcctgttgattctttcttctgacttctccagtttgctgctgaatacctctagtgaattttcagttttagttataatacttttcaactccagaatttctatttggttcttttctacaatttcaatctctttattgatattctgtattggatgagacattgctttcctaatttttttgttctctgtccatggtttcctttagctcttctagcatatctaaaagagttgatgaaaagtctttgttttgtacatccgaagtctgtgcttcttcaggggtagtttctattaatttctttttttacctgtgtatgggccatacttttctggtttttccttgtcatgtaatctttgctaaaaatgtgacattttgaatagtattataatgtggtaactctggaaatcagattctcctccctccccatagttcattgttggtacttgttatggttaccactgtttggtaacttttctgaactttataaagtctgtattcgttgctgtgtgtgaccagctgagctcctgttctgttagccctcgtgc

SEQ ID NO: 139962 - DNA, 951 bp, Homo Sapiens
cccgtcggctgttgacttcaggccaagagagatccgccccctctgagtggttagccggaccaagcccccaacccggaatttcgcagttaacattctggatgttcgcaagaccctcaccacatgccggaaaacatatcatcctggtcattgcccttgaagggtcagatacgttacagtcttgtgacctcgaaagagctaggcagaggttccgatgagcatcagctggggaaatgtttttgaacacccactgctctggagatgaccaggtgtcagaggctatttgttcacacaggatccttactagggaggcactgagaaagctatcattgattgctagacccatcagatccttatttgatccaaatatggaacaaaggtccgtccagaaaggaagcatgtgctgatcatcctgggatctctcaacctcggcgtctgattcagacgcagtgacattctccgggagattctcctttattacctgcagtgacattttctgcaggtttcgacagtgcttgacgcagaatgaagatggcacaacgtctactgcatttaagtgcagggatatttctttgaactgagccatcacctccttcaccagctcctcctcctgagactcgtacagacagccgaggagctcctgcaggtctgtcaccgttgaatgtccacccttacaacttatgtcgcatcgcagcaattcctgtttgatgtccggtgacatccggcagccaaaagtggcctccaactccttggctctcttctcgttagcgaggccaaaggagtagtagcctgcttggatcaggtcggggttcctgagtctttctactccggaaagcagcttctgtacgtccccgatgtcccaggatagggacggccacacctgggacattgggaaagcagcttctgtacgtcccctcggtgccgattcaacacacccggcctcgctacctagcc

SEQ ID NO: 139963 - DNA, 386 bp, Homo Sapiens
tctgctgcaagtgtttattctatttagaattctacaaatttgagcttttaagaaagattcacaaaatattcattcaaaaccacatttttggcttatcaaatttcaaatatattttactgtgctgaacaatatattctaatgctgtctaaaacacagctaaattatttttctttatttgtttatacacattcggtaatttctgaaaagcaagatttaaaaatatttattaacaaaactacccaattacaatgactgttctcccatacacgcaactattttctgtagctgtatcttcttacctcattccactttaactctgtataccgtattgatttgtgatgagatgatttattatgagaactcttagggagttctcatcctcgtgc

SEQ ID NO: 139964 - DNA, 683 bp, Homo Sapiens
gtttaaaagttttgtattatgtcatacaaactgtcttcacatacaagtgcattaaaaaaattatccccccctcctcctccccaaacatcacagtagaccaattcttgctaatatatgacaaagttaaaacatatgtcccctctgaattctaaacagctaattctagacactaacatctggatcttataatttaccggtctggtatggacatgaacagttccagtgcctttcaacttatccctgaatttttctcttctcaaagttctaggcagtaattttaatgccctcaaattagataaagctgattacttagagcttataaattagctacactttatgacactaagaatagagctatgacttatgcatatcatacctgtcaagctacctagcaccacgaatagaactaatattaatggatggactaatacaaggatctaatatatgacagtgatagtcttaaaaacaccgatttgttattttccttatatataatccaaattcctttctatccttctggcaatgtttctactgcctgactaccttaaataactatatagtgtcaatttcttgcttgggccaggtggtggctcatgcctgtaatcccagcatattgggaggattgcttgagcctaggagttcgagatcagcctgggcaacatagtgaaacctcatctctattt

SEQ ID NO: 139965 - DNA, 1189 bp, Homo Sapiens
aggtcatcaatttctctcccgatccactataaaccctttggatctcatctctacttttcttctcgacaccagatcctaattcccaactgtctactgggtattacatccacagggatgtacttcttgcaattcaaatgccacatgtcaaaaactgaactcctattccctttgcaaaatccctctgcttctctctttctctctcctttttgctacctatttcaggtaggggaaatggtgtccttccagccactcaggctagaaacctcaaagtccttttctgattgctgtcctcactcatctcacacatccagtcaataaagtgctattgattctcctcccaaatgcctctcagcttgtgcccttcctttccattcccaccgtgactatcccagcttttgaggtcccatgactcttcaccagagtggtaacaatagcttcccaacatctcccagcccccatccccccgctactctgctctgttgccatgagagttaactttgcgaaacagagagattattttcctctcctgcttgaaaatatctgatgacttcttatcacttacagaagcaagtctaaactttccactgtctcctcccactctcccaccacacaccaccttcctgcgccggttgcgtcagcctcgaacgttcctgaacgctttgctgttcctgtgcttttactcacgttctccccagtgactgcccaatctttagtgtgttttgctgactcctggcgctctggcttttccataagaggcgtttttgcacgattgcagacaggaataaaaatgagctctgcctactgggccgtcctggttagcaaggtctacaccacctcaaaggcagctatggactaagagcccacaaagaatctcgggttatgagggaggggctggccgtggagacggctaaagcgcctcatttgtcttcccagcagggaagcgatgggacctcggcgggcagggaacgcgatctccacccgtctggaaaactctctgagttctggagcactgttcgcggccggactgagtggcatgtccgcattttccccattccagggtagggcagactgaggtaggagagcagagccccgaggccgactccccgcggacgcgtgggtcgacgatatcccgggaaatccggaccggtaccagcctgctttttttaccagctgttcatattacaagcca

SEQ ID NO: 139966 - DNA, 857 bp, Homo Sapiens
aagaagcagaattctttaataattccttcctagacattgaatatacttataaaattaaagacttggggaaggagacactgagagacttgccagtttggttcctcatgaacaaaagaggacagtttgataactaccagaatagaatatccctagttttaaaatagtgagaatctctgaagttcatcaacatcttaagatgcacttacttgaaagtttgagattctgtgtatcacttgaatacacattgtgctttaattctttctttgacatgttgttttttcatatcaagaaatatatgaacaaaataataaccttttgaccctgaccttgctgggtgaattagctctgaaacactctctacaaccagtaatgcatttgtcctacatttcattctgatagaaaatgaacaccatagcaccaaacaaaaatccgaggcgttagataatgtctggattaaataatttaagactctctaggattttggttgtcattttttatttataacagactttaagtcactttctgttgcctcataggtcacattttagacaggtttgtgtctgttccttgcatctgaattcctgattgtaaagacacctatgaggtctcttagtttttgtcattcattttcttggtttatcacccctcccttctttttgttgtttttccctgactgttaagcagtttcatctttgcttttgttaaatatttgacagcagttagtttgtgttaagctcttgaaacttgtgattgtactttctgtgtagatatacatgtaattattttttatttttcaatcatagattcaagcttccttcttttttaccacaaatcattaaagttatttgtgtttcctt

SEQ ID NO: 139967 - DNA, 577 bp, Homo Sapiens
ctgactttttctcatcgccattagtaatgactgatggaaaacccagccaccactgtgatgcgaaatgatcagtctgttgcctgaaacagcccagtcctcttaactgaaacagcattctacttcttgttccaagatgagcctctgcaatattctggcaatttaatataccccctacaaaagcactccacagcttttacactattttggctttgagttataactagtattattcatgttttcataaaaagaagttagtgacccagagctataatcatccatcaagtcttccacaataattcccaactcataaattgctttcctaacaactagcaaaagctattgttcataatggcatttctaaagcttttgggcactgtgtaccaggatgaggaagagaagaaatgaggagcctgtcttttaatattccagtatttgtgtgtttgattttttttgacaacagtacatatatctatttctctagggatatggaagtaagtggagaagggcctacctttttaaaggacaaatataaaaatagcaacagtatctttgctaatcttactaatggatattgatt

SEQ ID NO: 139968 - DNA, 640 bp, Homo Sapiens
  misc_feature (53)..(103): n is a, c, g, or t
ggccctactagtttccttttctactataggttccagtatatatgtgtatgtgnnnnnnnnnnnnnnnnnnnnnnnnnnnnnnnnnnnnnnnnnnnnnnnnnnnaaaatacatgtataatttgtataagagctggggtcagaatgaccatataattatattggtttgctttgttatttgcccgttctcaagtcattctaattcttgtttcagaatatgatagagcttattccagtttggaatctgcagatcccttccacttagtactgttaatgaaaacagaacccttttaacaagtaatactaccatgctactttggaaactgcctagtacccaaaatatttgatatgctttttgagttggatacttaaatgcaccaaccaaagcaatgttttgattggctataatttgtatttttgaaaccatttacaacaaacattctcaagaagagtttgtatgtcaaaagtcatttaggttttaaagtcttttgatcttttcttactatatacaatcagtctgcagagactgttatgtgtctgtttgcctttgtacatatatatagcttgtttgaataatcattgtgcatctccattaatgttgttctttgctttgtatataaattaaaagagttgacccaggaaa

SEQ ID NO: 139969 - DNA, 971 bp, Homo Sapiens
caaaataatcacaaataactcctgcatcttcactgtggcggcagttgtgtcttccaatatcttgcttgatacagtcagccaaggacctctcatttcctgtgcacttcacattatccacatggatgggtccttttccttctccaaagtaagccatggttcttgctctggcaggacccttgtagccaagctgacgacagatcacagctgcatccttatcagtccatccatcatcacagattgttccccactggccattgataaaaacctccactcgtccttctttcttattttctccatccatcagtctgacaggaaaacccagagagagcctgtgtccctcgccgccagggtagcaggcaatgctaacatcttcgcggtggctgcagtcatgccttccccactgtcgcctggaacactgaagaaatctggtttcctttcctgagcagctgacgtcatccaaccatatgggccctgtgctttcttcaaaatggttggcagatgcttgtttaccatatttaaatcccaattgtcgacaaaccacgtatgtattcagctcagtccagccatcatcacagacagttccccactggcctctgtaatatacctccaagcgaccctcatggctgcctttcccacctgcaagtctgatgaccccatctgttagaggggtacaggacactccagcatcttctttatggccacagttatgctctccccaggagctctttggacactgctcaattgaaagctcattcccagtgcagcgtacttcatccaacataactgggccagacccttccccaaaatatgcctgatgccatgctttggcaatgccactgaggcccagctgcctgcagatcacttctgcatcggcatcatcccattggtcatcacaaacggttccccactggccagcatggtagagctccaccccggccttcatgcacactgctgcctccagcaaggcgaat

SEQ ID NO: 139970 - DNA, 656 bp, Homo Sapiens
  misc_feature (427)..(518): n is a, c, g, or t
tttataatatagaagattccctttatttaccagaactcagtagtcatacacacaaaaaaatgcaaactaatctgaaagagaatttcaaatatgaaaaatttttaaaagaagtaattactcaaattgcagcaatacattttttttcctgaggaaaatatttatatcaaacccaaaagaaacaacaggggaaaaaagaaaggaagagatttggtcttctaacagtcctgaaaagaccttacatatgtgtgaaaggccatctttcaaaagttctacttggacttctaaagtaagtcaacaagagccccaaagtgaaaagaactcgagttcacatgtaataatggaaatccaaattcccagagaaaacaggtatatatatgccaatctagatgtaatctatgatgatgccattttttaaaaagtttataannnnnnnnnnnnnnnnnnnnnnnnnnnnnnnnnnnnnnnnnnnnnnnnnnnnnnnnnnnnnnnnnnnnnnnnnnnnnnnnnnnnnnnnnnnnatgagatatcttggggacaggactcaagtctaaacacaaaacccttttatgtttcatatccaccatatacatagagcctgagagtattttatacatattttatatacgtttacacatgaaacaaagttttgactggag

SEQ ID NO: 139971 - DNA, 1228 bp, Homo Sapiens
  misc_feature (43)..(85): n is a, c, g, or t
  misc_feature (201)..(209): n is a, c, g, or t
  misc_feature (225)..(371): n is a, c, g, or t
  misc_feature (395)..(404): n is a, c, g, or t
  misc_feature (429)..(439): n is a, c, g, or t
  misc_feature (451)..(576): n is a, c, g, or t
ttttccccccttttgatttaaaacggggcccataagggaaaannnnnnnnnnnnnnnnnnnnnnnnnnnnnnnnnnnnnnnnnnnaggggccacaagggtttattcccctggggatttaggtttttccacccccttttgggggggttccccgtcggccgaaggtttaaaaaaattacccccctattcccaaaaattcccannnnnnnnnaaaatttaaataaagnnnnnnnnnnnnnnnnnnnnnnnnnnnnnnnnnnnnnnnnnnnnnnnnnnnnnnnnnnnnnnnnnnnnnnnnnnnnnnnnnnnnnnnnnnnnnnnnnnnnnnnnnnnnnnnnnnnnnnnnnnnnnnnnnnnnnnnnnnnnnnnnnnnccccttttcttttccttttggggnnnnnnnnnnaaaaaaaggttttaaaaaatttttnnnnnnnnnnngggcccccaaannnnnnnnnnnnnnnnnnnnnnnnnnnnnnnnnnnnnnnnnnnnnnnnnnnnnnnnnnnnnnnnnnnnnnnnnnnnnnnnnnnnnnnnnnnnnnnnnnnnnnnnnnnnnnnnnnnnnnnnnnnnnnattccacatcacatgctttatttggacttaaacacttataatttcattctaaacacttggttgacatacattttgatgtgtgtagttaggctatacagaatatacaaaccaaagctgtatgaataatacataggtttttcaaaagttatgtttcataaagaatacagagaaaggaaaaatagccacacatccaatatctcacaacttctaaaaataaaactacagagatgtaaaatataaacaaatcaaacaacacacaaattatcatccttgaaagaaaaattacaggccagcatcagccattctttgaagaactaaaattattaaagaaaacataaatttattacaaagctaactatgagtgtactaataggtaaaataatatgaagcagtataattctacattaacaagtttttccataatatagcataatctctctaatcaaaatttctaattctatctagtattaatttaactactgactttaattcataattggtagcctaatttctggcatacaatgtgaaatgacatataatttcattaaatccatagtactataaatagtcaattttacactatctcataaaggtgtatgcaaaggcctttttaaaaaacaaggctatctgaatataataaaactagttttcc

SEQ ID NO: 139972 - DNA, 932 bp, Homo Sapiens
  misc_feature (70)..(70): n is a, c, g, or t
gtggccctttattccacaaatgcccacttttccattccggtccaaaatactcccttctttgggtttttanggggctgattcgccagttagggatgccctcagcacatgtctttgaagctgtgagaaggcatcattgtacacttttcaagaactgccctagctgctgccatttttgcctttttcttttcatctttcaaatcattttgtctatctccactcagatgtgcaaactccaccatttcatttccaaattgactgaatatttggacaaactcttgaaagctattcactttctctagtctttccatagttgcgagaaccttatttcttgatgttattatctgtttaatgactactcggtctgccagcaacaacacttttgtcactgaagaaagaagtaatcttgcagcctttatcactcctgttttgtctgtaaaaattgtgatctgcccatcagattccagatggttcaagttggttatgtctgtaagtgctgcaattgtttctcctgcttgtttagcttcaatacaagcaatatttatttcttctttcaaatcccagttttcattggctatagcttctcctactttaacaaatcttccaactgccaagttgacagcttgtcctacacgctgaattgcttgcagagttttatcagactttttggtattatctttatgattaataagcgtggtgatctgagaaaccagcgggagtagcgtctgctccaccgagcgagttttgatctccagtcccgagtcgagggcgaagcccgaagagccggagccgtagactgctccggcgccgccaacgccggcgggtccgggagaggcggccatggccctcggtctatcccgcagccgggactccgcgccgcggcgagcccggacgcgtgggtcgacgatatcccgggaattccggaccggtaccac

SEQ ID NO: 139973 - DNA, 1130 bp, Homo Sapiens
tcccagtcatttgcagtatctgtcggctttcaatttggtcctcttgtttaaacaaagaaaaatagtaaaattaatctatgtaaaacatgccatatatattcaactgctactaaatataaaaagctataaaactgtgtgttcaattttggttactgtattatcacaacacttatattaaaatatgtatacttttaaatttggtttctataaaaaatggattctaatcctataaaagttatttcctaatattcaataaatgttgcctaagggttttttctatccaaatagcaattttattctggaatttaagggtgctttaaatttctatttaatagggtgagaatgctgtattattacgagtgataaaagttacaggacatagaggttattccgttttaaagtccacatcctgattacattttatatcctcttcttgatttcttacaactagatacatactcatttgctcagctggaaaaaattcttaacatttactgactttaggtatgaactctaccagctagttaataggaaatatgtaattaaacattgcctttatcaagtaatgtaagaaaagcataagagtaactttgcaacataggagttgaatgagcggctggtgattatcaaaatctggcacttaattgatttatacttgtacactcacagctaaacgtctctacctgtttttctatgttgtaaatctaggacattacttatctacataggaagagtaataaatattaataatgtgctatgataaacatcctgtactcttccaaatcttacaataaatctgcttcagtttcacttgtttagcttttatatttagtttgttagttgatatatgcttattttaaggaagcttaactattctaacagaatccacataatttttatattagccaaactgcttctttctaactctggttctaatagttataaaaagataatgataaatttatgaagtagatacagtcaccaaaattgaacacacagttttatagctttttatatttagtagcagttgaatatatatggcatgttttacatagattaattttactatttttctttgtttaaacaagaggaccaaattgaaagccaacagatactgcaaatgactggga

SEQ ID NO: 139974 - DNA, 708 bp, Homo Sapiens
agcagtagctaaaagtggctgtctttgtataaaactagaaaaggcaggcgcgccaccccaagggcctaggagtcttctggcgagacaggaggctgaaccccggaggctgcagccagggaggaggcagtgggcttcctggggagcccatcataagcagggactgctcaggaagcgcagggagggccgaggtgggcttgcagccacccgccagggccagacgtctgcaggggctgccctgaaagccggcggtgctggctcaaatgagcatcttcctcgggtttatttttttaaataaatcctctctcaccgccttttgctcccccgaccctcccagatccccgccatcggggagggcggctagggccaagcctgcagctgccgctggtcgtactcggcgatgagcctcttgatgtgggccagcttgctgtgcaggtactcgcagcggtgcttctcctggctgtagttggtgttggtctttttgatttttcgatattcctgcaaaatctgccctcgagtagtctcatactcctcggagccctgggagagctgccggagctgggcgtcgagctgggtgaaccgccgcgtgatgcgctcaatgcgggcgtgcaggtcgcggtactcgctgtactcggcattgaagtcgttcttgtagctctggcgctgctccgaagaggagatggctgcgtacttaagaaagaattcagcggt

SEQ ID NO: 139975 - DNA, 712 bp, Homo Sapiens
  misc_feature (608)..(654): n is a, c, g, or t
tcaggaaggctcgcagcaagaaatgcaaacatgaatctggagatcttctgggtgtataaaaccccctaaatcaccactttccccagaattaatacaagtcgaggatttgacgcttgtatctcagctttcttcttcagtgataaataaaactagtcctccacagcctgtgaatccccctagacctttcaagcatagtgagcggagaagaagatctcagcgtttagccaccttacccatgcctgatgattctgtagaaaaggtttcttctccctctccagccactgatgggaaagtattctccatcagttctcaaaatcagcaagaatcttcagtaccagaggtgcctgatgttgcacatttgccacttgagaagctgggaccctgtctccctcttgacttaagtcgtggttcagaagttacagcaccggtagcctcagattcctcttaccgtaatgaatgtcccagggcagaaaaagaggatacacagatgcttccaaatccttcttccaaagcaatagctgatggaagaggagctccagcagcagcaggaatatcgaaaacagaaaaaaaagtgaaattggaagacaaaagctcaacagcatttggtnnnnnnnnnnnnnnnnnnnnnnnnnnnnnnnnnnnnnnnnnnnnnnntcactacagaccaaaacagaagaagaaataaactcagaatctcatttctcagagattt

SEQ ID NO: 139976 - DNA, 564 bp, Homo Sapiens
  misc_feature (70)..(78): n is a, c, g, or t
attagctactgtgcctggcctgagaaatattattaaactttaaaagatttgacagttctaactgaaaccnnnnnnnnntaagcattcacagactcagaatatgaggtgccgaaaggacctcagaaatcatgtcaacaacttgttttatagttgagaaaggtttcaggactgagttgctctaaccaagagggtcaagcatcagaataggtgagctctgattaccaagtctagtgctctttccatttcaagatgatgccttcctagtcactctgacttcaagaacttttaaatgttgttaatgattaggctaagaatcactgggaaacactgctttcaatttgataaaaggattcataatgtaattatttatctgtgatgcatttaatattgtgagccatttcctagtgacctgaattacacaacagactttatttctatttttcaggtccagacctacagagtcaaaatgacagactttaaatactgtcacacatccagtgagcatggatgaagccttaacccaagatagtcctgatgataaaccactccctcgtgccgaattct

SEQ ID NO: 139977 - DNA, 826 bp, Homo Sapiens
  misc_feature (517)..(517): n is a, c, g, or t
ttttacagttttcaaatattttactgaaaatgcatattgtacaattaatgtataatgacacaccagtgtgagaaacctccataggtatcatttccacaaatatgctatgaatatagagttcctacacaaaactatacaacttaccagatgtaattcctgttacgtaccatactcacaatcgtcttgaagaatatggagaaaaagtgctgagtgacaaaaacaggagccatgtgtgattttaataaatggaaaacacggcatttcagctcagtggtaaagcagtaaaccaatcagatgcttagctatcaagtaatcatgtgagaggaaacagaattagatccttacctcatactatatgttgtcagctaacactgtagcagtggtatatgaatcacataaattacctccaacaaaatgtattccatgtattagaaaaaaggaggtatgcctaacattgtgtcacgttccaaaggtgaaattttgcaggtcaacgatatgacagttccaaggaagcatnacattttattggtttcaagttgatttctaatgctcaaactatttacgtcaaaatttacagaaaataaatctctatatcaacagcttaaaataaatgacttacctaaagtccacttctgaactgcataactcctataaaggtttcagtctgtaccaattagaatgtcttcagttattagtaatagagcatcctaaatcaactggcttaaaaataagtttagtctctcacaaaagaaacagtccaaaggaggagtggctacaaggctgcttggtttggtggctcaaagacatcatccaggtctcagggtct

SEQ ID NO: 139978 - DNA, 465 bp, Homo Sapiens
tttaatagagttgtacaaaagataatttattaaaattcctgtgtttctaggacacaaacctgtaacagaactgcagacatcaagcatggcttcaagcattcaggtacatgttttatccagttcacctttctgaagtctaaacatttctttccacggctgaacgggcaacacttcatgttttctgggcaatctctgggtttggtacactggtctatttcttccacttcgcattccactttgattttgggacacggctctaagggaggggaagatatattccctcaaggccttaaaggagccagtgctccccctccccgagaccagggcacccctccagagttagagaactttgtttccacttcacctatccccagaaggtagtggccctcagggggctcaggaatttcacaacactgctcacatccccaaccccataacaactcaccatcggatgcctaaaccaac

SEQ ID NO: 139979 - DNA, 606 bp, Homo Sapiens
catttattcaatatatatttattgaggacgtggtttgtgtggtcaggtcctgctttggtgctgcagatgcagcagtgaaccaaatggttgaagatacctgccttcctaaacctcatattctagtgagagaagacaaaaaaatctatatatgggtcaaatggcagtaactgcaatgtagatacacaaagcagggaagggtataaggatggtcaggcaggaagagggactgctattttcaatgagaccatttcaagaaaggtgtcaatggaaggtggcatttgagcagaaacttggaaaaggtataggaattaatgggctgtgtggatatcttagagaagaacattctacagagaagtaacagcagatataaacgccctgaggcagaaggtcgtgggtgtttcaaggaatgactggagctggaggaagtgaaggagtgttcaaagagtggggtcagatgatatagggccctggaggccattgttgaaactcaagcatttcctctgagcgaaatggagagccacctgggcattgtggaccaggcaatgacgcaatccagcttacattttaaaaggatcatctgactactgttttgaaaatagatactag

SEQ ID NO: 139980 - DNA, 899 bp, Homo Sapiens
tctttcccacgattttcccagttccaactaattgatggacattaacatctgtcatattctcttgttcttaggattaaatcttacgatgctgtttttttcctcatgtgatctttaagtgtatttttgtccactgaaggttcttctcacaagtacaagcactgcaaattgtcaagctttttctgtaatgtacacaaaaattcattgcagtttacaatgttgtctggcaatccaatgttgaaagcatgttctctggccatgtggttcaaaataacagatctgtttccaaggaattcttcattgcaaaacatacaaacgccatgaaaattggtatcatttcgttcttgctgctgttgttccagaatttctctcagtctctgtttctgaagctcttctctaagaattctatcttctggtaaaacgtcacataacaaaaaataattctcttgttcttcaaatggagcagtggaattaattcttattacactacaaaaatctgtgatgggctgttcagtgaaccttttcctccaatataaaatgtacctttggaaatcagcaaccaacttgacatcagctatgacaatcttatgctcaataatcatgtgcttcagaagtttgtcttgttcagccacaggaaaatgttcttcacagaaaatacaaggcacagatggagaaccttctaaagtggtggtgccacctggactttctggcagggaaagcggctccaggatacaatccttactgtccccataacctacacccccgactgtgctgcagctcccatcacggtcttcctgcattcgggcgacagcccctgggtcttggaagcagccattacccggcagaaaagaccccggccgtaatggccgaattcccgggcatatgtccggtaccgtcgactg

SEQ ID NO: 139981 - DNA, 1002 bp, Homo Sapiens
  misc_feature (448)..(456): n is a, c, g, or t
gccctccccagaacaccaaaagggggtttagggggggaaaaaataaaagtgttaaacccctttctttttccgcccccgtgtaaattttaaagggttggacaaagtgccatttcccccaagggagccaggaaattggctgtgggccattaaaaaaactgtttccaggttcccattggtcaattcttttaaaatgttgggcttttaaaccccattgttcggtttccattcaaagcaaaagggttagtatagttttccagccaattaataaaattttcaataatttaaggatacggtagcttaaaaaaagtagacgagaaagggtcttgataaggcaggggaaacatcttaggggaactaaactcacagaagcttctgccaatgtttttaaatatccagattgaaactgaaaaggttgtgattagaatattgtgtgggtgtcaagatgtcnnnnnnnnngtaactgcatgactcaagcagagcaagtcaggtaagctctgtgtgcgcgcacacgcacgagtgtgaaagattgcgtggtattaaaacaaatggaaacttgcaagcgtaacactgtgctttttgtttgtttaacctgctttctgtgccactgaataccaagtatttctggtcctcttttaatgtatatctttataatctacactagtgtttttacacgctgcctactaattgtagggcatactgcagacacaggaagttacaggaattccatttccagaatacatgcctgagggatgtcatcaatttccaaaattaaaagtctataaagtacctactacctcactacccaacagaatacaccacagcagctgaagggctggccctgtaacatctgattgcttagataactcccactgttagctgcggtttctacaaagatggtaatttcatgccacttgttctaaagcaatcttcttccccttccttcacccctccccccggccgtaatggccgaattcccgggcatatgtccggtaccgtcgactg

SEQ ID NO: 139982 - DNA, 782 bp, Homo Sapiens
tagttagtacgaggcctggctgtttaattcggcacgagggcgaggcagacaataaactggaagagatcacagggagtccagaaacgcctgtcatcccaagcttatgctgtttttctaaaagctctttatggggcttgatattgggttggtggtctttgtccagaaatatgaagggacaaagagggccataaccctcccttctgagagtttccaggaggagtccgagggtctagcttttctggtgaagccagttcctgttcctgccttctttcctaagggcctgctcgctctggcttccaccacagtgccaagcccctctggtctccaggggagggattgctgtgttacatagcaggatcggggtaatcaggccaacaggggagatggtggcgatttttcttttttaatctgtatttattatacagtcttgtttctttaagcccatactctgtctcttcccccgtcttcctctcaggtgacagtatcagtgagtgccatacagaattgtgtattcaccagcatcatgaaacagttgtggtcttttgagttgatcttggcagagtaaagggacgtgtcctggagccattcctgaatctccccttctttgtgacagctcctcccacccccccaacagaaatacgaaaaccaccattaaacacaaagacacaaactaagggcattacacttagagactggagtcccgcttatactcatgcctattacctttacttcagatggatctggccagagggctgctaggagcccagcccaaccacattcca

SEQ ID NO: 139983 - DNA, 680 bp, Homo Sapiens
aaatgtttcaggttctttataaaaataataaaaaattggattttatcacatatttattaaagacaatcatttatagttcataaaaaaatactgccctgatatacacaaaattttctactcccacccaccccccatgtccacaccaatattcagtctagattggtttaatcttgaagtgtaatccaataagactgaagaccaaacacttcaggtcctggacaagataataaaatactcgtaagccttctggatccttggattgattgacatcaataagggaaccaatttttgatgttgtaaaagaaatgtgttcatctccaatgacgatttcaagctcctgccggcccactcggtcaggaggaggccacaatgcatcatcctctttggtaatttcactgtcgtcaattattctcttcagttcctccatcacgcttttatgtacataagcctcttttctgatcatgacatcattcttgtaattgctgttgttggcatatcttaacttcccgtccggtcgaaactcaaactccaggaactcgtggccgaacttgcccttgtgccccacgtagtaacgcagataaaagtcactctccatggctcccaaaagacaaccgagcctgaacttccaagagcaagccgcactgccgccgtctgcgcccgacactgacgtttgcggcccc

SEQ ID NO: 139984 - DNA, 943 bp, Homo Sapiens
  misc_feature (36)..(36): n is a, c, g, or t
  misc_feature (131)..(131): n is a, c, g, or t
  misc_feature (167)..(239): n is a, c, g, or t
  misc_feature (306)..(399): n is a, c, g, or t
cgagagaagcgaggcgaggaagcggggcgcgcgtgnagaaagagatgcatgagcggcgggaagcgggtgaaaccggttgagtgaatcgggtgggagggaggcgggcataacggaatgggaaacgcgggganaacaaagggggaaagcgataatggtaaagagaactnnnnnnnnnnnnnnnnnnnnnnnnnnnnnnnnnnnnnnnnnnnnnnnnnnnnnnnnnnnnnnnnnnnnnnnnngaggggggtagggaaagaaggaaaaaacggggcgacgagtacccggaaagtggggtatattatgtcnnnnnnnnnnnnnnnnnnnnnnnnnnnnnnnnnnnnnnnnnnnnnnnnnnnnnnnnnnnnnnnnnnnnnnnnnnnnnnnnnnnnnnnnnnnnnngaggttttatgcgacgataatttaatttagaggccaatcgcggttgtggttccgtaaagaagaaggcgggcccgtgatgtgcgcgaaattgttgttctcgccgcgccacgcggccatgtccacaccaatggttcagtctagattggtttaatcttgaagtgtaatccaataggactggaggccagacacttcaggtcctggacaagataataaaatactcgtaagccttctggatccttggattgattggcatcaataaggggagccaatttttgatgttgtaaaagaaatgtgttcatctccaatgacgatttcaagctcctcttttctgatcatgacatcattcttgtaattgctgttgttggcatatcttaacttcccgtccggtcgaaactcaaactccaggaactcgtggccgaacttgcccttgtgccccacgtagtaacgcagataaaagtcactctccatggctcccaaaagacaaccgagcctgaacttccaagagcaagccgcactgccgccgtctgcgcccgacactgacccc

SEQ ID NO: 139985 - DNA, 640 bp, Homo Sapiens
tttagagagaaagaattttaatcatcagcctaaaaaaattacaaaacctcattgaacataaggtacgcaacattaaattctgggtaatacatgcattgttatttctatgtgggaatacctcattgtgagcaaacctgacatacagcagtaggactgaccgtcactagaaagctttgacacaacacttttttttattatagcacactgccaaaatgtgtttaacatagagtttgatttttaaaaattgatttgcacataattttagagagaatatctattggttaaaatgaggtatatctgtgctgccatgaaagtgtgccatgagaacacacttcagtttctgataaagcatttttacacatcataataaaatttcattttatgaaaaaatagttgaattcatgaggtatgcatcttgaccacatgcccacagtgtaagtacaaagtgtaaggtcagtgcatgagtgcacaacacagtataccacaagtaaatgcagttcccagtcatacatctcccccattataaaatgtgtctaatctcaaaacccccgatgaagtgcttgtgtggcacagcccaggctcacctacgggtatgtgtatatgtgcaaggatgggtatgccgccatgggagcacagcctc

SEQ ID NO: 139986 - DNA, 781 bp, Homo Sapiens
  misc_feature (503)..(562): n is a, c, g, or t
ttttttctgctaactttttatttattcaagtagaatccaatatgaaaatgaaataagcataaacaaacagttaaatttctactaaacctttaatcagctaagcaggccagaattttttaatgctgggcaagggctgtcatgaagaagatttatgaaagcagtgacaaaataatttcccaataaatacagtgcagatggggaaaatgatgactgggtcatcctcccacatagaaagaataacaagaggccagtacattgatcccacatataattttcaataaatgaggttcagtttggtctcaatgaactcttctgagaagaaaacattgaattttattaggtgtacacagagttaacaaataaattcccaaacagtttagtatgaaacattttgaacccctttagatccaatattgaacattttgcatggaatcttcattgtgtagtcaactgttcctggcctttcttggtagttgtcttccctaagctcaaacaaacagtgnnnnnnnnnnnnnnnnnnnnnnnnnnnnnnnnnnnnnnnnnnnnnnnnnnnnnnnnnnnntcctcatggatgaatgtgttggtttgcctttattttcatctaggataattcaacagactgtattctgagatcatggcaaggcacctctaacccagccactgggcaacatgagccccagatgctgagctagaggcatgtactggtgaaatacacagtaccggactcagcatgctgagctaaaaaaatatttttcctaatatgtccagtttaaaacttgtc

SEQ ID NO: 139987 - DNA, 798 bp, Homo Sapiens
cttagttaatatctttaattttttatgtagaatatactatttttttctccaccaaaataacaatatatttgcaggcgggaacatgtatgattttaaatgcacttttgaaatcttagagtagaaccaccactctagtaatacttgtaataaaattaaaatagttttaaacacttccataaagaattaggggtgcccagctccttgatttccccctagggataaagatatccatgtacaattccaggagcttccctgtaattcctcaaaaaagcactagtaaaactcttaggaggatattagataaagctcacttagcaatagccctttttccccacatattctggaaggttctacaaaagctattagatactcattcctggttctggaaaattaaataagccaattcttggtaggattttccaaatggcttaccacagaggatttatcctcttttgaaatatttcatcccataaagaatagaagctctgccttcatagcatttcaagcttctgtatttctgggacaaaaaatgtctaaacagaattagatctccaggtctcaaaagcacagagatatatcaagagaaatctggaggtaaaccaaacaaaaatctgtaaaatgtgtaaatgtcattctccttccctctcagaccttcttgcccttgtttgctgttttcgtcttcttcatggaaaagcaagtccttcagcactgggctaccagcagagtcccaaaatgtgtcaccctgcggacgcgtgggtcgacgatatcccgggaattccggaccggtaccagccggta

SEQ ID NO: 139988 - DNA, 458 bp, Homo Sapiens
tttgacaagtgagaaagctttattaaagcacacatacatgtcaggggggtgggaaacaaaagagcaagttacagcccgggatcccaagttatgccttccattacaattgcaatccacaccaaatcaatctttgaaaacattcctccattcggttcatacatacagtagaaaccactgtggctgcccttaatccagtgtgcttataggaaatcagttagcagctgactctgttgaaagggatttcctctctgctatacactccttccacacacaactttgggtagaaacgcttatgagaatagaaaggtcagtttgatcaatgagtaccagaagatgaaacttagctcactagacccttctttgaaaagcctcaacacactacacccatgtaatatgtaggtcaaatttaggaaacaatagcaaaaacaggaactggaagctcattaagcggggaggtc

SEQ ID NO: 139989 - DNA, 787 bp, Homo Sapiens
tttttgacagtagtctttctatgtatttattttacctgctaccaatcattgtactaccacaaagaatgaggaagtcccagggaccttgggaagaagaggtgtggtccctgagaaaagggttgagggggtgttggagtaaaaattttgtaccaaatggaagtttttcaaaaaggcacagacaacagttacctctccaaacaaatggatgtagcagtaaacctaagagtttctttaggctgtttactaacgtgaatagcaacatcttcctaggtattaggccaccccaagtgtagtttaaaaataaatagtactagaaacggaagtggaaacacatgcacagtttatcttttcactcttgtgaggtcagcagacatctgtaacgcactttccctacagcagctaacaaaggcaggatgatggtatctgttctgaacgtttgaaacaacatcaccacttatctttacagatttcctcaggttctcaatggagggcctgaaaaacatcactgtcaaggatgatgctgctacattttatgagctggagacgaacgagacctctcctgatgcctctccagtcacaggaataatggttttgaaaacgtcaatgctccatctgccttgtacgttgtaatctcctgtagtccatctgaggccaacgtgcacaggaccacagtagacaaagagtattcctgatgacaaatctgatatttcagtctacttcttcatgtgatatcccaagtattttttcccatccaccgtgctgctggatccatggcgagaagttctct

SEQ ID NO: 139990 - DNA, 602 bp, Homo Sapiens
  misc_feature (586)..(586): n is a, c, g, or t
tttcacttgacaattttatgattaaaaccaacaaatggaaaacagacagtgttgggtgttgctgacataatcaagcatttcgtgcggacccactcaaccaccccatttcttggatctatttctggatgtaccaaatgtgtctgaagatgaactcactttcgcacatcaaagatgtatccagtgttaaacaccggagccagaacccaggtgaaaatctgctggttcagggcaacaccacttccggctttattaaacactcaaaagtcaggttcccaagaaacgcttggatctatgcgcaagtataacatgtcaaaactgttaaatgtgaccatgagaaaaatgacatgagcatgtttcatctttgggtagagggtggtggttttctgggaagacactgtctgagacaccgagtagagaagtcaaatggaagacgtttagcatgtgcttaattcttgcttgataagaacaagaaatcccggaaaaggtcacccacagaacggtaagcaaagtccccagtgaacaagtttgaggtggggcttagcagtttgtttacagttgtggaaaactgttttagtcacttggccanaaacatatgaggggag

SEQ ID NO: 139991 - DNA, 1340 bp, Homo Sapiens
  misc_feature (43)..(65): n is a, c, g, or t
tataaggctctctagtggaaagccttctcccccaagagacggnnnnnnnnnnnnnnnnnnnnnnnggtggggccccaggtagtatcggccgctcggccccctcgtttgcccctggcatcttccgtttcttcttcgtcttcttttgggagcgccagagctgctggccgagcttcgctcttctgctgttgaggccctggtccccctggggactccagaggcttcatctccggctccactggctccatcgcctccgtccctggctccatcattgccatctgtcccttttcgttgtttcctcttcttcgtagggggcagagggatggcttcctccagtggctccaccttcacctgtggctgagactcaactgtcaccccctcctctggctccatcccttccgtccccttttgcctctttctctttttggtcggggacaggactgtgtcttctagaggctcagtgttaatctgttcctgcttcactgtcttgtcttctggctcgaaggtttctttccctttgggcttcttcctcttcttggtggtggacgggaacagcactcccagaggctccagtgtctccactgtgggctctgtccccacaggccctgctgcctctggttctttcagctgctgattttttttcttcttcttcttccgcacatccatttctggcgaccccaaagccatgtccacctccagggccccgtgcccattcactgcctcctgagtgactggggcctctgtcacctgcatctcctttttcttcttccctgaggtgagcaggttgggggccaaggctgacctaggccctgtgactggtgggttgcccccaaaggcacagaaccgaggcctcaggccaggagggatctgtggtgggggacttgctgggatgggctgcagagggctccctgacagggattgctggggaccctcaaggatccttagggtgccctggggggctgaggcacaggtgagtccacctcctgcctccgttgagggggccagcagggtcgcttctccagcttggggacagctgctgaggactcgatagcggtgccgcttgcctgccaatttgcccttgacgatctgggagccagagagaggcacatgccgcccattgaagcattctggggcaaagtctgcaggggcctgaataagccacagctccgtatctggacccgtcagcgcctccaaggagaaacgaggggactctgaggctgggggcttcgcggtaaagttggggggacaagagaaccgagcagcatcctcaccgccggcctggggctcctccatcctgggacccacacctcaggcaaccctgtagcccgggctgctcgcacccc

SEQ ID NO: 139992 - DNA, 260 bp, Homo Sapiens
tttcagttttatattttatttttccaatagtaaggaagtgagttaatccaatagcaacaacaaaagtttaccatggtttcaatgatgatggtgaggttccctaagccatcagtcagagctacgtagcttcctcctttctctaaatggccaactgtcttcaggtaataccagccaggttgagtaaactgagtggtatgagctatagaaaaacagaaagttccaaataagacaaaaatggtaataatagtatttcttttggg

SEQ ID NO: 139993 - DNA, 805 bp, Homo Sapiens
gcaagggatttagtttatcacatttagatgaaaactgaccagcaactaattcttgttctgtccttggtaagcttttatgttttgttttgggtgtatcttttctactgtcgtcttgtagttcaggaaaatgacttttcccatctggaggagtctttggattatttacaaggctcttaaattgaacaacagtgatatctctatcagaagttctctctccttgtttacaactgttggttttcaaaaagataaacctgtacagtgcacagatgtttcacataaaatatgtgatcagtcaaagtcagagccacccttagagtcatcttttaacaatcttgaaacaaacagagttattctagagaaaagtagtttggagcatgccactgaaaaaagcacagctaacgatacgtgctcgtcagctgctattcaggaggatatttaccctcaggaaatagatgcatccagcaactatactccccaagatcctgcaagaaatgaaatccacagtgataaggcacctgtcttatacctacatgaccagctgtcagaacttctaaaagagtttccttatggcattgaggctgtgaatacacgtgaaggttctgtgggccagcaaactacataccagacctcagaagatcaaactgctgataaaaccagttctgactccaaagacccagcagatcaaatacaaattacaatattaagctcagagcaaatgaaagaaatatttcctgaacaggatgatcaaccctatgtagtagacaagttggcagaacctcagaaagaagagccatcacagaagtag

SEQ ID NO: 139994 - DNA, 613 bp, Homo Sapiens
  misc_feature (506)..(506): n is a, c, g, or t
tttttgagcttctaacacttatgcatttattttcatgtgtaagaagaaaaacgtaactagcacgtgaacatgactgcatggatacacggctcagcacgaggctaaagtcagaagtgagtgaaaacaaaatagcatgttgatttaagtgaaataacagaacaggaggcctttggttataacaattgtggaggtggtctgtgaatgcagaagttcgggactccctgctctaggctcagggcaagacgctgtggtctgggccgaagcccctggggttctacagagaagcctgcccagtgcacggcccctgtggcattctcgtgggagcgtgtgagaccccagggagggaagcacattctgtttaacttgtccgtgccgtacaaaaatgtcttagaagtgataaagcaacaatgatgattctcctgtcaaagggatagaaagaatcttcccaggtgtggtcttgagtacgcagaggttacaacacaggctgggctgcagggcccaagtangacttgaggtcataaccaggaggactgaagggacacctgtcctggcaccatactggagaagtgcttgtttgtgtttgggacagtaaggatcctctagacacccagca

SEQ ID NO: 139995 - DNA, 517 bp, Homo Sapiens
  misc_feature (50)..(61): n is a, c, g, or t
  misc_feature (63)..(162): n is a, c, g, or t
ctattattgtgcataaaaacacattaaatgactctaaaacaaaataaacnnnnnnnnnnnngnnnnnnnnnnnnnnnnnnnnnnnnnnnnnnnnnnnnnnnnnnnnnnnnnnnnnnnnnnnnnnnnnnnnnnnnnnnnnnnnnnnnnnnnnnnnnnnnnnnntgagccaccgtgcctggccagaaaatctggattcttattcctagttcttcatttctgtcacatgcacttagttgacattacatctacatatattagctttttgctacatgagccatctatttacttagtaaccagtgttcttaatgaagtatttagtcttgggtttcttgtaaaatttctctgcattccttagacagtgtactatacatgaaatattcttgttgacctagtaatttatattattccatttaattcttaaacctatggcctttttattgagcacactcttaaatcattatttggcttgtaaacattcatctgaattgtggctacaatcctctttaaataatctagg

SEQ ID NO: 139996 - DNA, 880 bp, Homo Sapiens
  misc_feature (855)..(868): n is a, c, g, or t
  misc_feature (880)..(880): n is a, c, g, or t
caagttgacatgtgtatttattgcacaaatatcccctagaactgggaggttattataatacaagtgtacatttgagaaatgtatacagaacaagaaacagctatgtacatatccaacatctaagtaacttagaaaaagcagaacaatctcataagacatctaccagaagtaggcattatgtaaaatctgtttttttaagtgatcatcccccagagtatgccaattggaacaaaacaaaatctgtactagtatgtttttattgcacttaacattttcaaactcaaaattaagacatattaataaaagccagaaatatttaaaatcaaaccaattagtttatatacaagaaaaaattagttttaattctataatgtaaaagatcccttttttatttcctgtttcaaaaaacaggttttttttgatatgtaacaactgtctgtaccataacttgtaaaaattatttagaacaagccaaaactcttttcacattcatcataatgaccacactttaaagtagcagcagctcattccttgggctttgcgtaaggaaagaatgactatggtgaaggtaatagaaattatagaaggattaggaattacaaaactcaggaatgggaagcagtggggaggaacaaaacagtaactcaggaatcctataaggattaatgattctttaagaaactataggtcatttccttcccagcaaagcttagctttaggaacaacaatagcatgagccacccacttattgaggactagaatttctaaacggtaattaaacattttaaataaagaacagtttgatggttaaggagacacccagacattatccaagtgctatacagagctacaatnnnnnnnnnnnnnngtacaaggctgn

SEQ ID NO: 139997 - DNA, 502 bp, Homo Sapiens
cacaataaaaagatagtatctttatttgaccagaagtatcagaaaaattatgagtctatgaagttgctgtactaagacactttatatagcaacactgtaaaccacaattgcctgtacatgggccatttgaacagcatgcgtggttatcagcatcgtcatctgccaatagtcaggagatttaccaactcaccccaagtaagcgtagccagggtcaagagctcagggattgagtcctgacatactacatattctggagagtatggatctgtttgaacgtcagcatcccgataatcagtctgagtgcccacagtagactttgaagggatggataggtgcttagtagaagtaggaggaaaagtgtatggttctgccttggatacggcataaacaacattgaatggcatctgctgaaaaaatgggagaaaaggcctttcaaagtatttatagcgattctttccagtaacttcaggatcttcataaacttctttaggcatctgaaaag

SEQ ID NO: 139998 - DNA, 455 bp, Homo Sapiens
  misc_feature (59)..(76): n is a, c, g, or t
gtgccaagctaaaattaccctcactaaagggaataagcttgcggccgcatacgcggtcnnnnnnnnnnnnnnnnnnaacttaaaatatggcattcaggttttatccctctccccgacgccatgtttcctttctgtattagtcacacacgtgatcctaaagtctgtcttccccactttaactggggagggctggacaaggtggaattccaattgcaggagacaggatgtgacatgggtgaggtgcccaaggctcaccgactgaaacttcgatggctcttccctgtttccttgtgcagggccccccttctctccactgctcacctggctctcctcctcccttcctgcctgctttgcagctcttgctactattttccttttctttccctgctcccaccctggcccaatttatttcacagaaatatcacagggccagccaggcacagcggctcaccctg

SEQ ID NO: 139999 - DNA, 508 bp, Homo Sapiens
aatatttaaaatgtttaatagttaaaattttttaacaatttaactttaaaaaggtcacacattttctgatccagcaatgccccaatcagattgtttcattttattattattatcaacactgtcccctttttggcacctgtaaaatagttcctttcgggagtttggagccaggccaggcaccgtcggtgcatgggatgagatgggcaggtttggagctcctctgtctagtgaggatcacggtctgcagagaagggttggcctccccgtctcctatcaaggcttaaagcaaggagaaccatcccaaatttggttccttttcccctaagtatccttagaggcaatccaccctgtgactaggtgactaggtgaaggactgaggtccagaaaggagctatcttaaacctggaatcccatttcctagtctgcagccttaagcagttaccctctcagacaactagccctctccttcctccgcatgaaaaccatggcttacagggatgcctcgtgc

SEQ ID NO: 140000 - DNA, 506 bp, Homo Sapiens
gcggccgcggggaccccagccgctagcctggccacgcccctacgctgatgtccaggcgtccctggccgcgccccggaagcgccccctggcggtcgcagtcgcggtccaggggcagggttcctggcaatacttgtcttggccgcgcccaaaggctggaggccacgtccggggtgtgtgccttctcccgcccggcgccctcggctctccccttcgggcctccggggaagcgtccccgctaggggtggggtcttgggactccctggggcttccggagctgacccgtggggggtctgctgccctcagttcctgctgaccaaagtcctgccggatctggcgcctacgaggacgtggcgggtggagctcataccggtgggctaggtaagtcaggtagagcctgggttgctgggactttgctgcttttagtgaacccaggagtctggggttgatggggcatggagcttagtcctgtggatgtggctgcagtgaaccaggaggacctggaggcg

SEQ ID NO: 140001 - DNA, 950 bp, Homo Sapiens
gggtgtgacgcgactggcacacggccaccgacttggtctccgctgtggcccctttcctcgaaaggggcctcccgcacagggcgagccgagctgacacacagctacagagtgacaggcctgggagatgagccacacagttcgcctctttcacgaacagagacgggcagctcaagattggagtaggtacagagtacagaagaaagcggccgcgaagtatgatatcacaccagctcccacctgtgggcacccaacccgagccctccctgggaaagtctgggaactggttaaaaatccacacctcagcatcaacccctccaaggctgggctggggtatgtacacatccccatcattccttgattgaaggctgcaggagagtggagttcatccaaggcacttgagatcgaccatggatgcagccagcagaggcagaggaagccagccctatcccagagaagggcaggacaggggtgacatggggcccagggcactgtggcagtgcatacagggacctgggcaggcacgagtgtcagtcagaggtccagagacacccgggtccactcagcagcggttcccggggaccctttggcctcccaatgcgcaggttggaacctagcccaccggtctgagctccacccgccacgtcctcgtaggcgccagatccggcaggactttggtcagcaggaactgagggcagcagaccccccacgggtcagctccggaagccccagggagtcccaagaccccacccctagcggggacgcttccccggaggcccgaaggggagagccgagggcgccgggcgggagaaggcacacaccccggacgtggcctccagcctttgggcgcggccaagacaagtattgccaggaaccctgcccctggaccgcgactgcgaccgccagggggcgcttccggggcgtggccagggacgcctggacatcagcgtcgg

SEQ ID NO: 140002 - DNA, 1128 bp, Homo Sapiens
  misc_feature (962)..(1016): n is a, c, g, or t
  misc_feature (1074)..(1087): n is a, c, g, or t
ctaccgagtcttcgatcgcggagaaatggacagtttattactcacagtgaacacagcagccagaacagtatctttagtcactttcccatgcccctattcccaagaagagggcatgtggatcgtaccagctgggcaggcagtgggtctgcatcccaggagagggacccgaaactgggagacttggagattttatcagggctgtggaggacctgcctttcttctcctccagagatagatgactcattatccagcaacacagaggtcagcaccgacctcaccagcagcaggctcacaggagtggcaggggcattgggagagtgggaggcagcacagggtcagctctttcacgaaaacagagaaacggggcagctctagagtgggagtaggggcacagagaacaggaaggaaaggcggccggcgaaggtatgatatcacaccagctcccactgtgggcacccaaacccaagcctcctgggaaagtctgggaactgttaaaaatccacacctcagcatcaccctgccaaggggtggggtggggtatgtacacatccccatcattccttgattgaaggctgcaggagagtggagttcatgccaaggcacttgagatcgaccatggatgcagccaggcagaggcagaggaaggccagccctatcccagagaagggcaggacaggggtggacatggggcccagggcactgtggcagtgcatacagggacctgggcaggcacagtgtcagtcagaggtccagagacctgaaagtgagaggggcgggacccttgaggttcagggaaagagcatcttatactttttccattttgcagtgacttggagatttgtccacaccagtgcacagagacgtgtcctccttttatttcttttaacagccgcttaatgttttatcctagcaggaaccctaccatgggccatttaaagtgtttcaaatcttagggggctgannnnnnnnnnnnnnnnnnnnnnnnnnnnnnnnnnnnnnnnnnnnnnnnnnnnnnntgcttgaggttgggagttcaagaccagtctgggcaacatggcaaaaactcatttcttnnnnnnnnnnnnnnttcggacgcgtgggtcgacgatatcccgggaattccggacc

SEQ ID NO: 140003 - DNA, 457 bp, Homo Sapiens
ttttacactatgctaatttcagacaaacagttttcaatttagaaatacaaaaacttttaaactcgaaaaatggcgaacactggttttttgggaattgtgtttttactttgcatcaagatgaatttaggagaaaatcacggtgcttttattaaatgaacttcagatatatgtaaatttgttttttaaagttacatcattaacattagtaacctagcattttcattattggtataggaattaatgtttattgtacagtatctaaggtaaaatgtgtttctgttttgtaaaaactactgtagatttttacttacaagtgcctttttgccacttaatgtttttatttataggaatgctgatcttttgtacatacattttgttttaaaatcatgtttaataaatgtttttatataaatgcatatgtacagaagcctatttcaaacctcgtgccgcctcgtgc

SEQ ID NO: 140004 - DNA, 700 bp, Homo Sapiens
ttttttaaagagaaatgtaaaactcagtttaatttcaagtttgtatagagaatgtatgccacagtttgtattttataaacacaacctatcttattataaatacaaaataagaaaaagtgatacgttagctgttatgaagggtgaaaacattatataaacttcaaaaggctgctttctgcatctgcatctatgtaatttcatggttctctaccaatttcatttacagaaataatctctatagtcaaattattgttcactttcatgccccaacatgggaagtggtaggtgaatatctgtaggaatacaatttattgtctgctcctccactcagaagtagccctgtgtctgtccagtctacactcagaactttgtcttcatgagcagccagatcatagagaggagccttacaacttcttgtatcccacagcttaacaatgttatctaaagatcctgaaatcagctgctgttcatgggtaggagaccattttactgatgtcacccaaccagtatgtgacgttagggacagcgacaccaaagaaccatctttagttcggggatcccacagtctgatatgcctatctgtgcttccagatgctaaacgtttacacagtggagaataggaaatacaattaaacactttatttcctgtcaaagttgacttaagactggcagactcaacatcccacactctaattgtatg

SEQ ID NO: 140005 - DNA, 629 bp, Homo Sapiens
agtgtatagttatgaacactctcttatctactatactcatttctaatatctaatcagttaacaccaatatttcttaaactgcatcccttgtaacatcagtcataaaggtttaacagaggtaatcagtaaaaattagtggggacataccgggttaaagaaacatttttgtttttaatgcagaaattctcagtgatacacaccacattctctccaaaattgacattccgtgtaatttgcaatcttttccaaatggttttttaaaaggaacgtctgtctttcaaaacaaattaagaatgcatatttttctagaaagactttggtgttgaagagaaatgtgagatcagtactgagcaacataaaaagttaacattcaaatagtgaaatatttaaatctaataacttggaagtcaaattggctttgagaaaatgtcatttttagtagactaatattggtaattgttaaatgcttaccttccacatagcatatgagatcaacagaagtacaataagtccaagtagcaatttacttgaaataatcactatggtgaaataacgtttgggtctttgatgatgtagtccttccagtagaacatgcgcaacattctcatcctagtatagttcaattactc

SEQ ID NO: 140006 - DNA, 1032 bp, Homo Sapiens
  misc_feature (21)..(21): n is a, c, g, or t
  misc_feature (666)..(666): n is a, c, g, or t
gaacgaagtcctttcccactntaatgtctgtatcaatgggaaccatgtttaactggagcagccagaagccaagggtgagaacaagtatagcagtccttcttcctacctgaagccccagggcttcaggaagaaacatttgttctcatctaccaaaaacctggctgctcagtcttggaagtaacctggggaaggaagtgggatgtctcatgacaggtggctctttgagtcttctaccaagaactctttgaagtccatgtctccgccatcctaccaaccactgttctgtggggacattagagaacacatggctccagcaaacttggaagctgcaaaagaaaccaaagagacgccagaagcagcataacgagagtcttctttgctttctcgggtgacggggaagaaggacatggctaagaacagtgaaggtgaaaaccctcttaccatcctggagaagaaggaaggcatgcttatggaggtcaagccgggtagcatgcttcagggcctgttaaagaccttacgagaagattggagaaagatattgcagctattgtctccagaaggggtaactccctgaacccctttgaagatgtgcagatcacagaaccaaaaactgacccagaatccaagtctgaacagaatcaccaattctctctgtgatggctccanaaaccagagctgtcaaaccttgacttcatcctgtgaagccaatgaacacaatggccaccaagactgctatctctagcttgggaactgccaccatcatcagtgagaacttgatcacaagaccacgatcaagaaaacccctcagattctgcttttgcctatgcacagctaacccagaatgagcttatccagctgctcctcaaacagaagaaaacaataataatataataagagggatttccaggatcctgagctggaagactatactgacacctgccatcagtcatggaacgaaacccccacgctccacattctggctcaggttagcaaaaatgcgggaaagatgtaaatcaccagaattataccggc

SEQ ID NO: 140007 - DNA, 1896 bp, Homo Sapiens
cagttctctagtatctttattatccattcccgggggcactcctggctgcccaactcaggggtgcagatgtctccctgcaccatgccaggtgtggtgcagaatgggaggcagggggatggagcagagagaggcctggactgcctgtggcctttgtcgagtcactgcccttctgtaggctctgctctggaaatgctggggtcagaggcaggtgttggggagcagccctgtctccctctgtcctccaggggagcagctgggcctgaggaggaagcacccctgccccagggtcccgaaggccccagaggacccatatccccctggggcagttggttgcccctccctgacccttgggctctggaaggtcagagcagcagagcagactgcccgttttccccccatctcagggcctggctgaggcagggcaggcaggagagaggcccctgagggcgggtttcaggccctgggccaggcactcagatggggtgcacgaactggtagacgaggcgctgggagatgtctggcttccggatgatgcccttcttgtaatactggcggatggagcggctcagcttgtcgtagttcatggcgggacggttcttgcggatgccccacagccgggccacctgggctgagtcctcaattttgaagatgcccttctccttgttgagccacctaatgaagcggccatagctgtggggcctgagtagcaactccttgaggaactgccacaggtggatgggctgcccggagcatgatgagtccacctcgctgtcggtccagctctcctcactggtcgaggcacagtagtgaatcgccccaggtgaagtccgctctttcatccaggccgctgacttccagatgtccaggtgggcgtgcagcacatccccacccaggggcgagcgctggcggaactgctcctccgacatggcgcacagctccttgcccgccagctcctggaaggccttgcccatggggggcagccggtattggtgctctgtccacaggagccacttctgcacattgctggggctccagtccatgggatctgcggtgatgttgagcagcttgcaggccgtctcgatgtccttgagcacttcgcccaccaccatggactgcacctgctccagcgagtgctcctccaaggtcagcccgccgggcaccaagtccaggctgcccgctggggcttggctgtcaatgaccgggcactgctcaggctcctcaggtggctcctcccgactgctggccccaggggccttggctgcccagctgctgtcctcagggtacagcatgtcaaagtaggagaggtagaaggcggacaggccctgctcgggcgtggcgggtggactgggactccagtcccgtctctcgagacccactgcccccgctgccgccttctccaagcctgtccgcgacaccgtgtcggggggcagcaggaggtggctgggggatacgctgctcagacccgggctggcgctgcccatgccgctgctgtttgggctggcggctgtgtctgttagctgcctggtgcccagggagctgtctgctgcagtgccaacttcaggggccgggaagaggtgtgggcagctgaggccactggcgtgtctcagccaggcatctggggggccagcggaaccaggggccagcagggctggtggcagaggcagcactcaggttggccactgggggcctggccaccctcaaggggtggccctctgaggtctcagggctgcgtgcctgtagggagtcccctacccccagcccagggctgcctgctggcaccgtggcaaggcccaacctgaggggcttgcagggagctggcagcaggcttggaggactgggtctgtggggcagtgtggacacggcagagtgcaggaatgtgctgggaggaagtcagac

SEQ ID NO: 140008 - DNA, 212 bp, Homo Sapiens
gcagttctctagtatctttattatccattcccgggggcactcctggctgcccaactcaggggtgcagatgtctccctgcaccatgccaggtgtggtgcagaatgggaggcagggggatggagcagagagaggcctggactgcctgtggcctttgtcgagtcactgcccttctgtcgtcttctcgcagccgtatagtagtagtaggcggccgc

SEQ ID NO: 140009 - DNA, 798 bp, Homo Sapiens
caaaatttgaatctcaattttactactcaagcaggaagtaaaatcatttttctatatcttctttgctcccagactgtgttacagtttacagatctgaatattgtcacttgtacaccatacatacacagaggtctaaaactctctacaagtaaataaagacgaaaaaaaagcccagcaacccaataggaaaataggccaagcctgttataggctttttgatcatctccagactggcaggaagagaatgcatactcacactgtaagtgcctgatttgatttgcagaggatatagaaccttatcagaaaacaaccttccaaggcaagagcaaatgcatcctatcttagcacagcttttctccaattcttatttacctaaggagatgaatagctgccaggaacattgtttgcacaagggcaggggcctgccagatctgagaacacagcaaaatttttgtcaaaaatcttatattcagcttacaccattcatttcaggtgaacatacaacagtctgcatttcagtttagggaaatgtttacagtcgtctggttctctttattcttgggaacaaggttacctcacttggaacacataaccagtgccaagttgtccatccctaagcaatattgcttccttctactttctagaagttcttcagattgtggaagagaaacttttcagagttctttgcctcattccctcctccagaaattcatgcctttgtataatctcttcccctgagagccagtaggtaacctaatgagttatttttaccagtagcatacagcaaaaatgatagat

SEQ ID NO: 140010 - DNA, 801 bp, Homo Sapiens
aaaactaggctaggtgcgaggctgggtggtgaatcggcacgaggctaacccctgcttcctcaccctctgcacgagaacgaagttcttcgtcaccagctctttgctgccccttaccgggacctgccggcctccctttctgccccgatgtcagcagctcatcagctgcaggccatgcacgcacagtcagctgagctgcagcgcttggcgctggaacagcagcagtggctgcatgcccatcacccgctgcacagtgtgccgctgcctgcccaggaggactactacagtcacctgaagaaggaaagcgacaagccactgtagaacctgcgatcaagagagcaccatggctcctacattggaccttggagcacccccaccctccccccaccgtgcccttggcctgccacccagagccaagagggtgctgctcagttgcagggcctccgcagctggacagagagtgggggagggagggacagacagaaggccaaggcccgatgtggtgtgcagaggtggggaggtggcgaggatggggacagaaagcgcacagaatcttggaccaggtctctcttccttgtcccccctgcttttctcctcccccatgcccaacccctgtggccgccgcccctcccctgccccgttggtgtgattatttcatctgttagatgtggctgttttgcgtagcatcgtgtgccacccctgcccctccccgatccctgtgtgcgcgccccctctgcaatgtatgccccttgccccttccccacactaataatttatatatataaatatctatatgacgctctt

SEQ ID NO: 140011 - DNA, 1770 bp, Homo Sapiens
  misc_feature (28)..(28): n is a, c, g, or t
  misc_feature (79)..(79): n is a, c, g, or t
  misc_feature (772)..(830): n is a, c, g, or t
tccctccttggaagggggaccaaggggnttccgggcctggggggccaccgggcttctcggggggtctcaaacctccctncagcccgggtccctttttaatctgcgtggcggctccaggggcggccctgaggcaggggcccgcaggtggtggtggcagcgatggcaggcctgagggcccccgcaggtgccaggggcccaggtcccacggtgggcgagcccggcttgaaggtccctgggcctgcaggtggcgaggttcctcgatagcccggtggggtccccgttcggaaggagggaggcgacccgggtttgtatccgggtggggtggctgtcttgtaggcccccggggacggggctctctttccgtacggtgggggcccaggtggggaggccgttttgtagcctgctggcgaggaagccacggtggcaatgaccgtggaaagggtagccgaagaggtggtgaccgtaggcaccggtgggaaagggtagggcgccccttgagggccctgggaaggggaggggtgtgaacatgggtaggacccttgagaagtggaagaggaagagttggaagaggaagagactggagggccattggggcctgcttggctgtaggacacctggctgtgaggtgggggtaggtgtgctggccctggtgggtagggcctcagagaccccagggagggagacatggcgtaagggtgtgcgtggtgggagctaccgccctccagtgggtggggaaatgctccaggaggagggggcccagagtttccgtgannnnnnnnnnnnnnnnnnnnnnnnnnnnnnnnnnnnnnnnnnnnnnnnnnnnnnnnnnngtggtgatggtgatgtgttgagactggtgggtgggcggtggactgggccccagtagagggagggaaggggcctggatgggcattgctgttggctaagaggcggccatagggaggaggtggtgggggaccctggctccacacagcctgggatgggagagaaggctgagtatacttggggggctgattggagacagagaggcttgttgggggagggaaagagtgggggtagctgggcaatgcctgggaagctgggaagggggaggcagaggaagaggaggaagaactggaagaggaggctgctgcagagctactactagaggatgaataaggaaacctcatggggggcgctggagcagaagaggaagcaggaggcagagagtggggtgaaggagccagagttgggcccttctctgggccaggaggaagtccacccataccctgtcccatggcgtggggagagggcagatgaccaggtagtggttgggcccccaggccagggggagaggctgatgcattgttgaggggtctcagggcaggtgggggaggcaggttcggtgtcacatgggggaagttggctggtggtggagcagaaggtaggttcccaccacccactggagtggtaggcggctttgttgggggagcaccactagccccagagcttgatactgaaatgggagtagtgggtgtggggtgctgcttactcccacttagggccccccactgatgaggcagcccctcccctccttgggaccccattggggttccagactcaactccaccagtgacccccaggatagagctgtgggtgagggggaggggccccaggaggagcctggaacattcgagatgtggggggctccatgggagcatgatatccagtgggtgtcacagaaggctgggcttctaagctagcctctgcctgtcgacgaacctgccttct

SEQ ID NO: 140012 - DNA, 1062 bp, Homo Sapiens
  misc_feature (903)..(985): n is a, c, g, or t
ctgagcaagcggcaggtcccggtaaggggcagcaaagggtctggtgacgaagaacttcgttctcgtgcagagggtgaggaagcagaggggttagggagagttccagctgggtaggggatccgggtaaggtgagaccctgaggccagggggtcaatgagagggtgcaccgaggcagaggctgcatggatagcatcttgctggtgcaggtgcaggtgcgagtggatgtgggagtgctggtggtgatggggagtcacattgagcatctgcagccgggccagtgggtcattgcccagggccgccaccctttctgcgtgctgcctctcagctgccagccgctcagcataggacatgtcaggccgcagggctggcccagctgccagcgctagacgttctcgctccaggggccccaggctcggatgaaaggggaaagggtgcaggccaggtgggccaggctgcagagccaggcccccatgtcggggaaagggatccaagcccggcccagggaccccatgtaggggttccagctcactaggcttcacctcaaagccaggcttgaggcggtcacggaggtctcgttcacgggcttcccgttccctctcccgggcagctggatcactgctgtacagggccgggacattgtaacccaggagccccgggtccactgcccccaggggcacgtagaatggatggttgcgattgccaggagacatgacatgaggccgggcatattcactgagagtgcgcaaggctggagtgtcaggacccaggtaggggggcactgtagccaccgcactgcccggttcaaatggagggcgatggggcactgggcccagagatgggcattccaccggagcacggccctcctgagccaacttcacgctgcgttcaagctcgcgctccttnnnnnnnnnnnnnnnnnnnnnnnnnnnnnnnnnnnnnnnnnnnnnnnnnnnnnnnnnnnnnnnnnnnnnnnnnnnnnnnnnnnccttctccaccaggtcggcccgcttcttggccagcctggagccctccagtggcacgaagtacaggtcgctgcgcgcg

SEQ ID NO: 140013 - DNA, 1164 bp, Homo Sapiens
  misc_feature (496)..(541): n is a, c, g, or t
  misc_feature (1045)..(1079): n is a, c, g, or t
tttcatttttctaccagatttattatttcaaaaaagtttattattcagcagacataattccaaaaacctttacagaaggatctcttcacttcctatgagaaaaagaaataattaaaaaaacaaacataggaaagaattttgttaaagacatgcaagttataaagttataccaccaatgggaacatacacaattttaaaaggaaagaccacatgctatgtttaaatataccctgctgaggtgaaggagagaaacatccaaaagtgagggtttgtagtcttacgggcacttctaggtcaatatcagatgaatctcaaaaggggtctaaatgaaaaactttgggagaagagcaacgtgctctgcactgaccagaagaaagacattacttcagtattttctgtatatggcttgattatcccttatccaaaatgcatgctaccagaagtatttcaaatttcagatatttttgtatattggaattcagctgtatacttactnnnnnnnnnnnnnnnnnnnnnnnnnnnnnnnnnnnnnnnnnnnnnntaaacatttcctttgaatatcatgtgggcgctcacacagtgttggattttagagcatttcaaaattcgaatttttggattaaggattctcagcctgtaaacctagagttcttgactcaaatggactttcagtaccctttcctcaaccttcccacactcccgaccatacacatgtacctgcccacagacattcatacagtttccttattttaatgtcctgggaagaggtagaaacatcttgtcaaagtcactctttcagtggtgggcatctgcgctctaccatctggctgctcaaatgaaaatcgaaccttgcggaaaatttcctccacatcacaggaacaggcatattcttgcatatgttcaatgagtcttccaataaaaacagagcccattgtgggatgtctccaagaaacattatctggtgtggaagagcagaaagcgataaaatccttctcccggccgtaatggccgaattcccgggcatatgtccggtaccgtcgactgnnnnnnnnnnnnnnnnnnnnnnnnnnnnnnnnnnncggccgcttcctcgctcactgacctcgctgcgctcgtcgttcggtgcggaccgagtagcgccctataggtgaatctatagattct

SEQ ID NO: 140014 - DNA, 850 bp, Homo Sapiens
cagatttattatgttcaaaaagtttattatttcagcagacataagttccaaaccttacagaaggatctcttcacttcctgcccacagacattcatacagtttcctattttaatgtcctgggaagaggtagaaacatcttgtcaaagtcactctttcagtggtgggcatctgcgctctaccatctggctgctcaaatgaaaatcgaaccttgcggaaaatttcctccacatcacaggaacaggcatattcttgcatatgttcaatgagtcttccaataaaaacagagcccattgtgggatgtctccaagaaacattatctggtgtggaagagcagaaagcgataaaatccttctctatgtgggctttcttaatagcatcatcctcaaactcttctgtagttggtaaagataggtttccagaaactcctactgaatctttaaaccacaccacaccagggctgtcaccacggcaggcctggatgatgatcaccttcggtttgtccttcaaacttgggcagttcttggtattcaacatgttaaagattgcattgagttgtagtatatctgggacttgctcagagtgtttcttcccacaaatgccttcccgaataccatgagacatgaacaccaggaacgtgctgtcagaggtcttgtgctctgggcggtgtgcaaatgcctccagctctgtagtcatgtccgaagcagtgagattttttttcacatctacgctgtaccccagattttgtagcagcattgtcatgcctgtgatgtcaacctcagctccagttcttctaggaatactgtcaaattcttcattgcagataatgagagcaagacgtgtgcggcttgac

SEQ ID NO: 140015 - DNA, 706 bp, Homo Sapiens
cggttatttaaaaataatttttaaaatcggaaccagtgtcatatggaaaaatgatctatgatgctttttaaaagatccgagtttttcacatattatgaagtattaacaaaacacaaaagcattaagtaaaagtaatgtgaaattcagaaaataaagcagaaagttgcacttctgtgtgttaaaataatgtaattctccctgtacatttctgtccacatgagccaataaacatcaagaatacacactttacagtatttacctgttttaagacattcaagtcaattcagatggcaaaagtagaattcaatcactagtgaaatgttttaaaaatatatattaaaccaaaaaagtgtttttacaagataaaaaataatcttccacaatgtaattaattgcagatcactgaaattttaactctttagatgatttcagttcagttttttggtttcaaaatctagagacagtcaaacaaaagcacaggcagaatctctatctgtttttacgtttctctttcttgctttgactacttgttgcgctgtttaaagacgatgatgaaggtgctcttgcatgacctgtggcctttagatggtcaaaaagtttattccgagatggaaattcactatggcaggttgtacagctgataagaacactctgagaagggcaaaaaatcataaataaaagtaagcgttatcacttgaaagtagtg

SEQ ID NO: 140016 - DNA, 671 bp, Homo Sapiens
ttttacaaattcttctttattgcagacagttcaggcacaggtacatggaagaagccgtattgcagattttacacaaggtggtttgaggcagcaggcacctacctcttccccacccccacttccccaaatacacatcagcctagagatcattcccactgaaatctcctgagcatgctgtcctctcaaacagcacaccatccagccctgtgcccaatgtcaccaggcaatctgtgggatctgaggaggtccttagcctccacccgtagtgggacaggggaagggtatccttttacatgtcagatttagctgtggtgtccttaccaatcctaaaacccttaacagggcactgacccaaatcttgggtttggttctagcctatggttgctacattgccactaggtttataccatccagaagtctgtgggacaaggggctagatttgtactgggcaaggcctttgtccccaaaatggagaagcagaaactgccctaatagctaagactccccggaattggaagatagcatgaagtctgtatgctgaggaatgaagtggagagaggcctggcaatgtcctgcagcagtctgaggggtgaggactcctaaagcatgagtccctcacagactgcctccttccacagctcctgacctatactccaacacaactggggctg

SEQ ID NO: 140017 - DNA, 638 bp, Homo Sapiens
ttttaaaatatttatatggatcaactttattgaaagtgaataaacagagataatgtggcaaaaagaaattttcccaatattaaacccttgatgatacttttaaattcactataaggaaaagaatccaccagtagtaggtagctacttatttttgctgagtgtcctctgcttttctgcatgctccacaatcttttcttccacataaagccccttccgctttcgtactgcgttcatgtacttccgggcttggttctcagagtcagccttctccccaaagtgcaagtattcctcctcagtagttggcacccagaaggggtcactgggaatgatctcccaatggctgaatactagttgtgggctggccaggccacttgtcctcttcctgatttcatcagcaaaaccaaagctttcagcaacaggcagcacagccttgatgatgaacatgtctgtcccttctttcatttcttcttgaagtacccgaccttctctctttgacaagacagcatagactcgaccgagaacatcaccagtggccatgatgtcacatgtgtacatagctgccatcaggcgctgaggtttcacttgcagtgcatagcgacatgcttctttcatggtggcaattagctgtcctgagaaag

SEQ ID NO: 140018 - DNA, 572 bp, Homo Sapiens
  misc_feature (524)..(524): n is a, c, g, or t
ttgggccactgcgcccagccttaaccactttaaacagtacaatccagtaatgtttagtgtgttcgcaatgttgtgaaaccattaccactaattccagaacatttccattaccttccccaaaacagcccagtacctccaactctcccctgacaaccactaatcttctatctctatggatttgcctttatggattttatatcagtggaatcatataatgtgtggccatttctgtctggcttctttcagttagcgtaatgttttcaaggttcattcctgttatagcatccatcagtatttcatttttatggctaaataatactcctttctatggatacgccattttgtttattcattcaactgatggacatttgggttgtctctatttcttgcctattatgaatgatgctgctatgagcatttgtgtacaagtttttatatcaacgtacgtttctaaatctcctgggtatatacctagcagtagacttgctggattgtataataattctgtttaactttttgagganaccacaaactgtcttcaacagcagcagcaccaagttacatctcaccgg

SEQ ID NO: 140019 - DNA, 288 bp, Homo Sapiens
ctcagaacagactgacgaacgaaaccaaagaaggcaatgctttcattccaaagcgtggatctcgaaaatggtgggcttgaaccctcatgtattgccggtgagatgtaacttggtgctgctgctgttgaagacagttttgttgtttcctcaaaaagttaaacagaattattatacaatccagcaagtctactgctaggtatatacccaggagatttagaaacgtacgttgatataaaacttgtacacaatgctcattgcagcatcagttcatggtagccctaacctacg

SEQ ID NO: 140020 - DNA, 318 bp, Homo Sapiens
ttttgaaaggaaaatgagattacaagtcaatacctccacagagaggtaactcctaatattcctatgatctctgaaccctatttaaaccctcctaaaataaaaatatcattttggtttttctattatatttaactctaaaggcgggctctgactaatttgcttgggcttgatgctacagtattagcacaagctataagctccctaccaccatataagccttgctcttcggccttccatcattttgaaccctaaacctcatagatttagaacgtaacactgtataaaaacaaacagataaagggttaaaatattacaaat

SEQ ID NO: 140021 - DNA, 749 bp, Homo Sapiens
  misc_feature (711)..(711): n is a, c, g, or t
tttccttcagaataattttatttttgtatttcactttacactgtaatgcaaacagcttttatgttttctttgacgaagaatcataattgagtcactttaggtcttttagctggaagcatttcaccctaaatgaaaagttaatgcattttttacaaggattaacatgctaactacaacttgccctttcagcagatgacaataagggattctgaaaagtttggactgtctttttctttttgtatacaaataaagcagcagatcctttctctgtgaaggttgttgcagagctcccgtaccagcttataaaatgcggctgtttaagcaggacttgggtgggcagcagaattctgcacatgacgagtggctgcagcttagaaagcaaatttcacctgattccagtactgtgattttaaggaaacggtaaaactcaaagtgccagtaatgccatcaaggctcagtaacatgccatttcctcagcagctaaagacaaaaagaattattttggtgaggggatagaaatcctttcgctttgcagtgacacccactttttcttagcttggcttgggagtaaggagattggagtgtggggggacattagaaactcatttaaggcaaactgaaatctccttcatcagcagtcttcctgctggtgtagccacagcagaactccgaggcttgcaggctgggctgtctccttgctgcctggcctgngtgtttatttgggcaatgcaagctgacattgtgaggtg

SEQ ID NO: 140022 - DNA, 673 bp, Homo Sapiens
aaacttgagcttcaacatttatttaaataaaactttaaaagtcataaccaagcatgtaaagaaaaatactgtcatcttcagctcattttttaggaagggcaacagaggagaaccaaaataaactctggaatttattaggtttaagataatgagtgcattttttaagtgttaggctacgtataaagtttgctaaccttgatggcacacacacaaaaatctctagatggagaagtagaagatgctgttacttcaggcaaaagtaagagttactgaacaggaaggcagagtagtggggaaagttactcatctttccccaaagatttaaaaaagggggcaggtgcagaatgttgtcctcttctatccaagaatctcaaagcaattgcctatgttccacactttatgatgaggaagatggcagcaaaaagaacggcttgcccagtcatggtcagcaaacccaccaggaccagcgctgagagttcacattgcttctggttctgaggacttcttaagaggttcttccttgtaaaatgacaaagttatggttttgtccaacagttaaaagagatgctctttaagaaggatgataaactcatttgccttccttaaatgacaattacactcaacttaaataacttgggactctttaaaatcttatcttaagctctcctcgtgc

SEQ ID NO: 140023 - DNA, 775 bp, Homo Sapiens
caaggtttaagtcatttaattcccaaactaaaataaagaaattatccaaacaaaacagaaacaaaaacctttctatttcaaaatagtaatacaaaggtcagtctggtaagcttgcaagcattataatacctggttcagagaaagtatcactaatatcatcatccttgtcatcttcataatcctcttcctcttcttcctcctcctcattttcagacagttcatgctcactgccgaatccttcatcatggtcctcatcatcaacatcctcctcgtcctcctcatcttcttcaggactgcatttagttggctgttcacccaagttgtcggagacaaaaagagaataattgtgctcttcttttttctgggatgaatctgagactgatgtactggcagaaagactgctgctctctcctgctgcaagtgacccaggaccttcctggggcaggggacttagtaatagttcctgggtttctttaaaaggcaaagcgggagtggcatgaccttgaagaggctccatcccttttttctcttgtctctttgccactgcaccacagtagcaggtgttctcctttgctgcatctgtgtgaatctggctcaacaagggccggctctgttgcactgggttgatctttacctttgccttttttacatagtctttacattcaacatgaaagttcaccttttcattatgatacatgttggtcttcaacatgatttgtgtgcttgaagtgggtttacttgctttttggaacagtctgacaagggactcagctgc

SEQ ID NO: 140024 - DNA, 556 bp, Homo Sapiens
tgccttctctgaatagattttattgtgttttgctgatctgaatttggaaatttataaacattttacatgattataaaattaaatcaaaattttaagaggtaattctaaaaaacaacatatcaaaagcaaaatgaaacaaatgatccaagttgatgatctaaagttgatgatctaaagagagaaaatctgaatttaatcaagcttctagatctaactaccaactcacaggaaataagaggacactggaacatgtgaaacaatactacataattcagactacaggaaattctagaagacaatctatttagtacaacaaattacaaggaatttaataaagaagaggtaaaagagaacctataaagggtacttaagttatcaaacattacagtacatgaattgaatcagattcaaataatctgtaaaaaaattaggagccaatctagaaaatctgaacaccgggtatatgaggataaaagaattactggtaatttgtttagctgtgataataatttttttaaaaagagaatatttacatttcagaaatatgtgtgtctgt

SEQ ID NO: 140025 - DNA, 406 bp, Homo Sapiens
tttagattgaaatagaattttaatactcatgagagagccaagtgtttccaacccagtgtcgcttaaacagccttggccatcgcaggtctattcacatggattctgaatgacgatcagaagatattccttatctatggagagatggataaaatcaattcacccttaatttaaatttaatcaaggaatatttcaactagtcttcttttttcttcaaaacatcacagggaccttgtgcagacagatggtttcccaccctatctgcacgtatgaattacctgttcagtctttagaaaatacccatttcctagggcctcagagattctgatttcattggtttggggtgcagtcccaggaatggaaaaaattttaaaatgtcctccaagtgattggatgtgtagccagggtg

SEQ ID NO: 140026 - DNA, 1088 bp, Homo Sapiens
  misc_feature (361)..(379): n is a, c, g, or t
  misc_feature (425)..(482): n is a, c, g, or t
agttgaagtctatctttttaatattcagtaacagctcctcagaaagagttacagactaggtggtccacggtagtgagagcctttgaggtaagggaagactagccctagttgctaactaccatttaaccctattgccccagggtacacagcactgtaggtcatctttaatggctatattgggcttggcctgagaccagtattctgctcagggtctgcccaaatgcttttcgggcagtgcagctgaggcctaggtctaattaagagtttggtgttgggatccagttctactagccctagagaattaacctttcagccagttgcccatctataaaatacctatccttgggcagtattggattcnnnnnnnnnnnnnnnnnnngtattttcagtagagatggagtttcaccatgttggcaaagatggtnnnnnnnnnnnnnnnnnnnnnnnnnnnnnnnnnnnnnnnnnnnnnnnnnnnnnnnnnnatattggattttatgttagcaccagcctgtcctttattgatcataccatttacctggactcttttcttcaggaacacaatctaagtaatcctaaaccagttttgacacaaaccattgcctttaacaacccattcatagtgaggggatttagtgtagtttcaatgtcaccatccaagatcccaccccagtaccactaatgagaaatttcagggatggagattctgacacagctagggttcacaatatacctttacatcctaaagttacaaatgaaatccaagtgtataaagttaataccagtgatcactcactccccatcatttctcagagaatccaagcagctataaaagcatcattagtaataattttaaaaaaagccaccagaaaggcagttttagaaagataaggggaaataggaaaccaagtatgttcaagaaaaccccactcttgggcactgtgaaatgccccttgcctgagtaaagatgtggattaacttctctccccttttcttagattaatgcaaaagccgagcatggtggtaacaagcctgtggtctcaattagctgggagactgaggtggaaggatcacttgggcccaggagggtt

SEQ ID NO: 140027 - DNA, 1037 bp, Homo Sapiens
  misc_feature (81)..(81): n is a, c, g, or t
  misc_feature (669)..(669): n is a, c, g, or t
  misc_feature (791)..(821): n is a, c, g, or t
  misc_feature (879)..(915): n is a, c, g, or t
cggcacgaggagcaaactgctcccagatgtcctttctccctggtcagttggttccattaacgtttgctacttagtgatttntgtttttcctgttgatattttgagcaaaacaatcattgttttcattgaatatatttggccattttttcagacaaatagaattagcttatttcttcaacattccatcctttcccgatcaggaaatgaaactgatgattttataaggtatttttcacccctccatgaagtgaggtggaggcctttagcatttcagaagtgtgggccacatgtagttcatgccataaaaagtaggatttaattaaaagtcattgcagcccaataaaatggagcctggctgcacccagggatccttgccactgctcttcccttgctgtcagattaatccactgaagtccaactttggttcaagcagagtatttgcaaagagcaacaactgaatgtgatgggactgcttatgtagattttgccagccaaatgccaaggcagttgtagggcctgtacaaataaatgcaaaatcatttcaagtcaattgccattatttgtattgaagtatcagatagatagtaaatactgcaactagtagcttgatgtgctatagttttcactccagtcatcattttcctatctcaccccccgaaacaccacccntaaagttggatttttacatataaataaaaaaagaatcccttttatttttctctctctcagaagacttgctctggggttttgcttggaggagctgatcatatcctgcatgtcagagatttcannnnnnnnnnnnnnnnnnnnnnnnnnnnnnnatgactttatttacatttgaactgcctctttttgctagtgttgtaatgatgatgatgnnnnnnnnnnnnnnnnnnnnnnnnnnnnnnnnnnnnnggtcagctgttcccagattagtaagttatgtataatttattttatttctccctttctattttattctgctctgatttggaagtgcagccaataagctgttagatatttaaaacaaatttcca

SEQ ID NO: 140028 - DNA, 1192 bp, Homo Sapiens
tttttgttaaagaagcctggtttatcaggtagcatcccacacgattccacaaggcactcggtcacatggttaactagtttttccagatgtatttttgaccactttccggaaagactgatttgcagtggatcttgtagaaagcgttcaaggggaagcacgaacaaaaccagatggtggattcttagggattttctttactaaatgagttacccattttttttgttcatcctgagaacatgctaacagcagcatatctcttgctgatgttacatcataacttactttacatggacaaattaagtcctctttcttatctaagtgatctctgtggcacttaacatggcgtctttgacactctagggcagggggtggcttaaaaacatgccagagaggtttggcacaggcatcacaattggcaggaaagtggtagagtgtaggaataaactcatgggctttgtgattttggaaattagttttttcagcttcttgtactggtttcatctctacatcttttctacattcaccttcatttgcatatagtatctggaatattttaggaatttcttcagtttcagctctatacacatctccttgggttacaggtctaacgtgaaacagtttatctatgtccaataccatagatggattggattgctccttatcttgttcgtcattatagaacaaaatttttttgctgcttaccacaacatactgtttcttccagccatatcgtttgatatttcctctatttggtactgaaagccaaccttcaattcttgactctgggaggttaccatcagtttcatcagcactaggaaaactagcaacacttgtagaatccgagaggtccaaaagtttagcacgcaattgctcaatatcactctctttgctggccaactgcatctgaagctcattcctatgtgcacattcttctaccaattgcgcttgcatgtcattcagttccttctgatgtttcactaccatctggttgaatttctctctttcttggttgagttccagttgcagctttcgattttccttttctttctttctcaaatcttgtgtattagctttctttctatcaattttaaaatcttttcgattcattatttctgccaatttgttaacagcctgtgttttaagggttctttcagtgttgatattcttttcaaaggcagccttaagatttgag

SEQ ID NO: 140029 - DNA, 549 bp, Homo Sapiens
  misc_feature (105)..(114): n is a, c, g, or t
  misc_feature (388)..(404): n is a, c, g, or t
catttttctctaattagtctatgcatttctctctctcaaaccatcttctgcctcttcccttgagaaaacgggcatctcacgtacccccatctgagacctcttggnnnnnnnnnntcccgtgtattctggagatgtgagaattcacccaaaattcttaaaacattggagaatagcttgttataaaataaaagtgggggtaaaaagaaggtggttttccccacatccctttgcattgaataagagacctagttctttgcgtttgtgcaataactctttgctgcttgccttgagagcgggtagcaccacgctcctgtccagactactaacagcacaagacgcactcacagggtggcggaatcttccggaaaactctctataagctcagctnnnnnnnnnnnnnnnnnactctagcgttttgtcacgtcttacattttagcagtattttatattttctgtaacgcaccaagtcttagatctttctagagcttgtttgttcatcctcacaatcacagatttttttctccaatcctcacagagacccaattgacc

SEQ ID NO: 140030 - DNA, 613 bp, Homo Sapiens
tttttatttgttaatggaatgcacaaaaagtgctattttaatagagagacacaaaatattacatattcatgggacttagggacaaaactatgccttggaaattttctggaaaatcacataagctccaaagaagttgatacaaaggcagctaaagatcttggtttgatagtggcaattctaccaatacaaatacaaaggaatcaacaaatggacaactctttagattacagttatgacacaagcaatccacaggcattccagtgaaaactgcacagagctctctctgttgttacttgcaaaaggctagcatggaaatatcttgtgttcatgtgaagagttggcccatatttccttgcgtgttatcacaagcaggctaaggggcctccagtccttatgacataattagaggagagctgggaggaatttccagacaacagccaccttcaccagccagcccttttgtctgatggtccacacaaaactcattgtatgagtcagcaggatctagaaggttcacttcctccacagtggccgacagtttagatgaatccttctattatgtttctgaacccagacccagccaggacttgtctctattcattttctgggctgt

SEQ ID NO: 140031 - DNA, 529 bp, Homo Sapiens
ataggtttttctagtttttatttttcatctgaatggagactttatttgggaaagtgttttaattgttaaaactgatatttagtttgagaatgactttgtttacttttgtttagactactaaaatgtgacttacatgttttgattggactagtctgcaattttctcatcatagcatgagttggcagagaatatctacttccagcagtacatttaaagtttggtttataggaattaatttgagaatcaaaatgtaggaattttaaaataatttgctcactaaaaaaattaagatgttaaataatgggttattctttgtacttatctctgtcagaaactcttgctttactctttgttctcccagcagtttttggtttaatttctaatgtgtctaatttgtgtaggcgtcgaccagaagattatgatattcataacagcagaaagaaaccaaggattgactatccccctgagtttcaccagagaccaggttaatattttataatcctgcagatatttgatttcaaatattgga

SEQ ID NO: 140032 - DNA, 573 bp, Homo Sapiens
ttttttttgcaaagttaacatttttattgaactgaaattggtgtagaacaggggcaaccacagctgctgagctctgtaacaactgaaaagcccctgtgacattttacctttgagagtcctaacacggtttgagtggaacagctgagaaacagcatatatatattttaacacctcaaaatagtttgaaatgagcctcacagccttgttcaatcttcagattacaaataacattgatagcatctcctgtggccttcagttagtagtgccagttaatattgtttctgaaaactttcctctcaaagtgctggctataattttttctccatccagtacacataagaaaaggatttagtaacacttgggcaagtaataaactgtagaactttaaaagtagtaaaggcatataccaagcatacgtgactccacacattgtcagaaaggcagtggactggctaacgagtttctgccaagtttcagaagcaaagaatgcactaatgaaaagggtaaggcatccaagcagagtgtctgaattgatggaccacttttgtctaaaactaatttcaaccctcgtgc

SEQ ID NO: 140033 - DNA, 1894 bp, Homo Sapiens
gtgagaggtgccaagggggctattattgttgggggttgcgagggaaaagagttccggcctcgcgggggggttagccccctaatttgtttcctgtccttagacgcttccataaagaaatgcgtggggacccaccaggggaccttggcccacccatggccccaggtgaaattttttggtagtgtttaggaggagaagggggttttccccggggttaaagccaggagggttttggattttcaagaccgtgggggtgcgcgcccgccctcgggtttgttcaaaggtggggggaattacaggggcgtgagcccaccggggcccaagcaagtttttccaaagttttaaggggttaaagccctcaaacttttcaggcttaaaatcaattcctaatgtgggatatgttctccaagtatgcctaccaaagccatacaagaataaagtgagcagcagcagcagctagggtcgggcagatttctgaagcatgattgttcaaaggcgggctgtgccccatcatcctgagccatcggccttgccaggggcctgtggagccccagagggcaggacgggggctctcacaccatagcctcgggaagtacctgggagcttaccaacccacaactcctaaagtaacatgcaaccagttctggtctgtggtttgaaaaagttaaacgcaaagaagctgtagcttttcttgccacaatcactcaataggcatacaacactatattactggcataacatgaaaataaattaacccttaagcactacacctaactctaaaaagaaaatgcctttcaaaaacaggtatgctcaaataaggtattctgagagttgcacaagaacagtcttggaatgagccagtgcccccggagagtcaacatttgaacaaaatagcacagttcaaacccttcttctgtggtacttatgtggattagtacaattatgacatcactactttcaaaggaatgattaaaactattattaaaaacttttgtcacaaacagaaatgccctgcaaatcatattattgcacacagggttatcagaagctatgcacatcaagaccttgaggcccctagaagacccaaaatagagaccctaaggccatgcccgtggctgctcctgccagcatgcccagtgccaggtcgctgtcgttgtctcgatagcgctctcgaatgatgacttggttagcaggctgctgtccataaagtcctgcatatgggtactggtagggcacggcatacgcctgcccattcgcagcgtagacaacttgagttcctggcgggtacgcaccaccgtatggcccatagccataagcctgctcaggggccggtgcagcataggccgtgtatggtggaggtgaggaaaccacggatgtctcatcggtcatgactgcagagcccacatacgctgtgtttgtcctagaatcttggagtgtaaatttccaggccaagcaatcatctgtgctttctgcacaaagactaattgttttcccatctcgacaaacaatctggagcatgcagtcttttgactttccatccgggggctgagtatcccgacattcctgccccgtgcggatgttgatgcagtccattggcatgtggaccttatcctcgatattctgccgagtctggtcatcataatagatcaggtgaccatccgaccacagatcaaaccagttcttcttccagcgcttcaaaatagtactctgtcgcagcaaccagccactcttcacaaacgccatctcttcacctgcgaaccagcgtggagaacaccaagacgccacggcgattcctcgcctgctcgcctgcaactgaccgcacgtccggcgtcctggccgccgttctccccggccgtaatggccgaattcccgggcatatgtccggtaccgtcgactg

SEQ ID NO: 140034 - DNA, 471 bp, Homo Sapiens
ttcctcttacacaactagaattaatgtatttttcaccagttttccatataccttaggtcttgatcgtttgtccttaaaaaggggatcagcatgagtatagacagtagaaatgtatgggtagtctaaccacttttatcagagacagagcagggctgtggtctcactctagctgagcagagtattaacttggtagcaagagttcctgatacaaatagatgcaatgactgtaaatggtgtcagcagtacacatggataatcagtatttgactgtaatagtatagtagttaaatacagcacttaaaaataccacagacacagttaaagcaaaaggaaacaataaaaggaatgtctgcatgctattttaatctcacattctttatctgtcttaaagtggaaatccatttgcctataaatacctgtaaacgactttaaaaaataaatgattattgctttgtgacaattgaaaaaaaa

SEQ ID NO: 140035 - DNA, 772 bp, Homo Sapiens
  misc_feature (416)..(645): n is a, c, g, or t
aacatttagtcctttttccatattggcttcttcagtgaatttttaagttcaatttgtttttattgaggtaaaatatttataacataaaactgaccagcttacccatttttaaatatgcaattcagtggattaagtacattctcattgttgtccagccatcaccatcatccatctccagaagttttccatcttcccaaattctgtgcccattgaacaataactccccacctccccttcccctagcaacagccatactttttgtctctatcatcaacttcactactcatatttctcatgtaagtggaatcatacagtatttgtccttttgtgactggtttcacttagcataaagtctttaagatgcatccatgtttccagtgtttcggtttttttagaaaaactcatacgtgattgcnnnnnnnnnnnnnnnnnnnnnnnnnnnnnnnnnnnnnnnnnnnnnnnnnnnnnnnnnnnnnnnnnnnnnnnnnnnnnnnnnnnnnnnnnnnnnnnnnnnnnnnnnnnnnnnnnnnnnnnnnnnnnnnnnnnnnnnnnnnnnnnnnnnnnnnnnnnnnnnnnnnnnnnnnnnnnnnnnnnnnnnnnnnnnnnnnnnnnnnnnnnnnnnnnnnnnnnnnnnnnnnnnnnnnncgaagatttggggcactggaccccaccctggggaaaaaggggtgaaactctggtctcggaaaaaacacagaagaacaaaacgtaggtggattgcgcaattgtggtccctctaataatttccgggggg

SEQ ID NO: 140036 - DNA, 664 bp, Homo Sapiens
aatcttattccagaatcagtggtttatattgggttactgtttaacaccaaatggaattggcattctgcagatttaattaattatgaaaccagggtctcattttccttgctgatacttgttgaaaatgagattcacattctagtctttattttcctcctgttttgtccctgtgcttgtacatcttccttttatttgtgtgttatagttctattccatttgagaaggcagttggtaagaactagattgcatgtacaaagacaggtttactaagtgctgtacagtggtcctgaggttacagttgaattagaaaaacgaaatgtacttacaggaaataagaaagcaaacctttcaaatgagagtgatgatttctttaaaaaaaatcagtttttttctctcaaataatgttctttatttcacgaaatcatcaatcttaagcatgagcagggataaacaactcctagaaggaactcaattcattcttcctggattttctctgttgttaaatcacaaaaatgatagtccccaatcgtttctttataggaggttattacatttcattacagtcactgcattttgactgttgtgtttagaatttgaatgtacatccaaaatgatgagtttcaatttaagagccttaataaaatgtgtgagtgtgtctcaattg

SEQ ID NO: 140037 - DNA, 570 bp, Homo Sapiens
ttttttaaagaattatgggtcatattatgttgcctagctggtctagaaatcctggcatgaaatgatcctcatacctcaagacttctgagtagccagtgattacaggcacgagccactactttaattaactttaaatgcttaatccaatacctccttttcacttcactacaaggaagcaatgacatcttgtatgtttacgttttaaataagctctcaatcagctttgtaaggtaaactcccatttacctagaggttaaggaataggtattttccttaacctgaaggttaaggttctggttaactgagattactacatattcacaattctataaaactgtgtactggaaatcaatttaggtatcaatgctgaagtcagaaaatgatttgtaccttgatgaattttccaacgttttaaaatcatgttacttttcaaaagtgtaaggaaaaatctgtaggagattcattccatgacattgtctgttggttgctttttgagtatattttctcatggcttcatctgtcttgcactgtaaactcctgcttatctagacttcagactacccctcgtgc

SEQ ID NO: 140038 - DNA, 1256 bp, Homo Sapiens
  misc_feature (1050)..(1082): n is a, c, g, or t
tgaacaaaaatgttaaggtttatgactatgcattgtatagaattacctaatatttttatatctgaagtagaccttttgtaagtacagtacctacatgtttttttcatacattcatacttgccttcgcagtttcacatctgtataaatcttatgatcgttctctaataagtacacaagattaacactacttatgaaatatggacaaatatattactactcattataacccatccagattattagtttaactcattcaattactacaaagatccttacagagctgaatttaatatacaatagaacatcactgccctctgatggtatcactaatatataattttaaattcagcaaacaaaaaatcctttatcataaagtaaaacagggtatgttaattttataagctacataaataaaaataaattggacaaacaattttacatctgcctaagaatactcattactaagttataaacaatttacagtgctccttcacatcagcccttcacatgattttttcaagattctccctgatgatcagtttaaaggcactaagtccataagtttaatcaaacatcttcatagtgaaataaaaacagatgtaacgcgatgcagcacaaatataagtagttagatcatttttataaaggatgaaaagacaactgcgaattttaatcttagaggtatatgcagaatgtttacatgcagtgtatgtatattcactatttagttccattttttaactactaagaaaaatagcaaatcacccactaactgcagaagagcaaatgtaggaaaatcagtatttaatgaaaagtctagccattctctaagcttgaaaatcaacgtttttttagcattgcacttaagggcaataatattacaaagtctgaatcttcatttactcaaagagaagaaattaaattgatgaagcccacttgattgcagataataaacagttattggcagtagattcttctactcatgttatgctttatgaaactgtccacctaagtccaccttctggtgggggcccggatgtagcaatttgnnnnnnnnnnnnnnnnnnnnnnnnnnnnnnnnnttgcacagattgaacatctaaaattccccgagatgcagcctctttttgtcttctctctgcagcctctgcaagctttgctcttttctcttccaggtccggcgtgggaggcgcggactccccgggacaaggaaaacacagccccatagggacgacagcttgagaaccctgaccggg

SEQ ID NO: 140039 - DNA, 613 bp, Homo Sapiens
ttttttagttttgcaaatatttatttatttattttgcaggaatttgctataagcaaaaacatccaattgggtgatgagaagggcttaaaattcccctctgtttgggactggtctctccagtttacagcaaaggatcgcacccttttccataaccccttctacattggaaagagcacaccttgtatacagaatggctccgtgaagtcttttaaacggacaaaggtaaatcacagctaacaaaacgtgatgttggctcacacgtaaccaaacacctctttttcagaacagagagcgttaaaagtaaaggcacttccaagagtaacactgctaatgcgggtttctgaggggtcattccctttttaactcaaatgactgtatcccaactttcttcctggtgtctgaggcccacaaagtctcagtacctgagagtgggcagattgcagctttgagcctgcaagcctgatttactaaagccccatttatccatttcttgatgattcaagccgccactgtggcagggaatgccgcctggctgtgatgtagtcatggcctcctgactgctatattcttgtcctaataacattcattgtttgcccctcgtgccgaattcttg

SEQ ID NO: 140040 - DNA, 450 bp, Homo Sapiens
ccgtattcatttttttatttaacttggggatggaatggggatagcatacattttatttgtacaatatttaacaatcacttatccaaggtggggttttatggggattttaagctttctgttaaatacttgcagaaaaaatagcaagtacgatttgacagtagtacaataacctgtgcccaaaacacaagaaatacagagtaaagcgaaaataactgcttaccaatattctgagaggtaacaaatgggatatgggttgagactgcataaaaaacgtactgctggttgaatatctgaggtaaatgatgttcaatcaagatgctacttgtatcattttgcccataaatggataaataattttatgcatatcataccaaatgttcctaaaaagtaatctttcaaaaaagtataaaagagaaactggaaagtatctgtgatgaagcttctttcttt

SEQ ID NO: 140041 - DNA, 643 bp, Homo Sapiens
tttatggaagtaaaggtctttcagtttattgcttaagaaacaacagattaaagaaaacttttagttttagtctctgatgttacagattcagatgattcctataggttatttaaagaattcattttatcattttataagcaccctaaatttataaagctaaccacaaaagttgcctgtacattttttctatacctagtttcttgcaaattctacaatctgacttaagggataattaacggggaatacagtgtattactagacatgaaagtagtcctatccttagaaagctgtagttgaatataccaaaataagtcagttgaagaaatctgtgattctagtagtaataccatatcacttaggaccatcagaaaaatgtgtacctttctccaaacgacaactgatgcctttctttatgtaagcttttcacgtgttttggcacatattccattgcatttcaataaaaatgttaatgcattatcagtaaataaaagaattctatataaaactattctcagtttcataattgcttcctatatatttccttggaaaatagtgaaattacatatgacaaggcaaccagccaaatttaaagagattttgtagataaaattcatttatgaccattaagttttggctggggggc

SEQ ID NO: 140042 - DNA, 548 bp, Homo Sapiens
gctcttgaaatgtttcctttttcacactgtttatccttttcaggcaggatctgctgtgttcatcgacacttgcatttcgtcttagtctttctttacttctgaaatgatttttaattctaattctttcctgagttctgtcaccttatttctgatttttaaaaagttgatttacactattctctcttgttttgtattgttagaatgtcacctggcttgatttgaaatagcaggttacagcttggctcggttatgtgggcatgtctttctaatgtgctctcattgtccgcagggaggttattttgcatattcttgtttcttatataacaactgtatgcaatttcacttcaaatacttttctgttatttttaggtgagatgagttttcctgataagaaaggctcaggaaagtctaagctcagaactctcccttgtttctgtgtggtgttaaaaaacgtgggagatggctttcaggagttcctgtctttgttcctcttccccacattggtctacatctcatccttcctttcctgtgtccctatccagctcaac

SEQ ID NO: 140043 - DNA, 476 bp, Homo Sapiens
ttttttttgtattaagaaagcagtttatttcttaataactgaatgtatattattttacatataattaatgatcagagagaaataacagttgctgagaacgtaaatttatgttgtactttagaattgaacagatacaaccacagattcataccaaatgcattacttttagattattaacatattcttttacataatttcatttcacatatatggagtccaaccaagatacatctggcatagtaagttttcatcagtagcttcttgtataaggtaatgcacatgtccttcaatagataacggcagtcctgtcactctatttcgagtcttgattacaccttgtagtcgctgctcaatgtcaagaacatgggtcttggcctaaaaagaagaaacataaaaccaaaaacagatgttaataatttggaattactacctttctttatattttgacatttaataaatgttaataccattttaaa

SEQ ID NO: 140044 - DNA, 309 bp, Homo Sapiens
  misc_feature (153)..(167): n is a, c, g, or t
ttttttgcttctggaagctttgttctttaatgagccatggggtgatttgttcatcaagctgcttttgtgtagccatacagtgcatattttgagtgacacaaactgcactttatacagatggtatcttgttacccctcaaccccccagcaaagnnnnnnnnnnnnnnnggaaattacaaagtgcctattgattgcatccggaatgtaatcagttccgtgggtgagataaatcattcttcttatagaattattctattaaacagtaaaatgttatatttcacaggatatgtccttttataatacagttttt

SEQ ID NO: 140045 - DNA, 736 bp, Homo Sapiens
  misc_feature (131)..(143): n is a, c, g, or t
cttttgaaagtctaaaagtaatccaaatgcccatctcctaacccactgaatacttaccattaataatgatttacttataaaggtcttctgtaaagggaacaagggcttagtatgtggaatggcagcttgannnnnnnnnnnnngacatctgttaaaaatgagctatgatatcatcaatcatattaactctgtggtattgtgttattccttgggtgttctgatttcatatgacagctttttctaggattcaaaccataaacatttcctctagagactgtaatgagaggtacaattatcaacccaggggactgtacatgataaaaaatatatatataccattttgcactctcttccctaacccacaaaattaactctttaccataattttctacaaatagaagaacaagtagaaccactagaagctgaaaaatctaaaggtttaattgccaagaacaatttggaacgatagaaattttttctaaatgtatataaagcatgtaagaaaatgtgtattatagatttgagcggaatataccaatctgtaaagtagtaaccaaaactgataaacatggaaattctatcactttatttaagaataatgaagtattttattgtcaaattctagtagtattctatttatacaaaaaggaacatagaaaataattttgtttacaaaggtggcattgataggaaaatagcagagtatttcctcatatctaaattatatatatttctt

SEQ ID NO: 140046 - DNA, 497 bp, Homo Sapiens
tttacttttttcaatttttattatggaaaatttcaaacatatacaaaagtatagagaatagtataatgaactctcaaacatccatcacacagcttcagcaattaccaatttatggccaatcttgtttcatctatgtactcaattaccccacactcagatgattttgaagcgaataccagtaacatatcatttcacctgtacatttttcagtatacttctctaaaagataatcattttttaaaacaacataaccacagtaccatatcacatcttaaaaaacaataaatcaagaagttatatttttatttcaaattatgtaacaactggggacacaatcaatacatttcactggtatcatgaggaagagtgtcacactaaaatggagtccaagcttttatcgatgcaattgctttataatataaaagaaaaaatcaaacaaactagcatattagaacacttttggtaatttgtaaggagctgaagactgctgatatcac

SEQ ID NO: 140047 - DNA, 723 bp, Homo Sapiens
ataattttttaaaatttatttttatactcagaatttaaagataagatctaaacttcctgataggttttttcatatttgtttgccagaatggtagctgagtggaggttgtctcgaggtgttgaagaacagacacaagctttctttgaaggctttaatgaaattcttccccagcaatatttgcaatactttgatgcaaaggaattagaggtccttttatgtggaatgcaagagattgatttgaatgactggcaaagacatgccatctaccgtcattatgcaaggaccagcaaacaaatcatgtggttttggcagtttgttaaagaaattgataatgagaagagaatgagacttctgcagtttgttactggaacctgccgattgccagtaggaggatttgctgatctcatggggagcaatggaccacagaaattctgcattgaaaaagttgggaaagaaaattggctacccagaagtcatacctgttttaatcgcctggacctgccaccatacaagagctatgagcaactgaaggaaaagctgttgtttgccatagaagaaacagaaggatttggacaagagtaacttctgagaacttgcaccatgaatgggcaagaacttatttgcaatgtttgtccttctctgcctgttgcacatcttgtaaaattggacaatggctctttagagagttatctgagtgtaagtaaattaatgttctcatttaaa

SEQ ID NO: 140048 - DNA, 543 bp, Homo Sapiens
caaactcaaaaattttgggcaggaattagcacaagttcagcacagcattgggcagctttgcaataccaaggatcttcttttaggaaaacttgatattatttcaccccagctgtcttctgcatcattgcttactccccagtctgcagagtgtcttagagcaagtaagtctgaagtattgagtgaatcttctgaattgcttcagcaagagttagaagagctaagaaaatcactacaggaaaaagatgcaacaattagaactctccaggaaaaataaaccacagattgtctgattcgattgctgccacctcagagctagaaagaaaagaacacgaacaaaccgattcagaaatcaagcagctaaaggagaaacaagatgttttgcaaaagttacttaaggaaaaagacctcttaatcaaagccaaaagtgatcaactactttcttccaatgaaaatttcactaacaaagtaaatgaaaacgaacttttgaggcaggcagtaacaaacctgaaggagagaatattaattctagagatggacattggc

SEQ ID NO: 140049 - DNA, 646 bp, Homo Sapiens
  misc_feature (485)..(519): n is a, c, g, or t
  misc_feature (591)..(591): n is a, c, g, or t
tagtaccacgttggaaatcagattgcttttatttatttatttgatagttaatgatagggagaggggtgatagaacaaatgggtattatcttttcttctttcctataattaattaaaatgaaattatggacctgtacaatttcaatagatatggatggataggataatattattaataatagtttttccaacttaagaccagttttttcaactcactggtgccctaacgtttctgattttgctatcaatcgtgaagaggagtttttaaattatatggttaaagagagaatgacttttgctgaagcatcttattttaaacaaagtaatattgagcttattgataaaataaaggtcagcccaagagtgtgtgggaataaggtacattttgaaagaaaagagaatgaggctttaaaaaaagttgttttctttctttttgttacagctaaaaatttccaatcaccattcacttcaaatataccaccttgnnnnnnnnnnnnnnnnnnnnnnnnnnnnnnnnnnnatatgaatattctcaataaataattttcgtgtaagcatttattattttgagcattacagtttggaccccaanatggagtactgtgaattttttgagagatgctagaagaacagaagaaacagtaaac

SEQ ID NO: 140050 - DNA, 577 bp, Homo Sapiens
  misc_feature (480)..(514): n is a, c, g, or t
cacgttggaaatcagattgcttttatttatttatttgatagttaatgatagggagaggggtgatagaacaaatgggtattatcttttcttctttcctataattaattaaaatgaaattatggacctgtacaatttcaatagatatggatggataggataatattattaataatagtttttccaacttaagaccagttttttcaactcactggtgccctaacgtttctgattttgctatcaatcgtgaagaggagtttttaaattatatggttaaagagagaatgacttttgctgaagcatcttattttaaacaaagtaatattgagcttattgataaaataaaggtcagcccaagagtgtgtgggaataaggtacattttgaaagaaaagagaatgaggctttaaaaaaagttgttttctttctttttgttacagctaaaaatttccaatcaccattcacttcaaatataccaccttggnnnnnnnnnnnnnnnnnnnnnnnnnnnnnnnnnnnatatgaatattctcaataaataattttcgtgtaagcatttattattttgagcattacagtttg

SEQ ID NO: 140051 - DNA, 585 bp, Homo Sapiens
  misc_feature (87)..(87): n is a, c, g, or t
gctcacgcagcagccagagcaactgcagaatttaattctttcagctcaacaggagcaaacagaacacattcagagcctcaatatgantgaaagccagatggggccctcacaaacagagccagtgcacgtgatcactctgtccaaggaaacactggaacatcttcatgcccatcaagagcaaacagaggagctccatttagctacaagtacttcagatccagctcagcacctgcagctgacacaggagcttggtccgccaccacccactcacgacgtgccccagccaacgccacttggccaggagcagagctgacctgtaaacacgtttgactgcttgattgggctcttcttataagccagctctgactggattttgaacgcttgaaatcaggctctccacaccattgacttgcagatgcttctgtgagagctgtgatggctaactgatgtttataatgccctccatccaggtagcaagatgtgtgtatgtcttgtctaaggtactgatttgtattgagcatttcaatattattgaatggttttcattttaatctgcaatgtctcataaagactcgggtagttttt

SEQ ID NO: 140052 - DNA, 724 bp, Homo Sapiens
  misc_feature (65)..(115): n is a, c, g, or t
  misc_feature (665)..(676): n is a, c, g, or t
gatgtgctccgacggcccagcgttcgccgaacaggatgtgctgtggcaggggtcagagagagggnnnnnnnnnnnnnnnnnnnnnnnnnnnnnnnnnnnnnnnnnnnnnnnnnnnaaaaaaagtcacaaatcagtcagattcaaggatcaacctgtttaattgttcatattttattcctgtatcagtagattaagaaagtaaaattttcccaagcactgatttatagatcatgtttataagcagcatacaaaaagttaagtttcataaacaataacattcagtgatctacttaaatccaattgtaatccttactttaaactaagggcaataataatttaatacatagagtaaatacacacaaaacctgtgtattcagaactacaaacatggtttccatagccacgtatggttttagtcaaggacacatttccacaatgaacaagtacttacaaatatgttaataaaacactaacccaaatgcttaccctgccatcagctttttaaacaatgccattcctgctactgaaagcatttatttttagaagcttgaatctgctctgggaaaacgggttctcctaaaacttaacaggatgttataaatccgaaaagattttaaatcaaaaagccttccaacacagcattattcatgtgaaacttgctttcnnnnnnnnnnnngagacggagtctcgctctgtcgcccaggctggagtgagactccatctc

SEQ ID NO: 140053 - DNA, 551 bp, Homo Sapiens
  misc_feature (18)..(18): n is a, c, g, or t
  misc_feature (218)..(218): n is a, c, g, or t
gcacgaggtgttttgtgngacattccttcacagttggcatgactgtttgggggactgactaaatgctttatcacacatctgcatttacaaggtcttcactgttaatcacagaaaacatttttgttccttccagattgctcttgcttctgtagacaattatatgctaattattattcaacataacagtgagagcaaaagtgacaatactgcaaacacanaccgcaatttaaggagccaaaaagaaatatgctggcaagctaaatgcttacacacaaaaaagttagacttttaaagtgtgtgagaaactctgaaaaaaatatttcaagttcttcagtgctcttatgacattttagggggaaacagtggtttctttaaaataatattttaatcctcctatctcatactgtttataagtatgagatacttttgacaaaaggctacttaatgagtatctagatttatgtagagaaatctgaaagtaagacaaaactaactgaaagcatctttaagctgcctctgatgaaaagattgacttcaaacaaactggactg

SEQ ID NO: 140054 - DNA, 669 bp, Homo Sapiens
ttttgaacatcaaagatgtttgttattgcagccaggagacaatgccataaaatgctaacaaaaaaaagttatactgttttccttaaagtcagtaaattgcataaaagtactctgagcatttttggaagaaaggcaccagataagtccaaaatcttattgctactaggatcatacagggtcacagactatggcactctgttcagccaggagactaagtctcagcaagtcagtctctgaccttgaggcttaaagagcaaggaaggaaaatgtcaataaaacagagccctgtatcacagattaaactggagtgaaaatgatttccagttttatgtcaaagtagaagctggttcctaggacgctggcgctattttagatggacactctgttttctttggcccatttcttcatgatccggatcatgtattctacttgggtgttacctgtgcttctcagtaaatggagcacttctcgaagggtctctttgggttctctcccagctatgatcatctggaaaatgcccacacaggcaccccgtttgccttcccaatattcagggttaggatccagcctctcaaggacatcaaaagctttggcagaatagtaaaactggcccatcttgtagcagtcattagcaatgagctgtaagagactgaaggactcggccgagtt

SEQ ID NO: 140055 - DNA, 755 bp, Homo Sapiens
  misc_feature (70)..(78): n is a, c, g, or t
  misc_feature (533)..(533): n is a, c, g, or t
  misc_feature (616)..(616): n is a, c, g, or t
  misc_feature (669)..(669): n is a, c, g, or t
ttttgaagaaccagtttattaagagattacaccaaaagcataaacaatttatacgtcaaactccgactgnnnnnnnnntaaccgataaggatgttttttaaatgtactgtactcacaaataacaagacaaatttgacctgttcaataaatagaaatgaagtggctaaaaatgtttaaatggaaatggaaaacagtcgtcttctttgtacagttttgaaggggtgccccctattcacgcctacacgtagaaaaaccctgacaaaatcagaggttcacttaacactccaaccatatgagcgtattaaggtttcttttcagatcttaggagatcttgtccaccttaatcccattcacagatcttaggagatcttgtccaccttaatcccatcataaagactgttggcatgagttctgatgtactgttttaatatgctgagtactgttgattcaacaacaaaccttaatgggtgatgagcttttgcataccaatatgaatttgtcagcacttctgaaaactggccatcatttttcanattcacaatttgctggatgtcagggaacaataggaagaagaatgagcgtcaattttcatgtcttcctttgcttcttcactggncttccatagaagtagtcagaaaaaaacaaagcaccatcaaccacacttcacanacaattcatgttggcctaagctttgctcaacattcatatgacagaagatagaataatgaaaagggactgctggcatcactcctcgt

SEQ ID NO: 140056 - DNA, 575 bp, Homo Sapiens
  misc_feature (30)..(31): n is a, c, g, or t
atgaacaagagttaagtatctgttaacttnntaaagcttgatagagatataattaacacatactctggaaagtactctctttcactgtcaaaaaattgattgatcacagttttccaaaatatggttctggataagatcccttaggtttcccgaaatttcagcctggcttgttttgtaccacgcaggaggtcattttgggagtttgctctttggattgttcttggtagaagtctggaatctgaatagttcaaccacagttgcatggaacactttgagtgttcaactgcattatgtggtcttgataaatttttaaaaatcctattttgatagtttttaaaagtggaaaaccattacaagagttgagtggatagggaatgtaagaatgtagttttagaaaaattcaattatatttggttatcactggtattgtattgttattgagctaccttgttatcattttaagaaaaataagtttatatactgggaactatgttgggaaaatgttgccatagtaactttattttttataatagaattttctatttttgaccaaacataaaatatttggatatggg

SEQ ID NO: 140057 - DNA, 963 bp, Homo Sapiens
tttaattttaagaaatattcgctttattcgcctttaaatatgaaactttttgcacttaagttaaaatctctgctaaatccataggtctctcaagaactgacagatacattcatatacctactaaactactttaaaaagaagacacttccatggcgaattgaattagcccaaactttccccccaaatgggacaaggtattacattttggagtttttcttcgagtcacaaactaaactccagatctctctgtccaaaatttcatcgcttaaagaaaaaaagttctaattacaggagcggatactgagctgaagaacttcccaatttgagttggttattcctactaaacgcagccacacagctgcaacaacagctgcagcaggaggacaacgggctacgttttttgcgcaaaccctcttgaatcgggcaagttgacgttagaaactaaaatagtcccggagtcagctctgcaggggtcgggtttcgcggacccggcagtcgcccaagctcaaggcgccagtgagcgaagcacatttccagagttccaagtttgggcacaggagcgaagttcgggtctgggccactccaagccatggcctcggatcccagaaccggggacctggctggcacacctgcccaggtgcgctaccggcgccaggagccccgccgccctccagctgcccccgcggagacgggtccccgggatgggtctcacgcgcccgaacgcgagcgccactcacccggcacagctacgagaatccgctaaaaaccaccgcttccggcctctgcttagcaagccggaaggaagcccggtcacctttcttggcccgcagagtgggtctgacttcacggaggggcgacagagagggaagtcgccagtgtggtcagcgggcgtggtattgaccaagtgcatgagaaggaagtgtaaagtgggcgacctagaatatagagcaatatataatgaaa

SEQ ID NO: 140058 - DNA, 711 bp, Homo Sapiens
  misc_feature (694)..(694): n is a, c, g, or t
gatgtttattattccatttattgataccaaaccagtcttacaataacatgctaagagaatgtacaacatcctatgtaggaaaagcagaaactgggggtgtgggggatgggcaatggggagtgctatctccctcaaccctcttcaccaagaaaaaagtttgcatcatcaggaaagcctcaaagccaaatattttaactgtactggtttatgatgattaaataatcgctagacataggaaatcacttcagggtacacagtttttgtaaaataaacattgagtagaatatcatttacctagtaatacttaatgaacattaactgttagtgatagaattaagaatttttactcaatgtaaattttcctagattgtttttctaagcccacctccaacatcaattacaaaaaataaaatcacttaaaaatccataaagctctaaaattaccgtttgtgtgcttcctgtttgctgcgacactcttcacagtaatacttgtattcactgcacagagtttctgtgttgctgaaaccccttaagcagtgagtaattgatgtattttgttccacgtcaacagaaaggtctaaaaaatcttcatctttgctgcttatagtttcacaagtaagacatctggtttcattagttaatgttccctgaaaaatctcatgaacccacgttgggtctggtgtgctgttattantttcattatcaatatta

SEQ ID NO: 140059 - DNA, 932 bp, Homo Sapiens
tctccttcttgcccgacttcttcttgttgccattgccacctgctggggccttgccatcccgcttgccagctgcgttggtcagtgtggcattgctgcctgggatgtagacattctggcggtagtcgggcacgtgctgcagggtgaactggggtccgtagcgggcgctcaatcccatggtgccggcaccccctcccagggtggagctcccatcagcagcttcactggcggacgccaagatcatggcttgcagcatctctgtgtcaaactggttgttgggccaggtgccggtgtcatcgccattttgggagccgctggtgccgggtctctgggcctgagagaaacgccagtccgtgttgggcggggttgctgtccgggagggcgctctctgcacccaacacctgcctatagaacaccggatcacagctccgcagcgtgttctggcggctggccagtggactggctgcaccaggtttcttcagcagcgggtcgctgcggcgggagtccgtggtgagatacacctgatggtaaaggtgcggcgacatcaggcctccccgcacggcgtccgcgtgcaaggagggccctggtgttcggtacagtgagctcaccggggctcggtataggtctctagactgcttccacttgtaaactttgaatatgattactccgaacactgtgaccacaaaccccacagaaaccaggattagagaaagaagtagataaaaggtgagattttttttctgctcccggggggcagagccagaggggaactcggctcgggcttcaggagagtcctcggttactgacacagtgagggtagcagtggtggagagcgaaggctccccattgtctttgatcaagaccgtgagagtctgcctgggtgaatctgtgtcttggactggacgggcagtactgatttgaccagtgtgcagccc

SEQ ID NO: 140060 - DNA, 430 bp, Homo Sapiens
ttttagtagaaacttgaaggttctttattgatttatttattaacccgttttccagaaggttgcttgggcccgagagtcacctgcagaggcgcaaagcctcctcgacattctttatggggctgagctcatcagccaggaccatcaggtcggtcaccagggtgtccagcagcccacggacctcactgtgcaggctctgggtgtatttccccatgaccagggggtctatgggttcttgagaagagaggatgatgtcaggggtagggtcttccaaagaaaacctgtcctgacttgcagattttatgactttcttgtcatcctttgccttgtgcttcttgctgttgggacggtcctctttcccgagcagcttggctcctttcttgtcttctttgtctttgatccccagttgcttcttttgctggggatcaaagac

SEQ ID NO: 140061 - DNA, 903 bp, Homo Sapiens
  misc_feature (780)..(814): n is a, c, g, or t
ggggaattccgccccttgttcctggtccggagtcccctctggacccggttggtggccacggtcgcggtacccttgaggggccagcggcgcccctcgcggttgggttgtctggaggacgtctttccggggggccggggcggcgccgacaccggtgtgtttgtggttggtgttgtgtggttgttttttggcctcttaaggcagttattagatgccctattatatgccatatctcagcttctctggacatagacctcactaactttgtatccctgccccgagggcctcatagccaggtctcctgagagcagagtgaagaggaagctcagtatttctcaggcaggccagcaggtcggaagtgattggggtctctgccactcctgccccatttattggcagcctgatcggccagcgagtcctccgcaccatggcctgtgagtctctggatattctctctggcattgctgatcacttctgcggcccaggcacccccaggtccccttttggcagcatcatagttcccccgagcatggaagtatttgtctgagccgatgtaattggcttctctcatgtcagagtaggctctccacatgtcccgagccccatcaaaagcctcgccaaggaacgaaaagaagcttcggctgctgacactcaggaccaaggagcagaaaaccaggcccgtgagaagcttcatggtgctgatctgtgctgtagctgagctgcgggtccctccccggccgtaatggccgaattcccgggcatatgtccggtaccgtcgactgnnnnnnnnnnnnnnnnnnnnnnnnnnnnnnnnnnncggccgcttcctcgctcactacttcgctgcgctcggtcgttcggctataggcagcgatgcgccatatgaggtcatatagtcttgggggg

SEQ ID NO: 140062 - DNA, 689 bp, Homo Sapiens
  misc_feature (577)..(611): n is a, c, g, or t
ccacaaattccacctcttaagtatttattagatacccattgtgtaccctctccccgctttgtatccctgccctgagggcctcacagccagatctcctgagagcagagtgaagaggaagctcagtatttctcaggcaggccagcaggtcggaagtgattggggtctttgccactcctgccccattcattggcagcctgatcggccagcgagtcctccgcaccatggccaaagaatctctggatattctctctggcatcgctgatcgcttctgcagcccagacacccccaggtccccttttggcagcatcatagttcccccgagcatggaagtatttgtctgagccgatgtaattggcttctctcatgtcagagtaggctctccacatgtcccgagccccatcaaaagcctcgccaaggaacgaaaagaagcttcggctgctgacacccaggaccaaggagcagaaaaccaggcccgtgagaagcttcatggtgctgatctgtgctgtagctgagctgcgggtccctccccggccgtaatggccgaattcccgggcatatgtccggtaccgtcgactgnnnnnnnnnnnnnnnnnnnnnnnnnnnnnnnnnnncggccgcttcctcgctcacagactcgctgcgctcgtcgttcgctctgagcgagcgccctatagtgaatctatacactt

SEQ ID NO: 140063 - DNA, 694 bp, Homo Sapiens
  misc_feature (72)..(86): n is a, c, g, or t
aatatatgatttttattgaacatgttcacctttacattattacaaacattttacaaataaaaagtttttgtnnnnnnnnnnnnnnnggaaacatttcctgaattatcactggatagttgaaacaaagaaataaaatatataaatatgaaggtcattctccaagtattagaacagaatacggatggaatcacttcagtaaagttattcataaacatttgcatggttacccacatactgtatcaccttccaaaaaatcaaacacatgagaggaaggggaacctcaaatgagatgtcttttctccatgggatttggtcaacgcatatcagtaagataatttctttgctatatacacaacataaacatttgaaaatgcagaatacattgtgtaaattaaaaattttgtcagctttgttgtatggggagtaactacacagaccacccacacaaacatttaaaatatactgtgtatatattatcttacaaaaatcgcatgtgtaagggaataaggcctttatttccagagcatcttaacataggattaatatgggtatattcatcttttatattttagacttcaaattctttaacatctcagctattaacattatgcgtagtacctaagacaacatatgagtagtggcataacacaatttcaactacagtgcttggttgcattcacatgacgtaccatct

SEQ ID NO: 140064 - DNA, 532 bp, Homo Sapiens
aaggctgcgttcatgtcgcttctcatttattaattcagtctgttctaagttgtgtacagttatgaaaataacaaaaccaaagctggaagcccagaaatatttacactctcttgggtactgaggtcagtctatgttgttgcacagattggttatgtttggtacctcaaagtgtttataattcagacaaaatcagacagattaacaattttatatacagtaaaacaaaagggaaagtcattcaagtatcaaaatacagagacaaagattaaataacattttcattacagttcagtccattgccacaccatgagcaacaatacttctgagctgctttctgctggcctgggcatctcaaagacagacccaattcagactggttttctaatgtctctgactgcagctctgcctgctccctgctcaaacccgagcatctcgggaactcccattagtgtctgacgctggagggcccaggagggacgcagagagctgcacacgcagagcctgtcgggaaggtcttatgcgctcctcgtgc

SEQ ID NO: 140065 - DNA, 1048 bp, Homo Sapiens
gtaatgtccaccttggggtcttctgtccacagcacgtggaggtccctggttctcggtcctatccagcatccaccaggcgtctgcttgccggtggatgccggcatggactctcttattcaacgtagctggaaaggacattcttagcatggggattagcccggacatgtaccatccacaggtatgcattcgaaatgggatatttacaagatacatgtatatataatattgtatatattccattcaaagtctggtcttacaagacttttagtcagtcactgaacttattgcagaatgaggtaactgagatgttcacagagtggattgatgtagctcaggtcctcagagtcaatccctcctgtctggattcatcagtcatggtttgatcgtctccattcgcagaataagctccagcttttctatatacagagagtcaaggtggcgccccacccagccctgccctgtggtcctgagtgcaccccgacttgggtcaggggtgcccagcttcacctcagaactggtcttcaacagaaagaactgaggacgtcccttatagattggtctcatcccaggcaggatcattcatgttcttcaggactttcctcaccagcttctccaggtctttgcgggctctctgttcttcctctagagatttcttcatctttttgttgtcctgtcttaattcttgaacttcatcctttaatgcatatacggtatccacaagactcttttcttctatcactgtctgaccattacttttagtttcttccactataattttctcttcttctggaagcaaaacttgtggagcagattctttgcgtgaacttgaattgagtgtttgccttgttttggcgctggtgcagtaagcttcaatgactttcagaatctgagcatcttcttccaaagcagctgtgcttttccgggacgcgaactcctcatctgaaggcttccgttcaggtttgcgcttgggcagcagctttttcatggtcttagggctcttactaagatcctcattgtagcagagagcagcttgagtgcggaggggagg

SEQ ID NO: 140066 - DNA, 682 bp, Homo Sapiens
ttttgtaaattgaatttatactttattaaaatcaaacaatacaagccttaaaatttgattcaataacattataaaactatgcatcctttatgaagtttcagttgatatctgattaaaaaacactttgtttcataagtgttcagtgatttatgaaacttttaaaacaaattaagatgggatttattacatcttatagccattattggacccattctacattttgaaagactaagagaatagggttagctatgggaaatgctggctcactggaagaatcctgcattttccaacttccccactcctagaagttttgctaacaggaattgcaactaggaatgcctcacctgaaaaactaatttcatacaactttcattaagtagtttgacaatctgtgacccacaaatacttccatagaatggtagaattatttataatcagaaatgatggtggggtataaagggaatcaagagaggagagaagagggctaatgttgtttcttcacctctccccatgagaaaaatcatgtgaaattgttgcaagacccatgaaaggaattcatatataatatttctgtactataaaataatatgattctatttgagaaaaatcatagtacctgagtgcaacagtattcactggcttattataatcaatttgcatgactaatatttctgtttgcctc

SEQ ID NO: 140067 - DNA, 661 bp, Homo Sapiens
cgagtctgtgagaagagttcttaatgagaactaaaaaggttatttctgttcttggtgtcccaaactgctctggtattttgccaaatactacagatagtaaaattcttaattaaagctgacatggttatatttttaaaaatttaggtgcaattagtctttcaagatcagaagatatttagttagtatcatagttcagtctgttccaagctgtaaagtcagttatttcagtaatgtaatttctaagatctataaaaaatgaaaatattttattttcttatataactttctgtgagagcattgaacagtcaagaaacttgtatgttttccagcccccattctgcttcaagttacatggtgtctagccttttcagctctagaaattctacattattatgtaatatcctgctttatgggtcttggtggtatatggtatagatcaactcaaaatttaaaattttcatcgtatgaatttttgtgtagagatttcaagatgagttgatctgagaacaaaaagaactccaaagaaatcttactattttcctgttggtatatattgttcaataaaacactatattggtatatattgttcaataaaacactatattggtatatattgttcaataaaataattatgtattacgaattaaattttcaacctaaa

SEQ ID NO: 140068 - DNA, 831 bp, Homo Sapiens
ggctatgcagctgattaaaagtgctcaggaacggatagatagcttgcgtcgaactggggtgatccatgaaaaacagacagctgtgtcagtagaaaacttcattgcagaattgctgcctgacaaatggtttgacattggttgtttggtggttgaagatcctgtccatggcattcatctagaaacatttacacaagccacaccagtgcctttggaatttgtacagcaggctcaaagtctaactccccaggactataatctgaggtggtcaggccttttggtgacagtgggtgaagtcctggaaaagagtttactgaatgtcagccggactgattggcacatggcatttactgggatgtcccgtcggcagatgatctacagtgcagccagagcgatagcgggcatgtataaacagcgcctgccacccaggacagtgtgagaggagacctacctgggagactgagactttcccccacttttagcttgatgttaaagaagtggttgtaccttcctaaatcgaatagtctaaatgaatccagtagtttttatcattttcctgtagcctgcaatttttctttctctagaaaggcatcatgtcattccaggagacaaaaagaaacaaatcctttttatagtcataccatttcacctatcatagtactcaaaaaagaaaatatacaaatctatttacagcacaatttaatataccagatttataaggtggaaattcatgtgcagagacatttaacttaatgccatgtacttgattattttgttctttaaagaagagattattaaagaacatgttggttgaatgtttataaaagcaaaaaa

SEQ ID NO: 140069 - DNA, 633 bp, Homo Sapiens
gtcctttttaacttttaaatacaaagtctgagctgtcccatgccccaagtcttcctgtccactaaggtccggcagagtctgaatcttcaatcagaacctctgtggtagcaccgagtatatctgagttcataaccagcccttcagtgcctccactgctgccgcttcccacaaagatcttcccatcagccatcaggctcacccgttccgtcccactgcagtatgactttgacatcccttcagcttctaacagtaggcactctccagaggttgagtttcccaagggctcaggaagaagaggaagaccctgaccatctgaaggctgcgtcagggactctgggttagtgcccaagatatctgtgctggtgatgagggcgcctgcatttgcagccagagcttctgcaatcagcacctcagggtggctttttgccttgtgttgcactacgctgtccttcttctcaaatttttttgcacagatattgcaagaaaactggtagaaggagtctgcatcatgtttcttcatgtgccaattaagagatgccttttgtcgacaagtaaatccacagatctcacattgtaatggcttctcgccagtgtgaatcatccggtgcactgccagattgtgggaactcttga

SEQ ID NO: 140070 - DNA, 172 bp, Homo Sapiens
gaacgaggttttccgagaaaaaccaatttaatgcttctgttctcagcatttcacagcatgcaggactcaaatggatacaacagaagaaaaaaacccacaatttttggaaaagcctttgtccaatgattaatattttgatatctattgacaatcccttagaactttaaatctc

SEQ ID NO: 140071 - DNA, 469 bp, Homo Sapiens
tttcctattaaggaattttattagattaataagaaaaatccttatacctattaatatagtcattttacaaggatatttttcaaatgtcatttgatattacttttgttaacactttcaatgacaattctgatgagctctaattttggatcttttatggttactgctttctgtgacctaagaaacctttggctaaccccccaagtcacaaaaatatcatctgttttcagttaaaaagcttcatacttttaaaatattacatttaggtctatgattcatctcaaagtcatttttgtgaggtagggggtcattgttcacttttttctatatggatattcagctattctattctggctccatttgttgaaaagactttccttctctgttgaattgttttgccacctttgtcgaaatcaagtgatcatataaacgttgatctgttttcaggctctctcttctgttcccctcgtgc

SEQ ID NO: 140072 - DNA, 807 bp, Homo Sapiens
  misc_feature (692)..(726): n is a, c, g, or t
  misc_feature (729)..(767): n is a, c, g, or t
ccttggtttttgtaaacaacatggagattttgttattataaatttcaaaacaaaatgaaggaatttccacatatttataaccttcaaagtacaatattaatacatgtctgtcagttagaaagaacagcagtttgttaggctacaaggtttaacataaaaccaatttacaaatgtgaaaagcagtagtggtccaatattcaccattacacatgaatctgtttcttccagaattttttaaaattaaaattttagtatcgtgaaatattaaaataacaccccaaacatgccacaatcactattcacaaataaagttaaaatgaaatatacaaaaatccacttaatactgttaaataacaacaataaactacaagatttcctgaacagaaatggtaggacccctgaatgttttacagtgaatttcacgaaaagaaattaagttatgactattttcatgatatataaggcaaaaatttacacgaccatttcaaaatataccaattaagatttatagtttgtaagatgcactaaacaaatagtccttaaaagtgaacaaaaatgcttaaaatactgttaccaacaccaaagtgtgtttatgatgttcaaagagatgcataattaaaactaatatttagtatctctggcccggccgtaatggccgaattcccgggcatatgtccggtaccgtcgactgnnnnnnnnnnnnnnnnnnnnnnnnnnnnnnnnnnncgnnnnnnnnnnnnnnnnnnnnnnnnnnnnnnnnnnnnnnnctgctgaacgagtagcgcctatagtgatctatacatcttt

SEQ ID NO: 140073 - DNA, 754 bp, Homo Sapiens
  misc_feature (543)..(543): n is a, c, g, or t
ttttcacagcagggaacatttattgagcactctctgtgtaccgtgcactgcaccagccaactcaggagcatcatctcatttcatcctcacgcaatctgtgaggcagggctgctgctaatcccatggcactggaggaaactgaagctcaaggtggtggatccactcccacctatgggaaaatccagagtcacacagctacaagaagagcccaaacctgcctggcttcaaaacaggtggtgagctccccattgctggaggtatccaagagtctgccgagggacttcaagtattcaggaagggggagaccccaagatcaatgccccgtggatagtctccatcttcaacagggtttctcaatattggtgctattgagattgtgaactggataattcattgctgtagagaagattgtcctgtgcattgtgggatgtggagcagcatccctggtctctgcccagcagacgctggtagcacctcctcaatcacggcaaccaaaaacatctcaagacatggccaaaggtccccctggggcaagggggacanaatcaccatatgagaagcactgttctacaagaatttttgaaaaagccagcagacatccatggagaccagcgttgacaatgcagggagaagttttacacccctgcggtaccttcttgggagacagttgtgcactgcagcagcccttatatcatggcagagatgctgcatatctgctcctctgtcagcatcccaaggaccaggagggatactc

SEQ ID NO: 140074 - DNA, 669 bp, Homo Sapiens
tttatgcttggctattctggttctttgcttcaggacaagctttggaacccagaaggttgtataactgggtgtctgacccagactttgcagctctctagagcaggacacccttccactggctttccccacccccacccaccatgtagaaaccccaatatagccactctttcactaaccctgagttgcgttgccccaagctggtcagatccgaagggactagtcccatggctgctggaatagtctcgtctcccttctggtaccagaacgtctccttattctatgctctgctgaagatctgaaggtccatggtgtgggctgagaaagcaacaattcagagcatcccgggaattcccccccaaccccactgctgagcaggccgtgcacccatgtgtcagcactcaacaatgaggcagctctcacgtgctggtgccagaaatgtctctggctgctggaaatgggtcccccagtagacctcaaatgtctacattttgtaagcaatagactgatcttggtgaatattattctaatttaaaatcagctggcgtttactgagaactgattcttcttagacactttgttacgtgctttacatgcattatcatattgattttcacaagcaccctatgtagtggatattactgttcttattttagaccagaggaaactgag

SEQ ID NO: 140075 - DNA, 350 bp, Homo Sapiens
aaaataaattgtgcattgtatttgtgaatttttaaaatattactgttttatttaaatgccatgctgagcaattgttctctgtacatggtaaccaaaacttagagatttcgatcaattttgatcaatgtttagtaaaccaaaacatgtactgtgtacaacggaaataatatggcatattagccaggcatgatggttgcccaagacagttaaattaagctcaattctgtattttattagggctctgttatgtccttcatctgaaatgtacacatttttggtgtatgcttggtactggagattcatatatgcaaatattctcatgcaagaagttccacagtaacaacagcaaa

SEQ ID NO: 140076 - DNA, 510 bp, Homo Sapiens
atggtaaacaaacactgatctccacagctcttaacaagaatgtttatagccccaaacctatgaatggacatgtaatcaacaaatgatcaaatactacatcatttgaggtgttgaattttccccttgagactcagttcttgtgcaggttgggcctgggaaagtcccaagccatcagctcaggtccagccagcctcccggatggccagatatgcaggagggtgggtttccttcatcccccaggttgatgaaagacttttccaccaggctggcagggcagggcctggagcactgaggcagagatctccctgcccgagcacctcggcccgcccttctcattccggtttcctttgacccattcttgggtgagcgccagtgttctagaaaggggagtaaaggccaggttctagaatggctttccccccccaccctgagatcaggtctggaatgttagaagggcatcttgtacatccactgggaataaattgccttgcacttggcggcttcctctgc

SEQ ID NO: 140077 - DNA, 449 bp, Homo Sapiens
gctatcaaaattgttttattatattgaattaccaatgacaataaattacaaaaaacaatgttttagacattgctgagtctaacaaaataggctgaagtttgatctttgtgaaaggacttgaaaccattgttttttcccacaaaaaatccccatcaccagcactgcattcgaattttcttgaaaattgtttcctgagtttattcatggtagtatgtgcttaaggacaacaggttgttagtctatttgagcaaacctgatgttttctctaagaaaaacaaattcaatatcctcccccttcaagaacaataaaaccccaaactgtgctatcattaaatactaccaaaaaccattaactagaaaaacacaatgcaaaatcattattcaagaacccattagaaaccacagtattctaaagtcttatagaaaagatgtgtttttactagttaagc

SEQ ID NO: 140078 - DNA, 972 bp, Homo Sapiens
  misc_feature (843)..(874): n is a, c, g, or t
tttttttgtgagagcagggtcactttattggtatagagactgcagagggaccgggggctttagctgttggcagctatggtgtccttaatccagtccacatagttgtagaccttggtgtagactccaggcctgttcttctgggcacagccatggccccaggagacaactccttggagctgtccattgcagaccacagggccaccagaatcaccctggcaggaatccttgcctccctcaaggaagcccacacagaacatgttgttggtaatctttccagggtaggaggcttcacactcagcctggctcagcacaggagcatccaggcactgcagctcgtctgggtagtcggcaccagagctcagagtgttgccccagccggagatgaggcactcagtgccagcagctggaggggcggtgggcagagagatggtggacacgcgggcattgatgacggcaggtgaggagagcttgatcagcatgatgtcattgtccagagtctccctgttgtatttggggtggcggatgatcttggccgcattgatgaactgctcattcccctccaggactttgatgttgtgctctcccagtctcacctggatgcgggtcttgtagcagtgagctgctgataccacccactgttcgctgatgagggagccaccgcagaagtggtagccagaattcagggacacctggtaggggagagaattctcctcacagttgtagcccccaacgatcttgtcatcatcgtcaaaggggacagcaactgtgcccagcgcctcgcagccgtctgcatcccgcgccgctcgccaagtgcgtccacccagaagcgggtgcagctccagnnnnnnnnnnnnnnnnnnnnnnnnnnnnnnnnccactctgccaggcctggcagccgccagaccctttccacacttgaccgcccttcccggtcccggccagcgtgcggggcatctgtcgtcaggtccgcac

SEQ ID NO: 140079 - DNA, 556 bp, Homo Sapiens
  misc_feature (119)..(131): n is a, c, g, or t
  misc_feature (142)..(142): n is a, c, g, or t
ttttaacatcccaaatgtgttttactgcagagaagctgtctcccgcgggcagcaagggcagttctgaagatccactgaggtacaggaggcttgtgaatggattgttaaaactctctctnnnnnnnnnnnnngctgcgcgtgncgcacacgttactgtttgcacagattcaggatccaaggatcagcaggtcgaagattggggcagcgggaaggccggctcgttcttgcggcccccgttcatgtgggcgtaaggctgtctctcgtctaagctggcgcggaggaccagcaccccagggccggggcggttctcggccttgttgtcctgagtgtctgtcgggcagtggcagggaggacgaggaggccgaggggtccagggggacgctctccatgttctctggctccaggtccagctcctccggctcgggcaggttgttctcctcgctgtagtagaaggagacgtccggaagccagggtccatctcctctttgatgctgctgatgatctcaggaagggaggcgcatcttggggttatctggcacacatgcgcatcgttcaa

SEQ ID NO: 140080 - DNA, 487 bp, Homo Sapiens
tttttttgatctttttgctgattttattatactatatagatttgtatttcttgtgatctgagaaacatcaaaattctattttaaatttgttcttaaaaatatacaatattgcactttaatttttggcagcttaacaggaatgaatgagtacaaaaaatcatacaagaaactagaatttttattttgcttcataataagagctttgtgaaaaacaaaacttacagtagtgccaaataaaccaaatatttacagtatagatattaaagtcttacctctaaaggaagattcagtgtattggatgtaaatattattaatataagaaaagtcacccccactgcccaattctgctgaacattttaagccaaagagtattggtgagaaatgcttctgtgatttctttctcaagacatacatggaagggatgcttgttcttggagcatctaaagtgggtcattaaacttttacaaaaatgtttcctccataactt

SEQ ID NO: 140081 - DNA, 582 bp, Homo Sapiens
  misc_feature (62)..(62): n is a, c, g, or t
  misc_feature (505)..(505): n is a, c, g, or t
gaggtgtcacactgtattaggatctgcatttctaaaactgacgtggtatcaggaaggcattntcaatcattcaaaatgtggagaatttaatggctaaatctgtaaaagccaatgcaacccacccaattgaatctgcattttcttttaagaaaacagagctgattgtatcccaatgtattttaaaaaatagggcaattgattgggccattccgagagaattgtttgcaagttttgggttttattagaaaatatttgaaagtatttttattaatgaaccaaaatgacatgttcatttgactactattgtagccgattttcgattgtttaaccaaacccagttgcatttgtacagatccacgtgtactggcacctcagaagaccaaatcatggactgtacaagtctctatacaatgtctttatccctgtgggcagcaagcaatgatgataatgacaaacaggatatctgtaagatggggctactgttgttacagtctcatatgtatcnccagcacatgtaattttttaaatagtttctgaataaacacttgataactatgtcaagtgtttattcagatactattt

SEQ ID NO: 140082 - DNA, 891 bp, Homo Sapiens
  misc_feature (78)..(78): n is a, c, g, or t
  misc_feature (82)..(82): n is a, c, g, or t
  misc_feature (181)..(181): n is a, c, g, or t
tgatcgactgtggtagactctaaggaaataattgcgtcgttttatagtttcagaatttagcatctctgtcacagaatnaatntggtgatgaatatgacttgccatgtgttctgaagattacccaggagtactgaccatgcagatccaggacagtactgcgcagattagttgtatagtctgnccatgctctgctgaagcaaccattcagttcttgtttgtacctaaaacaccaaaaaagaaacactcaaatccagctgctttgtcaattgtcagttctgactccttttgctgtggccttatccgtactatattgtgggtagagtaacttctcagaaaaaaaggaaatgtctgtattggttggatgaaactccaccagagcacagcttagctggggcgagatgcatgtgaaggcaggcagtgccaagattccgcttcctttgtttgccaaatactagaaacacaaggaaatgcaagttacgctaaatggcagtaatactacccaactgcctttctgttcattttgtttgaaggaaattgttttgaccaaacagaaaattacttggaatggtgtgttttacagtctacctagaaaatagatggacaatatttttcaactgtatgagcacgtagataaccgagagaatgtggccacctgtgttcaagaagccactgatactggtttttgttaaacattggaagttcaggcaatggaataaatgtaggaacatacagaatgttgcactaatttggtagcctgggaattttttttattgtgcagtatgtatttaaattttgtctatgttaattaccagcatttacctttatttaaatgatggtaaggtggaatattgaataaaattaggttttgtgttttgttctttgtagtctgat

SEQ ID NO: 140083 - DNA, 246 bp, Homo Sapiens
ctttcagttttcctcatttaattatttttattccatgaatttaagaccctagatcttcatgtaaatgtgctctttgagcttcttaactggtctttcctatcagcagaaggggatgtcttgtgctaaaatctcagtgtcaattcagtgatttaactaccacgggtttactttcgtttcctttcatatcccaagtatttcttcacttctatctagctgtttgcttttatttttgatcaaccatgaaaa

SEQ ID NO: 140084 - DNA, 414 bp, Homo Sapiens
ttttatttataaaaatatcatttatgaaatgacaaaaccagtattctgcagggtgagaacggcacatcagcttggtaacaatattccagcacagcatataaatgccatcagttattagtctaccctggccagtactttgcatacatcatgcccaacctttacaacaatcctgttatgtccatttactgacatcacattgctaaatgcagatccctttgattctcaagccatgctctttgttcagccactgcaagtacaaaccaaattctgttaagaaaactcatcattgaactggtattttatcaacccaatatcatataatataaatagaatcaatcaagcattgctcaaagcaatgagccagtggctaagaattgaaaatcaatggaattgagactttcttctttaaggggg

SEQ ID NO: 140085 - DNA, 1364 bp, Homo Sapiens
tttttcacccccgccgccgtctgtctcgcgatgtcttcgggtgtgggtggggacatcggggattgtggggagacgcgcgttttgattttgttgttttccggcctggtatcttacccgccgtatttattgtgtatattgccctttttgtgcgccggtattcatatccgccgcgtttattttattataggttgcgccgcgttatattggcggagtgttgcgccggagttttgtatattgttgcccgcgccttgttatgttcgcccagcgttagcgcttggcccgggttcgcggtcggcggctgtttgtcattcgcccggttctagcatcggcgttgccggtcgccgcattagatagcgcttacaatgggcgtaggcgattggcgttattggcggcggtacgcgggatggaggggataacaggcgacggcaggggacgttccctatttccgtttttcgcgtgcggtttttacggccccgccatttttggggctccacaccggtgttcccccgaaggggcgccgggttttctccggggcgattttggttccccgccgtcgattattggcgttagttgcagccggtgcccttttgccccttttcgccgttttgccccgttttcccttgccgtttttatgcggttgcccccccgttcccttgtgcgcttttcctcccgttgcgttctgggtgtccaccctctttccgttccgtctttctgtaatcgactttttattaagattataaatttaaacaatctgaacagttttacccggtgatatacaattcagtatgcacaaaaatacagggtaatgagggaaaagggccgagaaaggaaggattggcaactcgttttggagtccacacggtgctgatggcagagaaccagaggggctgcagacgaaccccacctttttacaacaaaaggcttttaaattaaacaaatctatcgagctgaagacacaggacggggttctcacaggctcgaacaatgctggtttcatgaaatgcaaccgaaggctgaaccaaggcagtgcaacttagaagcacacacacaaacaccacagctgaccaggaacttagtgcaaagtctccaacgcagtcggcggtcccggcccctccctcccccggggccgccggggatccaggtgaaggaattgacttccttttttgtttagtgaggaccgcagtgctaggcatgatgggaaatgtagtccgccgtgcccgccccccaccccttacccaaacagtgtccgagagtgtcggggtgtcaggcgccacccccgagtccgggagacgggtggaggaggggaggagaacggagccagaggggcggggagaagaggggttcaagacacccgccccgggaag

SEQ ID NO: 140086 - DNA, 705 bp, Homo Sapiens
caccttgcagcattagcttatgagagaagaatttctctacttcattaaataaatatatgtaacagaatgagagaaaatctgtagcacaatgaattctaatggaggacaatttcaagtgtcattttaggtctaggagcttgacacaggtttaaaatgaaacagcctttttcaatattttctgttttatttactgaactttcctctaagtcatgatcattggggttgtggttcttcttacaaagttaactccattttcatgctccattttaatcatctgatattttatttaatcttgattttggttatctattgctatattaaaaaaactgcaaaatttcatgactttaaacaataatcattttactatttcataattctatgtgttggctgggctcagctggtaagttcttttgtatagacttgaccaaagaacatcctagatggctcattcacatgactggcacttgatgctcagtactggctggttgctctgctggggctcctgagtgaagaggccacacatgccccatgcatggtggtttggttctgagagagggtgtcccaagagagctcatttgaagaaagaggaagtagaggctaacagtcttctaaaagactagaaccagaactggcagagcatcacttctgcagtgtcttcttggtgatgcagtcacagggccagattcaagatgatgaaaaataaac

SEQ ID NO: 140087 - DNA, 622 bp, Homo Sapiens
ttttttaactgtaaaggattgcttttattttgaacttaagctgaggaaaagaagccaaaagtattttaaattttattctatttctagcacattctgtgagggctttaaaaagaaatttctctctttataattttcctttcctttattctttacagaacagtaaattctgattactcaagttctcaaaaatgaaagctatatctggaatgtttctattttgctccccctgttggcctgagagcaggataacactgcctgagactaacaattcaagacgatctaaacatttattttcatggacttgactaatataaagatgtaatggcattccacagaaagacctaaaccacagtttcagctctatcttatatatatacctgacaattaaaagcagtatgtttatgtttaatttttaatttttaactattagggttcaaatctagaaaattatttttatacaaaggctagctgcatgccattcatttttcaaaataattacttttcaaaaattctgctgtttctatatttaaggctgaaatccactgaaaacacccaaacttgcaattcctatcattatttttgttttgctaccactgatttttaccctcgtgccgaattcttg

SEQ ID NO: 140088 - DNA, 1343 bp, Homo Sapiens
  misc_feature (444)..(513): n is a, c, g, or t
  misc_feature (1011)..(1105): n is a, c, g, or t
gggcctgggtgacagagaccctgtctcaaaaataaattaattttttaaaaatcgtgtactgctgggctttagtacattagttgtgcaaccagccccactgtctaattttagagctttgcaattaatccagccagtgatcaattcctcttctataaaatggtgataaggatggctaccataattgtgccctgattatattgtcagggttatgtgaggaaatgctcataagcatctcagcaaagccaggggtacagggctcacctgacaagagatatccttgggtttgtcctaatagcgagaaaccgggcctcttttgcctctttttttccctcttgctgatgtgggagaggagagaacattcaagaggtgatcagcagacatccttaattttgataaaggcagctgagcggggaaatataaggtcggttctgtgtagatagacannnnnnnnnnnnnnnnnnnnnnnnnnnnnnnnnnnnnnnnnnnnnnnnnnnnnnnnnnnnnnnnnnnnnnactctagagtgtcacgctctataagtacacacattctatttagtcattccattctagaccgatagcttttatttttagtttggaactattacaaattgtgctgctctggacattctcgaacatgggttttgggacacacatgtacacttttctgttgcttatacctaggaaataagattgttggattataggtgatgcacatactcagcttttaagatatgttgtcagacattttttccaaagcaattgtgccaatgcccgtgcctaccagtaatgtgtgaatattccatttccttcacatcttcagcaacacttaatgatgccagtcagaatttgcatttccctgatagctaacgaggttgggcatttttacatgcttgctagctgttaggatatctttctttatgtaatatcccttcagatgtttgcatattgattaatccgactgtctttttccagttaatttttcctttgttgaataaatatgttgcaaatatnnnnnnnnnnnnnnnnnnnnnnnnnnnnnnnnnnnnnnnnnnnnnnnnnnnnnnnnnnnnnnnnnnnnnnnnnnnnnnnnnnnnnnnnnnnnnnngaagcgcaaaacccaaaaaagacggaacaggaggacaccaaaaaaagagaaggagggaagaagacaagccacggggaaagagacaagaaaaagccgccctggagggggggcgcggggccggcaacaaaaaagaaagtctagacgcggacggtcctcattgagtgcgggggcgcaatgccccccaagtacccgagcaagagaaaagccccgcggagtgcgaccacccggtgtgtgatag

SEQ ID NO: 140089 - DNA, 721 bp, Homo Sapiens
tttgcaaaataagttttagttttattatatttggcctgattatttgcataaagtacagcaaaaatagtgattgaccacatataggctcttttaaagtttggctttgttggaactttttcataaggaatttcacattcaacttttaaaaactctcaaggctaagaagccaagacaaggattcacaatcagactgcacttgtaattcctgtataaattggatacactcctctcttgtcaaggttcccaaaatatcctgaggctcctgggcctgccagagagtgacattctttactaccgcaaggtcaggaaccttgtaaggaaactgtgtagacaaggtatcaggctaatttttccaacaggctttttataggctctataaagtcaacttcaaatcctcaaagcagtctggtcattaaaaaattatgccattccaatgaaagccttggcaaaataatcagtgtatccaactgtgttctgttacaaaagaaaacagattcctatcgaatttgtacaaataactatattgccaaaagtgaagaatactcacaaatactttccaaattctggagacatcaggtagagagaaaggttagtgtttcaattgttctcacaaaagtgtaatttatctaattactgtaagctatgtacagctcaaaagaaaaaaacaattttcttgactctggaaaacaaaacataaaaagtatcagcaatgtctcaaacc

SEQ ID NO: 140090 - DNA, 542 bp, Homo Sapiens
ggactaaagcaacttttttatttacagtataaaggttacaaaggtatatatgtatttatatatataatacccttaagttacacattttcattgtaatgtacaatgctgtatgttgatgtgctaactcaaggggaagtgttgtttatgcatctatatttatagagtatacataaagctttttaaaattaggaacacaaatagtgccctgttttacgcgttgggtttttgatttggtatccagaagatctgagacttaaatttcaaacaagacttaaaaagaaggcttgtttaaatacagggttctaaaaagaaggaaaaaacccagaaaatcacatacttttaattatttgtaaaagcattattctagttttctaagtctttatacttaaaaatgaaagcagtgtggaaaagaatccacataagcaggtatcatcagagtttgcacagattatccaaaacaggccttcaataggtagtggttttctacattatcttccaaaagacctcaggttttggtaccacaaaggacagatttttctggg

SEQ ID NO: 140091 - DNA, 1233 bp, Homo Sapiens
  misc_feature (136)..(150): n is a, c, g, or t
  misc_feature (436)..(527): n is a, c, g, or t
cgtaaaatgtgtagaaaatattgcgtggggcagattttgttcggggcaagatagactaagtacggggtgttgttgcctcaatatagtgatcaagttgtgttattgttccgccaccgagacggtataatagtcactnnnnnnnnnnnnnnntggtcccagtatttatgctctcccctccccggctagattggtgggggtccttctttcacaagataattatatcaccaaggtgcaggtgtgtgtttcttcacccgcacagacgtcgattatttatagcgggcggcagctcgctcgccgggcaacttttaatttataagtgcgcgctcttctctattgggatgggctcctcttttttgataaaaaaataatcgcgggtggtcgtatttactgtcggtggccctcccgcgctcgggggtattgcgccggccccccctcnnnnnnnnnnnnnnnnnnnnnnnnnnnnnnnnnnnnnnnnnnnnnnnnnnnnnnnnnnnnnnnnnnnnnnnnnnnnnnnnnnnnnnnnnnnngctagagccaaccaaatctttattagtctcggcagcagaactaatggagcccccatttacaggggagctttagtgggctagtctggctaccaggcagggatgttagcatttctattggtgattgggatagaaagggggaagagactggaagggaaccaaagggggagactggtggaccacctgagggcaggcacagatggggcttcctgggctggtgtagaggtggatcaggccccagaggagaacactgccatcttattcagaatgaaggatgagacaaagcctgagagggtgacagtcacagctacaaagagagggccgagctcctggtgtgagaggcatttctggacggaggcagctttctagggctggaagtctcaaatagaactcacctgttccccaaccaggggtccccaggttcagctcaattgttatcatgggtaccagccaggaagctgtttgtgggaaggatgggacttaactcatgagtgttttatgtatggacatgtgtgagtatatccgtggtgcgatatctacggtcttcagggccagagtccctgtatggagtctgatgaattacggattatgtgaaatcatgattctatttgagattgtttagtgtggcgtggtctatcgtgtagctgttggatcgataacttttaacacttggtcgcatatgagaggcaacttacgtatatttatatgt

SEQ ID NO: 140092 - DNA, 685 bp, Homo Sapiens
agtctacatttaaaaattttaatcatagctaagaaaaactaaaaacaaataattctattaagaaacaacaaaaatgataaacatttaatacctaaatgtagatacttaaaatcctaaacaaaaatattaaagttaaaagggccttgaaatttgtttctaacaaatcatcttatataatcaattcctaaatagctcatatcctttgctttggtgttttatctgctatcatctaaacattagtacagtagaaaatcactcaggttcttttcaaatgcttggcattataatgtgatctcatatctttcctcaaattaaattttgctccacatattccacatgtatacagatgaacatccatgtgctgctccaactgttcattatttgggaatatctgaaagcagacctggcatatagtctcaccagcagataaatgagaaatcatatgccgtacatggtcatgttttctgaagtttccttgatcacaaatggaacagacatacctggccatgcctttgtgcatatcattgtgcagtcgcaactgacgctctcttaaaaactgctttccacatgtttgacaaacaaactgtttttccttagtatgaacagtatagtgttctcttaagtgacaccgctgataaaatcctcttccacacagattacacaaatgctgtcgtctgtgatctct

SEQ ID NO: 140093 - DNA, 685 bp, Homo Sapiens
  misc_feature (575)..(575): n is a, c, g, or t
gattttattcttataattttattagtatgcataaatggttaatggacaggcattaccaacttgactgacctatcttacctaccctgcagagaaagtatatgctattttatctaacttacccaatgccttgtgaacccaatgttcataagctagctaaaactatcatcttggacccaagttgatatcataaataaatctaacttatataatcacccattatatcttaacaaaaaataaattaaaaaccactagctaaaataatgtcacttttcttcagcttttaaaatgcctgtccaagttgcttactgggattagaagcagaaggctgacaaagaaacatatgataaaaatagtgtgagactgtccatcatcgatgctttgttgatgggacgtcctctcatactgatgtatcaaaaatacattttgaagagtaaaggaagaaataacctcatccagttcttaaattccttaccccttaagtgaccacattaataagtcttatgtccaagtgaaacatcatgacaatatctgagttttacaatgtacactacactgaaaggcaaatcgaatagcanagtacttaagaatctgggaaatgctactcaatcccctctttttctgctttattcatctggacacaagtacataaccctggaaacagaaaacataatcttgcggtatttcc

SEQ ID NO: 140094 - DNA, 1054 bp, Homo Sapiens
ttagtcatcagaaaaatggacattacaacgacgatgacataccatacgacacgcagtagaatggctaaaattaagaccactgacaaaacaaagtccggcaagaataccgtgcaactggacttcttatacattgctggtaggagtgtaagctggtacaacagctttggacagtgatgtggcaacctcacatagagttaaatatctaattagcatacaactagtaattccacttctaggcataagacagaaataatgcacgctgatattgtctttctgaagaaattcccctaatttttcgggatccccaggttctcgaaggcatagccagcaaacaggccctgaagatggtttcctctgggttaccctcctagtcttggcagattttctcaatctctggcattccttcttttcttttacagtcttcattcggtgctgtctctctctcctctcttgaattcttctatactattgtgaggacaatacaggctcttccagcttgaaacttcagttctttgcatcgctgggccaagacgttccttgagtaggattctgtgcacacactgctagttacaagacgtcacgatcttcaaaacatctgaggggtggctttgcaaatgaggcttccacaagctgccaggcagtggcttcctaacccggcggacgcccctcgaaacgattatcaagttgtttcactggacaggtgctgggtaaaagcttgttgagaaaataaaaaataaataaacgtgttcgacccgccgccgcaagaatgatttatctgtaaaatacgtgtcggtgtggtcacaaccgttccccggaggttaacagccggagaaggggcttaaggagcatcccgcggatgccagaccaggctcatgtcgcgcctgccgggcggccagtgcagggccgggccgaggtcgcctccgccgctcctcctcgcggtagctcaccggccgccgctcccggccagagccaccctcccagctgtctgagggcgccgctgtactggagctttagtcgttgacacaggccgtggtagctacctccgggcggccgc

SEQ ID NO: 140095 - DNA, 496 bp, Homo Sapiens
tttttgggtttgcaaattatatttaatgtaatattatttaatatttcatttttttaaatccacactgggtagagtcaaacttattttgaacagaagtaaatgctaaataattgaagcatttttaaagcagttttctacagctttatttagtctcttactcttttagatgttttaaatataaattttcttatttcaacttatagtctacagtgctgcgtggttctttgtttaatggaaaccaacgtctatgggaaaactcattttaagaaagacacatacatatgcacaatgcatgcaaacaggtaacagggaatagtaaatatcacttctattatatttttcagtatcttctcaatcaataaaatggaatggtaacacagttccaatgcagcacacatgaatggcaacacaaaggtgaaagtatccttgcttaccatgccaaacggctgcatgtccatcccacagagttgccactgttttccttgcaccctcgtgc

SEQ ID NO: 140096 - DNA, 643 bp, Homo Sapiens
ttttcatttcattaatttttaataccacatataaatggtgaactgcgacccgaaggtatatatttttacctacatcatacactcacaattgtgtttacatctatgctgatgcaaaataaagtcattgttggaacttccaaaagcagcaatatcaacaggaggaatatttttcacttgatgtgtaatctatttctttgcttgctctgtcagcttaatattaatggctgcccttaagttagcccaaaaaaggccacgtttgctcttttccttgggccattccaaataagtcctcctggccatgagacttttgagcttgtgataactgctaggaatggagtactgcggaatgggttccagcaagatcaggattaagctattagatccttcatgaaagagattgtgatgggcaaagtagagttcataatggcaccattcactctggacaaagttgggagacaaaacaaagatggacttgtaactcttctcaatgcaggtgatgatattttccacaatgctcttgccaggaacaaagtttctctcatgaaggcaaatctgcataccttctttctctaggtttggcaataattcattcttcacccagaaagatcgtgcccactatatgaaataaatgcatgaaactgga

SEQ ID NO: 140097 - DNA, 590 bp, Homo Sapiens
tttaaaattaactctttaatttatggaaaatgactcatttacagctaattcagtaagcagataagaggaaaaaatactccacaatgccaccattctaacagaaccacactaatttttacgtatgttttccttatgtattttttctaaccatatttttgcataactgtaattatgatgtacatatgctttttatataggtaaacttcttaatctggaataattttagatccacagtaaagttgcaaagatagtacaaattcgtcacatagccctcacccgatttcagctctccctaatgttaccatcttacattactgtagtactggacatttcccaaaactaaggaaccaacattggtatgttacttttaactaaactccaaattgtattcagattttgccagttttttcactaatatcctttctccatttcgggatcccacccgggatcccacatggcattcagtcatcgtatctgcttagtctcctctcgtccgtgacggcatctctttccttgttttcgagaccttggcaattttgagtagggtcaagtgttttgtagaaagttcctcgaattttgctcctgtgttt

SEQ ID NO: 140098 - DNA, 1529 bp, Homo Sapiens
gcaaaatattaataattattctattaactttccactcctttgcccttatgcttccctgctttctattaatttttttcgtcccccctattcttcgttatggtttaccccttagctataattcatagggccgtccccacctactccattccatttagctacaatgaatgcatcccaacagatagcacatcagtttagcgccccataattattactcacagacctagttatgtgtcctaagccctgtttccttgaaggtcataatatttctgggactcattcattatctgtaactgtagtcactcacatacagttaaaggatcagtccttagagattctatgtccaactttatctgtacaaagttttaaggcattcataatggtatgcttaaatcacaatcatttataataaaatacgatcaaaactctcttttaaaaatatctcaactgagaaaaccacagaagagaataaagatcgtatttaccactgatgtactccttaagcttctacagtgatgcaaagacttttttttggcttacacagactttatgccttgaatacttggtgttcttatacaaatgtggcctggagcttaagttctgcctaaagttactgtgaaatttacacattcaagtgtgctgattgctattaataaaggtagaaaaagttagttaaaatatctggtattattattatcagtatttattgcaaattatcttatagtattctctactgtagtgtgaacttcagtcttgtgccaaatagcagcatagattacaatatcatggtaccaatgatgatcaatgactcagctagtatcagccaaagcaaaggaatttgtttatatataaaagaagtaagtaaggagcatagctttattttaatatcagttgtctgaactgagcaatgggcatccttggtatccagaggcagaacttgaagttttctttccttaaattacagtgatagtcaggatgggagacagtaggtggtggcaatgggttgctagctagctggctggctaaaatacatacctgagctctactggagctatgcaaccttgctgtgtatccgttatttgtaaaggctgactgaacaaaattgccttcatcatacaagcactgctgtctgcactacagtaataaagaaacacactgacagatacaatggcttcaagtgataagcaatcatcaggaatttgtagtgaaattgttggttgactggaaatgttctctatatctccagctgctatctgtccttgaagtagccattcattgccttcagctgttagaaaccagcaactggatactccttcagttagctttgatcctgatgggaggtctaatctgagtttgaactgaagagtctggccagcacacgcagtcacgggggaaagcctaatgcttggagcagatttaggtagtttgggtaatgtcttctgtttttctactaggaacgggccatctaccacagcattttcagatctgaagatggggagcacagataccattttagtttctaaatccatcac

SEQ ID NO: 140099 - DNA, 695 bp, Homo Sapiens
  misc_feature (76)..(76): n is a, c, g, or t
ataaatgtttagtatttaaaggaccactaagggccagtggggaaaatgaatcttatggatggatatcatcattttntgctacttaataatgttatggactttcaaatgagatttctgtaactggaatgagaaaaatcctaataagtttaggatgggtcagaagatttgtgcaattgagtgaatgcttgtgtgcttcccaaatttcgtatgttgaaactataatcccaatgtgatagtagttgatggaagggcctttggacagtggagccctcatgaatgggattagtgctcttaaaagaagagaccagagagctagctagctgtctttccaccatatgagggtgcaatgggaagctggcagtctgcaaccagaagaggaccctcaccagtccctcaccgttctagcaccgtgaactcagacttcagtctccagaactgtgagaaataaatttctattgtttatgtcacccagtttatagtactttgttatagaagctcaaattgactaagataatttggatattaggttatatcgcttgcaggaggtatgtaacttcttgaaacatgtaaactctctgtgttgtgttctgctgcctaaatccaccagataaatatttggtttactttgcttgggaaaactgttactcaaatgttctctgtacaaatgcaggagagtaaaattatttccccatttt

SEQ ID NO: 140100 - DNA, 745 bp, Homo Sapiens
  misc_feature (249)..(249): n is a, c, g, or t
taactatgacagtggtacaaaaagcaggcggtacggtccggaatcccgggatatcgtcgaccacgcgtccggatttttatttatgagtctttgagactaaattcaatcaccaccaggtatcaaatcaacttttatgcagcaaatatatgattctagtgtctgactttgttaaattcagtaatgcagtttttaaaaacctgtatctgacccacttgtaatttttgctccaatatccattctgtagacttntgaaaaaaaagtttttaatttgatgcccaatatattctgaccgttaaaaaattcttgttcatatgggagaagggggagtaatgacttgtacaaacagtatttctggtgtatattttaatgtttttaaaaagagtaatttcatttaaatatctgttattcaaatttgatgatgttaaatgtaatataatgtattttctttttattttgcactctgtaattgcactttttaagtttgaagagccattttggtaaacggtttttattaaagatgctatggaacataaagttgtattgcatgcaatttaaagtaacttatttgactatgaatattatcggattactgaattgtatcaatttgtttgtgttcaatatcagctttgataattgtgtaccttaagatattgaaggagaaaatagataatttacaagatattattaatttttatttatttttcttgggaattgaaacaaacttgacataaataaaaatgcattg

SEQ ID NO: 140101 - DNA, 519 bp, Homo Sapiens
tttgactgggaaaataacaattttattctttctcctaagattgtgattttattattccaagatcttatgcttgaattacttagcaagaaggcatgattatgcagaagacagggaaatgaagagaaaagagcgggaatatacgaaaatgaagcttccttaacagagttcatggtggagatggtagacactggtggagtttttatccaagacttaaaacttaggaaacgcctatgatgccactttaactggaagtaatggagacatctgattccaaattcacattttaaatgcctatttgcaatcagcaaagagccaggtatgctgcatgctgcttgctgtaagttacgatttggcttcactggctcaaattttttcactccaccaaaagataaggcacaggcccgtttgtccaatcaagtttgctgaaaatactgcagcctgagtgtagacaaacttcccctgaatttgctagaagttttcttgtgtctggaggtttcatagatcaccatacatcgtgtc

SEQ ID NO: 140102 - DNA, 930 bp, Homo Sapiens
  misc_feature (297)..(348): n is a, c, g, or t
ataactttcaatggttctttcctttccagctggcgagagaaaggagaactaatatacctgctggcagatttttggtgctgcccaaaaaaggacttcacagggcatctcttctcaggttcaagcctggctgaattctgcccagaagctcagtcattgcagaaatttctctaagggctgatagtacctctgggtaggcgtcacaaccaaggctggttctgggcttagtgggggctgagatgaagttacctcctccaatgagaaattgggagctgatgccctgcaacagatatatattcnnnnnnnnnnnnnnnnnnnnnnnnnnnnnnnnnnnnnnnnnnnnnnnnnnnncgccaataagccttacaaacagttttgaaatcttgttctgtaccttttaagccagtgtctgtggcgagggtgactggcaagtcagctgatgagttctgccttctgagagcactgagtgagcaaggcctttcatcagtgttttggccttctcattgggtgaggaagacattgaaccaacagccaacgagatatgaacctgtaagaaaaaagtcctagaatatagtatttttccccaggccagcaaagtgaagaaatacagtggtgacagatgagaaaggccatgttcaagagatctgaaaagtacattcctgccttatcagaaaatgtgtcagacaggttttatgtcagcctcagtgctcctgcggtgtcgacgctctgataaggaccatgttccagttagaatgcgagggagggaaagagctgcactttgcttcaccatcagaactctgagccaaataatgaatatgtaaactattttatgattattttaaatgtttgtttggtaacatttataagatctatttttatttggggatagactgagaggccaccatttacatattaacaagtgacttcagttct

SEQ ID NO: 140103 - DNA, 1411 bp, Homo Sapiens
ttgggcctcttgcctgtgtgtgttggctattcctgtgtatttttcgcctttcctgtcttcttcccacatggttgtctcggtcatgtcaccgtcgcctttctgtccaggtctcgtgtatccttggctttccggcccgtgccacggtactgtcctgagtgtttgaagctggtatccgtctgattccagggacaggcagtatgttcagatcactttaccacctggtccaccgatccccacccccatgcttgcacgctcccagagctcttgtgattcagaccttaagaaggatccttgggcttgcactttaaaccacgtttgctgtccgtggaggtctgacaggaccctatagttgttactacataagtgcttttgccaatagggcaagttagaagaaggaggtaatatgaatattctttagaaaaactcaaatccatcggcttatcaatacccaaagtctgaggctacccagggcacaatttggtccatggaatgctgagtggaggaggcagctggtgtgaggctgcgcctgactcccaggagcatttagccatcctttttggcttggggagtgtcaaagagccggactgccttcctgcacagcagacagaaccagtagatctgaggagctacgaggaaggcattggccacgttgcagtagaatgggatgctgaagggtacttggagcaggcttagtccctgctggcggccataggaccagtacatgaaggggaagagaaggatccggcaggaaaggaaggtggccagcgtgaggattccattcaccttgtacagaagggtgtgctgctgctttagctgaatcagaaccctgcccagcgacacaaacggagtgctcagttctgccgtgaagatgcagccgacaaagaagtccccaaggtctccccggagcctctgtgcgactggcacaaggacaaagagaatgaccgcatgatgtgtgatcatgaggcggtttcgacttaggaagtttcgaagagtgagggagggcgcacggttctggtctctggttcggcaccattcacagaggtacatggcgtacgagtcatagatcatgtatggaatcagaaaccacacatattcccgggcaagccagtgcctgccggtgatcacgtcgtcgcaggagcgaatgatgacgatccccgagccggtggccagcacggcgtgcaccgaggaaaccagcctagcgcggcggagaggagaacagcgcgcgcgctcagtccggtccgaggaccgcaggagcccggcccgcccggcccttcggcctgactctccccagccgcaggcagatgtggggagcgggctccggaggctcatcgcccttaccaacgctactcctacccctcgtgccgaattcgccacccaggcctcgctaccttaaaccgtgtagtacttgccg

SEQ ID NO: 140104 - DNA, 810 bp, Homo Sapiens
  misc_feature (196)..(205): n is a, c, g, or t
aaagttgtactctctaaagattttaataattggacttgaggtaatctataacactcggggagaaaaattaagaacagagaagatacataccataatacttgacagattttgaaagcacttaaagcacttatggtctcttttggtgaaatctcaattactttaaaaagctatgagtttgcatttttctgcttcacannnnnnnnnncaaatttcttgcttcattgtctatgtctgtaggatcctttttaatcccagacaaagctgtatggatagtcaggtactttaaatctaaagagggaaagcagccgactgaagaatatggcaacaagacacataccagccagacacatcatctttctctttctgatgttcatcgtagaggtggcagccttgtctaacagcaccattcccaggctaacacacatattaaacagggaaataatgaatgtttctgctgcaaactgagcctgactaaatttactgatataatgtttatgtcctgtgtgagggtccctttggacatatggttctcctcttatataagtccacatttgaccagacgtcatcacaatcacaaagcacagagttaaaacttcgcacaaaattctgcaagaaatagatttcctattccatttcaagaaatacccaagtccaccaatgagagccagaagtatccctggcttgaggagaccatgataatttatttgtaggctgtctgattctgacgctgacatgtgttctttctgctacccattcagccatttggtcagcaacaatatcccttcctctcaaattataaatgtcatctgt

SEQ ID NO: 140105 - DNA, 617 bp, Homo Sapiens
  misc_feature (219)..(272): n is a, c, g, or t
  misc_feature (543)..(572): n is a, c, g, or t
atgtcagaagtttattttattggtaaaatattaaataatatacagaattaaaaactgcacttacacttctgagaagaaataaatcttggacaaattatatgcttgttcctgagattccctaaatttattccagtagctgtgcactcagacagtacaaacctttataatataatccttttcacaaagtattacaaagtttctgcagcttctttagttgtnnnnnnnnnnnnnnnnnnnnnnnnnnnnnnnnnnnnnnnnnnnnnnnnnnnnnncacagtaaccacatacatgcacagaacatgtatgtgtgtgcattaaaaacaaagaagatacaagtcccacattttagtctgcagtgataaaactatttagcggaggtctccaaatcagtatgtagtagagtgacttgtcacacagctgcaaagactgtttcagtatttccatagtaaacctcattttctgaggtatggtatttgagccttaaaaaaaactacattacacttagcaaacctgacatacaaggtatggaattttaactttacnnnnnnnnnnnnnnnnnnnnnnnnnnnnnnttcttttttaaacaatagtttttatttccccaaattattagtttg

SEQ ID NO: 140106 - DNA, 591 bp, Homo Sapiens
tttgggttcaagtggtctttattagatccacataagaatctagaaaatgataaaatatcacaaaacacagcacaatgtgggttcaccaataatgaaatatagagagaggatcttatgttttaaatttttgtaacatatagtccaaaacaaatagataattatacattctgcaatagatgaggacattggcagggcatataaaattagactcttgggcttcaaatgactaagttggaagcattagcaaactcaaggaagggacaattcagaggctataatgggcttaatgctgctatttaaagtaatgaagcattttctctgctttctggattcatttcaccaaacgatttcctcagcaggtcagatatagatttgcagcaaaatgaaaaacattttccaggaataaaacaactgatccctgcaacagctgacttaacttttctgaataataaatcttcatctgacatgcccagatgcctcagagtactgtcactgatattcttaacctcttcctaaccttgccagatccttgtatttcatatttgccaaacataattactgagagggggtaactgcactagctgtgtgatc

SEQ ID NO: 140107 - DNA, 773 bp, Homo Sapiens
ttttttgaaaatgaagtgatttttaatttataaataaaagactctctaaatgattttcaggatgtatattacaagtttagttttaaatagacttaaatttataacaggtcttacaatgatttcaataaataggcactccagagcacaatgtgtacgtacaacaatcacgtgttgacctcttaatattccaaggggatcaaaatctttttcaaacacagaaagaaactgggctttgtgcaatgctaaccccaatagctattctcctttataaaccacaatattattgtcagtttcgtatacttttactttataaagaactcctacaggaagaactttctggaggttgtcccagatataaacagctacattttcagtcgtgctcaccacatctgcaaagtatggcacatccatatccagattcttatgatcaaggggctgcataatcgcctcctccatatattttttgagatcagccagattcataaccattcccgtagcagggtcaatctctccatgtactgtcaccacaactttataattgtgcccatggccatttggattgttgcatttcccaaacagtttcaagttttcttcatcacttagaaatttactgtacaatcggtggctcgcgctgaaggagatgcggcgggacacttgtgcctggcagcgacggccaccaccttccgtgctcatcttcccggcgctgtctgcggtgctcggccggcacctcctcccgccgcgcggccggtgcctcctcccaccgcggctgcccc

SEQ ID NO: 140108 - DNA, 722 bp, Homo Sapiens
ctctttctttttggaaaatgaagggattttttaattttataaataaaagacctttcaaaatggatttcgaggaggtatattacaaagtttagttttaaatagacttaaatttataacaggtcttacaaggattcaataaataggcactccagagcacaatgtgtacgtacaacaatcacgtgtgacctcttaatattccaagggggtcacaatcttttcaaacccagagagagactgggctttgtgcaatgctaaccccactagctattctcctttataaaccccaatattattgtcagtttcgtatacttttactttataaagagctcttacaggaagaactttctggaggttgtcccagatatatacagctacattttcagtcgtgctcaccacatctgcaaagtatggcacatccatatccagattcttatgatcaaggggctgcataatcgcctcctccatatattttttgagatcagccagattcataaccattcccgtagcagggtcaatctctccatgtgctgtctcccacaactttataattgtgcccatggccatttggattgttgccttttcccaaccgtttccagtttttttcatcccttagaaatttactgtaccatcggtggcttgcgcttaaggagattcggcgggacccttgtgcctggcagcgacggcccccaccttccgtgctcatcttcccggcgctgtctccc

SEQ ID NO: 140109 - DNA, 792 bp, Homo Sapiens
  misc_feature (90)..(90): n is a, c, g, or t
cccatgtatattataccaagtaaaaattaaatactaaaatgaggtaatggagaaaaccaaaattagatttcttttgctttcaaataatcnccacaccaaaacatttggtgaaaatgaagtgatttttaatttataaataaaagactctctaaatgattttcaggatgtatattacaagtttagttttaaatagacttaaatttataacaggtcttacaatgatttcaataaataggcactccagagcacaatgtgtacgtacaacaatcacgtgttgacctcttaatattccaaggggatcaaaatctttttcaaacacagaaagaaactgggctttgtgcaatgctaaccccaatagctattctcctttataaaccacaatattattgtcagtttcgtatacttttactttataaagaactcctacaggaagaactttctggaggttgtcccagatataaacagctacattttcagtcgtgctcaccacatctgcaaagtatggcacatccatatccagattcttatgatcaaggggctgcataatcgcctcctccatatattttttgagatcagccagattcataaccattcccgtagcagggtcaatctttataattgtgcccatggccatttggattgttgcatttcccaaacagtttcaagttttcttcatcacttagaaatttactgtacaatcggtggctcgcgctgaaggagatgcggcgggacacttgtgcctggcagcgacggccaccaccttccgtgctcatcttcccgccgctgtctccc

SEQ ID NO: 140110 - DNA, 552 bp, Homo Sapiens
gcacgaggggattgtttgagtattttttaaaagggaaacagtaccaaggagaccagccctaccttgatctggggatagtcttggggcaaagaaagctgcgtagtgctgaacattaagctttctgggccactggaacaaagaactaggatctcacaggaaaagctgggtaactcaagcagctattctttctgtagggaccagaacacgagaatttgaagagcagtgcaaagccctttctctcccaagccccaggcagagtacaagctcatttttctcggtggttattctgatatcccattttggtgtgtcataatacttcaaactggaaagtcacctggtcgagtctagggaggagggagtggaagggtctctgcttctgtacaaaatctccaggatttacaaaaatgtaacctgccttccttcaatcccatatttggtaaataagttaatatttgacatgtttggtgttctctgacctgttccccacactggggattcctggtctgtaacttgaattgtttcttccacatgttcttaagtactagagttaaa

SEQ ID NO: 140111 - DNA, 522 bp, Homo Sapiens
gtatggaaacatttgactttatttaatattgagacaatacatatagttctgattaagagcatcagaaactctgaatcaagtgtattcttcttggtcaagagcttaaaaaaagtccctctcttaaaggctcatcttgataggaatagaaacaaaaggttaccccatagttctcttacatttggaagttagctatatagagggtacaaggatattcattttccttcaggacaaagtcatctctgtacgccctttattgttgaattgcagtttgatttaggggattagaggtggtatggtaccagtaattgagtaatggtggaaatgtgaaagtcagtcacaggactctcattggtgccagtgtcatagttaagaaagaaagaaagaaagttttatatatcctgtaatctagactggaagctaaataattgctaggaagcaaacttaagtgatagctgttaagttttttggtttgtttttgaccagagatgatgaagtaggtgatcttttcttggtttgctccta

SEQ ID NO: 140112 - DNA, 544 bp, Homo Sapiens
ccaagcagggtactttacaatttttaatgcattcatacaacagtgcattggaaaagtactgagcctctacaaaatagctttacatttttaaacaaatgaatgtgattttttttcacttacacaagcataggctttttaatatttccacaagataaatatctcaattaaactataagctcactctacagtgtgccacagtgatgggcttaggagacagttatacacttagaagatcctaaccttagtgttatttacactgacatgtccagtatcaccaagtctgaaaggtgaacaaacaatactcagaatgtggctgaatttgtgttaactaataactgggaatgatatagctttaatcacttatgaaacacatactgtaacttagtctaaactggtaatttcctttgctcctctcttatggtgtgggaaaatttaaagatcaacatgaaaaagatctgccttagcaatggctccttttaagataacaaaggaaaaattgaccctcgtgccgaattcggcgcgccgtcgacttcatactctctcg

SEQ ID NO: 140113 - DNA, 410 bp, Homo Sapiens
tgcggccgccaacttttttctattcttgtaagtgatggtaaaactctggaatcagtccagtattttagtttttcacagcaaatttgattttagtctaccaaggagtttaacttttctatgttccctaactctaagattagggctgtattacctagacaggccttaaaaggtttttgtgttgttctctgttaataagaatttgttcctttaaaccagaggatcaaccttggaactattaacattttgggattgataattcattgttgttgggggctgtcctgtgtgcttaggatgttcagctgcagccctggcctctacccactagattccagtagaccccctcctcagccatgacaacaaagatatctccagacattgccatctgtcccttgggtaggagggtgggaaca

SEQ ID NO: 140114 - DNA, 829 bp, Homo Sapiens
  misc_feature (603)..(776): n is a, c, g, or t
ggtctcaacttttatttctaagcattcttgcttatcttaggacagtgattattaacctacctctctgtttctatcaacagaagccaactttatgatagattttgctttgtctctaaagtttaatattttgagtgtactttagaaaataggtcatcattctttaagcgtcattcattgtctaatcacataattttgcagaccatggcagtcattaaatacagaaaaatactgtgtaaaatttgataatcttgtaggaaagttagctgatgtagacatcaattttggatgtgatcagaagaatgtctgcttaagataactggtcaataacttggtatggctactggattcattccacatatggtagtataaggcatgagccaccgtgcctggccaaatttcttctattcttgtaagtgatggtaaaactctggaatcagtccagtattttagtttttcacagcgaatttgattttagtctaccaaggagtttaacttttctatgttccctaactctaagattagggctgtattacctagacaggccttaaaaggtttttgtgttgttctctgttaataagaatttgttcctttaaaccagaggannnnnnnnnnnnnnnnnnnnnnnnnnnnnnnnnnnnnnnnnnnnnnnnnnnnnnnnnnnnnnnnnnnnnnnnnnnnnnnnnnnnnnnnnnnnnnnnnnnnnnnnnnnnnnnnnnnnnnnnnnnnnnnnnnnnnnnnnnnnnnnnnnnnnnnnnnnnnnnnnnnnnnnnnnnnnntaggagggtgggaacaaattctcccttagttgtactttttataccaacatcag

SEQ ID NO: 140115 - DNA, 1278 bp, Homo Sapiens
  misc_feature (854)..(862): n is a, c, g, or t
gggtgagtcaccacgcatcgatgttgtctgtacgcaggttgtctgctggggaaccagctcttgcgcacgcggtgcactatgatactatatgtgggcgcgccggcgcacacaacagttggtgtgtttgaaaaaactttttctgagggcgccgagccgcgcacaacacatgtgtttttttgttctgtctgttgtcttgtttttgccgggaaaccttttcccaagggtggttttccccagggggctaaacctggcttcctgttagccaacccctttattcctctcgggtaccaaggagctggaaccctccagtgggataattccccacgtctgcgtcctcccagttgctgaccgacgttgccaaaattaagtggcataatctggaaggtttcctccagatttttagctcaatttggtggtactgtttagaatgtgaatctgttccctgctgggtcctgtataagcttacgattcgagttccatcttactagaaactgtgtcctaacttgtgctgtttctcttgtttctcctggttgacttgttggacagttcgatctaagtctattccttgtagcttagctgcttgttgtgcaatttttcgtttcaacatctttaagttccatctggaacctctccataattgtaacatctgtcaggcatactttggcactttcttcttcaggcattattgtacccaagagtgtttcttgttcttctatgtcgttctttaggcgctgtatgtctctattgacattctgccagtttgtttcttaattctggtatttccttctccttcaaatcaattatgctttgcctcatgggcacaagtcccagcatttcatcacgccgcttttccnnnnnnnnnagctctgattctgttgacttgagtttatctggagcaagtcgcagtttatactgcaaatcactgatgacttcttgtaactcagcctctgtctgaaaaactctctgaccaacggggcaacatgactggttttcgtctgttatctgagtaatgaactgggagtaaactgctgtggctccagccagcatggctcgctgttttgatgatttttcaatttcctctttaaggctggcttaaatcactttcagaatccggctaccacaaacatcaaacagcttgtcttcgtaactggacaactgctcttcctttctttttagttcattatttatatgatttttattctgctcagatgaagctagttccttgttcaattcggcaagtctgtccctggtctgattaatttcttttgatttactatg

SEQ ID NO: 140116 - DNA, 1000 bp, Homo Sapiens
aagaatagacacagtagatattttaataaaaacaatggtcctgccattttttatttatcatagcaatacatacttacagaagaaaaagaatcacacattttaaattctgatcattacactatttttttgtagttgaataataaaagaatgaatctcttagtgactttttaaaataccttcaatgttggaaaaatgcaaattatgatatgataaacattcaataactggagtaagttcacttccaaatgaaagacacttggcacccagtaacagtaatgaaattaaacatcactgaagacagtaaggaggtctgcctggaggtctctaaggaggtctgcctggaaccatatctttagtgtagattcacaatcaatccaatctttcaacctacattttaataatttagctttagaagaataacatgtgaatcagtttttctctaataaggccctgaaaaagttgtatcctgaagcactataaagagagtgaaacttttttgttggtaatcaacagcttcaaatattggtttttatcaacgaattataaatacctttttataaaaggccaaaggcacagtaaaacaatgagtatttgtactttaccattttagagctcaaaataattcagaacacaaaataattcaggcgaccagcacctaatctgtcctgtaggtggcaaaattatcataaaaggaatccaggcacaggagtcagaattgctgcactgaggttaatagtgacagatgacttaaagctttatccgacatacaatttttaactttttcaagttttatagattcaaagtgccttttgtatcgctctgaattaacaaaagtttgtctgcatggtcaacaccaatgcttaaaaatatgttttcatttctcaggctctggactttcagtctgatgatcatttctttttatgattattcctgaaaaattcctctcctttttctcgtttcccaacagattttgctttatttttatttatatttaattatt

SEQ ID NO: 140117 - DNA, 444 bp, Homo Sapiens
  misc_feature (205)..(379): n is a, c, g, or t
gtttgtgttttgttttcagaagcagaatttattccaaatacatacatgcatcttctcctctctacctaacatggaacagtttaataaaaagtaatagatgctttctcagtaagattttgcttggggattcaaaaaaattgggtaggaaatggtagacatatttcactacattaaaaaaattttccggccgggcgcagtggctcannnnnnnnnnnnnnnnnnnnnnnnnnnnnnnnnnnnnnnnnnnnnnnnnnnnnnnnnnnnnnnnnnnnnnnnnnnnnnnnnnnnnnnnnnnnnnnnnnnnnnnnnnnnnnnnnnnnnnnnnnnnnnnnnnnnnnnnnnnnnnnnnnnnnnnnnnnnnnnnnnnnnnnnnnnnnnnggcgtgaacccaggcgcggagcttgcatgaagctgagattcgcctcggccgattccagccagcct

SEQ ID NO: 140118 - DNA, 640 bp, Homo Sapiens
ctgctttttaattcaaaaaaaagcccatgattctttgggaggggatacaggattgttttccagtcagatcataatttctaccatctctgtgacaatcataaattcaaaaggttcccactctccgcaccccgattcacttttggcacctatatatgaaatgtcgcttctgaaaaatggggaaaaaatgtgaatactgggctcttcccacagtgctcctttcctgatgaaaatctttcagtttgctcaatttagaatactgatgcaagaaagtttaaagatatgtcatcaatgaaaatctttttctaactatctggctatcttagaaaataattatattagaaacagcagccaattctcagaggcaaaggggcgatggcttatctctctctacttctaattttaaatttagaattacagagcaattctatgagaggtagcagaaggtctggcacaggctctggcttcatgatttcagaatacaactttaactcatcacgtctttgggaagagtgtgtgtgacacttagcaagaggctcactagacctccgtgtgcagtgatgctgatcagacagacacatgcattcaccactagtggagagggaggggcctaaccagaggacaggcagttaggagaggactt

SEQ ID NO: 140119 - DNA, 801 bp, Homo Sapiens
gaagtgatctaagatccataagcgtcagctcaggaggcatgtgggtcagtaagtacggcttctcttggtatcacaggaatctgatcgcaggtcaagttactggacctctcaaaatgggaataaggacattccattcatctgtgtttatataaggtcgagccagaatgtcaaaatagtaggacccaagtcaatgttggcaaccagcatcttgcttgtctgatttggtttgatcccaggtcctcggaaccaacaggtggaactttgatatcaaactcatacagctgtctcttgtctattggcaaggaaaactgtcctgtgtgatagccattggtctgaggtatagaagatgtaagtgttgttgagctccccagtgaactccagcctcttgaccagtttctccacaaggtcatcaactgagaggagagtttgccaccttttcctaaatgcattatctaaaaactgtattgaagaattagtcattggagtcttggcttgcctaattaaccagtgcttgttcgttccatggatgttgaagttcttgtttcttggtgcaaagacattctggaaagccttctggtactgaggtgcagctgtccaaggcgaatgaggcgctggagtggcgatcatcatgaagaagggctcaaagttggacttgtagtccagaaagtccaaggagacattagccaaaacatctgtcaggtagtccacactatagttttcaccatgcttccgtgccttcccattgatagacagggtgtaattataatacttagaatcttttccaaggcataccagtaactc

SEQ ID NO: 140120 - DNA, 629 bp, Homo Sapiens
  misc_feature (436)..(445): n is a, c, g, or t
gtgtccaagttatttctatagcagacatatttttgaagtctacccacccctgagttcagcaattatactttgagtgtaaaattatatgcccttaattaacaacatgtacaaagctacaaaatgtcatctatacagattaaaaacaattttaaaatattatttaccaattattgattgaatggttttactggggtacgtatttcaaacctttcagccaactggctttcagttttaagcccaaattgattcatatattcactgcaggatatttcaaaaagagtgcaacaataaggcattagtaaaaataacattgtagtagaaacagattttgcatatgtgaaaaggtaatttataaaatacattaatcactttttaaaaagaacttagttgtagtatcattaactcacatggtactgagaactggacctttcaacannnnnnnnnnctatagaaagtttcatctagctgtaagcaaagtcttttcacaacaacaaacaaaccctccaggaaaaactatatggctgtgtgagacaaataagcaaccatttgatcgacgcgtgggtcgacgatatcccgggaattccggaccgtaccagcctgcttttttcacgactggttcatagtgcaca

SEQ ID NO: 140121 - DNA, 630 bp, Homo Sapiens
aaataggagggaaaatcttattttctaatatgtctcaggtatttttatgacttctactaaaattcacactgaaactttatcttctaaactggaatcattacttaattttaactaaccaacaaccacaaaagcagcagctactgctaaatattggattactgacaaaggaattcagttttgtggaatctggtgtttgcactataggttaagagttgccatttaaatgtttcttattcataattaggttttgttccgctttagaaaaaaataaattcccaaatgaattgcatcagtgtttccagcgtttcagctgtgggcttctaccaccactaagccgctcacctagagttgttacttttttgatgggatgacattccatggatttatgtactgaaatggatttcagattttaaagagaggaatgctctacgtgctcagaactgaattaaaatggcattatgtcaatagagaattcagctaccaaacaagaagtattgtttattttgcgatatgctgtgaaattcaaaagaaatgtaagaaataatctcttttcaatatactgatcatttagttaacttcctgagggatgtgaacagtgaaacagttggcaaataaatcaatatatatcag

SEQ ID NO: 140122 - DNA, 953 bp, Homo Sapiens
acgaaagaaaacaaacaaaaagagcacagtgaatatcatattccattacaatagtcccaggacttcattagacagactcccagtaattaagcctccaatcttaaaatgttaaacatttcaacatgtattgactaattcctgtaaaatacagaaagtgcaacatcaccaaacgtgcatttcccaggattcattttagaattctcatgaaaatttaataatagtatttcagttaattatggcatttgagaaaaaagatactaatggggaaagatcacatacatgctttgggtgatacgttaaaaaaacctacaataattagtagtattgccttaacatttctaaaatcacataaaaatgatcatctttgattgccatttcagtaattttgaatacagggtatgttattttctgctcactagtaatcaaaacacataaaacagacttgtaacaaatattcagagtcgattattttcataagctaaacagttccgatactttaagatttgtgtttgagcatacagtactgcaatgttggctacataaaataaaaaaatctttttaagaggaagctcaataatcagaggctgtattgcatttaaggatttaacactggctatatacaaaagggaaagcatttcaatgagaaatacttcacgttaccaagttctctcctttaatatggcaacattcagcagcttatgctactcttttatcctttggttcccagtgacaaacaatgcagtaataatgcctctggttttagttcctcttggatgacatttattagcagagagagagacctgatgctttagctgaaatttggcagcccaagaagtgcaccaactgctccaaagtaaccctcatgttctagaaacaatgcttttagttgaccttttgaccagtaatccagtgcatatgccaaaagtttcattgagagggtattgacacgtacc

SEQ ID NO: 140123 - DNA, 626 bp, Homo Sapiens
  misc_feature (154)..(162): n is a, c, g, or t
  misc_feature (181)..(191): n is a, c, g, or t
tttgattgttatcttttattttcatatgaaaaatagattttaagcaaaattcaaaaataactcgacactataaataaagagggccttaagtacattctttttgttaataagatttaccagtttgtaggttcaaatatgcagttaaaatcactgnnnnnnnnnaaacatgttacgaagattnnnnnnnnnnnggctcagccacatgttggtttaaattcccatatgcaactattcccatatgtactatgtacaagtgatttataaaaacattggcattaatggtacaggcaaagtaaactacagtggagtttcagaatctcagttcactgcatcttgattaaaaaaaccatgtgacattccaattatgaagtcagtgaggtagtggaggtgttttccttgaatatatttacacaagacagtattcctcatctggctgaggcattcttttcctgattttgtccaagttgagagtcctctgtgagggaagactccagctgagacagactgggtgatgacgctgaatctgcagaggtgctggtgaccattcccctaaagcatctacttgtctcctcaaactgtgtaaagtgccctctgtctgccgctttcctttaattaatacttctgct

SEQ ID NO: 140124 - DNA, 987 bp, Homo Sapiens
atagataaagcatttttttatttgccttggagcaatatattttgaattaagcccagcctcccatgtttcagtttaggtagctaagatacatgctggtgaaaagtaaaaaactaaattatttgtctttctgcctaccacataactattttaaataattttcttaggtgcttagttatcatggtcatgacatcataaagagtcccactttgtctttcctttaataataagcaacctctgtttatacgtatttgaaaaactgcctcatgtgatattgacagagctatagtattaaatacaaagatgaataaatggtgtgagtgaaaaatagtgtattcgactccaagctagctcaaaggcttacacgtccatttcaacattgggaacaattcactatagaatgtgaaaggaaaatgacagaccaatatacaaatttttgtaggaataattttgcatatataccacaagatcattatcacatattaaaaataaatacactgtttgttaggtaattctgaaattgtcatttctattttggagttacaaataataagccctgagacagaagacactggtcctcacacagcagctgccattgctctgttctcagttgcggtgctttatatagaacaataggtatacaaaagcgtttgagccattccggtattcccactgctctgattgatgagagacaagttgtgggcaatatcttttcgtaagtctaactggtcaagttctataccctctaccacaagtggagggagctccagggccttctgataatagtggattgcaagatgaatcagccccaactgatgaaggccacggcccaaattgtagaatgattcctggcagggcccacgtaaactgaggtatcgattaagaaaggaaaagccctgtgcaataagagcatgtctccgtgacacatacttctgagatgccatatgaataaaggttaggcctatacagaagctatatagaggttcgtca

SEQ ID NO: 140125 - DNA, 646 bp, Homo Sapiens
  misc_feature (597)..(597): n is a, c, g, or t
  misc_feature (602)..(602): n is a, c, g, or t
  misc_feature (635)..(635): n is a, c, g, or t
atcattttctcattttaaaatttattcttaggtactttttcttgtcctattataaacagcatttcttaattacattaaaaagccaatcttgtattcctgagaccaatccattttggtcatcatttgttacattttgaatacactgttagacttggtttgcaaaaacttattttcctactgaagggtacaatgtgttttatgtatgtgtgtgttatgtatctgtcagatcaaattgattagctgtactatttaaatcttctatgtccttaataatcttcataatttagtctctgcaagatctattaattactgagaggggtatgttgaaaatgcccattatgttggtagactgacctatttctctttgtagtgtgttcatttttccttttggcccttctcctctccagagacctggtcaggggctccccagcctgccgcctaacacaagtccctttcctggtccggaccctggctttcctggccctggtggtgaggatggggggaagcccttgaatccacctgcttctactgcttttccccaggagccccactcaggctccccggctgctgctgttaatgggaaccagcccagtttcnccccngaacagcagtgggcggggtgggggcactccagnatgcaacagct

SEQ ID NO: 140126 - DNA, 552 bp, Homo Sapiens
  misc_feature (470)..(496): n is a, c, g, or t
ctgtcctaaatctaagtttattcatattgtaaaataaatgggggcaatctcacaggcagcacagcaaataagaactctgggatttctccttaataatgggtaagagagaaggctgttctagcccagggtttctcaactttggcactattaacattaggggttggttaattctttgttgtggggtctgtcccattcattataaaatgtttagcgacatcctcggcctttacccactagatctcagtagcagcccctacctattccttctcacccctcatcgtgtcaacgaaaactatctctagacattgcccattgtcttctgagggcagaatctccccaggacgagaaatagtggtatagccaaggtattagtcccatttccatgtgataggacttaaatctatttgtggttattattgcatcattttaatccacagcaggtttctgcaactcaggtaatatccaatagnnnnnnnnnnnnnnnnnnnnnnnnnnngagacagggtctctgtcacccaggctggtgtcacccagtgcagtgacaggatcatg

SEQ ID NO: 140127 - DNA, 211 bp, Homo Sapiens
tttgattatatattgacaaattattgtatatttttatagggtacaatacggttttatgatttttgaatataaggtggaatgattacactaattaacatatgatctcaaatatttaacttttttatgagaacattagaaatttactctcttagcaatattgaaatatacattcaattattcctatatttagcatgctgtgcaagtgatcttt

SEQ ID NO: 140128 - DNA, 547 bp, Homo Sapiens
ccagtcttttctatttttaataccgagccattacataatccacacagtaattgctgacttgaaaaactattggcaacattagaaaatccccagagttttaaacaggaaaaggattactacagcacaaaagcctttggtagtttcactgactagtaaaccattggtaatcgtcacttgccagtggaagtcacatgggccctgggaaacactcccctatctcagggaaagcaggctgggggaagggatgaaatgcagcctcagctgggaggaggaggctgctggtggggtggtgtgctgagctctgagtggggctccaacaagtgacctccagccaaaagtgctgaaggagtgagcttcaggttgtcctcgggccaccttttactgcttttgtttcttgctagggaatgagtgaagtctccagcggcccagtccttttcctctcggtttcccaccttcctacagcctccaacatattcctgtaagagcctgagggagggtggactactccagttaaatagattttataaagacacaggagccctcgtgc

SEQ ID NO: 140129 - DNA, 654 bp, Homo Sapiens
  misc_feature (585)..(585): n is a, c, g, or t
tttttaaagctcatgagaaggcacgacatcacttttatgtatgaatgtgagaagaatgaaacactacattaacagagaacaagacaaatcagacggtgagaccggacacagcttttgtccaaagtcggcttgcaggaggcggcaggattcagcgccatggggtggccacagaggacacacaggggtcagcagaggacatgtggggtccgtggccgcgaacgctgctgaggaaaggccccagaacccctggtgtatacagtccccgaaagatgacggacgatgagtgctatgtgctcaggaggccgggaggctgagcaagccattccacaggggacgcacagcctcagggctgcgaccccacgggcagcaggcagtctttctccgagtttcaactgcagcgctggaaagagccgctccaggctcaacctccagtcgtcagagagaaaccaagaccctctgtcttcaccctcatgaccaaagtcagccgcctgtccgagcttcctgctccactccttgctgctggctagacacctggtgtttcaaggctaagacccacctggactcctacgttcacgttaatgattntggctgaagaaaggaaggcacaagtaatcacacacactttaccatcttagcctgcggaagacacaaacg

SEQ ID NO: 140130 - DNA, 991 bp, Homo Sapiens
gaattgacatttgtcaccctttatttcaataaccagccaggagaaccttccagccatggtgaagatacgaacgctcagcgaacaaacggtacttactgtgtgctgtggtccaagtaagtgattactctgtctccctcttcctctaagcgtttacttacatggttaagatattctggaacctctctttcctgcattaacctttggccttcggcagcatataagcaattagtctcttccaaaaatttcagttcaaatgaatctttatacacctgcaggtcagacagcatgcccaggaggctccgcaacaggctccggtccacggcctcgccgctcctctcgcgctcgatcagcagtaggattccatcaatggttttactctgaaccattttatcactaataatatgggttctaaacagttctaatcccatatcccagatggagggcagcgtggagttctgcagcacataggtgcggtccaagaacaggaagatgcttctgatcatgatcatttgtctgcagtggtcctgccagcacgtgttaatcttctttaaaaataaaacactatctagtgagtcttctctaaacggaaggatctgtgcctggacgtggtcttcacaggcctgacgcagttgcttgtagagcattggggagactttgtgagaacagagattttccacagcctggtagagctcctcgaggttgtacctgatggaggtgctgctctgcacggcccgcaccgcctcgtgcagcttccgccacgtgtcctgcgtgtagttgtcgggcagccgaggtctgtctcggaagttcttgatgaccagcttcttggagccgcccgcgccccccggcttggcgggcgcggcggccagggccgcgggcttggtgaggccgttggtgcggcccacgagcgccgagaagctgcccttccgcggggcctcgtccgccatggctgggccggcctcgtgccgaattaacacccagcctcgctacctgc

SEQ ID NO: 140131 - DNA, 806 bp, Homo Sapiens
cgatcagcagtaggattccatcaatggttgtactctgaaccattttatcactaataatatgggttttaaacagttttaatcccatatcccagatggagggcagcgtggagttctgcagcacataggtgcggtccaagaccaggaagatgcttctgatcatgatcatttgtctgcagtggtcctgccagcacgtgttaatcttctttaaaaataaaacactatctagtgagtcttctctaaacggaaggatctgtgcctggacgtggtcttcacaggcctgacgcagttgcttgtagagcattggggagactttgtgagaacagagattttccacagcctggtagagctcctcgaggttgtacctgatggaggtgctgctctgcacggcccgcaccgcctcgtgcagcttccgccacgtgtcctgcgtgtagttgtcgggcagccgaggtctgtctgcagcaggtgggtcctagccggggagcgcgcggcggcgtggttggccctcggcgtgttccgtgtgtcccctcctgccttggaccctcaggccttttcctttcccgcctcgccaccctttttccgttcgggtccccggcgggcagccgcgcgagccgaacagcggcggccgggactcgggaaggcggcccgagttctcccctgcagggccgccgtgggggccgggcggtgtccgtggatcgcggagtcgtcgcggtgtaagtagacgcggcggtcccaggtcgctgccctcacttgctggcacgtgtggccgcgctcccaggcggtccgaagggcctgcgggccacgccccc

SEQ ID NO: 140132 - DNA, 615 bp, Homo Sapiens
  misc_feature (64)..(75): n is a, c, g, or t
tttttttgagaaggcacgacatcacttttatgtatgaatgtgagaagaatgaaacactacattnnnnnnnnnnnngttggcggcaggattcagcgccatggggtggccacagaggacacacaggggtcagcagaggacatgtggggtccgtggccgcgaacgctgctgaggaaaggccccagaacccctggtgtatacagtccccgaaagatgacggacgatgagtgctatgtgctcaggaggccgggaggctgagcaagccattccacaggggacgcacagcctcagggctgcgaccccacgggcagcaggcagtctttctccgagtttcaactgcagcgctggaaagagccgctccaggctcaacctccagtcgtcagagagaaaccaagaccctctgtcttcaccctcatgaccaaagtcagccgcctgtccgagcttcctgctccactccttgctgctggctagacacctggtgtttcaaggctaagacccacctggactcctacgttcacgttaatgattttggcagatggagggcagcgtggagttctgcagcacataggtgcggtccaagaacaggaagatgcttctgatcatgatcatttgtctgca

SEQ ID NO: 140133 - DNA, 1013 bp, Homo Sapiens
  misc_feature (283)..(297): n is a, c, g, or t
tttttttctcttaatcatgaaagcaaaaagtttattcatgtttgaaactacatataactaccacgaggaagactttttcaatccagggtgtaatccagttagaaaggaacacgaaacgtttttaatacattagaatcaccgccacaaattattttcatgactcaatcagtttcagaatcgcatacaatacaaaaagagagaaaggagagggggccccattacacagggtgaaatatacagtactgaatactgaaatctgaatgcatcacaattagtcgctgcnnnnnnnnnnnnnnngcatggattagtaataagatgaagaacattcaaaatgtttctcagtatttacaacagttttaccgatcctgtgttgaattaagacccaatgtttccacactcggttttttaaaagttgcaagtgcaaccctgatttttcttttaaaagattacaatgtacattacattttatgaagggaaacaaagagttaattacaagatgcaaaaagataagaaagagacaaactacagcgtgagtattgttcagaggtagtaagtgagcactctaagctacagaacatgttgacattctattggtttgtatgagttcgcatgaggtaataaagctgtgttttgattggtgggatgtataaatactcttttgctacactatatacaacactccagagagcagggccttttgcagatgcccagaggacgtagcaaaccttgacaagtctgtgcagcacccagtgcacaccgtaaaaccccagacggatcaatctcgttttcacctctatcagcagcaagtatcttcgtctctcagaacaatctggatccataattttattaccgagcagactctgggcactggtgctttcagagagagaaacgatgctaccagtctctgatctaattataacataagagatctgaacacaaacgtgacgaggaagattcttaaacacaaccatcattaacagggataggcaaacagctctttattccaactccat

SEQ ID NO: 140134 - DNA, 683 bp, Homo Sapiens
  misc_feature (362)..(403): n is a, c, g, or t
taggaggcacagcacttccagggtcacacactattaagtggggagctatgcaccctgcttcatggggcgctgcagcccactccttgcatgtttggtgactgcaggttaagatagtgccagttccactgttgggcctcagggtcagtgctactccgggtaccagtcggagaacattttgtggtgatctgatgccatttctctctgttgccctacccatgtgatgtcaaaccctgtgtatgttgcagttttttggaagcggttgacttgggctagtgctacttgaacactcacagaactttggccccctaactctggctgcaaaccagacttatctaggagactttgaaaagtagattccgggnnnnnnnnnnnnnnnnnnnnnnnnnnnnnnnnnnnnnnnnnngcctctatgctttttgtttctttgatatatctaaacttaaggtcagaacagaaattcatgtgctgaacagaatggattctttttgcagtaccaatccaattgaatcctctttttattttcctgcgtccttaccagtcactttgatagtgctaactaacctacactatgggggttattcatgaattaagtatgatagaaaaaataaagaccttgaaattgtcgtgtaccctgtggatttgaggcttattactacaacctggctggataacacgttcgcgag

SEQ ID NO: 140135 - DNA, 549 bp, Homo Sapiens
atgaagccataagtttttaatgaaaaaaaatgtatgccacagtgtctatatattcatctgaagagtacaaagatggagttctgagaaaaaagggtttatcactatagaaaataaatctggttcttaaattatgttcaaagcaaacattaaaacagtaatgtctcatacactgaaataaagcaattagaggtaataaattataaatacagtagttcaaatattgttttaagcattagtttttctaaacaagttaaattcaaaacattttaaatctgttatattttttcaaagggatgtacaaatgaaagccttcatagaaatctaaaacgataccaccttgtgatcttcatatagaatatgctgaaccttgaccatttttgatttataacatactttggttaatacattatgttccatatgcctttatatttgggaggaatcagattgtgatttgtagcctttacatgcagtttacccaaaccttcttcacatccaggtcttgcttgattctctggagaagttttgtcagactcataattaaaatgatgc

SEQ ID NO: 140136 - DNA, 858 bp, Homo Sapiens
tgtaggtcctcaattttaagcaaaggtactacccatggttgggggaggtgttgaaaagggccgaaggatacatatatatgtgcattagggtatataggaaatctatgtacttcttaattctgctgttgaagtttaaaactgccttaactaatgaagtatatttattctaaaaaggaatctaaccatctaaaaatgtttttaataacaaaattaaatcatattaaaaaccacttcgccatttgtaataagaactctcactaataatgaatgcataaagaaaatgtggtctatacatgcaatgaattattactcagccttaaaaaggaagaaaatcttgccatttgcagaaacatgcacataccagaaagatattgtgctaagaaataagccaaacaggaacaaagtattacataatcccatctgcaatagtctggatgtatgtattcccctctaattcctatgttgaaatcttatcaccaaggtgatagtattagaaggtgaggcctcagggaagtgatgaggtgagggctcttccctctcgaatggactgggagtatattcattctctgccactcttttgtcttccaccatgtaaggatgcaggaagaagtctctcatcaggtaccagatgacagtgccttgatcctggacttcccagcttccagaacagagatttattcattgtttgctgatcgtgaaaatgcacagagcactctggaagcatagctgcagggacaaagacccgaaccccagagcttccagaacagcctcttattgcagcaggagccgggattctctgacggaagatctcggccgtaatggccgaattcccgggcatatgtccggtaccgtcgactg

SEQ ID NO: 140137 - DNA, 685 bp, Homo Sapiens
  misc_feature (538)..(538): n is a, c, g, or t
  misc_feature (605)..(605): n is a, c, g, or t
ggctgaattcctcatttacctattccaggcaaagtgattggaaagaacgggaaagtgatccaggagattgtggataaatctggtgtggtgagggttcgagtggaaggtgataatgacaagaagaaccccagggcggaggtatgggtacggggcaagtgggcatagagattggtttccagaagtaaatgggattgtcctctgagggctgggattgttctttgagagggtggagtacggaaagttgtttaacactagtagatttagagcccagaatgatcccactgggcaggctcccctaggagactgggcggcgttaatccttccatttcattttcctttctgatccatcgtttctgctctctgttctctagggaatggttcccttcatttttgttggcacccgagagaacatcagcaatgcccaggctttgctggagtatcacctctcctacctgcaggtacccaggccgggagagaaaaatgctgggtgtgaaaagggaactaagactgctgtgggggtcagctcagggattttggntctctgtttgtctctccgtgtagaacagaaaacatctgtggaaatttggggctatagggttgggtcncagaattttccttgtttagccagtgtcttccttctccctgcattcctgagaggttagatatagagggacagtcagggtgc

SEQ ID NO: 140138 - DNA, 1056 bp, Homo Sapiens
  misc_feature (68)..(185): n is a, c, g, or t
ggttcaagcaattctcccgcctcaacctcgcgagtagctgcgactacaggcatgcgccaccatgctcnnnnnnnnnnnnnnnnnnnnnnnnnnnnnnnnnnnnnnnnnnnnnnnnnnnnnnnnnnnnnnnnnnnnnnnnnnnnnnnnnnnnnnnnnnnnnnnnnnnnnnnnnnnnnnnnnnnnnnatgagccactgtgcccggcctgttttctttcttttaaaacaagaataatgaggcaaaatatttgagtgaaaacaaataacacaaaagcacaactcttggaggaaaaaatctgacatttaccaacagttttggggaggtgatacatcaacacttaaatgatgcaatccatcacgtgaatctgtaacgtgtctatgtcaggcagaacctctccacacttggggcaggaatgaatcggaatattccgctgttgccgccagtccctgtcctcagctcctctttgaacaaggtaagcctgctggtcagagtcacttgttctcgccccatgacgactctgcatctccatcaaggactgcctgcctccgtcttcgaaagcatcattctctttcagcagaactgccagctgcaatgccagttgctccttttcctcatgaattttctctctcgctgctctttcagcatgaaaatcagaacagtaaacttccatctgagccctgaggatggtcatggtttccaggtcctcttcctgcttggcaatggtttgcttcatttcatccatttgcagctgtttggaagccagagccttctctgccagttccagtttttcactcagttccttcagcactgccctgtccactttttctgactcttttcttgttagttcctcaattgttttcaatgcattattatgttcttgaagaagcttgttgtgtgtcatctgtagcacagttaatttggacttttcatcctctgttttagcctgttccattttgatttctgatagcatgctttccacttgtagctgtaacttttcctcgtgccgaattcgccacccaggcctcgctacctaggaagtgtggggggcggtggggta

SEQ ID NO: 140139 - DNA, 703 bp, Homo Sapiens
  misc_feature (560)..(560): n is a, c, g, or t
  misc_feature (658)..(658): n is a, c, g, or t
gattcaatgacaaatatgaatgactctacctatttgtaaaaatgtgaacattaaaaacagtacaatgactgggctctcacaaaccgtgcaaattcaatttgaaatgttcatctggtataatattcagctgtcaagaggaagcaactcaaaggacatcacacagtctataaaccagctcgaaggagccttccagactttgccctgccgaaccctctctgggtgataattacacaaatcttcatagatgatatactgtgtgcagaagcgctgatcagaatcgggtctcgcatggtatgcgactgtattgatggtctgagtcacgtcactgtctggcttgggctttctactgaggatctggcccccacctgcagtgacgagcttaataaggttgtcctttggatggtgtttgaaggttccccacaaatagaagtagcatccatcaaacagctttggcaacagctgttctctgttgagcctgcttctgcgtggaccttcaggaatttcatacttttcttcctgttcacatacttttcttcgtagacatgcttttacccattcanattttagaatccagcatccattgagaatcccaagcatacacttcaaggtactttgaactgcatcaccaggaacaacaacatgagttactgtactgtcnaactcagtatattttttagccttaagattactgcaagctcactga

SEQ ID NO: 140140 - DNA, 564 bp, Homo Sapiens
  misc_feature (153)..(488): n is a, c, g, or t
gtgtaaaccagtgtgcctagcctacagttttttaattttataaaatgttatttctaatttttctccaaaagtaaaagtggcattccaatggcaatattaattcaggtatccagaactcttaacctaaatttgggtgagatgacgaaaagtgtnnnnnnnnnnnnnnnnnnnnnnnnnnnnnnnnnnnnnnnnnnnnnnnnnnnnnnnnnnnnnnnnnnnnnnnnnnnnnnnnnnnnnnnnnnnnnnnnnnnnnnnnnnnnnnnnnnnnnnnnnnnnnnnnnnnnnnnnnnnnnnnnnnnnnnnnnnnnnnnnnnnnnnnnnnnnnnnnnnnnnnnnnnnnnnnnnnnnnnnnnnnnnnnnnnnnnnnnnnnnnnnnnnnnnnnnnnnnnnnnnnnnnnnnnnnnnnnnnnnnnnnnnnnnnnnnnnnnnnnnnnnnnnnnnnnnnnnnnnnnnnnnnnnnnnnnnnnnnnnnnnnnnnnnnnnnnnnnattcaatcacatattaatagcttttattttttgggtttgatcccaccaagaccaaagctaatgatttcaggtattg

SEQ ID NO: 140141 - DNA, 923 bp, Homo Sapiens
tttttgaaggtataatttttattgacgtgtcctcagcacaaggtctgttttcaattttctgagaaatcaacttgagtaacgtataaaaattaaaacaacactgaactttcgttccagttgctgtcaccaccaagcctgctggctggcacctggaggagctgggaacaaaaggtaccatggcaggtgaaaggcccaagtgaccaacactacatgggctgatcatttcagctaaatgccttctgtttactgaaaaacatcttggatagcccagttctgcggtcaagtgtgctgtatctgcctccctgggccacctgctgggtacttgtgcagtaggaactgtgttttacacgtctctgaatcttcctcagtgcttatttctcagtggttgctgaactaatacttgctaaacaaatgaattcttctttattcagagtccatacaaatacaggtaccttcataagcgcaatgttactggagacataaaagttgaatcaacagagaacaagtactccctatattcttcataggatgatgggtgttatccaagccacgtgtttactgtctgactccatcaacagcagccaacagagatgaatggaagcaaagaggagaaagaaaacatccaggttgttgaaatcatcacaactgcatctctctactgtcgctttcagaaccatttcatgatcttgtaggtgatatacggtgcttaaaagtaaaatcaatgacatacagccacggctggggatgttcaggaggccttcgctttcaccttggacagcagcatctcgttcttgcggccctcctccttgaactctttcacagtcttaaagtatagcctctgcttttctaacagctccaagtactggtcgttcaactggtctcttctcattttgttctcttgctttttcttttccacctcgtgc

SEQ ID NO: 140142 - DNA, 323 bp, Homo Sapiens
ctcttacaaatatgtttttggaagcatgataaatgtttaaatgtagtcaacatctgtaactcttacatgagtgtccagaggcactcatgggaaaattggttttgctttctttgtacacaccagagacccatctgaggtcatctgattataaggccatgtttatataaagggaatttcacccacagttcagctggctgttgattttcactgcaactctgcctttgtgtgtattggcgatcatttgtaatgctcttacacttcgtctttaatgttctttttggagttaggacctctcagttcataaagttttttacaattcaaaa

SEQ ID NO: 140143 - DNA, 665 bp, Homo Sapiens
  misc_feature (86)..(86): n is a, c, g, or t
  misc_feature (645)..(645): n is a, c, g, or t
cactggtacattcaataaacatttattagcacctgcagaaaaggcacagagggggatataagactttatgaatctgaccaactgtnggaggattcattacagtcaaaaagaatggtcagagaagcagcccccaaatcacaaccatccacccagtagacatcaccaagtgctggtttagggcaagtagccagtctaaacatccatttaattctagtgggagagaacaaacagtttcaggtcttacctcttctagacaactctcccgtagcctcctatcaaatatgttttgattacaaaccccttctagaacttagaagataatttgtctaacccagtctacattttctaacacctgataatgtgtagtggtaaataaagcccagcccacaatttctatagttgagactccagggggagtggcttcagatcagtgacaaatgagcaccaactctggcatgtatggcatgggtcactgtgataggatgtttttccctacatggcttctctgatgttgaacaaggtatgaaattcgggtgaagccttttccacacgcattacactgatagggtttctcaccagtgtggattttttgatgttcaatgaggcctgtattctgagtgaaacttctttcacactcattacatnttatagacatgggagtttca

SEQ ID NO: 140144 - DNA, 660 bp, Homo Sapiens
gaaacacaataagcacttttattgctcctaaagtcttcgacttggccgcagtgctgggctcagctggtctcgctcatatgtctttatagctactcttctcaagtggtggactcagtttccccacctctgaatctgggtgagccctgggactccctttggccagtagaaggtagccgaagtggctgcgtgcggatcagctggagctggctggtctaggatggcctggattgggacccctgaactctccttctcatggtctctgcttgtccagcaggctggcctgggctttctcccgggcagaggcggaggtccgaagcaaaggagcagcacgcaggttctcttcaggtggaggaaagcagaggcgtcagctcagactatgcctttttcacataaaaaatgattttcagctgaaggcaattaagaagcagaaagtgcaggaaaagttcaggtttccctccccttttctgcctaaaggcacgatataaactctccatcactggacacaacccttgactcagaggtggtaccagaggctgctgcagacaaatcctgttgcatcagcttcctctcggatatttaccatcccatagtttaccacctttggaagcctaaaactgttgtccttggtcatcctatctctacaaatttattgtatttttt

SEQ ID NO: 140145 - DNA, 862 bp, Homo Sapiens
tttgattttatagcttttaaagttatattttgtatattcattttttttgtataaaatgttaaaagttataaaatggaagtatataacatattttgacaactgatgcttcccagcatgcaattcaacaggttcaagccccctttatgcttccctaactcctcaaaggctgggaagggacagcaggttagacactgcacgaggatattacacccaggcattgaaggtcacattccagaaggtccagttgaaagtgactgagtgcattttaagtcacacatggataactgaaggtctgtttgtaaagttcacatgctgaactcctacaagctgtaaaacagagttgataggtttgtgatccaacctattcctatcgcggtgtataaaatggatgttgttacctggacctaaaatgagggttccaccttgctgagctgggtctccttgaaaatcaaagagagggccagtcactgcccgccacaggctctgaaggcttcctgagagtagatttgattttatgtgggggctctgtcctgaggaagcaatttcttcacctcttttcattcccaatcttttataaatttctctctcaggatcgacatagatttcatgagaatatccagtcagcttgcaaaaaggctcaatatgatggtaggatgactgtccaatcactataagggtgacatttgcttcttgtaagaaactcctggggattttggccagatcctctacgtattccttgcagatgtaacacaggaaatgccgcacgaacaccaccacggcgcggcgctcccggaacagcgcgccgaacggtacccgctgcccgcgggcgtccagcaccggcagctcggccacggcggccgca

SEQ ID NO: 140146 - DNA, 803 bp, Homo Sapiens
cttgttggttgattgtataattttgaacactataatagcaattcagagacagacattgttaaaggtttgatgtatataaaaattccatgtttgattttttaaaatatgtgtataagtctgtcatgtgctaaacaaaataatatgaaagacctagttaaaaattctaaccaatgtaaaatgaccatttttctgttgcattaaacctttacaggtaatggaacatgagcttcacccatattaaatattttggcccctttaaggtcaaaatacagatcatctagaagttagattcaaaatggaaaacctattcatggctcagatttttcattgtgggttaaaaatgggtgtctctgtactagtattgtatttattcaattgaacttgtattctgatttctaaccttgctacctattgctgttttatgtactgatgaaagtacctatttgtgtatattggatttttcacttggttagctaaagaagatgtaaaaatatctaaaataatgttcatggtgaatcttattttgagaaatacatgttaaaaaagggaccagtatttctttattttctgggtgttatatttaaaaaagcaagtttggatttttacacctaatttactaggaaaatattttattctgtaattcatgttaagattatgtatggtttgcattttaaggggatttatgttaggttaattagttgtttctgtaaatcatttgtaatagcatagtgctttttactcattgctgtatctttttctgaaaacactgttgttaacatctaattcagtatccttattggtac

SEQ ID NO: 140147 - DNA, 513 bp, Homo Sapiens
gttactgagctggcatcttcttccttgaatgcatattggcctctgaggcacttcctggttaacctcattccacagctgagaaaacccaggcttggcacaggcaaggaatctgacccaacgtctcccatcttattagtggaaggaccaagactggacccacaactgtgctcctgttttgagtcaccatgctgccctcaagatcagatctcaaaacaagcagacatggggggctcagaaagtccccagcctagaactttcctgtcaacccaatgacactaagggctaagctggctgcttattcttctggattcacactagaatgaccttggggtgtgtttcacacatgccgatgtctggagtttcacccccagctaactgactatgaatctctgggttggggcctgggcactgatattcatgcagagcttctgagatggtcctattgcattaccaaggtcgacacctgcagaaacattgcacactttttcattcatttagttattaaataggtaa

SEQ ID NO: 140148 - DNA, 1546 bp, Homo Sapiens
tttcacaatatattgcaaaattttaataccatgtggttaaacacaatattcaaatattaaacttttcaagcacatgaaagtcaccttctgaaagacaaactgggctttttttataactacctttgtgtaactttataaaattacttccctcaacaatatctgacactgatcttgatactagttagaaagtctgatgtaagatgatgacatctcaacgtcagtgatttaggagattatcttcagaattcatcagaggaccaatcgtcatcttcatcccttacttctcggtatctccctgaagactccccttctggattataactccgcattttaatattcagtctttcagctaatttttgcgctgcgagctttgcttgcatctcctcataattctgtttctgctgtttctgaagtgccaaggattcttctatggagagcagctgcgtgggcatatggtgaagtggtagaagccgagctgctgtgatgtcatcaagatgctgcttatccctgcgccgccgctcttctgaggaaataggagacccactcttctggcaatgactagatgaatcattttgtcgaaaaggtaacacattggttttaaatttacgcagctggggcactgggtttttggctcgcatttctagcacttccatgtaatgaggtttcttctcagtcccactgtgaaaggccttgtcaagttcttagtacttgcgttttcttctgactgttgttcaccttggtccgcaatggtgatcctctgtaacctgtcaataaacaggttgtccaaagctgctggaagtatcttccgcttgacttgaaacacgatgccgcgggtgatgctcactagcttcagatgaaggtggtaccctgtctctattgctggaagctgggcccttattcactgtgtactcaacctctgaagtctcttcatcaccttcaagagtaggacgtccaagtccctggttttgtgaggtttgagatgacttgatgttatctacagaggaacatccaggaactagtgatgaagtatcaagtatcgggtcagaattctgggccttatctgtacccacatcaacttctgcaattgctttttgccttagcttacagtctaaactaacagggttaaacagttcactttttcttctaacttcttcacattctgcaatggcagctttcagtttggcaaaagagtcaaagatctttttacctttgtcgggcaatttgcaaatgaatttttcgcttcgcgcaaaagtctctcctggcgcttcaacatttcccgcagctccacccaacatccgctgcgccaagtcctcgggagcttggggctcgaagccgcggggcagcgagcacattctgcgcgggctgaggctggcgggcggcgggcactcggcttcctcggcaggccccgctactagcgccgatccgcggacgcggtgactccggggcacgagcgggagtcgccatcgacgcgtgggtcgacatatcccgggaattccggaccgtaccagcctgctttttgtacaactgttctatagtcaccaatgcc

SEQ ID NO: 140149 - DNA, 534 bp, Homo Sapiens
tgccgtcatgggccgttctacccacaggaaggtaaaaatgccaataaaataggcagtttgttctaaagcagcaatcgcaaacattctatagaaatcccattccttagcatatctgatcaagtcatcaggggcagtattctggttggaatcttgaagctgccaccacctcaggtatgcttcacaaagcaaacaaaatatgcagagttttccatggatatttatttgagtattgaaaagaatatgtctgtaggcctgagctttgcacaatatagcattaatcaagatgataacaggatcatactcgatatatttgtctacaggtttctggcaggatttacagatggttatcttcagcacaccgtggttatagtctcggtacaactctttggcctcctggttgcattcgatgcacctgtactggcaggaggccgaggcagcagtaggagtcgctgccaccccatccacgttccccttcccctgctgcaggccgctccgcccgccgttgcccatttccactcaactgcagtccagaac

SEQ ID NO: 140150 - DNA, 528 bp, Homo Sapiens
ctttttgcaagttctccatagaatttactaaataattctccaattttaagttcatccatgagtctagaacttctaaaagtctgaagtaacttaataagaaggtccagggctggaattttacatttagcagctctatcttttgtataaacactggtacaagtgttcttaatttcaacagagtaaggtgcgatcttctggcccattttttctaagaaaatacataaaaactttaggatttcttctctacattcacgaaattcaatactgttgagtgacttccggacaaatacaagcaaaccgaaatctctggaaaaaaactaaagatgtctgtaatgcttttaatagggcacaacatcacggtctgcatactcgtgttttaaagaaggaatacaggagatccacataattaagtatttgaatatttaaaatgctaaaaagaggacttttactacacaggggaaaaagtcccacccaggcattgctaaagagttaaaagaacatgacttcacttacatttcttcacttttt

SEQ ID NO: 140151 - DNA, 699 bp, Homo Sapiens
tttttcagatttagttttttattacaaaagacaactatgcttacaaggtgaattgaattacaagccttttactactttttggtgagttaagaaaaagctatttaatctaacaaagtttcactttagcactcagctaaatagaaatttcgaaattttatttaaagatatgataaaataccatatggccctggtttcaagagaaattcatttaataagttgtgtaaatgagtttattagttaaagtgaacttacaaaatatctgttggttttataaaccaaagcaaactagttcatttgaattgctatgtgcccccctagcatttttaaatgcaagacaatgtatttgtagaaatgatcattctttctcagggaatgctaatttaccatgctcccatggtaaattctacaggaaactttcatggaaaatgtcaaagttaaggaaagtttagactcaaaaataataaatttttggtaatgatagtttttggaacacgtataattccatttacattctcagcttttcaattgtatttatctgaaaattagtttcataaaatgttacatggttataactcaatattactgtataaagtatttgagaaatgtctggtaactctcttgtgattaggtaacttcatgactcaaacctcctgttactgttttgatgctagctagcacttattaagctaccttttaatg

SEQ ID NO: 140152 - DNA, 435 bp, Homo Sapiens
  misc_feature (360)..(360): n is a, c, g, or t
ttttttgttatagcaagctaactttataagagactttttactatggttccctcagagacttttagattggaatagcacttgttccttcatgaaaacaaatcttcagtcatctccttgtaaatagcatggaggacagcagctgcttgaagggaaaccttcagccttcctattggggtagccagatcttcagggctaacaatgtctagctcttgctctagaatatctcttcctgactccaggatctgccacagttgaagatatgcatatcccacttcttcacattctttcttttcttcatccagaggatcacttaccactgtaaactttaaatgtccttgatccaggatcttgtccattcangcatgtcgaacagaaaccgccttcggccttgctgctcctggtgggtcccaggtctattaccttgctaaagtggaa

SEQ ID NO: 140153 - DNA, 1942 bp, Homo Sapiens
  misc_feature (52)..(52): n is a, c, g, or t
  misc_feature (1782)..(1782): n is a, c, g, or t
atcatagttatgcatgctggtcctaagtgttacttctctattctgcttatcntgtctcacatgctattacagatgtgttagattctatgttatgaacaatgtacttggtactacagacaggagcgaccttttccagcattgctcgtaacaaaacaaaaatgttaactagaaaaactccttatgatgaagaaatctaaagccagagctgggactccaaaccccttccaggctggaagacaggtcgctgagtccaggcaaggggcccccgtaactgcttcccgccagaaagcccagccgcgtgagtgcagcagcagcaccccagccctggcgtgcccgcaccacgccctctagatactctcctagctcaggctgaacacgcctggattgtgtcggccgggacagccccgtcaggtgtggggcagctgacccacgtctgtggtgaacatgctcctccaaactaggacggtgaagggcccagggcgctgggaactgccaggcgctgactctccttctgggttctcaccagcaccggaacccaccccagccaatattcaggaagtgccgcggccgagccttcatcaaccctagtgagtttcccacagaactgaatcccttttcccaaattcagctgtgcatgagccctttttgtttggtgccctggagcactagtgtagttcaatattctcttcagaaggaaaactccagcagccaccggcctgcaggatgtgtgctgagcccacatgacctgaatggacgggtcatgtgggaggggccctggtgggagctgtgggccacacggctgagttcttccaatacggaagccccgagctggaggctcacacgctgtggggcagcccagagttgctggaagctttacaggggtgcgtagctaatggcgtcggtgtcgctcggtcgctgtggaggggtacccccgctattggggcggctcctcccggcatgctcaggtctcaaagtacttgtagatcgccgtcacatacagcatcacgttctgccagtcgggtcgttcagtccgtaccatttcattaatgtccagtgtggatttgatgccgacactttcagctgcctggaaagccagcatgaagttccttctcttatcctggctgttcagttcttgatatggaatgtgggcagggagatatgtatgcaggagggcacagaaggccagcccatcattccagctgctgctgaagtttgtaatgtcaatattctgatagccttctgttttcttctgacaccacttcagcaaggggttcttctttgatcctccatattctctggccaatgctgagagagggtctttcctttcttctcttattcggcttcggggtggtgggagtcacagatgccgttggagaagaggacagggaaagctgtggagacgtggttcccatagccatcagagaggctggcgacgctccctcctgtgcagaaatgtcccgtttcatttcttcactacttcgtcgagacactgagagggtcttggcactttccatcgcaggcactcttggcagggaagcaggccggctggctgaagatgttcttaacagatgctcttgaacagggatttccccatagtttggtctcttatctgacagggctgtcaggggtttggatgttgagattggtccacttatggaatgtctctgcataggggacacagctgctgcagtaggggttttcataggactatgggctcaggggcgttcgaggaattgcagctgcagcagggtttggtacttgagatgcactgtcaaaggactntgatgagggtttttactgtaggagttggctctgaggaagtcgaggaccttctactcagtcccattccctgccttaaggctgccaaatctctctcaacggcagtcaagtaattgtatacccggccctcgtgcggaaatcgccacccaggcctcgctacctt

SEQ ID NO: 140154 - DNA, 570 bp, Homo Sapiens
tttgaaatattcaggtaaggtctttattacgtttttaatatacttgccttatcagaattataatgaagactgtatttctgttttccataaactttcctccagtaccttaaagttacaaacatttagcaaatgaaatatagggaattagctcacttttgctaagaccatcttccagattgggtactcagagcaacaatgcatgtcagggattattcacaggtaatgagcatggtaaagtaaaacaactgagaaattcttttccccctaattcttgttgacaatctatatattagactgtcttcaattaggccctaacatagatgcttcagaaattacatttcagtcatcagttttgccatatagggccaaagtaggacatgcttctgaacacatactgatgctctgatataacagtgtttgaaaatcattttatgacaaatccatcagttgtaaatcaagaaggtaaggaaactgctttctgcaaaataatcaactgccccaaaatgaccacacaggaccttgtcattgcacttatactctcagactcctttagaagcatttgagttttat

SEQ ID NO: 140155 - DNA, 561 bp, Homo Sapiens
aaaattagaagccagtttaccattagagagagttttgatttgagatataaagaacatattcctctccaaaactgagtttcctctgatacaaaagtatttgccttctggagaagatatggtttgcaccgtccaacaggtgtgctctgaaggcccccactgaaatatattgcatcatagatgaggggaaagacttggttaatttctcttatcaaaagctagtcttcaggacatcctgtccaacttggctcccaggggcccaagggttcttctcagagattgttcttagagacccccaaacctgcagcccaagcccaggagccacctgtgcatcttcgccacgtcgccaggctgtcaggagcatgcgtctctcatagactggtctcctcacacactctgacggggatgttatagtgccgatcgtcctcagcaatgagcgttaccactggccagtccttgggtgggtcggtggggtagactgtgatgaattcttccgtgttgtacttggagaggcggtacacctggatggtgtggcgcacagcatagggcaagaaggaacatttc

SEQ ID NO: 140156 - DNA, 1148 bp, Homo Sapiens
  misc_feature (971)..(1037): n is a, c, g, or t
cttttcattttcattaaccaaaaatcgtgtcctcccgtgctggacggtccgggattcccgggatatcgtcgacccacgcgtccgcccacgcgtccgcccacgcgtccgaatacatgtttacctctttctttcctaaattgcattgaattgataggaaggatggcggaatcttaaagtgatacatgctaactgtagaaaaaaatagaaaatgcacataagcaaaaggaaacatttaaatgctatctttcaaagataactactcttaaaaccttgagtatcttttcagacctttttcttggcaaatgaatccatattgacatatttgatttttttaaaaacatggaaacgtactgttttgtaaattctttttaactgcacatctactgttcataaatatacctctgtaacataactttttgtggttctaatgtactctgttgtatagctaatacaagttaggatgcttttggccagaggtaacagtgtccaaatataattggcctaagtaacctaggaaattgtttgacataacacagggttcaggggtgtcattacagacacactttttttgccttgacctcagttggtttgttttgccttaggctattccacctctcgatcacaagagctgctgctataacttccagttttacatctttgtaaaattgtatctcaaaggcagaaaaaggcccatttccgtctcctcattttgttttattccatggaggaaggattttttaaacaaaagcccctcccagaagaattttcccccgtccaggttttccccttgggacctttaaaactcaacggtttcaccggacgaaaaggggcacaaggtcctcggaacacttttattcggggtccaacccgggactaagacaaacaaccaacttccctcgccctgtaaaaaaatccacacctaaaagcccttcaccccctcaaaagtggtgggtcgcaaaaacaaacaagtnnnnnnnnnnnnnnnnnnnnnnnnnnnnnnnnnnnnnnnnnnnnnnnnnnnnnnnnnnnnnnnnnnnactgataacgccaaaacaggggggtgctttttaaacccccaacagaaaaaatttggctaaaaccttccccacccttttgtttttttctgtatccggcggtggcgatacaac

SEQ ID NO: 140157 - DNA, 561 bp, Homo Sapiens
  misc_feature (150)..(172): n is a, c, g, or t
  misc_feature (197)..(273): n is a, c, g, or t
gctctctattcatgtgggcttgagttactgtctagtgtcctttcatttatcctgaaggactcttaggtctttcagtgatgaactctctacttttgtttatcttggaatgttttatttttcctttatgaaggtagttttgtgtataaaggnnnnnnnnnnnnnnnnnnnnnnnagacagagtctcaccctctcgcccnnnnnnnnnnnnnnnnnnnnnnnnnnnnnnnnnnnnnnnnnnnnnnnnnnnnnnnnnnnnnnnnnnnnnnnnnnnnncaacagcaacaaaacaaaaccctcgaggggccactttcctgtctttactccttttcccttctctattctttcaccagaagccctcatttgaccagtgaactcctaggccctcttgacccgcacattagctgggcgatttccttgttctgctaattcctaattctgcttaaaatgtatttggatttctgtttttgaacacttatgatgccaggcactgtaatgcttgaaacccgatctttccctagagaatgtaacatacgtttttattcatttaatcacttcattatg

SEQ ID NO: 140158 - DNA, 550 bp, Homo Sapiens
gaaattttattatcaatctttaaaattttaatcttgaccataagatacagcttccataagccttttttaacctttataacctttattaaggggtcggttaacacttcaagaaaacctttttaatctgatgcaggggcccgtatgctggtattgcatcagtgtgcctttgacatcaattattaacttgcagagaaactgaacttattttgtctctcaaaatcagcccttacaatctcacatgcctacctcttctgtggtagttcctgagccttgaggagttgaatagcttttacttctggccttatgtctcaggaatgcagtttattttgattgggatcttctaccaggcctgaagatgaggttttaattgctgtcagtgcttaagatttagcagaccttggtgtccttgttagacccaggagtcaaaggcctgtaacttaatgtcacaggtactttcaaagcacctacagaaatatacatggatgtaataaccttaattttaaaaaattatctcaaatactttttcctgagcaaatcaaaaattaagaag

SEQ ID NO: 140159 - DNA, 646 bp, Homo Sapiens
  misc_feature (227)..(252): n is a, c, g, or t
  misc_feature (578)..(586): n is a, c, g, or t
ctcatattactgacttgtattgcagctgggttactgaaaataaaccccaggtccaccccaatccctcaaacgagccacagctgtggttaacaatgattcatttgcattttattatttcaccaagagaagaaacagaagttgtctggctttcttcacaccaaccaataatttcgcattttaaagtttgggatgtttttcataatgagctgaatcaaaaatctatttgnnnnnnnnnnnnnnnnnnnnnnnnnngattcaggttgtttgcacgtaaaacatcaattggtaagtttcttttgtctttgcttccattttgctggaaaaagtttgaccaagcttgcatgctaatttgtccttagttgcaagtattataggcaattttgtactttgcctaatgaaaggataacccttcttcaacacaatcagaactcaacagtgattcagaagcaacatcctacccttaatactgtcagtttcgagtcatccacatgaaaatctttgataaggttgagaagatgtcgcgaggaatcaattaattgatgtgcctaagagttcagcaatactattttgctttaagnnnnnnnnngcaccattgattgattttttaaaatccacgttatttttcctgtgtctgaagtgtctatgt

SEQ ID NO: 140160 - DNA, 617 bp, Homo Sapiens
  misc_feature (51)..(74): n is a, c, g, or t
aaagtatatccctatttttagtgatgaaatctggaggactagttgtttgcnnnnnnnnnnnnnnnnnnnnnnnngagacagggtctcaaaaattaatatttcatacttttttttcttgtatttaaaaaatatagagccactgtgctcggccgcctcagttgtaatgttatgcttttctctgaagccaatttttaagaagttcagtcctcagctgtctgacccctccacagttggctttatattcagaaagtaaaaattacttaaggcagcttggaagtgaggcctgggaactactgggggcaactagtatgaacagcactatttacaggtctctttctcttgcctttgattcagagctgtcattctcagtaaatattgatagttttattgaaacaaaaggggtctttagcatgggaatagtaacagcagtgcataatcaagataattctgtatccttcactctttttctctgcctttttttacttaaaagtaaattcagactcttaaaatggtatagaattattagcttgaacattgaattatctcgtcttaactagaatgttttttaaaaaacagtttttaaatgtttttaaataaacatcttgctagtatggtgg

SEQ ID NO: 140161 - DNA, 181 bp, Homo Sapiens
ttttcaaagggtgatgcaaaaatagtttattatgatatagtttatgtaaagttaggtaatatttacaaaataaaaatgatcagctacatccagggaatctagcatgtcacacaaaggaataaatattctgacaaagtaacacttcaattgtagtgaatcgttgatcacaaactaactttgt

SEQ ID NO: 140162 - DNA, 446 bp, Homo Sapiens
ttttccccagtgtctcttttaaagaaaacatactttattttggtctaaattgtgaaaatacccaaaacatttgatagaaattgaactctgtcaacagtgttatttatactaagatcaggacagttccttgagatcatactgttttattactaagtttggcctttgttttacaaatgtaatgttcatatttatttgaattttaagattggttaaatgttaatgaaaagcaatccaattgttaatttttagtagtgccttttctctgtatgccttaattttattttatattaataattcaagttacccaccaaaatgaagattttttccaaaatcagtaggcttcacaagttcatttggccttagactgtgtattggtccttaaatgtttcttaatgcctgcctcctcctacccttttctacctcctttttaaaaaaataaatgaata

SEQ ID NO: 140163 - DNA, 508 bp, Homo Sapiens
cttcagagaagcctagtgattttaacacagaaaagacctctgtggcagttaaagaagaagtcctgcctatcaatgtggggatgctgaatggaggccaacgcattgactatgtgctacaggagaagcctattgaaagttttaatgagtatttatttgctttacaaagccatctatgctactgggagtctgaagatacagtattgctcgtcctcaaagagatctaccaaacccagggtatcttccttgatcagcctttacagtaaaaatgacccatctatggctgcttaatacggacattgagggatccttccccagaaaatccacctgtttgttgctgcaattttcctctcctcagctgcgtcatttcctgcatgttgcctgccacttactcaccactggggtctttggaagataatcttcctctttggaaatgaatggaaaagcaaaaggccctattacttttaaccactggcttcatataaacacttgccatttttttctgcataaa

SEQ ID NO: 140164 - DNA, 601 bp, Homo Sapiens
tggtgtgaaatattgtgtgaatatctaggcaaaacataacaatttggctcaattttcttctttagaggattcgtgctgtttttgttcataaagggtagtgaaatcattgaactatattttagaatgaaaatttttgattttattaaaatgattttttcaaggcagaaagtaaaaggaatgattgatagcggagtgcatatagagctagagcatatcatccttgaactctgcaaatcctttcttccattttaatatagcaagaacaattttgtctttactacatcttaaagaattagaacttgggttggtgtaagtgacttacttccagggaatcatgccctatttctaccagcaggtcatacccaaatgtcacactatctattgttaaccatgaatgatattcagatctattacttttcgtgaaaagtggaacatgttacttccaaccatggcctgtcaccgtgagtgtgatcagctttctccaaaaccacatgggtcgcaggagctaaggggtggtacccaaatgttaggaacagtgttaggaaagggcaagggaaaagaagtgactggatgtcttatgagaaaccggtaaatgactaaa

SEQ ID NO: 140165 - DNA, 363 bp, Homo Sapiens
  misc_feature (100)..(134): n is a, c, g, or t
gccaacattccatagtttgttcatggtaacagcagtaaggttctcatgccaagcattcctccttttacaagggggatagcatgatgctataagcctaggnnnnnnnnnnnnnnnnnnnnnnnnnnnnnnnnnnngagtaagacctactatatgatagcaaacagggtgactataagcaataataactgtacatttttaaataactgagtgtagctggattgtttgcaactcaatggataaatgcttgaggaggtagacaccccattctccatgatgtgcttatttatttcacattgcatgcctgtttcaagacatctcatgtaccccataaatatatacaccttctatatacccgtaagaatt

SEQ ID NO: 140166 - DNA, 819 bp, Homo Sapiens
ggacaaaagtattgggttttatttgcataatgtagaaacatactttacataagcactactcacatactttacaatgttacaaatatatatatgtatgaaagattcatgaaggcatttgatataaaacatacacagtatgctattttaatatacaaatgcttaaaagaaaatttagtcataagaattacaaaatcatcaataatttacaaaagttttcattttttcttaaaggtcacattctcatcctttgggatgtacaaaaattatgtggtttacacagttttatccacattcaaaacatcacgttttgaatgtcttcagcatagcatgtacagtataaaatgtttccataggaacacaaaagaaactgtcactagtggcctgctgtcagatggcttctaattcatcagttagccatttttaggacactagtccagcttattgctacaatcttcaagttgttctagtcacccaaattataatgaattcaatgtataccagaatttaccaataaagggtcaaagagttatataatatacaccaatatacacaaaacagctattctgagtaaaatgaatattccatacttaaataagaaccaagaatagtaattttaggctactctattatccttgtgattggtatttttaaaattttgagcaaagtgcacagtgaatgaaacagtcagcagacacgatccttctgtgaactctcaaattcctgccttagaatcacgtcacctgagaaatgagaaccttgagacctggtgcatatcaaatagcttcacatgtcaaacacacagggccgcttggaggcacc

SEQ ID NO: 140167 - DNA, 616 bp, Homo Sapiens
tttttttgttttgaggatatgcatttaattttaaattttataatttagattcagcatgaattgcaataaatggatcctcagcagagttactaatagaaaaatgagctttgccatcgtcagaaacgtagattttaatgcctgtgcaattgccattaattttatctccagaaatgacatcacagtatgtgccagcaggaagaccagtttgcaaagttaaagaaaatgtccagtcatcattgttgaaaacaatgaatcctctgtttcctctcccaaaagccacttggttgctcccattatcataccagtttgtaaaaggctggccatccactacattgcggaaattaaccatgttccttatttggcgccatcgatgttcacagacccagtcattgccacaagtagtgtctggattaatagtaacttctttaattactccattattatttggtggcccaacccaatcattaacatcttttccattttcaaaatatcttggccaacggtagcttgacattactcgtgtaaatccataaggatgagcaagcataaatccaactgccattgtgtacagcctagcatcccagaaggtaagtatagaggctcctgcagcgccatg

SEQ ID NO: 140168 - DNA, 844 bp, Homo Sapiens
  misc_feature (63)..(145): n is a, c, g, or t
  misc_feature (419)..(419): n is a, c, g, or t
tatgaatataagtattccatacttgtatatacgaatatagactacatatgtagattacacacnnnnnnnnnnnnnnnnnnnnnnnnnnnnnnnnnnnnnnnnnnnnnnnnnnnnnnnnnnnnnnnnnnnnnnnnnnnnnnnnnnncttacagaataaccatttaattagagaaagaatttaatcttcagatgccatgccatgcagaaagagatgcacagttaagttactcgcaaactattgtgaaatgatacatcaacatatatcttatttttcaaaaataggaactggggagaaggttggggtttcatgccttctgacagagcacttgtctttgtggataaccatgacaatcaacgaggacatggggctggaggagcctctattcttaccttctgggatgctaggtagaaaaccaagntctctattttttttaacacatcttttaatgatggtaatgatattctgatattctgtgataatataattatgtaactttcaggctgtataaaatggcagttggatttatgcttgctcatccttatggttttacacgagtaatgtcaagctaccgttggccaagacagtttcaaaatggaaacgtaagttttgaaattgttcaaactatccttttctcaagaaacagaaggcaatcttgttctaacttaatatgacaactattaattatatattcaacaaataattgattagaaacctgatatagggctgcgattttagtaatgcaggttatattaaaggagtaaaatatatattttccattgacaaagagtatgcaagccttttcagacatattgtaaacatcccccttagcccacaggaataatt

SEQ ID NO: 140169 - DNA, 668 bp, Homo Sapiens
agctatgatttcctttagagaatgctgggtgtggcattctggacccttccacttcaatctgagaagacaatatgtttctaataattggtacttgtttcaccattcttcattcagaccagtgaaagagtagtgcatttaattggagtatctacagccagtggcagtgtatgctcatacttggacagttagggaagggtttgccaagttttaagagaagatgtgatttattttgaaatttgtttctgttttgtttttaaatcaaactgtaaaacttaaaactgaaaaattttattggtaggatttatatctaagtttggttagccttagtttctcagacttgttgtctattatctgtaggtggaagaaatttaggaagcgaaatattacagtagtgcattggtgggtctcaatccttaacatatttgcacaattttatagcacaaactttaaattcaagctgctttggacaactgacaatatgattttaaatttgaagatgggatgtgtacatgttgggtatcctactactttgtgttttcatctcctaaaagtgttttttatttccttgtatctgtagtcttttattttttaaatgactgctgaatgacatattttatcttgttctttaaaatcacaacacagagctgctattaaattaatattgatat

SEQ ID NO: 140170 - DNA, 1106 bp, Homo Sapiens
tttcagtgtgcaacgttttcatttaatttttaaataatttatatccctctgaaacaaaaccctgaggctcaggtacatcatctgaggttctcttaaatagaagagttggtacaggacaccggagaaggccgggaggctctggatcggtaagtgctgaagatgctgaggctgtggggcagctttcccgggacaaccacgtgggagagccggctcacctggtccccacggtgaggcgcaacaaggaggggctggcacaggccaggcacctttataagccagagagaggtgcacaggccagaaagaggtgccccccagactcacaggagccccgtggtgaggaggagggggaacactgcagtcaccagcagacagaaggaaagtggccccagcatctggccacatgggaacgtgcaagccaaacgccactccctgctccctgcctgagcgccattcgcagtcttgtttcctgtttcctctcagcaccctcatcctaacgggctgagctggcaagtcccagacattggaggagtgacttcaagtttgaggccctgggtattctccagggactggaaccttccccaggatccagaggctgggatgtgggttttggcggggagtgaggggaagggacgtgcatttcccaagccccacctgcacgagcactgttgtcccccaggtgctttcctccacattgtgacatcggaaaagcttatccctggggtccaaaaacccaaccttccccaacagggccctccgctcctcccccataggcccctccgctcctctgtggccctggtggaggcggagcatggtctgccagcgccctgggctaccatggagagagctccgcggggcgtgcaaggatgcggccggtcacgtccccctctccttcctccggctggtcctctggttgctgagctcactcagcttcttatccagcctcctctgcagctgggccctcttggctgggtccagggatccgttcttggtcccgctgccggcatagaggaccccttcccggctgattctctgccgggcatgggcgcgagccctctcaccgcagccatggatctcaggcaggtggtggctgaggcagtagcggccgc

SEQ ID NO: 140171 - DNA, 238 bp, Homo Sapiens
  misc_feature (57)..(94): n is a, c, g, or t
ttttctattttgaaatggagtctcactgccccgcgggctggatcaagccctcagctnnnnnnnnnnnnnnnnnnnnnnnnnnnnnnnnnnnnnncttcaaatgaatgtaagaattattattttttaaagtacagctttaaaaatgccccttacaaatacatcagtgttatattaaggcaaacccacttcagaagcacaaagtttatttctttataattccaagaaatatgtgaatgtt

SEQ ID NO: 140172 - DNA, 1457 bp, Homo Sapiens
  misc_feature (33)..(33): n is a, c, g, or t
  misc_feature (269)..(269): n is a, c, g, or t
  misc_feature (297)..(297): n is a, c, g, or t
  misc_feature (305)..(305): n is a, c, g, or t
  misc_feature (380)..(380): n is a, c, g, or t
ttgaaggcaaaagccttccaccaactggaatgngaagttcggatgcccgaagttcctttttcttttagggtagtttagtccatctttcaggtaaattagcccgagtcccttttccatgtgcagctaggccattttcggtgacaggggcttttctgttttcaaaggtgtcatgaagggataagacccctcgtttttccatggttgggactcttctgggttactgaatctgttgccgtggaaggtggtcgaactttctgagaaggcgggcntggctaccaagcacttctgatatggtancatgcagncgcctggcacgccttcagacacgttaccagcattaggctcgcaccagaaaacgtggcactcaaagcgctggttcnccgtgtccatgatgaaggcaaatgtgtggacgtccttcccaacacccatgaaggacaggaatcgcacacgacattccactaagacttcctcttcattcttttcactgatgacagtcacagtggcatcagccacgttcatgttcactgacagccagtcctccttgttggatgaggtcataagattttctatggcactgttcaaaatatccattccgactggtttgtctacaggtaacatgcccaagtactgcacgtggaacttctggaccagctcagtctttggtgttggaaaatctacttgcaaagggacatcgaggttcacattggccctttcctgtaaggagctgcaggccagcgctttggcattcttccgttcagccataatcttggagcagatctcgtggagacttgtggcaatggcttttgctggtgtgtcacatcgaaatacatgacatttcaaaattcttgtatctttatctcttgctacataagcaaaatcccggccattgtcgcggcccacgccccacacgcggatgctgacgatgggctgcgagtgcagcacgctgcggtccatggggtccaccaggctgagcatgtcattctccaggatcaggtacatgtctttcccctctccccaaatcccgactgtgtctcggatgtcatttttgcagtaggaaagttgcctgatgcagttgttgaccgcaacactacttttaccgggggcgaggtcctcttctgccatctctacccatcccagagaacgcacagcaaaacacttggcttctgggtcactgttgatactacaagaatcatcatcatcagggtgtggggcatttctgagtttcaaagatgcatagcgtagggttgctccttcaaactcttttaaactggggtccgggttaacagtggctgcatgcaaatccttccaaatgtcactattaatctttcccccattcagaacagcaaaatcactccatggctgtttctcgttctctggggtgggagatggcgttacagaactaagtgaccctttcctagaaccctggagatctgctgggatggagacggcccgttccc

SEQ ID NO: 140173 - DNA, 456 bp, Homo Sapiens
atgagccctacacccagccaattagtagatttttggttaacagatttaatgaacccaaacttctactctctgccagtgtttctagttcattctgtgcaaacacccctagcacacttaggatccagcaacatctggggttttttttctgtctttccaatgtcctgctttctcacttctaggtctctctttgcacatgctcttccctcccccttccaccgctgcattctttcctccctatatccactcttcccctggctaactcctatgaagcctcagcttcaatgtcacctcctccaggtgtgcctcctgctctccctcctatgtcatcctattataaccctcatcacacagccatcttcaggaaggcactctgtagcccacgcctatgcactcgactcttgacttgcctgattgcacaactttgggctgccaactctctcagtgtttgactttcct

SEQ ID NO: 140174 - DNA, 658 bp, Homo Sapiens
ctttttttcttttctttactgaagtattataagcattccagacatatctacttaattcagtttgccttgctaaaaatatgggtgttttcttacacatccacataaaactagcaataatgcttaggtatcatcagtccttaactaagtttttcagattttcttcaaaactgtgtctttacagttggatccaaatcaagtctgcacattccatttggttgtacttcttaaacttctgttatctatccctgtttttcccctgctgtttattcatagaaacctagtcagttgttttatagaactctgctttctggatttatcttgtcaaagaatgagaccccctctcaatatctgaaacaaaaagcataaagtttattcttattctttgctatggtaaggctagagtctccccaaatatagtagaccactaatcttatatagggttttgaggaagggtggagctcaagaagtggcagagtttcatgtctataagtgggttgacattatctgtaagaatgtgattatttgggtgggactgttgttgatcagtgggcattcaggtgtgtttattggagtgagtccattcctgtttggctaattttcagagacacagagcagttactcatctttgcaggtgttcaccaggcaagttgtcattgat

SEQ ID NO: 140175 - DNA, 609 bp, Homo Sapiens
ggtcttgttttcccttacccctttctttgaagaaagggtgtcaaaagacattacctgcctctaaagccagatatcaccagcagacttcttaaagtggacataatcctagagctttcattctgtttagaagttcatgttcatcttagccatttggaacttcttcattctctatcttttctccacggtggctgggcttgtctgcaaatcattgtgtcaaaatcaaactattttcaaaacagccctttgcttctgagcccctcccctaagtcctctgtgggggtccatgattctgcagaggtatgggacagaatcttcagattttaccccttgagtctcttcctagtcatatcctggttccctcattctaatattgacaaaggatgactcattaagtgcaactggttatgtaactttcacatactttcattgtgtatgtcaggatctgaggaacacaatgatgtcatttaatcggaatctaaatgtgacacaaacaacgtgccagcactacctgcttgtgaaataatgttctgagcccacagtgttcctgggtatgtgagtttatatcaagtgaaaaggctgcttaattgacattaaagttaaggaatgtaa

SEQ ID NO: 140176 - DNA, 451 bp, Homo Sapiens
gggttctttattccattttattatttattaagactgttaacaaaaaataggctttatttttcctctgtacttaaaaactataaatttacttgggtcactaacagtgctctcagtctgagagaaaattacataataacaacaataatgaacaaagcacttagcatgtgccaggcactgttctaggtgcttttacatattcagtcatcacttttcacaacagctctatgaggtaagtactgttatctccgttttacagatgaggaaactgaagcacagaaaaaccaaggttcagtcagacagctagtatgtggcagagtcaagatttaaatctaagaaacaggatctggaatctgtactcctaaccattacgccacactgagatggttcccaaacagcaggaagaagaagtgttctttccctataggtaacagttcactcattcttttggtgc

SEQ ID NO: 140177 - DNA, 1263 bp, Homo Sapiens
tctgctatttctcttttcttcttttcattctctaattgtgccctttccaactgcttctgatgtttctcctccctagcctgagccttcatctgttgtacttcaatagtatcaggcttccttcttcgcatgtatagttcatggtttcccatacataaggccaaaatccgcttattgattctcagacgaggtgcataaaacacaaaatcaggtgcctttttgtcgattggctttataacaaattttttgtcattaaatgaaatatttctgatttcactccagggaaaaccaattttaggtgttaacttgtcgtcatgctcataaatattcagacccaaagcatcaacacctagccacaattcagttcctttttattgttttatttcaaaatagttgactccatacatttctagatcttgtgcaatcttcaggtattccatcatagaatcctcccttaacattcctctatgttcttcatgccagttctgtattctttcttcccactgttcttttgttagtttgtgttgttccaatacacgctggggtaggagtctatcattagccaggtagcctggcttatgaatctctttattgtaatctccatacttggcttggacagcataggaagccaaaagaactgcagtttctggcgggcaatatatctcatcatttaagatggcttctttaacttgcaagaagaagagtctctgggttatttcttgaattaattcctcagaaacatcttcaggaaagaatttagctctaaacttgaactgtaaaggattctcttttttaacatcctgctgtgttacctttttatttagtttaagccatgtagaataacctttgctgtctacatactgcagcccaaaaaaccagacctcacgcaaaccaactgttttcaccacctggtcaaaaagttgtttgccagttgtattgggctgaatggcaaattccagctcagcatccattgtagttactcttacgttgattggtttcggcattttctttctctttttgttaccttctttaaaaattctccacttcaatgaattctgttatcactttccggagagcgggacggcttctgcccgccggcgtgtggctggggcgctgcgcggcggcgcggctgcgacagggagggagaagcggtggtgcgagcgctgggccgcgggagacgagaggcgccgccgccaccgcagacagctccgcaatccccggccgtaatggccgaattcccgggcatatgtccggtaccgtcgactg

SEQ ID NO: 140178 - DNA, 1033 bp, Homo Sapiens
  misc_feature (121)..(460): n is a, c, g, or t
  misc_feature (501)..(501): n is a, c, g, or t
gggcactcaggagtagatactcagtgcctttgctgacatgtctgtgttctacaaacaccttctctccattatttttctgtttttaagttcccttagagcctacagtgcagtagtgtagatnnnnnnnnnnnnnnnnnnnnnnnnnnnnnnnnnnnnnnnnnnnnnnnnnnnnnnnnnnnnnnnnnnnnnnnnnnnnnnnnnnnnnnnnnnnnnnnnnnnnnnnnnnnnnnnnnnnnnnnnnnnnnnnnnnnnnnnnnnnnnnnnnnnnnnnnnnnnnnnnnnnnnnnnnnnnnnnnnnnnnnnnnnnnnnnnnnnnnnnnnnnnnnnnnnnnnnnnnnnnnnnnnnnnnnnnnnnnnnnnnnnnnnnnnnnnnnnnnnnnnnnnnnnnnnnnnnnnnnnnnnnnnnnnnnnnnnnnnnnnnnnnnnnnnnnnnnnnnnnnnnnnnnnnnnnnnnnnnnnngtatagataacagaccattagcattttctcctttatatganacatttattatttgatttatttgtgtctattttgctctgtggcttggacccagaaacacttgtataataggtgaaatgaacaaagaatgagctgccagaacatctgagagctgtaaagtttaaattatttggacccaaagaagcatagtctgacgttgttcagttcacacaaaattttgtctgaaaagccaacttttttctttcccttttaaattatgctgaacatttagggccagtatgtgtaactgacatgctgggacagttgtactcacttttgctggcctgtaggactgtgacatagggagaacactaagtgtgtcctccgggcctcgggtctcagtcctggagctatctacagtatgttaccagcgagtaagaataatagcttctacttgcttttccctacagagttcaggagttttaaaacgtcatcttagtctcattatgaccttcacatgggctatgacaataatttcctgtagtcagcagatgtctgaaggaagatattttttaactgaatctttacaccaaa

SEQ ID NO: 140179 - DNA, 930 bp, Homo Sapiens
  misc_feature (658)..(724): n is a, c, g, or t
  misc_feature (734)..(768): n is a, c, g, or t
  misc_feature (770)..(846): n is a, c, g, or t
ttactgggaggggaaaagcattctccctccccatacctgtctaccacgcagaggctagacttaaacgtttttcttaatttcttatgatctccttagaaatttagtggctaaatcatgaattacatgttaggaatgagacagcctggcaagctcaatttgactattctcatagctagaaggaaatcatttcttctgtgctttaaatttagttgccaccttttatcctgtccccattttcattacctcctctcaaccaaattagaggaggactgaggtaaagaactcttattttcagaaagtctattccacttaatgggctttcaaggaatatcttactctatgacacaaataaggcagactagagagcagttataaggttacttctttgttatatgaattctaagcaaggtgtttattccatgagagggtatctttatctcttgtgagcagacagaacagcattagtgttcagctgattactttgtaatagctgacagactgttttatctgttgtcaaattagtcttaactacactaaacattctttctgtaagcaagtggattggtttggttgtacacttgccatctttcgaacaaaacaacacatagctgccagaaaaaaggtagtcttcccatttcctgctcttgccatgtgttcnnnnnnnnnnnnnnnnnnnnnnnnnnnnnnnnnnnnnnnnnnnnnnnnnnnnnnnnnnnnnnnnnnnatatatatannnnnnnnnnnnnnnnnnnnnnnnnnnnnnnnnnngnnnnnnnnnnnnnnnnnnnnnnnnnnnnnnnnnnnnnnnnnnnnnnnnnnnnnnnnnnnnnnnnnnnnnnnnnnnnnactgtgcccagaatggatgaccaggaaccttaaagagtggctgaaaagattgcagagttatcataataaattgctaacttgcgt

SEQ ID NO: 140180 - DNA, 960 bp, Homo Sapiens
  misc_feature (51)..(64): n is a, c, g, or t
  misc_feature (209)..(528): n is a, c, g, or t
  misc_feature (749)..(757): n is a, c, g, or t
atcaacgacagggagtctactcttctcgcaccgattagatgctcgagttannnnnnnnnnnnnnaacggcaggttagcaatttattatgataactctgcaatcttttcagccactctttaaggttcctggtcatccattctgggcacagtgtgacatttacctgaacagagaggagaatggcactagaagatgagggagatttggtgcnnnnnnnnnnnnnnnnnnnnnnnnnnnnnnnnnnnnnnnnnnnnnnnnnnnnnnnnnnnnnnnnnnnnnnnnnnnnnnnnnnnnnnnnnnnnnnnnnnnnnnnnnnnnnnnnnnnnnnnnnnnnnnnnnnnnnnnnnnnnnnnnnnnnnnnnnnnnnnnnnnnnnnnnnnnnnnnnnnnnnnnnnnnnnnnnnnnnnnnnnnnnnnnnnnnnnnnnnnnnnnnnnnnnnnnnnnnnnnnnnnnnnnnnnnnnnnnnnnnnnnnnnnnnnnnnnnnnnnnnnnnnnnnnnnnnnnnnnnnnnnnnnnnnnnnnnnnnnnnnggaatttgccgtggcaaacccttagagaacagcccatttgggaggcaaaaagaggacccgtcgggaaaaatggttcgccttcaggagaccccgataggatttcaaaaagccagtaccatcagagttatttctggcccccaaataccttaaaggaaatcccatcaggagcgggcaaggtcgggatatggcccggagtgctggggagcaggccccccagggannnnnnnnnctccgcgggtcctctcccagatcaaaaccggaggggtccctctgtggaagccgaagcgataactgctccgaaatcggcggccattgtgaccagtcgggatataaccacgcaaaggagagccccggagggatcaccagcgaaggctgggtccgcagacggggaccgcagggcaaaggcaaaggcgccgggcgggcaggcaaaca

SEQ ID NO: 140181 - DNA, 1065 bp, Homo Sapiens
cgattatttggctgcgtggacccgtgttgtcctgccggtgttgcccttggactccccttgggattgttccgaaagcgctcgtgcgccccccggcggtttttattgggtgggaaaccccccgcctttgtttgtgccgcgggttccttctggggacccggtgtggcccgtgttcacttacacttattgggccccggtgcccacacggagtgtgtctaaaaaactttttcgaagggcccaaggcgccccaaaaagttgtgttgtcgatggttagtgagtgtttgtgtttttattccagaaatattttaatacaatcgtagtacagttatgaagtcacattcaatccactgaatatattcaaggtattaataaaaatattatacatctttattcactatcttaatataattaaagtatttggttcttataggtaagattaattaccatattcattcatatatgcactgctagtcaaacaacatggaaatgaatgtatggattatgatagtgggggttcagtcctttttgatctgaagtctaagtttcaaaagtgaatgttttcttttttaaatgtcacaatatttgaatcctagaaagaataggcaactaatttaaggcaagatattgaaacttttatacaactttaatttgaaaaaagaaatgatcaaagatcatacatgccttaacatttagatacctatagattcatataaaggcagtaataaaaatatcagtgcaagttctacattgggttcctcagtagagaaaataataggttctttgagtgaaccattatcttcaaatcccaaaacactggcaagaagaaataattcttctgatgcaggacaacatgtagcataattatttttagtcaataaaggtgagtataaaatattgtgattatacataaaaattagtgtctggccactttgtttgcttttattaaagtaaaatacacatagaaaaatgtgcatattttgtgaacattcagcttgatggatcttcacaacatgaacactgcacttatattaaaaaatagaacattaggctgggcttggtggctcacac

SEQ ID NO: 140182 - DNA, 618 bp, Homo Sapiens
  misc_feature (398)..(474): n is a, c, g, or t
gaattcggcacgaggttttttaattcaacccaaagtctgaatttcttgaggaaaaggtcaatgtcttttcatctctgtattgttccccacctcttaacacagtgcctggcacatactaggtgctcaataaatgtctgttgaatagaattattaataatttaagagtaggaaaaaggagtgtcagagagagactcaaagatgagtgagagagcatggaagatggctgtttcatgtgagacaggaatggaagaagttatgaatagggatcagatgggggagtgagaatccctgtaagtaaaatgtgaggaaaagaacaagctgagaacaagattctcctgtcaaaaaggcgtcttactgtaaatagtccaaggtgacatttgttagttttgaatactgcnnnnnnnnnnnnnnnnnnnnnnnnnnnnnnnnnnnnnnnnnnnnnnnnnnnnnnnnnnnnnnnnnnnnnnnnnnnnnctacacaatccaaattaaacagcttttggtgatgcaattgtacactttcttaagaatatatctaataccacattttagcagaaccaagcaatgactgacattattcattgggatctggccactaaataaaattcttttatgcat

SEQ ID NO: 140183 - DNA, 580 bp, Homo Sapiens
  misc_feature (310)..(352): n is a, c, g, or t
gttgatggtgttggaaaacaccctaccaatataacacttaagttcatttttagcataatatctgactgggttttcagatgttttaatattagagaagaaatggtggtgtaagagacaaagaaataacaattatgcataaaagaattttatttagtggccagatcccaatgaataatgtcagtcattgcttggttctgctaaaatgtggtattagatatattcttaagaaagtgtacaattgcatcaccaaaagctgtttaatttggattgtgtagaataaaagaaaactacataagtctttgttctttgnnnnnnnnnnnnnnnnnnnnnnnnnnnnnnnnnnnnnnnnnnngcagtattcaaaactaacaaatgtcaccttggactatttacagtaagacgcctttttgacaggagaatcttgttctcagcttgttcttttcctcacattttacttacagggattctcactcccccatctgatccctattcataacttcttccattcctgtctcacatgaaacagccatcttccatgctctctcactcatctttgagtctctctctgacactccttttt

SEQ ID NO: 140184 - DNA, 1043 bp, Homo Sapiens
ttttattttacgattatttaaatgttattcactgaacagccaagctttgtgctactatgggatttcgttttctgcggttccaagtcttgatccacgtcctgccacaggatcactgaagtagagcccattttcttacactctcgccattagttcaaaagcttgcagcattttatgtctggtacttggaggatgattttcctgtacagttttgcgtttttttcaccgaaaatttctgattattattgttttctcttgtgggatgaaatatgtaccttctatatcacagccttaataccttcagcttcttattcattcaaatcttgcttacaatccagtccgaggattcccggtttactgattttctttttcctgcaaattttagccttctgttttgttttgaaataatgcatcctctgcgctttgtcacattctgaaattcgtcaggtgttttaggatgcacactttcttagatgttttcgagggtcttaactgcagttctgtttccggaacggcgtattttctttctagggattgtaggctcccggccgccccctgaggagctccgctagcagctaagagggcagccacgaagagcgcctgagcactctcgcgagactgtggggctcgccattggctgctccgccgcgccgcaacggaccctgggagtcggccatcatgctggccccggaggccgttagcttagtcatggctctaaatatgtacctgcaatcggatgttgaggatcaccgagcccgcgacgtagaagtacgggaagttcatgcgcagctgccaggccagctcgaagaaggcgagcagggtgcgggagagccccttgcagaagacgccgtacgaggtgggtgtcgcggcggggcttgaggccctgacggccaaggaggacggagccgccgcgggggccatgagccaggtgtcgccgcccgcccagcgtctgtagcgagggttgccgcagggcccgcggacctcctagcgacggctgggaccggcaggacggtaagcaaagcggctcccgggatcgcaggaattcc

SEQ ID NO: 140185 - DNA, 841 bp, Homo Sapiens
tttcagtgcattctcagcccatgctgctttattgctaaaatatatatatacacaggtgcagagcttccaacttttttaacagttccctttttacatcaaagaattaaatttcttcaaaaaccccaaagatgcatagattaagaagcaagctgccttttgtaatacttaaaataatattcaatgaaactcttaacgttatacaccaatggtgcaatggagaatatggaggacagcaagtaaacacagtgagcaactcttattcttacaaggcagtaggtaaagtataatgtgaaggacagtctaagataatctttctggttataagaaatgggtcggttttgtgataagtgccaagactgttactgtttaaggattgatgataatgtattaccagaatacctttcttatccctgggagaaaatattttttcactgatggaatgacatatcaccaagggagaaaaaaacctgaatactgtcagtaactaagatacctattctgactttaaagaagatttaggacttcatggagaaatctgtgatgtctggtttcccaaaattaagtattttaatgtgccttagtggaataatcggaggaatttagagaaactctgttcttaatctttactggctgacagacatgctatcaagtaattggggaagacaaactatattcaggatatgacatctcacttcatatatttcaatggaaaccaaacatcacagtcacaagaagtctaattcaattctgaaccactggaaagttaccattccactttattcattcccaaagttatttgtagcaaaatcctacaggaaagaatgaaataaaaagttttccc

SEQ ID NO: 140186 - DNA, 1037 bp, Homo Sapiens
  misc_feature (677)..(730): n is a, c, g, or t
  misc_feature (734)..(743): n is a, c, g, or t
ttcacttgaaaactcttcactgcttctttattatgatgcacccacagtacagaacctctcacacatctgtgaaaggggaaggttacatttctttttggggagcaccttcatttttgtttctgttaccactttgaagaaagcaaatcatttccaaagaaaaacattttaaattccaagtgtttaagactcagcttgtattttgtggtgtttgaaatgaagtagcatgttttagccagaggtggaagattgttttgtggcattttaagtttgatgtggatcagaagtcttcactgtctggttgaaccagtctataattttcatatgcaacttttcatatcaaaaatgtttcatttttacctctactcacaaagagatgctgtttaaaaaaacacacacacagctaaatttaaaaccgatcatgaaccacagcattactaacagggaaaatgaacttttgctgccctctcctgctaaaacaatgaaatactaaaataccaaaagatttatgaagctaaagcgaagtcctcaaaccaaaagcaacagacatgtcattctcattatacttcaatcaaaaatcagacaacaaccagaaaatgcattggtaatatttatatttgaaaattccccattgatacatgaggtttggattacaacttatttacaataagtgatttccnnnnnnnnnnnnnnnnnnnnnnnnnnnnnnnnnnnnnnnnnnnnnnnnnnnnnngagnnnnnnnnnngagaaaggtgggggaaggagggagggaaggaagaaaaggaaacctatattcatagacatcataatatgggatgtttatttccaagagagatactactgctgctatcgtgcacaagaagcagcacaaattaacattccgctagatcacatttgctcaactttctctcaagatgcacaatccttcttttaggttttcaaaattaaatatagaggaatataaaatgcaatgccaatatacctactaccccggccgtaatggccgaattcccgggcatatgtccggtaccgtcgactg

SEQ ID NO: 140187 - DNA, 547 bp, Homo Sapiens
ttttaatatttgaagagatttattctgagccgaatctgagtgaccaatggcccgagacagagacctcaggagggcctgagaacatgtgcccagggtgatctgggcacagcctaattgtatacattttagggagacatgagacatcaatcaaatacatgcaagatccacattgcttctgtccagaatggtaggacaactcgaaggtggagcggggaggttccaggttataggtagattcaaaatttttttattggcaattggttgaaagagttattatcactagaaaggagtgtctaggttatgataaggggttgtggagaccaaagttttatcatgcaaaggaagactccaggtagcacgcttcagagagtatagattgtaaatgccactaatcagacttaaggtctgtgttaatgttcatgctggtcagctttgctgaattccaaaagggaggaggacataaatgaggcatgtccactccaccttctcttcacagcctgaaccggtttttcaggttaactttggagtgccctggccaagaggaggg

SEQ ID NO: 140188 - DNA, 667 bp, Homo Sapiens
  misc_feature (482)..(498): n is a, c, g, or t
agttcacgttaaaaaaacagaatgagtcataaggagtcagacatgccattaatcagctcttaattatcttccataaaagagggaaggaaaaaaatagagataacacgaatctgtgtataatccaaaaggttctctgtgacttggaatgaagccagaaaaagaatctcattttgtttcacacactggcacctggtatggagatcaacagttgctcaaatgaattttaaataattataatttgttaatagataattaattgggaattgattctgcaaggcaaagtcaaacatttgttttataattgtgcagttcttgcaagagatcacctatactttttttcccccatcaggtataatgggtctctcccaaatggcgatagaggaaggaggaaaagtaggtttgctttgtttaaaagacctaaggcaaatggggtgaagcccagcactgtgcatattgcttgtactcctcaggctgcaaaggtnnnnnnnnnnnnnnnnngctacataaattaacttggagaatttgaaagacttttatgtgttgtttgtattctctagcattccccttacatttctatttcagaaattgccttttgtttggattggagaagagactttggagacatggtatttgaagagctgccatatggaaggggaattggactttt

SEQ ID NO: 140189 - DNA, 489 bp, Homo Sapiens
ttgtctcaggttgagactctggactttggacttttgaattaatgctggaatgagttaagactttgagggactgttgggaagatataactgtattttgcagtatgagaaggacatgagatttgggagacaccagaggtggaataatatgatttggatctgcatccccaccaaaatctcatgttcaattgtaatcctaaattttggaggttgagcctggtggaagaggattggataatgggggtggtttctcaatgttttaacaccatccccctgggtgctgttctcatgacagtgagtgagttattgtgagatctgattgtttaaaagtgtgtgccacctcctcccactttcctcctgctccagccatgtaagacaggcttgcctccccttcaccttttgtcatgattgtaagtgttctgaggcctccccagccatgcttcctgtacagcctgcagaactgtgagccaaattaaacctcttttctctata

SEQ ID NO: 140190 - DNA, 760 bp, Homo Sapiens
ttcccatttctaggtattttgtgcttaagttatttattcattggcactctaataaccagccctacttttttattttagaaagatataattagctatttaaaattgtaattatttttcatttcactgagtagtttcaaaaaaagttatctagaaaagtaattcccagtcatcaaatggaaagacacaagcaagaagtaagttgtttccagggtttttaaagctttgtaaaataaagaaaagaaagtattggttttgactgggataatatagcagtacaattgccattaacctatctgtaaaagccattcatttaaaaatgcatattttaaaaatgactcatttgtggtaaggattacttactgtaacaattaaaaaataaaaccatcattctcatatttatcaatactttacacttttaccaaatactgaaggagacaactatcattgttacaacttcaaagtcaaaacagaaacacaaatcagaattaagagaaacttcagaaaatgttcagaatgtacacatttgtgtgcattttcagccaaactttcaaagattccacatataaccaaatgacaactttgaatcaaaatgaatgtcaaaaatattcaagctttctgacagacttactctaatgaagcaagaaaaagacagcaaatattaagcgcagtatatttctcagagggagggaaatcacacacttcctttatcataaaacaaaagttgagacagcatttcagtaacattgatcaaattattccc

SEQ ID NO: 140191 - DNA, 632 bp, Homo Sapiens
ttttgcaaagaaaaataatgactttattttagaattatttaaaataccagtagaacatttaccactgagctggaataacaccagtgagtttgattcccagtgatatttttaacttggctgggacagtctcatcatttatgtctctgtttaaatgtcatatagttcaagaagccttcctaactgatctaaagtagtttatttgtttcccagggcttctataacaaattaatacaaattgggtggtttaaaacaatggaaacttactctctcacagttctagaggctggaagtccaaaatcaagatgtggcagaatcatgctttccaaaggctctagaaagtcctttcttgcctcttctagcttctagtagttgctggcaatttttggtgttccttggcttgtagatgcatcactccattctgcctccattttcatatggcactctcccttgtgtgtctgtgtctctatttctcaaggaatatatatttccaatcttggtttacacatgactttttgaaactggaataaacctcatgagtgggcataatgccctataaacagatggatgtgaatgctcaggtgccagaaatccaacatggccacagctgatggagaatgttaaaatagtgacag

SEQ ID NO: 140192 - DNA, 2196 bp, Homo Sapiens
  misc_feature (752)..(770): n is a, c, g, or t
ccaaatgcaatgcagagctcagattcttagcaccaaatttccaagcgctccattgccagccacagatggagtttcgcaagtcacggctgagtgctctgtcaaggctttgggaacaagtgtctcccggactgtcaagtcatcccttccccaaggcagccagctttggcctcttagagcagatccaggacaggcaattcatcccaatccctgctgtggtcgcagggcccttggtgggagtctgcgctgcccctccagagggcgagcttggagaggaacccagtctgaggggtaggctgaggctcacggagcttctgggagctgcaagatccccccagctggcagtggcttcctttttcttgtgatgcaggagttgtaagcctcctttgggactgctgtgagacttcgggctatgaccagagagtaccatgcctcgcgccgcaagccagaccagccacaagacctagtctgtgccctgacacagggagccccaaggggaagtagggaaggggacatcatcgcttcagtcctaatcctgtgcttcaggccttcgtcacagctgaacggcctccttagctgctagaagctggtctctgttgggtcccagatgctgaggaaagcctttcaaaacttgggaggccccagcagggtggcaccacacaggcccacacgagtcccagtgtgggggtgagagacacctcgtgagggtgggttagaaacctctttaccagccatttccagatacatgcgtcccnnnnnnnnnnnnnnnnnnncttttcactatcatagtcactctggtgaatccaagcataaacagacaaatccaactacaactcaacagggtgcagatggggagggcagggcaacatctatgtatatgttcagctgctccagcagaacagacagcatggcttccagctgggactggggggaaagaaccatttccaagggggtgtgttcccctttgtcgggtgtggagggctgatactatgcatgtggagctgagcagcgggctgggctgtctgggaggtttggcagctacaagctagggtgcaagtgggggacagcgggactgtgggcctggcctgggtgccttgcccttccatcctggtgccaccactgacaaccaagacacccagcctgctgctgtgggctcagcacaggaaggggccaggccttctcaggggaaagggctctctccatgtcaacaaggcagaaacacctagggtcacagctgagcagtgcctggctcacatctgtgacgggaggaggagacagggaaccgaatcagatcgttgagattcgtggtgagggtcccagttggatgagtggaactgagagtgagaggctggggtcccactctggtgcctggactttgccttcccttaatttcaccctcagtatggagtaggtacctcctgcaaccaaccagggtcattactgagaaggggtggtgaggctgggaattcgggacattgtgacgtgatgaggggtataggcagtgattgggctctcacggcagacaacagcacagcggggcagacaggggtgactgcagtgccgtgggaaggacagggggctcgggacccgcctcccagacccccacacactccagagatgccggtggcccaggcttggaaacgggtggacgtctcccaagaggcacaagtccttacaaagagaactggttagccctaaagtcccaggtctgcaaagtggccaaaatcatggcagcagttccaaccttcagaactcaataaaacagggtttctgtggagcagagagggaagcccctcaactcaggccccctaccctgcagggagggaggaagaggccagcgctctcaagacatcaaggtcagtcttttctaaggaggtcatccacgaagtgccaccctcctgccagcttgccttctctttttacccgctgtcccttctcccacaggctgccctgcagagggtggcacactgacccacagcaggcccccacccccggccaccaaggacaggcggccgctcagacgctgcaggtggcataggccttggctctcccagcggcaaggagggggatgtctactctccagcacgtggcttcctctcccactcccacttcttgtgcttcctctcccctctgcccagccccctcgtgccgaattcgccacccaggcctcgctaccttaaaaccgttatagttactgcc

SEQ ID NO: 140193 - DNA, 516 bp, Homo Sapiens
ttttagttttcttggaataatgtttatttaaagttacatttcagaggaaactatcttcaggagggcatgaagcctatattggctactgcaaaacaaccagaagttttataaaatatttctgatttaaattactaaggcactatagataggcacctatattacatacaatcttcaaacatttttaaaagttgaaactatgtattagttgatatctaaaatattaaagcccctgacaaactgaacggctaagaacttgacaaaatgagatgcctgtttcaatgattctgttgccagcatattaattaaaatacaatttgagattctaaattacacgatccagccttagtccagggaccttgtgatgatagttgtattagacttcaaaacaccctttccgcaggaaagggcatttttcaagatggcaactgctgtgtcatcattttcccttttctggactgtatcagaaatccttcagaaagccctacccttaaatgcacagctgcttttcccaactgc

SEQ ID NO: 140194 - DNA, 817 bp, Homo Sapiens
  misc_feature (160)..(198): n is a, c, g, or t
ttttccctttggggaacaccgcttttggcccaggttccactttacccttatggggcccccgcgccgcccaaaagggaaaggttcttagaaaagctttttggagggcccgagggccgccccaaaaggtttttttatgtttttgggaataatctgctggaannnnnnnnnnnnnnnnnnnnnnnnnnnnnnnnnnnnnnnctatccaggaattttaattcggttaggtgtgggaactagtttcttgagtcaacccctttaattgtttctctggcatggtcaataataaaaattttgaagtcccactcggtaaaattagtgtaaacattcacatatttaatagtacctttaaaataagcattactacatttaaaatggttccaaaatgaatctataaatggtaatataaattaaaaaatacgaacttaaagtgaataaatttttaaccttagctatggtataaataatggtaaatgtatagtgtacctttgagtcattaaaatgtcttaaaagataacagcttgttaccagaacattagaaaccatagccatgattctcaagcgttaacaatctacatttgatattttcttggccactgcattcttcaatgaataataatttccagaattccattccatgttgttttccaatagatcttttcacactcgatgttgaatacatggctctttgcagatgaataaaacaagtgcattcagtttagagatccattttgcgaaggctcattcgactgaaggaatctctgtggcaggtgacaggcaatactgccttgtataactgagggatctttctgttgatccc

SEQ ID NO: 140195 - DNA, 348 bp, Homo Sapiens
tttatttatattaaatttatttattttccttcaacttttaagctcgggtatatgtgcaggatgtacaggtatgctacacaggtaaacgtgaaccatggtggtttgctgcacaaatcaacccatcgccttggtattaagctccacatccattagctactcttcctgatgctccatatataccagttgttcacatttttgggttacattgccctttggataccttcaacaacctttgttccttattacaactctgatagatgaggccccaatcccttagcctgaagaagacgctacagactgttatggaaatattgtgttagggaatattacgtgttgaattgcatccct

SEQ ID NO: 140196 - DNA, 488 bp, Homo Sapiens
ttttacccatttctaacaatttttactgtaaaatttttggtcaaagttctaagcttaatcacatctcaaagaatagaggcaatatatagcccatcttactagacatacagtattaaactggactgaatatgaggacaagctctagtggtcattaaaccccctcagaaagtctaagattcagaatgtctccatcatattagaagaaaaatgtactgtattaaaatttaaattgcatttttacaagttgttttttaattagtgttctatttacattgcagaacttccaccaactgcagtagtttaactttggcacaacattaagttccatttcttttgggtattggatcctgctttttgagtgtgtatgccccaaaacgttttcaatgtcatcaaagattgggcaaattcacagtaaatcagacatcttgagttgaagaattgattctccttcaacgttttaggcagttgccacagcttccttagcattc

SEQ ID NO: 140197 - DNA, 107 bp, Homo Sapiens
tttaccttgagatgggattctcacctctgtcactcaagctgaatggagtgccattggcgcgatctcggctcactccagcctgggcaacaagagttaaactctgtctc

SEQ ID NO: 140198 - DNA, 700 bp, Homo Sapiens
  misc_feature (558)..(558): n is a, c, g, or t
  misc_feature (688)..(688): n is a, c, g, or t
tttaaacgttgacttcattttattttttataactgatctaataatcatcttcatgagcttatattccaaaacagttaacttcctatgaatgccatctcagtcccatttccatttaaaacagattgttttaagtaaaactgaagtctcagagattgcctttctctttccctcactggccttgagtcttcaggctcacaggattgaagttctctgtctcttcttgagcctctgtgcaggtcgcctgtcttttgggtttcagcatgccttgctgaaagcatcagctaaagatgtctacaggtggcgcatttgattgctggtgcatttgagtgctgccttcttaaggcttgtgcagaatctagcaggctttccaaatggcctagtttcatctgatttatgatggtgttaattcctttctggctgaaattttgaaacacccgagccctttacacacaccatggtgagctttaaaatccaccagctggagttaactagctttgttttgtctccctctacaaagtacttattgaattctgtagacctttcatgctgcttaggggncaaggatgatcttgaagggatgtacacctttggccagaccacaccatgacaccagtctcctgatgtgacttctcaagtggcacatagctccttagtgagtcagagactgaagctggaaatggtttgtgantgctaattagat

SEQ ID NO: 140199 - DNA, 611 bp, Homo Sapiens
  misc_feature (423)..(483): n is a, c, g, or t
cagaaagagtatcaattatgtaatactattaattttctaatataccatcactagccagcttaagtaatttagaggaggataatttgtctttacaataaataaatgctgtgatcctttctagtacctgaattccctaactctatgttccaccactttgattcaggtccagtaatgtcctcaatgtctcactgaagttatttccagcatatttttctgaaagggttaatcagcttgtgaataagtttcttggagtgccctcaatgctatcacagcagcaagtagttttctgtccccctccactttaaacgactaaaactaatattttcagctcctatttaatcagtccaatgtttcacacttggtactgtgacaacattaacataacatccaagtctgtataactaggacttcacattcctccannnnnnnnnnnnnnnnnnnnnnnnnnnnnnnnnnnnnnnnnnnnnnnnnnnnnnnnnnnnntttcttccaggcatgtctctttcaaatgtgagcctgaacctagaaagagtaattttgaaaagtcaaatttaagaccattctttattcaaacaaatgtaaaaaataaagaaagtgagtcaacaggtaaa

SEQ ID NO: 140200 - DNA, 475 bp, Homo Sapiens
tccaattcacagcactacccacaccgtgggagtgggggtgtgcaccagtaccgactccagccactgcaagggtcaggagtcaagactcagacgggactttcctagggcttctggatttgggcaaacagaactgaatgagcccatagctgcttccttccagctgcctctggaacctaggccgagcatattgctgaggaacggggggtacaaggtgccagaggattgggtctggtggacaagaaacaagacttgtggtcacaaattggcctctggccttggagaaagctgtaaatcttgtctgaagcagagactataaagaagtttctccctgctgtcaagggtacattgttgacaagcaaatggtgtttcggttagtaacggttctaagtgcaatgagttgtgttgaagcctccgtctcccatccttgcctgtagcccgtagtcacttgtgcagtgaggacatctttttaaattta

SEQ ID NO: 140201 - DNA, 548 bp, Homo Sapiens
tttttactttcatccaaacacacccttttctgaaaaacataaaagcatgcacatcgacggcattcttataaagaaaaattaataactaagctgtaaatcagtaataatacaaacaaaagtttaaatgatatgtgaaaagacttacaggtaggtatacggctcttaattttagaaaataattcaagtcagtatcaatacaggttaaggagaagcttctaattttccaaacattttgatacaaaatttttttcaacgactgtattttatagaccttttgtgagaagattagtatagttctatgaaacctaacattcaagtgatcttatgcaggtcaggctaccttgttaaaatgagttagaatccacataattccaacagtattgcctctcaaagttcaaatttagaacatacccattatattcaaaatatattaaatccctgtacttaacaaagacatggaattgatctaaattttactttacaggtaagagaaaattacaattcagcatgaggaaattttcataagttgtacccatgccccgattatt

SEQ ID NO: 140202 - DNA, 673 bp, Homo Sapiens
agaatctaaacaaagaataaaaattagccatcttctctccatctaaaacagagctaaactttgctgatatgtttatgaatttcctttcagtattaaaaagtgcatataaggtgtatatttacacaaaattgaaggtcatacatagatacaggttggtatcctaactttaccctctcactgattaacatggtatcacgagtaacttcctatgtttttaaatctttgaaaatagatttctagtggttctaccttatccatccccacactgttgaaaattttggttgtttcagatacttttattatcaatgatgatgtgataaagtttcttgtatatatctctttggctctatctttggtaatttcttaagaatggaatcttagaattggactgtgaagagggggattcacattgctggggctaagtacaaattgacatcaccttttaggaatgaaatgcttctctttgaccctttagctccagtgtcccagcatagtcactgggcttcataggagtagcagtgagaggacagtgtcacagcaagggcctctctgcatgctccctgatcattgtgtttgcaggttcagcatttcttcttgagtccttcccttcttccaaccttattgcctcatttcccccttgtagtcaatgttttttggaaacactgtttatttt

SEQ ID NO: 140203 - DNA, 1237 bp, Homo Sapiens
  misc_feature (1214)..(1215): n is a, c, g, or t
ttttattttttgctgacatattatttataatagggatgtaattacccaaaaataaaagtattaacaaacagaatccaatccaccaggagcaagtaaagtctatctccggaaagcaaagacggttcaacattagagaatctgttagtacaactcactacatgaagagactaaaaaagggaaactttgggcatctcaaaagataggcccctaacaagcaactggtaaatttaatatttagtcctaattttaaagcacacacaaccacaagatattcagaaagctaaaaatagtcagaaacttccttaacctgtaacaaacattgtatttaatgcatgagaacagatattagcaaattttcccgtaaaagctcagatggtgaatattctaggtttttcgggcaataccgcctctgtctggactatttaacaccattgctgtggcgtgacagtagccatcagacaatatgtagaaaaatgtgtgtaactgtgttccaataaaactttatttacaagaagagaccattggctggatttggccccccggccaccagtttggaaacccctgcattagaatcattcgcattagtcagaaacaagagaaagacgcttgagtcctggccaacatgataatatacacaaagtataaatattagaaaggcagagacacaactataattatttgcataattatatgactgtttacctaaaaagttcaaaataatgaacggacaaactattacaagtgaccaagtgtaacatcaatatacatcaatcaacagtgtttactaaaacagcaatacagaattacaacattttatgggaaagtgtcccattcattataacaaaaactttgtggatttcataaaaatccacaaaatactcaagaacaaaccaagaaatgagcacatcggacatcaaagaaatcttaaaaattttgccaaagctctaaattcgttgagagctggaatccattttcaagtagtaggactctaagtcacatgaatgtcaattttccaaatctgtccccatagactccgtgcatcccttaaaactcccgcaggactgctgtgggtcttgacactgcttctaaacttgacatgggagaggaaacgtgtaggacccgctgaggaatgcttctgaacggcctcggggagggagcctgctgtaaagctgtcacagttaatgccagtgctactgtgcagaaagagaactagnnccggtgagtccttgaaaccagc

SEQ ID NO: 140204 - DNA, 475 bp, Homo Sapiens
tttcaaaatttcacaagttttattcatagagcatcttaatctgtatctgctaagttacttatggaggtactggtgaatacccattagacatgcacggattcttctggtagagcactgagcacatactcagggtgtcaaaaagtgaaactgaagtttctagaagtgttctcacaggattgagcttaaggcttgagcagctttaaaggaagcatgccaaaggctaagtccaaggcatattcatttgagggaactaagaaccatcctataaaagtatacccagacactgccagtttcaaggaatctatttccccacagaaatctcataagccatcttgaagtgttaatgttactttctagtcctgacagtcacctttccaagtctttcaagcttgaaataagtgaacactttgctcagacccattagtcagcagaagagaaagaatcgagtagaggaagatagatgggggggaagaag

SEQ ID NO: 140205 - DNA, 716 bp, Homo Sapiens
  misc_feature (297)..(333): n is a, c, g, or t
aaaattaagatttctttaccaaccatatcagacacctaacagttgttaagaacatctgataaacagcagactgaggaaagtttggttatggcgcccggagagggggctctgcctgccttcccccgccccacccccacccttccagggctcagggcagcccccagaacatctgtgcctctctctaggtccaggggagggcccacctctgacctccgatgtccacgggactctcctcagctcagaacgacgtcttttatttaaaaatagcttttattttaaactcaccaattctctctnnnnnnnnnnnnnnnnnnnnnnnnnnnnnnnnnnnnncctgtcaccaacagtctttgtttttccaaaagttctgccttgtctctgaccagccagagctgggcaggctgaatggatcctcacagctctccaggatcgggtggagatgtcccgagggccctgcccagagtgtcccggaacaggccatggtcccccggtccctacacaaagaaggggtgggcttggctcctggggtcttcttccctgtccagccagtggctggctcctggcctccttctccagggtccaggctcatctccgtggccctcgaaggggggccacccccctcaccttcaagcagctgccccccaggtcacgacggccaccccccttgcgctggttgctgaggcagaaggtgcagatggagcgcggctggcggccgc

SEQ ID NO: 140206 - DNA, 723 bp, Homo Sapiens
tttttttagaaaatgttattcttttattatttcaaggaggtaatacatagcccaatatggcaaagcaaaagggaattagaggcagcaaatggccaggtttttctaagcgcctcatgctgcatctctgagctcctgtctgcccgcagcccacagctgcttacatgaaggccaggtcagtagacagatggcccaacttgatactccactgactgagaaagggctcaatgtgcagcacagcagaggcactgccaggacccagcacgctgggcggcaccccacgctgccaccaccagctacagaggctagtgccttagtagcagccagtgtgtctagcacttgattttattcctgtgagcctagagtgggcaggacgtgaataaatcctgagtcataagttaaggtgaaagacttagtagtgttaatactcttggtgagaaaagacaacacagtcttggaggagagtgggcttggagtctggtggaagaaagatagaaacccccagaagggcctcggcctgcaggcactgccttgaggccatcagagggggttttcccggtacatgatagggaggagtgaggcaggtgggcactggagggctgtttcctctggcacagttgaactagagggtcactttccactcataattggtttcctaggtctaagtcaccacacctggggctgaagcaagtcttgcctgtgcaccaagcgtggccttggaccccc

SEQ ID NO: 140207 - DNA, 656 bp, Homo Sapiens
ttgtccatgactggtgagtttcaatattttattaaaatagcatatttaaccatggttaaccaagaatatgttaactttgtgccccccaacctgcccccgccccagatacgcagcaaaacacagtagtgatttcaaatatccttgatcatgaccaacaggaatatttcaaagtcaagtttgcaactcaaaagtagaccttggaaaaactctgaattaaaagagaaacataaagctctcacacagaattcttttatctgccctaaaatcaatgccggcgcaccaccacctgacaatactgctaggatttttctttatgcatagtataacgactcatttattaagtacccacttttataaataaaatcggcattttttgtcccgcttaatgttccttttcagcttcacaaagaaaccagtaaataaaactgtcaacgacagtcacaacatatgctctcacagcaagataaaaaaacttgaaaatacgcagagatgcatctacgctattttacataaaaagagagattcaaaaagtgcaaggcaaaatctgcagttttttgaggggagcttttaggcacatccatttcattaaagcaagcttcagaatgaaattccagtttgttcttcatgacacctgttaaagtctttctttaaacgac

SEQ ID NO: 140208 - DNA, 446 bp, Homo Sapiens
tttttttagtgatgcaaagggtgccattttataaagattaggttggagcaacacgcaaataagggacattctaacaaagacttgattggagagtgtgagccaagtaaatgtctccaggaagagcttcacaagcagaagctatgtaggtgcagaggcagtgaatggaagcatacttggtttcaccaccaaaaagtcagggctgatggagtgaactttgagaaggaaagaatggtgaggtataaattcaatcaagttagccagaggtcatataatatgggttccacacaatcatagtattctgagtgagatgaaaagttgttcgaggtttttgagcttaaatgacatagtctgtttcatttcaacagaatcattctggctactatgtggacaaaaactgtagcaggtaaagaacaggagccaagaagccagtatggagccaaagagca

SEQ ID NO: 140209 - DNA, 708 bp, Homo Sapiens
ttttgctgcacacacagatgtttattgttttccaagctccctggtgttaaacatgcagggtcagggggctagcaggctgagatgaagctcctctctacttggtcttcttatcgtaggtgccagaacccttgtaaccactcacatagcctgtgttgtcagtcatctcttcccgtcccgcaatgcccttgcccttgccactctcatcaaagcgctccttgtgggtgccggtgtacttgctggtgtctgtcaaacggtccactgcacccactgttgttgctttagtagcgccagtggtggctgggtctttgccctccatgagtccataaatgttctccaggacttcatctggactcttccctttgaagcgcttctggcccagttccttcactgcctctttgaactgttgaaacgtgatggttcgggcgttcttggccttgactttgctgaacacgatgtccacgtccgtggaggtgactgtcttgccatccatgatgccacagtctttgcacagcttggagaagttcttgttgttcatttcagtgccactgcttgatgattctccaaacgcagcaaaccgatggaatgttttttctgcctctgatgccatggtcagctagaggtcggggagggcagtcgtgggagacacttgggggtgaaggagaagggggagggaggacttagagtacccggatggtggtctgacccttc

SEQ ID NO: 140210 - DNA, 496 bp, Homo Sapiens
  misc_feature (482)..(482): n is a, c, g, or t
tttctcatttaattttattttttggtaagatacagcataagagagtcacatggtgataagacagaatcagtaatagaatgtagccctttaatgccaccagaaatccagagagagaaataagctagggttttattcagtagcagagtaatctccatccagggtctgcttgaagccctagtccctctctgacaccacaaggtccccttggctacctgtcaagcctcctggggactccactggaaacatctcagccgtagacagcaatcttcctctcacactgcagtttcaagatgatctggtattctgctgggaaattttgcatggtgttctcaaaccaatatttgtcatcccagtaatgggaccaccttttgcaattgtcttccccaaaaccaaacaaggatacctggtcacaggtatgcaaggcatacaacagagccacaaactccaaggacggatactgaccctggttctccagccaactntcctggatatacct

SEQ ID NO: 140211 - DNA, 650 bp, Homo Sapiens
  misc_feature (486)..(541): n is a, c, g, or t
  misc_feature (546)..(546): n is a, c, g, or t
accacaggaaagcctgtttttgtttttactggaggctcaggtggcacatgacagatcataaaatggcttcagaggtagggggccgggggaaaacaaaaataaacttggggtgggggcaagaaaagcaaccaggaggaggtaagagctggctggttccttctcagcctgagttacgggagggagttgctgtctctgaacagtaaggatggctcccttccttcaacccttgataaggggagggaagaaaaaagaaaaagcaaaaggctgctgctttggtcctcctgagtctcaaggaaaaggtgaaaagctggtgttttgatgtcatgaattatgggaaagggggagcagggtactgggtagggtacaggtcatttggaaaaactggcagataccagatggcagctctgggtgtcctttgagttgagttggaatcactccaggatggtggtggtggggtccccactgttgacaggggctgaggtctcnnnnnnnnnnnnnnnnnnnnnnnnnnnnnnnnnnnnnnnnnnnnnnnnnnnnnnnngtctncgctggaagtaggggcggtttcgttggcgcttgggctcatgccgggaaccatcagcgggaccttggctgggcttggtctcaccatccccacctttctgggtagg

SEQ ID NO: 140212 - DNA, 305 bp, Homo Sapiens
tgccaatgctaatctggtggctgcttttgagcagagcctggtgaatatgacatcccgcctgcgacacctggcagagacggccgaggagaaggacactgagctgctggatttgcgagaaaccatagactttctgaagaaaaagaactctgaggcccaggcagtcattcagggagcccttaatgcctcagaaaccacacccaaagaacttcggatcaagagacaaaactcctcagatagcatctcaagcctcaacagcatcactagccattccagcatcggcagcagcaaggatgctgatgcggaaa

SEQ ID NO: 140213 - DNA, 459 bp, Homo Sapiens
ttttttactgttttcaattcatttattcaatgtgaaaatatttacactcttgtataaaaaagctcttttcaaaaaatgtgaatggaaatgaggtaaaataaataaaattgaagtagttcaaaataatctaatcggtaataatatagtaaaccacatgattatacccttagaagtaaacatgtgacaagcatgaaaaactaaaaggatttgttagaggcatgtgaaccagagcaactccatcttaaacaggagccgggcaaaatgagggtgaaatctattgggctgcattcccagatggtcagttaaggcattctaagtcacaggatgagataggaggtcagcacaaaatacaggtcttaaagaccttgctgataaaacaggttgcagtaaaggagctggccaaaacccaccaaaaccaaaatggcgacgagagtgacctctggtcgtcctcactgctac

SEQ ID NO: 140214 - DNA, 558 bp, Homo Sapiens
  misc_feature (213)..(462): n is a, c, g, or t
tctctattttggttttggtgggttttggccagctccttcactgcaacctgttttatcaagcaaggtctttatgactggtattttgtgctgaccttctatgtcatcctgtgacttagaatgccttagccaatcagggaatgcagcccagtagtttcagcctcatttttcccggctcctatttaagatggagttgctctggtgtcacacacctcnnnnnnnnnnnnnnnnnnnnnnnnnnnnnnnnnnnnnnnnnnnnnnnnnnnnnnnnnnnnnnnnnnnnnnnnnnnnnnnnnnnnnnnnnnnnnnnnnnnnnnnnnnnnnnnnnnnnnnnnnnnnnnnnnnnnnnnnnnnnnnnnnnnnnnnnnnnnnnnnnnnnnnnnnnnnnnnnnnnnnnnnnnnnnnnnnnnnnnnnnnnnnnnnnnnnnnnnnnnnnnnnnnnnnnnnnnnnnnnnnnnnnnnnnnctcttaggacactgagctgctggatttgcgagaaaccatagactttctgaagaaaaagaactctgaggccaagcagtcattcaggtagccctaaac

SEQ ID NO: 140215 - DNA, 808 bp, Homo Sapiens
  misc_feature (43)..(62): n is a, c, g, or t
cattctttaaacggagagctgacacctgggcgtctgtgtttcnnnnnnnnnnnnnnnnnnnncacccttctagatactctagtattttgtaaatttccttgtcatgggctgacttttacagggaacattttaaaatctaaatttattatcctgcttagcatctcaaacaactaacctttcaaaaaaatttatatctaatacctttcatttagaaatgaggagggagacagtgcaattcatggtccacagagactcctctgctctggaatgggggtgaagatgggacaatagagggtcaggcctttataataaattaggcaaaaggttcagtgtccagctatagtggacaacatgaaactccataaaaatgactggatagggggactgcttgagacttttcttttgggcattactaacagaattcaaagaaattccaaccacgcttagttttccaaattctactgaaatgagagtgttcataaaaaagcctgagattaataaaaggcagggctgttaaggaacactgagaaacaaaggttaaggtggtttggcattaaatcggtttacattccaaaagaatactgaccatcactgggaggaattctcaaaattacaaagtcatggttacataaattcctctatataagtatgttttctttctcaatatacatgttcttctatatacatagtatagaaaagctagtaagtcagctcagctataataattctgtcataaaaaagcagattaccttttttggctgcaacaaagcatgttacttatacttttcagtttagctaatgtatttac

SEQ ID NO: 140216 - DNA, 428 bp, Homo Sapiens
  misc_feature (198)..(198): n is a, c, g, or t
tttttaaggcaagatgcttttattaactgattgcattaacgtacagtgcttagaacgatgctgcggagctgatgttatcattgtcattagcagggctgatactcagagaggtggtggcagctggaagaggaacttctggttttggtttcagataaaaccagagctctgggcctgtatcctggctcctttacttcctanctgtgtgactttcggtcagtcactcaaacacccttgatttccctggtttcctcatctgcaagaggagagggttccagctgttaatctcgggttctgccgcagttcacccaccaccacacactcgcccatgaacgtcctcctcgcagaccccggggaccctggccggccaggggtctggtctgccatgggctccctttcctccccagagcctggtgagggggacagtcagg

SEQ ID NO: 140217 - DNA, 483 bp, Homo Sapiens
cccaccttgtccatgttcttccaacaagaagacaatgacatctaaggcttctttagctgtttcccctctttctaaaccaagcctgaccagatccatccccagcaaggcttctatctcggcagctggctctctggtgttgatggcttcattggctatgcacactcccatgttcattggctcccatttctgctccccagagccaggcgggtctgcttatcattatggcataggtccttggaacttggtcgattgaaatgtaagtgcactcaaccttgctctccggttcgtgatcagcagccgagaaatacacaacctcttgcacttcatctctgggccgggctgaatttttcccaaataccaccagaccatccttagcacgtggagggaaggcaacaaaacagtaacttggaggagctgcagccatcctggggcggcgggctccgggctccgctctccgctctgcggtgctgaggctgcggccgc

SEQ ID NO: 140218 - DNA, 458 bp, Homo Sapiens
  misc_feature (84)..(84): n is a, c, g, or t
cattctgtcctcattgatgagagaaaatttggaccacggaaacaactgtacataatgagaggcagtacaaaggaaacactagcntctgtggcatagaaacagcacaggtgttgagagagtagccacatcaagctcataagaagaggtgggtcttgaacggagacgtaggaaatgaagaaggcgcatagttgcggcaaggaaaattcaaatttgtagtagagcttggaaaaagaaaatcatttttaaaaggaaatatcaagggcccactaccatgatatgcccaagatccatgactacgggccttctgttaacttcctagtgggtaacagagcagtggctggtaccagaggtgtataacggtgagatgcatggtcttggagtcaaatacaaacccagtcatttactggttgtataaacttgaccaattaatctctcaagcctcagttttcttgtttaaa

SEQ ID NO: 140219 - DNA, 580 bp, Homo Sapiens
gaattttctccagatatttaatgcaagatgcaatgtagccatattccatgaaatgtggttagcagtaggggagttgtagccctatcgaatcaaagtattacaatacagctgaaagctttatatagacgtatttcggttcttaattgcactaatgcagacagtttgatagataagcttctctcttgtgctttttctactttgggaggttatatactttagatgagagacaaagaaactctactggtttaagagttctcagttttacttttactatagaccttttttcccaccagtttagatgggaagacccagcctttggtataaataacttacttccacaaaaatatttaaagggtatctttagtgttcactgtcagttgtgtagtcttttggtaagggggtggctagagcctctttactctcagtaagtgctctgggctgatggataaacacactaaatttaacaccctggttgtttgcagctctgacaaaaccactattagcagtcattgtgatggcttttagggtgtctcccgtcccaaaaattgttaatgagcggctattaatttttgaactggcc

SEQ ID NO: 140220 - DNA, 414 bp, Homo Sapiens
ttttttcaactcactacctttctttattgctaagcacctcaatagacacagcgcccaccttaccgctaggccctccggattgaggtttacttaggttcaaaacttgcagccggctcgcgacgaaacctgaaagtcagcgccaaaatacagacattaagtccccactccttcgtttcgggcaacacctgtttccactctcagctccccgtcaggagtgcgcaccctcaagcctcagtcttgctaaataatcagactgcacgtgcagttttcatacgaggtgtcagaagtcaaagcaattcatcacagactgggagaataagggaacccaagcccggcccagtcttacctgcaggtagctgagggcctgagattcgggaagaaacctttaaacgctaagggacaaagtggtgcgta

SEQ ID NO: 140221 - DNA, 275 bp, Homo Sapiens
tcaactcactacctttctttattgctaagcacctcaatagacacagcgcccaccttaccgctaggccctccggattgaggtttacttaggttcaaaacttgcagccggctcgcgacgaaacctgcaggtagctgagggcctgagattcgggaagaaacctttaaacgctaagggacaaagtggtgcgtaggccaggcctggacgcccagggacctggccggcctgcagcgttcggacggccctcaaagccacgctcgtggctcagttcgtcccaa

SEQ ID NO: 140222 - DNA, 420 bp, Homo Sapiens
atcaaaaacttttatttgaggcttcaataaatgttcttaacttgtggttcttggaagtttctgggctctgaacaatacaaaatggaggtgataccaagatgtccgttatttagatttataagattattttctatcagctatctaattctacaaagtacacaaaaataagcctttaaaacctaagaaccataaaatccttgggtgaaaatgtaagccttatgcaaatgtaaggtattcttatcactgaggcaaaaattcatacttttgtagaactttttgagtatggaataataattaagaacatgaactatggagatagactgtctagatttgaattgtgcttttttcgttagttatgtcaccttaggcaactcataacctttccataactaagtttcttcatttaataactagggttaa

SEQ ID NO: 140223 - DNA, 432 bp, Homo Sapiens
  misc_feature (337)..(337): n is a, c, g, or t
tttacagaaagattggtttattagaatgaattagctcttgtgactgtagaggctgacatatctcaagatctgcagtcagcaagctggagatccaggagatccaatagcatagtttctttcagtccatatgccagcaagctcaagacccaagaagagccatttttcagtttgcgtctgaaagcagaaaaacttatgtcccagcccaaagcaggagttcccccttacttgaggaagaataagcccttttgttacattcaggccttcaacagactggatggggtccacccacattagggtggagtttgttctgccactgtgcagttatcattctgggatngggggtaccttactctcccaatgagaaattctaaatttcctcttttgagcctggtgcctccaccttctcagaactgcatagggcgtgagctttgt

SEQ ID NO: 140224 - DNA, 426 bp, Homo Sapiens
  misc_feature (57)..(57): n is a, c, g, or t
gagacgtgaaccgcgtgcacgatcccgaggaagaagggcgagggaggaaaccgcgcntttgttggtgttcacggataatgaagctgatgtgagagccctggagagaaacatcagtcaaaggcatgcagggaatcccatccagcgtccctctactctcctctgcagcttccatggttggaatgctgagccattgctaggacgatgaggctacaggaaagtgaaatgcacctgctgcgatctgatccaactgaccactcctgctgctcctcccttgcacctcaggcatctccttccaatctggaggaaacacttttacctccacttttcttttacagtcctccaaactctgttccttctagggagcacaagtacagaaatagaaacctggactcccttcatcctgcttcacaaacttacaatgttaaa

SEQ ID NO: 140225 - DNA, 763 bp, Homo Sapiens
ctggccagcacggagcccagcagcttgtgttatgtggagacggtggacattgctggggagacgaacttgatgttcatgacaggccctgatggtcacccccaaagaactggccactataaagaagatggcgtcctttcaaggcacagtgacgtgtgaggcgcctaacagtcggatgcaccacttcgtggggtgcctggaatggaatgacaagaaatactccctggacattggcaacctcttcctccgaggctgcaggattcgcaacacagacacctgctatggactggtcatttatgctggttttgacacaaaaattatgaagaactgtggcaagatccatttgaagagaaccaagctggacctcctgatgaacaagctggtggttgtgatcttcatctccgtggtgcttgtctgcctggtgttggccttcggcttcggtttctcagtcaaagaattcaaagaccaccactactacctctcgggggtgcatgggagcagcgtggccgcagagtccttcttcgtcttctggagcttcctcatcctgctcagcgtcaccatcccgatgtccatgttcatcctgtccgagttcatctacctggggaacagcgtcttcatcgactgggacgtgcagatgtactacaagccgcaggacgtgcctgccaaggcccgcagcaccagcctcaacgaccacctgggccaggtggaatacatcttctcggacaagacgggcacgctcacgcagaacatcttgaccttcaacaag

SEQ ID NO: 140226 - DNA, 546 bp, Homo Sapiens
ggaggtgctaagacacttatgacgactattatgcagttgagaaaaatctgcaaccacccatatatgtttcagcacattgaggaatcctttgctgaacacctaggctattcaaatggggtcatcaatggggctgaactgtatcgggcctcagggaagtttgagctgcttgatcgtattctgccaaaattgagagcgactaatcaccgagtgctgcttttctgccagatgacatctctcatgaccatcatggaggattattttgcttttcggaacttcctttacctacgccttgatggcaccaccaagtctgaagatcgtgctgctttgctgaagaaattcaatgaacctggatcccagtatttcattttcttgctgagcacaagagctggtggcctgggcttaaatcttcaggcagctgatacagtggtcatctttgacagcgactggaatcctcatcaggatctgcaggcccaagaccgagtcaccgcatcgggcagcagaacgaggtccgggtactgaggctctgtaccgtgaacagcgtggagg

SEQ ID NO: 140227 - DNA, 686 bp, Homo Sapiens
tttgtatttgtggtgcttgtttattccttgagtgtgctgcaggaaaggggctgaatttacctcattctattttggtctggacctggaggctggaggaaatgcggtccccaggagaagtctagaaagatgagtctccccatcctccatggctgcccgcccacctccacagtgccagatgcaggcagctgcccatccgtgtgggatttcccccagagccgtgtcagaagctctgcagtgccccccagatttttctggggggaccccccagagttcttgatgtttcaccagagttcttggtgtgttctgtgagctggaatccagctcgcggctcagttccactgggtttctggatggatcatgctggccataaggatgcagaggataccagcacatttgtccagcgtgcatctgaggcctgctttgtgctaagctgtgtgcctggtggagaggccgctccagggctgaataaaatagggctggttcttgctgacaaaaagcttaaaacaggttggatgacctggagttgacaataatgcctcctctctctccccagtttctcggtttggactgtcagttccatagtcttctttatcacagaacacattagagagctttggctttttatcctaagagcttgttctaagatggttccatcttgagttggggtcagctcactgcagctgtga

SEQ ID NO: 140228 - DNA, 604 bp, Homo Sapiens
tttatacaaaaaaatttttattaagtacagtttcaaatttagagcttccacgcttacaaatgtgattggatatttaggatacataatttattcttaaaatacacaacttatatacagatattaaaaactcagtctccaaaatgctcaataaagatgtctgggtgacacttatagaattgacctagcaattttttcttctctttggcagaaagttttgaatcctcatcaagagtttttagtaaattcaacagctcatctttggttgtcttctctgtattgttggaatagtcacgttgatcaattctctggcaataaatatatcctgcatctctatttggatctcttccgttctgtatggccataagcttaacacttacaattttatgtagagttccaggaatcttaaaaacatctttctgatgatccattaaaaagagtaccagaagatctgttttgcctttggataaatttttattgtcaacaatagcttttgagaatatccttttcacaaccattcggttgtcactttctttctgtaatttaaactcagaaggatttgctgcaacagccatgaaatacagtagtcttctaaattcttctctat

SEQ ID NO: 140229 - DNA, 656 bp, Homo Sapiens
agctgggccgggtgccagatactgggatcagccactgcagctccatgagcactctctacagagacgcggaccccagacatgaggaggctcctcctggtcaccagcatggtggttgtgctgctgtgggaggcaggtgcagtcccagcacccaaggtccctatcaagatgcaagtcaaacactggccctcagagcaggacccagagaaggcctggggcgcccgtgtggtggagcctccggagaaggacgaccagctggtggtgctgttccctgtccagaagccgaaactcttgaccaccgaggagaagccacgaggtcagggcaggggccccatccttccaggcaccaaggcctggatggagaccgaggacaccctgggccgtgtcctgagtcccgagcccgaccatgacagcctgtaccaccctccgcctgaggaggaccagggcgaggagaggccccggttgtgggtgatgccaaatcaccaggtgctcctgggaccggaggaagaccaagaccacatctaccacccccagtagggctccaggggccatcactgcccccgccctgtcccaaggcccaggctgttgggactgggaccctccctaccctgccccagctagacaaataaaccccagcaggccgggcgcggtggctcacc

SEQ ID NO: 140230 - DNA, 847 bp, Homo Sapiens
cccatcctgatcctctgctgtctgctcctatcccacagcggacaagtactgccctctgctgatcaaagaaggggggatgccccttctgagggacataattaagatggcgaccgcacggcaggagaccaaggaaatggcccggtaagagaccagcagtgtgtttctgcctggaaccttggtttaggggagtaagggcatagcgggcgccctctggaggttaggaatggctgaaattcccagggacagcttagagttgagtatggaggttgacagtgtattgatgtccacctggggcctctccaaatgtcatctcgaccacattgtggctggaaattagatgaccaagctcggaacggagcatcagggccctcgtttgtaagcttagttttcttttattcccaacaaattccatccttttatcactgggtattagcaagtcaggtcagaactattcattatttttggccaaagacattcccactaaagaagggacacagtgtggtaaaatacattctagagataagatgaggcagagtgcgagtgagtttgctgaatgtgaagatcacaaacatggtggagtctcggccttccgtggctctgtggctttcactgcagcatctaaaatgtcaccgcctccagttctcgagttgatcaggacacgagagactctcagggatgcgacgtgtcgaaatcgtcgaacgaccttgttttctccaggattcattctccacttttctctcgtccgtttgcaatatctgagaatacatagcaaggaggtaaagctgtcaccacagagcaaccttgggcgagccttggccctctcgagactttagtcatcacatctttg

SEQ ID NO: 140231 - DNA, 484 bp, Homo Sapiens
ttttttgcttcactaaagcatttatttcagtgttccttaaaaagtgagatctctgtggtgcatttagaatacaacttgaatgattaccaggttatttatacacaggtgttttgtgtaaagcaaggttcacctggggagagggttgggctgcactaggaatgactctgtattgtgtaatcagccaatgaagaggaattgagaaaagattttgagtgacatcctcgtagaaggtaagaaaggttcaacatgcgactttcagggccctatctcatcttgatgtgaaggcatctgtcaaatgtaccattatatctctttagcttaaacggagcagtgtttagcgattaaagtaatggaacatgattcaggagtcgtgttttctgtttctgtctcctgtagcttccaagtaggtagtcttgacgtgttcactttaatgccagttcactttaaagcaattatttccatcctaggtgaggcagtaaaatct

SEQ ID NO: 140232 - DNA, 419 bp, Homo Sapiens
tttttggtacgctcgtgtttagtgtgtatttattaattggggagggtatttgaggcaaaccgaaagtctcggggcggggaagtgagtggagcctgggcataattgaggagtcgccggagttgagggatccacgttgaaggtgacaatgacttttctccgccgcagtgttctctcgcggaaaggagcccggcggccgaaaggcccgagaggaaagcgactcgttggccaccgcgcagcggccggggtcggtgcgtccgcgtgggcgcgaggcgcgggcagggtcgggcgccgttgtgaaacctcgtggtttagttgactgcagccctcggactagggtggacaataaacgccattcgctcggaaactaagttgccatccgcttccgagctggcggccgagggtctttaaatcggcctttg

SEQ ID NO: 140233 - DNA, 471 bp, Homo Sapiens
tttatctttaactctgttataaacatgttgacactttgccaaacaaaaacctgatgaaacatattctgaattttctactttcctacataaaaacttacaaacaacaggctgaaggaaagaatgtgtagagaagatacaggaagtgacatcataaagctggaggagactttagagctgagctgctcttggtcacgcggcacacagtcccagtgctcagtcaccatgtgtcctgcatggctcccatgttggacggcacagacggaacatctcgatcgttacaggaagttccaccagatggcgctgtctccagggacatctggctgtgcccggccaccccatgtagaggtccctcctcaaggcagcatgtttagggcaccgcctccacacagattcccttcccatcctgtggcccgcttctcatcctccacacctgtcttgctcagtgacgctatgctccatgcaggcttatgc

SEQ ID NO: 140234 - DNA, 403 bp, Homo Sapiens
tttattgttataagtactttatttacaccaaatcaattctcaaaaatttgtgtgaggtaggtaccattgtccccatcttacagccgaggaaactgaggcacagggaggttaaggagcttgccaagctcacagagcctgtaggaggtggaagctggaattcaaatccaggccatctggtttttcagttcctgtaggaagcactgggctgtaatgtatttccatgcatttgaattacccagaggacttcttaacccacagattgttaagctctaccccaagagtttctgcttccacagatctgggtagggcctgagaattcacattttctggataatgctgattgttgctggtccagggacctcacttggagaactgctgctgtaaaataatttttcagaggtgg

SEQ ID NO: 140235 - DNA, 411 bp, Homo Sapiens
tttttttattgttataagtactttatttacaccaaatcaattctcaaaaatttgtgtgaggtaggtaccattgtccccatcttacagccgaggaaactgaggcacagggaggttaaggagcttgccaagctcacagagcctgtaggaggtggaagctggaattcaaatccaggccatctggtttttcagttcctgtaggaagcactgggctgtaatgtatttcctttggcagggagagtgtatttagtttggctcctgagtccttctgagatgatccttctgttgtcatcgctaacagatgatccttgtgtctggtgtggcaagatgttccagacttatgtatacattcctgccccaaactggttcaaagggtataattttttgttgttgtttcttgatacacattgccag

SEQ ID NO: 140236 - DNA, 451 bp, Homo Sapiens
ttttttgcagcagagaaaggtttaatcataggtctgccaaatgaacagatgacaggaaacctcaaatccatctccctgaggatttggcggctgggtttttcaggattatagagtgggccaaagtgtggagatcactgaggggtcaaagagtgcagcgtgaagtcatggacagggagatgggttcttcaaactggttaacattagctgtttccttagaatctgggatctgaaaaacatcttaagcagctcttaaacaaaagacttataattctaatgtcaaaaatcccatctgtaggaacaatggggatacaaatggtcaggatctagtgactttgggttacaaggaagtgggtcaaagtacagcctgattagtgcttatttataactatatttctgtctagacttcttgttaactctgtgaggacagcttcactgcttctcacctgtgcct

SEQ ID NO: 140237 - DNA, 478 bp, Homo Sapiens
caggctaagaagtgtcagagtggcagtcagccagccggggcattgctgctagagtgagcgaatgccagctatctttagtgtttaggttgtattgcttatcatccattctctagggaggaagcattggatctcccttcctcctatcccttcatttttactcttttgattagaggcaaacagggactttattaatgctctcttcaaactatattgaggggaaaaggtaattctgcagaaggaaatcaggttgctattgccgaaacaaagtagaatgttcagccaaagagtaacagttgtccactgtgtaacaaacctggctctgtacatgttgcatgtgtgttatctataaggcatgcaagtagaaatgtatagcagatagttggaaatgtggttctgaagtataagaagatagatttatatagtatactggattgattttccaagagtgactggattcttcttccctagagattttaaa

SEQ ID NO: 140238 - DNA, 463 bp, Homo Sapiens
gatttagacaggagaaatgtaatacaaaagactggtaaactttgataaaacagtaactctaaaatacaagaaaactctatatggtaccctggagctgagggagagtattcaatgaagaaaaaatttagaaggggtgttttctccacaagactagagtagttgaaaaaggtgcagtggcaacccactcaacagcaccgcgtttcactgctttgctcaggtcagagctattcggcaactgctggacgataacaatggcagaaagcaattctccgcggcataggttccacacagttgaatctctttcagtggatcaagctacttaaactctggtgcttaatgtcttcacttataccgtgagaattaatacccacttcctgaagttatcctgtcagttgtttgctgattttacggaacaggctttggagggtacctcagttcagatgtgtcatcttccccgagaaag

SEQ ID NO: 140239 - DNA, 456 bp, Homo Sapiens
ttctaacaatacaaatagtatggtatgcttgtgcattctgccttcatccctttctatttctttctaagttatttatttaataggatgttaaatatcttttggtgttttaaagagtatctcagcagctgtcttctgatttatcttttctttttattcagcacaccacatgcatgttcacgacaaagtgtttttaaaacttggcgaacacttcaaaaataggagttgggattagggaagcagtatgagtgcccgtgtgctatcagttgacttaatttgcacttctgcagtaataaccatcaacaataaatatggcaatgctgtgccatggcttgagtgagagatgtctgctatcatttgaaaacatatattactctcgaggcttcctgtctcaagaaatagaccagaaggccaaattcttctctttcaatacatcagtttgcctccaagaatatacta

SEQ ID NO: 140240 - DNA, 437 bp, Homo Sapiens
tttcttccaactctgcaagcacagctcatttactcacctgactgaagtaacagtgtaaaagacaagcgttcaggtaagaagctgactggaccagtttgaaaaatctcacaaaattattactgttcaatgcagcaaaagcctgaacagcaaatttcacctcagatgagtttctaacagcaggatggaactgttgtacttctcttaggatgtctcccttgttgagactgagcagaacattgtagccctggaactccgcttcgctggcacagaagacaccattgtttctcaggtcctggtacatctccttcaggctctgcaggcacttggtcatgttctcattatttgatcttggcatcaaaggaggacatgggctcctcacacatgaagtgggcacagtggatgtgaaaccgggtgcacttctcaatcagggacaccgc

SEQ ID NO: 140241 - DNA, 453 bp, Homo Sapiens
tttcaggttaaaatattttattttgacgtgctttttcttgagtgcctgaatgtggtggctcttagggtaaccccagaatcctcactgcggcaacaagacctggccaccaccctcacctcgaccaccacggccttcgctgcagccccactctgactccccgggggctgctcacgtgccagcacccactggccaagcatcctccggcaggacccaagtcctctgtattcagaggccgaccctgctttccagagactcacgaggtggcagagagtcaggctgtggcaggggcccctgtgtatcgaggagaggaggaagagtctgcagaggtttctagggaaggagatagtgtggaagtgactgtggctctggtcctgcctggggggagatctacaggggaggggcctggccttgggctggccctgccctgcgtgggatctgtgccctgcgtgggat

SEQ ID NO: 140242 - DNA, 808 bp, Homo Sapiens
  misc_feature (153)..(153): n is a, c, g, or t
  misc_feature (167)..(167): n is a, c, g, or t
tttttctgacctgtaagtttggatctcgttttaaaattaatttatggactgggtaatattgcacacagcgcggcacgaccactacacctccccccaagcacacacacacacgatatacacagaaggtcagaaatatgctagaacgatgctggngaaaatcaggtagnctgtaaagggagtagcccccaaatcagtcatcttggcctgaagatgtaaacaaggaggtttgcttcctgcaagatgagtacttcactgagtttggttttcatttttgctacaccgaagccacctctgtccctccaatgttcatgtctgtccgaggctgcgcaggaggttacgtcaagatgtggccaataaagtccaaaaagcgctttgaatactgttctgggttcacggtggagatctccgcgccagcgccatgtttaacagtttttgcagcatgggcagctttcttttttgcatcataatgagtaaggatgtcaataattgccatgaagtacacctccttcctaggcgagttttcatggcacttaattccatagacgtcgatgttccgatcgaactcctcgggagccatgggtggtgagctgttcagtgtattcccggggctatctggaggggttcacaccgggtgggtgccatcgctctcgccctactcctacccatcggtctactcacacttcactttcttctggtcagctctctgcacatcatgaattcgcaccagcagactgtagtccatgaagctcagctgggccagaaactcaacattctttcttaggttgtgcaggaagaccctcttggtgtg

SEQ ID NO: 140243 - DNA, 563 bp, Homo Sapiens
  misc_feature (47)..(96): n is a, c, g, or t
tttgaccttagtggatctgttttaattaatttatgacttttaaaatnnnnnnnnnnnnnnnnnnnnnnnnnnnnnnnnnnnnnnnnnnnnnnnnnntatacacaaagtcagaaatagctagaacgatgctgggaaaatcaggtagctgtaaagcgagtagcccccaaatcagtcatcttggcctgaagatgtaaacaaggaggtttgcttcctgcaagatgagtacttcactgagtttggttttcatttttcctacaccgaagccacctctgtccctccaatgttcatgtctgtccgaggctgcgcaggaggttacgtcaagatgtggccaataaagtccaaaaagcgctttgaatactgttctgggttcacggtggagatctccgcgccagctgtgagaaaagaaatattaatcctgtatacttgggaagtgtcttaagcagacaatcatgcttcagttttgaatatttcatattagaacacttcattatcttcttttgcacttttatctctggaacatttttcaaacaaaaaagaatttgtgtaacatcctagtgatgcgc

SEQ ID NO: 140244 - DNA, 520 bp, Homo Sapiens
tttatttccaaagtttattttatatagcacacatttatatggaactgtaacagtgtttcaacacaagacatttgtgcagaaaaataacaggaactcttttgttaggatgattgtctctgttttatacatgaaagagctagtatataaaaatagtttttaaaccaaaggtaaccttctctattctatatcaaaagtacaatactctgagtggcaaagaaccagggaatctgaaagaattacctccttttactaatccaagactggcagccaaaaggaacactggcctgcttcagactatttacgattcaacactgaaaactcattaggagaattaatctgcatttgaattttatggaatcatatactgtgtgtgcatacatacgtgtatgtacatctgtgtgcatttctgtgtgcccatcacacgaactcactggcagccagtggctagagaaaggcaagcaaattttggttgtatctcaagcctgagtgtatactcaacgacagaactggagagtacagg

SEQ ID NO: 140245 - DNA, 1399 bp, Homo Sapiens
ttttttttatgattatttcatgtccatactttattcagattttcagacggccacagcagacgcggctctcccgtccatgcagtgcacgacgcagacgttcttgtggtcctgccgcagccaggcgtgcatgttcctgcagatgttgtacagggtgtgcaggtgtggggcccgccgtgctgcccagccacactcggagacccggttgtggaacctggagggccggtaggtcctcggggacaggttgtagacggcatagtgccctgggtgcttggagtccaggaacaaccgcacatcttcgatgttgtttttgagcgctgactccacaccttctgctgggaatgacatcactgcaattctggatgtgatgtaagatatgtccaggtcaccctttgcataattagcgacggactggatgaccttggaggaggtgtccttgaggttggtgaagagccgctctgtcccaccccgcagaatgtccaggaagccgccatacggctggtcgtactccgccagcgccaggcctccactgtagccactgccagcggggcccacgggagggggtggccctcgggacagtgtggcgctcccgtagcctccattctgctccaggagctctgtgatgggagacttggggttcacgttgcgggcggccgcgatctcctgcagctggtgcaccacctcggcgatggacagccgctcctccgggttcacctgcagcatggcgcggatgaggctgtggaagaccgtgtactgcgtgtcgtgcggggggatcgagtacttcccattgactattcgaagtttcgctccatcctcaaaagggtgctgccggaagcacagcaggtacaagatgcagcccagggcccagatatcctgcttctcgccgatcgggaagttggaatacaagtctatgatttctggtgttctatacattggtgttgtattcctcgtgatctcttcctccaccagggctcgcctctgggcgctccagctgtagtcagggtagtgcgagatggtcgtggcactgccaaagtcacacagcttaatggtcccttggttactaagcaacaagttctcaaccttgaggtccctgtggatgatgggcggcttctgccggtgcatgtgctgcacggcgcggcacgtctggtagaagatcttcagaaccgtgtcgcacgaaagggggcctcgagattccattttcttcaaaaattccaccagctgccctttacagagctctgtgagcaagaagaactcagcctgccccgtgtctgactcctcttttcctatagacgctgcagaacaaaactggacaatgttcgggtggccggaaagctttttcatgaagcagacttcttgaatgatggctctgttctttcctcgtgccgaattcgccacccaggcc

SEQ ID NO: 140246 - DNA, 216 bp, Homo Sapiens
ggatattactttccttgaaatctaaaagtctgagaatcatgtaatgatcaggtaaaagaaaatgtaagaacattatttaagaagaccatgtttttgtagaggaaaaaagaacatccaccctttacagttatttatttgtccccaacttttggaattaaaagacctgaacttgacatttatgtatttatatttggctaaacatcttgaaacctttgc

SEQ ID NO: 140247 - DNA, 373 bp, Homo Sapiens
tgttaatcttttgatttgctttcttctggtgtttttgttatgtatattattacttgttactttttttatactagtctcatagctttttcagtattgccctatagactttataagcttcatttttaaatattatataacatttcaagatgtgtctattttgctgttactgaatacttaatttgcttataattttaaaattgttatggttaggatccacacagataagatcatggaattcctgtatttcaagttatttctttagaaaaaaaattgctgaaggatgcccactgctagcaatattaacattttatgtcttttattatcagttgtcaaatttctttctaaatggttgtagaaatgtatgtcattcatt

SEQ ID NO: 140248 - DNA, 469 bp, Homo Sapiens
gccgcccccgccgccgcagctcgggggcgcggggggcggcagcagcaggcacgagaagagcctggggctgctcactaccaagttcgtgtcgctgctgcaggaggccaaggacggcgttctggatctcaaagcggtgagctccggaggcggggacgggggcggacttcggaacccgtggcccccggggaagcccagcccctcgccgcgtgggtctagcggcgtggtgtagacgcgccttgcggggacccgggaccgggcaatccgaggaccatgtggcctgcgcccgggtcgtggacgccgggatgggggagggacgagggaccaggatggcaccgagcggacgcgtaaccaatggggcccggcgccacgctgggctctcgacaaagagcccaggacctcgagcgcgcccgcgtggcttctgtctccgggcgcagggacctgagggtaaccgagtgtctgttgctctgcg

SEQ ID NO: 140249 - DNA, 468 bp, Homo Sapiens
  misc_feature (73)..(73): n is a, c, g, or t
cagactgggttttgtttttcctcctttttatttaaactacaggaacatggttccaactggaatcgcctattanaaccatccattcttaacagcaaaatcgatatccacggtgtctccgggcaaagcgcccgttacgccgtgagcctctgccacaggtggacgcagagcaacagacactcggttacccgcaggccacatggtcctcggattgcccggtcccgggtcgccgcaaggcgcgtctacaccacgccgctagacccactcggcgaggggctgggcttccccgggggccacgggttcggaagtccgcccccgtccccgcctccggagctcaccgctttgagatccagaacgccgtccttggcctcctgcagcagcgacacgaacttggtagtgagcagccccaggctcttctcgtgcctgctgctgccgcccgccgcgcccccgagctgcggcggcgggggcggc

SEQ ID NO: 140250 - DNA, 952 bp, Homo Sapiens
ccatggaatctaataatttagtatctggacatcaaacagatcacaaactccttcgttatcatctaaattaaagttgtattcatctgccggggtaggagaaagccttaagagaggaaacacgtcagaagacattaactcatcgatgatatctccactaatagatcctgctgaagatatatctgtagctgatgtctgctgcagagcctggcttctttcagagacatgttgctcaggcagattttgagttgccatgctggatttctgtggagtcactggagtcaaggactgggaggaaggctgtgtgaggtcatcaggtgggggaacaggaaaaaccacgggcttagatgaactcgactctttatttataagcagcacatggataggtcctgaatgactctttagattgatctggtatttcttttgtccattctgacccatttctggaatgggtacctccagttgtgtaccagaaggtgcctgaatggccaaaagtgtatcaccattaaagcaattacagatgtcttcatgagttacataggaaaatctattattaatggaatcgtccatcacatttttgatgctttgctgtagccacaacttctgctgatcaagttctctttccttcagttctagatcttcaatttcagctttaagatatcttaatctatctatgacttctttagtattacagccagcacctacacctttccactggatactgttttttgactttttttcaatcaagtcaattccctctaagacattggtgatatcataaattctccttttttgcctcacagccaaagtatcagcagccgctttgagatccagaacgccgtccttggcctcctgcagcagcgacacgaacttggtagtgagcagccccaggctcttctcgtgcctgctgctgccgccccccgcgcccccgagctgcggcggcgggggcgggtgc

SEQ ID NO: 140251 - DNA, 544 bp, Homo Sapiens
  misc_feature (16)..(16): n is a, c, g, or t
ttttttttactcatgntaaatatacatagcatgaagttaaatcattttaactttaagtgtaaagttcagtggcattaagtaaattctcaatgttgtgccaccatcaccactatcgatgtccaaaactttttcatcatttcaaacaaaaattctgtacccatcaagaaataactccccaggctctgccctgcccccttgtaacctctcttctacttttgttttatagagttagttgcttattctgggtaactcatataagtgaaaccataccacatttgtccttttgcgtctggcttatttcacttcgttttatttcttaagtgtcagccatgtcacacatatagaaaaagttcatctttttcgccaaattatattaatatatcacatgtattcatttatgtgctgacggacacttaggacatttccatggactcacataatttgatgcaagtagaaacatttataattaacacaatattttatgaaaggctcatatgtaataagtactattaactgagtgcccactttgcagaacctgtgtgag

SEQ ID NO: 140252 - DNA, 362 bp, Homo Sapiens
tttgaggattttatttcatgtgcttttaatgtatggtaggagggttaattcacttttgttcttggttttgacattttgctttttacaagagtcttttaatagagctctaatcaaagataaatgggtgtatccaataatgctaaaatgccataccgtgttatcggtagaatcgtgctgacagcttaacagaaagtcttctggggtaccacacttcagtgggtactgatgtgtttaccagggaaggttggagtgtagattaccgtttgaggcatggaaagaggattgatgagagttctggatattgtaggggatgcagccagcctcttggcatgtgcagccagcccagtctcattcttctccat

SEQ ID NO: 140253 - DNA, 520 bp, Homo Sapiens
caagaactgcttgctttatttaggggtaagggcaaagagggaagtaaaatgatgaaagattggtttaaaagggccaggcaaaggcagggaaaaagcaaaaactcccctcttctcaggtgacagtcacaaaatcttacaaaggatcaaagctggaacaaccctccccttatttaaaaaaattccatagcaagtaaccatcagggctggagctccttccagtttttgaatcttgaacacaggtttcccccaacagaatgtcaagccctgtgacccaggggaggaaggaggggagaggatgggctattaccgagagaggcgacacatgtcacactggcaggccctggccgtgaagatctcgagctcctccctccggctccccacacactgcagctgtactttgaccttcttcaggccactgatggtgcagcactgagagacggaggtgatgttgtgtcggtaaccactggccaccagcacagagtaccgagaagggaaggcgctggactcacagtggcccaca

SEQ ID NO: 140254 - DNA, 514 bp, Homo Sapiens
  misc_feature (180)..(207): n is a, c, g, or t
aggctgtggcaacttttactaccagcgtgaacaaccagcatttttattgcatttgagaatgcttataatgtcagtaattagtactgactacacaacattttttttattgtctgtatccgcagacatggaatgatggaattacagttgatgtcaaggaatgagtttcttttatgccttatnnnnnnnnnnnnnnnnnnnnnnnnnnnnttcttgttactggcagcacatatacatgaagcaccatgctcacagtccggactgtatcatcttcatcaaggcttatgggtagcagagattgcgtgagctacactgggcccaagaaatgccttcagcattgtaaatctgattttcaggataaagaagcaaaactgactttgaagacatccagaatttcaggaggctatgtcattaaccaaaaggtaccaaaaagattcaaaatctgaataagcacactcttctttgtgcctttgcacaccggagttcagctggaatatcgataaagagacgacatcct

SEQ ID NO: 140255 - DNA, 504 bp, Homo Sapiens
ctgtccaaatctgaatcacctgcccaagctctggatgatggtgacacagccgtgggagctggtgcagcgctgcagggatggctggacctccacctgcccactgctggggtcaaaggtgaagaccttatcggtgctttctccgcgatcatcccgcccgccaaggatgtggaccttcccgtcacacacagtgactccacagctttccacagggctggggaggacagctgcctccccccacacatctgtgcctggatcataggtgaagattttgctcatgagaccccccatgacatagatggtgtcctcaagggagacagcctcgagacaccgctgtgagaagggtgctggtgaccgcaggctccaccggtcctccttggggtcaaagcactgcaccttgtccgtgttgacgccgccctgcctggcgcccccaatcacgaagagcttgcccgcgcaggacgccaccgccgccgagctcacggcctccgggaggggcgcggcggccgc

SEQ ID NO: 140256 - DNA, 549 bp, Homo Sapiens
gccgagggcggccagacaaggggtggttcgggtggtggcggtgtcttttttcgcgggagacagagcatttaatgagagcaagagctggacagtgtggtcaggaatcgtcccacccaaggaaccagacacatactcggtccttgatggggtttcctgaggctctcatactttctcctgccctggaaaatgccatccaggagctcatctctttgctactgcctctcttccagagcagcacaagaaggaaataaaatggacttgcgggggaaagaagatgcttgtctctcatgtctgtctcttacaggggggcttctgaagattcccacagcctctctggagttgttgccccactttggggtctttgtccgagtaacttcaagtagattggcccacgggcaggggttgtttgctgagagatcaccaagcgctgctcaatctcaacgatcctctgttgtcaccagccatggctgtgaaggccagtcaacaaagggaagattttacccagaggagctcaaacgctggcatgaaagactctgaagtggcatagcc

SEQ ID NO: 140257 - DNA, 367 bp, Homo Sapiens
tttatttgttatcaaatatttttgggtttgagttttgaggaactccaggatttaaccgaggagaatgagtaggcagagagacaacagcagagatgcagagagtaactacgtattgtggaagccgaaagaagacaatgttaatagtgaaaatttgccccatggggttaacaagaatccttgagcttgccttgcaagaagacagacgaagaaacagcttgttataattctctctgcttgcaacaaaactggctgactggctgaaactggctggaaccaataaggctgactggagtcagaatggcacagaatagactcgctctcctggggggtgacgttttgatgtcacagcctgaatttccacgtcatg

SEQ ID NO: 140258 - DNA, 507 bp, Homo Sapiens
tttaggaggtccaaggttttttattcacttgttcatacaatcacattagaataaatgcatcatataaaagttcatgctgtcagtgctgtaaccattaagtaataacgtttcccactttttctgaatggtccaccagtataaatattggtattacaaacctataaatgacaaaggaatattcttatgttttctgagttatattatgaattataagatgagaatagacctgccaatattcttcacatttgaaagtttcctaccagcataaattccccgatgttcaacaatgtttgagccacacacgaagcacttcccacactcctcagactcttagggtataacactcatatgttttctcagatgcactttaagggctgaactgtatctaaaggtcttcccacattttttgcattaaaagggtttctcaccagtggtgacccgttgatgttcagtaaggaatgaattaagtctaaaggccttcccgcattccttacattcaaaaggttt

SEQ ID NO: 140259 - DNA, 424 bp, Homo Sapiens
  misc_feature (11)..(11): n is a, c, g, or t
ctccgggctgnttccggtgtggccgcgacaaagagccgcagcccctgtggcttctgcgaggaggcgtgaggcgtgtgcgcctccgcggcgtctccacggagcgagcgggacgcgccctcctcctcggtgggagggaggggggtcacctgcggggaccaggtatccgagggccacccctagacagtcagcctggcccgaaggatgaccagcccccggtaaatagaagggggcgaagccagctccgaaaccttacgttcgctgtcccttgtaaagaccctagaggcagtgatggggaacgccaaggagaaaggggcagaggggaaaccacagtagagaagtttggtgtgcagagggttgaagtgtgcttttccaaggttagaggtttttaaaccttgtggctttaatgggaacgtagtttgccctc

SEQ ID NO: 140260 - DNA, 564 bp, Homo Sapiens
ttttttgtttagacaatttgtttattaattttttaaaaaattcattaaaatgtcagctttcttctgaagtttgtagtttacttcatgatactctcttggaggaagaaggtaggaagggacaacactgcatgacagatgttctggttccatgataaaaaaatatcggtttttaaggagagttcacacgaagcataatcaactacacatgaagtcttccaccagtgggagcttttccaaatcgtaagcatcgaagagatcgctgatgccttcctcctccccgaggctcaggagatagtcctcttgcagcaggggaggcagtaagttcacaaacggtccttctaggttggaaggaatttggtcctcagtctgctgtaagaggttggctggggaggccagaggagaaaggtttcccatagaaactgagcaatcgctatgtcctgagttggttgaagccaagtctttggaagcgggtttagggatattccccattgtggtcttggttgtttgttttcattggactgtgtgttcagtctcttctggacataataaaacctcatgggcccc

SEQ ID NO: 140261 - DNA, 969 bp, Homo Sapiens
  misc_feature (668)..(668): n is a, c, g, or t
  misc_feature (750)..(750): n is a, c, g, or t
  misc_feature (825)..(825): n is a, c, g, or t
tttttcagcatagtgaacgttaatatttttatttcttttgtaatgaagagtacaaatggttgggagcaggacatcacaggaggaggaaagatagcgccatctctgcagaagaactcctgagccacacacagaaggaaagttgatccccagggcagcctttcccaccaaaaaaatcaggcccaatccaggagagtttgccagtagctccccagggttccagggtgtctgccagccttcctaggaatcgtgggcaggcttctaggtgccagtgactcaaactcctttttccacttcccagttcaacctggtcactctcatccccacaagttcccaatctgaatcccattctctgaccattctctgcttccttgtttttaatctcatttgagagtgatcctcacgggttcccctggcccctgcactcattttccttactgggtatgctaacgtttgtcttctaattcaaggaaatccttccaaccctgttttcagctctgcctccaaacccttccatttccccatttcacctcccagtctcctcactcctggagcaaagagctctgcacttggattggctaagcatgcatggctcatgtggagcaggggagttggaagatgtccctcagggcagaaagcctgcttttggtggggaacttcgtatcattcanacaggcttagctgtagagaaccctcactgcacctctcctcacgtctggctcttcccctcctctgctggaacttgggtcattntcgataaaaagcataaccagctgtaactgtgctcaaagcccccgtgtgacaagcgcccctcgtttttttgtgcanggagccctatcagcctatttagccttgttttaaacagttgaaagggaaaaaactgtgcccgatcttggctcagggccaaatcccttttatgggggataaaatccaactggccatgggttgccggggggatgatccctccaaccc

SEQ ID NO: 140262 - DNA, 497 bp, Homo Sapiens
tttaaggtacgttcaccattctgtttctttaatgaaagtgtatacaatccataaaaatcttcatctatagcactaaatctttgggcaccatcatgtagaatatcctacagttgtcactcacagacttgcagccacctgacttcatgccctcttgttatctctttaagccgaagtgattcaacagagccacattctccatcagaccttcttcccatgtctccaagtgtgtatgcggtgttgagagaaaacctgagtcccacaacaattgaaactgcagtatgttccctttattttccattgctggtcaaaggtgtttccaacgatgcaaaggtggtgtgtgaatcaaaggggctgaaatactgcctgggtagggagaaaacacatttattggaacaaattcatgagcataacacaaaaggtgtctggatggtcctgcgtgttgctgatattatgcgtattgaaagcagacaccttcagttacttaaactgctttacgt

SEQ ID NO: 140263 - DNA, 635 bp, Homo Sapiens
tttcttctgttaatattgttattaacactggtttcttaaagttgtcttatcttgcaagtttatctgaagctttggtttcaagcatttcagtcacaacactcccaattgaggagtgccacgggagtgtgaagagagcttcagatgtcaaacatttcctagaacctggtatttacaaagctgaagaaataaaatgtggttattgggcaaagaacagtctttaaactttttcatttgcttcctttcttggtgcgtcagagtttatcctgtcattcagcagaataaggagacttcattgcagtttcaattgttgtgggactcaggttttctctcaacaccgcatacacacttggagacatgggaagaaggtctgatggagaatgtggctctgttgaatcacttcggattgttgagatggggataaaaacagaaggaacataacctttgtcacccctttctgttggtcttgaaacttcgcaaggctgagagctgtagtgtttaccgaaggctttgtctttgggaatgtcaggatataggtacttcagaagggtttcaggaatgttttcacccataataactttgtagtctcgcaggatgtcagcgaatggcagagccgacaaccggcctttattggtagg

SEQ ID NO: 140264 - DNA, 529 bp, Homo Sapiens
ccttttccatcttcttctactctatcaccttcttcctcactgcttgcatctgcagtatttccaccttctccctcagtttctgaagagctctgttgctgaattgcctggtagccagtaaactttactcctgggttattttctatttcccacaatccttcgttaaatcctttccgtttgtttgactttccaaacttgtctttgtactccttatatggaaaaaggtctttgggacctagaaatgcagtttcatgggtgccaaaaaagaagataggatacttgtttgctggaggcttcacagcgccctctgggagttcatcaatccgggccggccagtgcgggtagcccttcatcttggcgaagaccaggtcgcccgctttgtactcgcggggccgcggacgcgccatcccagccgctccccttcctggtagtccttggtcgccgcgaagatgccgggaggccgcccccccgcgggccgacgaattgcgccgcgctccccgcgggcctcaagccgggcggacgagcggccgca

SEQ ID NO: 140265 - DNA, 558 bp, Homo Sapiens
atggacgaaggaattcctcatttgcaagagagacagttactggaacatagggattttataggactggactattcctctttgtatatgtgtaaacccgaaaggagcatgaaacgagacgacaccaagggatacctacaaattaccgcacagattaatagaaaagaaaagaagagaccgaattaatgaatgcattgctcagctgaaagatttactgcctgaacatctgaaattgacaactctgggacatctggagaaagctgtagtcttggaattaactttgaaacacttaaaagctttaaccgccttaaccgagcaacagcatcagaagataattgctttacagaatggggagcgatctctgaaatcgcccattcagtccgacttggatgcgttccactcgggatttcaaacatgcgccaaagaagtcttgcaatacctctcccggtttgagagctggacacccagggagccgcggtgtgtccagctgatcaaccacttgcacgccgtggccacccagttcttgcccaccccgcagctgttgactcaacaggtccctct

SEQ ID NO: 140266 - DNA, 494 bp, Homo Sapiens
  misc_feature (473)..(473): n is a, c, g, or t
gcggccgctcagtgggtgaaggatgtggagccgcacaagtgggcgctcgtggaggaggcgggcccagctcagggccacggggctttctgtcctttgtgtatttctggaggaagccgctgccccacagcaatgggtgaggctgaggtgctgaggccactgtgggtggagcttgtccagggctgtcctgggaccaaatgcagggctttgctgcaggcaaaatttggggcagcttggcagacagagtggtgggaggggctggcagatggctggggaggtggctctagctcccagctctaggacctgcaggaagccgcccctgtctctgcagcacctggatcctggccctgtggagaccacatctggtggcctgaacctcccatatgacctgcagtggcctctccaatggctttcatgtggcatctgcccacagaagaccccaaggtgcccctgtcctctcccgggtgtgggcagancaggtggccaggcctttctat

SEQ ID NO: 140267 - DNA, 445 bp, Homo Sapiens
tcaggttcaggaacatttattttcagatatatgtctttattggcaaatgataaaatgactaatttcacggagccttattatgatgaaatatacttatgaatgttaaccaacacaaaataataaactgggtctcttgtagtaagcaggttttatgtacataaaaactgaaaagaaattaaattgattcttaaatttcactccactgtatactgctaagagtgcaaactccaaaatgaccaattctggtttgaattatgtactccccttggactcagagaatggctcacactgacaagaatgtctattttgtcattacttagttttcaggctgcaagtatacgctgcattaagtcatgtatcagattcctcaggccttttccagatctgacaggagtcctagtggggacacttgccccccagatacttactcatgcagtactttgct

SEQ ID NO: 140268 - DNA, 1122 bp, Homo Sapiens
  misc_feature (677)..(685): n is a, c, g, or t
  misc_feature (933)..(960): n is a, c, g, or t
gcagtcctggtgattaagcttaaatatgggaatgatttgctcgctattctttgagagagaaaggaggaagaaatagaacctaatagtgatcatgaattttagggaaagtaccgaagaaccatggggtcccctctggtttcttgtgttgaatgaggcaagggtaatcatctgattccgagctgaagacctctggtcctcttaaggagggagagtgcatttttagagcttttagcaaaatgtgaaaagctgatgtttgcgccttgctttgtgaatttggctttgttttacttatacattaactcatgtaatctcttaaatcttacaagcattgatccatttcaacaaaaaggtaaatttaaaatgcagactttgttatttgccaaagaagattcatgaaaaatttacgtccaattattttgcaaatagttaatttcatttggctttttaccatgttccttcctttctttttcccgcttccttaatgtaatttaaaccctggcaaacattctttagaaaccaagaggaaagaaagaacaaatatcaaaaaagacatagaatttaatattgatacaatttcacctctaaaatggatttgaagaaatgcaactttatatcaaaaaatgtcatctgatttcctttgtttcttttttaaattatgtaatcagatgattttatgnnnnnnnnncaggggagcggaatattggtttcttttacttgttgttttcagttttctctgccattcatgtttcttttttgtgttcagtgtttcaaatacaatttgtatttaaggattttaaaataccaaactgtaactgagtacagtggatcgttttctgttaggatgttaatattatacaatgaaatctataaagtgttgtcaatttgattattgacacatataacatgtttacaaataaactgtggtattgatcnnnnnnnnnnnnnnnnnnnnnnnnnnnnccctgtcgggccggcctcgggccctcgaaaagcttttctaaaacattccgtttgggcgccgcgggccccaataaggtaagtgaaacatgggtacaaagcctgttttcctaagggagaatcctgggccaatgaactaaggcgctggggaattcccccccacat

SEQ ID NO: 140269 - DNA, 533 bp, Homo Sapiens
tgcttatgtttttataagcatagccaaaggtctggaattttgtggctggaggggccctgtctcgttcatctccattttgcagaggtggtgactgaagccactgagtgtcggtgctttactcatggtcatccagttgatccctcagtggcagaaccaggcctgggagcctgtttctggctgcctggtccagtgcgctttgggaggtcacaacccaaacctagtctggggcaagacctccctttgggaggtggcctctgatatttttggagcaccaggtcttccttagtgtttgagaccgtctcggagctgactggctttcacatgagaaacagttgggtctgtgttacatgtgtgtctattattttatgggataatagttcagggccgtcagggggaaactcagtccaggtagctcacagagggacccactgtacataagcgagcatgacctgtgcaggctgcactcctttgcagagttgtctgatgtcctgtgggccatgctgatgcgcgtgggcctccgcgttgacaccacc

SEQ ID NO: 140270 - DNA, 906 bp, Homo Sapiens
ggcagggggaagattgtgacagcaagtattttttatatccatgtaatgatacatcttcctttactgttccaaatacttcatctttaatgtggccacctccaaattccttcttcagagttgctcttgttgctgcatacaacattttttgacgaacatgagaatgatctggagacaatgcaatgaatatccattcatatccctgggcattctgagaatctaacctgaataatatatagcatggttgtttgtaacaccaaacaggggaaaaacaaaggaatcataatccttatcccaggaatctgaaggctgactatatgatccaatcacaagttgctctgtttagtgatttccattccagagatggaagcactgacattagaaatggactgtggtgcagaaacattttcaatagatattttcagaagtctgtactttccatttctggctctggcaaagatctctttaacatcttcacttgctggttctcgacagcgtactgaagccccagtcgcctccactgtcccagctcttccctacgtgaccaaaagggggaaagttgggcgactgtcggggacggtggaaggcacgcccccttcaaccaggccgcctcgaaagccaatttccttcgctcccccgaatttcggatcaatctgcaacgtgacggcagcagggaccgggctggaggaggacgcaggccggcagcgcccgggaagcaggagcgcggagaggcgccgaggcccggctcgccccgcgagaccgacttccggagctcccggcccgactccagccctgccggtcctgcagccctcccggctctcccggctctcccggaagccccttccctgcgagtcgcgccgggcgctgttaccttgagatgccggtctggtgggacatggcggcggccgc

SEQ ID NO: 140271 - DNA, 441 bp, Homo Sapiens
ggccgccgccatgtcccaccagaccggcatccaagcaagtgaagatgttaaagagatctttgccagagccagaaatggaaagtacagacttctgaaaatatctattgaaaatggttagttaaatattttaaaatattttctgttcctggattagtggctgttgtatttttaaacttactgtgtgttgtcagtgatttgaactattaattaatatgaagcaagttcaaatcttacggtaacttggattcctcatattttgtgcaggtccctatgggcccctaatttcattctgaattatgtgactatcagggaaacagaaagatgttttttgatgtgacttcttcctcttttactttttgtgtctcagtttctgcaccacagtccatttctaatgtcagtgcttccatctctggaatggaaatcactaaacaggtgattatc

SEQ ID NO: 140272 - DNA, 780 bp, Homo Sapiens
  misc_feature (78)..(78): n is a, c, g, or t
aaggtctcctttccatggggaatggtttataccagaaaagaaatgggtaacgaggctgaatccttggggaatcctctntggcaaatctttcagttctgtatttgttgtgttggccaaaaattataatttcatttgttatatctatttccaactgcacatagttgagctgtctattattcaattttttccaaagcctgaaaggcttctcgagaaatgggaaatgctactccttgtagtgtttgatgcttagtgtccacacccacgtcagtctgtacctcattgattttaatctgtcgtagttcttcctcagctgcagtcagtggggcaggggaagattgtgacagcaagtattttttatatccatgtaatgatacatcttcctttactgttccaaatacttcatctttaatgtggccacctccaaattccttcttcagagttgctcttgttgctgcatacaacattttttgacgaacatgagaatgatctggagaccatgcaatgaatatccattcatatccctgggcattctgagaatctaacctgaataatatatagcatggttgtttgtcctccaacaggggtaaaacaaaggaatcataatccttatcccaggaatctgaaggctgactatatgatccaatcacaagttgctcattttcaatagatattttcagaagtctgtactttccatttctggctctggcaaagatctctttaacatcttcacttgcttggatgccggtctggtgggacatggcggcggccgctagctccccc

SEQ ID NO: 140273 - DNA, 682 bp, Homo Sapiens
cccttatgcacagcctgttcagggaccttcctggacgtggccactgtcagtccttgggccttgtctgtagcctctgtgggaaatacttatagcaggttcctttggtggaagctcatggaaatttctaccattttttaaaaaagtgaaatcttaattttagagaaaagtaaagtccctccctcccataatgctttggaatggcaagttttgagaagagccaaccccaactttgacaacaagacgtgcaaatgctccttccttgcccactgccccctgctttgatggagcacacgcttcacatcgacccacacgctacccccacaacgaagccatgcagcctgctccaaggacagggaggccgaggaggaagcacattgcctgggggcacgtgcaaggtcgtcctcgtgcaggctccgagctctgggctgggacagatgagacctgtccatgccgaggcctccttggcacgtgggctccactgtctctgctcctttctttttctgtgctccgtggaaagaagatcatcgtggccccacacctcccggtgcccctgtacttcctcctgggccactcagcagaattctcgggccctgtccatggcatttgggtgggggccttgccagtcctccatgagcccagaagctcctggtgccttcagccatcttggcattgtcaggggaga

SEQ ID NO: 140274 - DNA, 599 bp, Homo Sapiens
tttttgtgattcaccagaagtactttctgtttgactttgaaaaactgtcagaaggagcaaagcacctttgcatacaagaaccttctttcacgttgtctttcttgcagggacacagtgggcccaggtagtggtggtgcgctatccacttgtagattttgcagaatgacttttaatttttttcttataggaaattcggcgccttcatcagtatgtgaaatttgctgtccaagatgtgaatgatgttctagacttggagtgggatcagcatccctacacgttgattggatctaggatccaatccaggattctgcattgtgtaagttgtcattctctttagtcgccttttctttgttttccttcagagctttactatgtaagcatacctcccaaaacactatgatttggttttgcctgtttttgcataccacataaatccattcacttagtctctggacaggcttctcttgttccacatcaggcttgtaagatccatccgtgttgttgcctctagctgttattttagttgctctgtataggattctattgtatgaatatgctgtatttgtttattcattttcctgttggacatgtgctgcttt

SEQ ID NO: 140275 - DNA, 607 bp, Homo Sapiens
tcagtttgtccaagaacctttattggaaaaatgtccaacaagtgatatcactagcagctgaaggggctgccaggtgagagggggagcacctgaggctccatggaagacattggagtagtgcagtgcagcatctgcctctagggtcagacaattccttttatttgctggggtaagaggagtacccacagaaacacccctctctgagggccagaggcaagatgtggggcagctggggatgctcagagtcctgatacaggtgaaatggggcccccatttgggacctaatggagtagggtacaactagtgactctcccctggaccggggaatggaaggagatatcccatctgatatccactccccaggtccaggggcacagactctgaacagacctaccttctggctctgctcacagtggaaagaggatgggtaccaggcctgagattgtgggagtggcattaccctctgggagtctcgggcagatcaccatcttgggctccccctgaccccatccctatccccagttgttagtgcatctctcttctgggtgtgtttcttcactcaaacgtcgatggtgttgatagatggtgactttttctgtcttgtccc

SEQ ID NO: 140276 - DNA, 484 bp, Homo Sapiens
ttttttttgggggtaaagaataaattttaatctctcttagggtaggggttctggtgaggctgctctctgggcggggccacagagccatgcactcgcacgcggtacaggcaagtgaagcctgggttcccccagttgcttgagatcttcaccttgaccgcactgaaagcccgggccggctggttctggagtgggaacatctggatgatgttttctggctgaaactgaaatgcccccaggaacacctcctccttgggggagccctccatgccatagatgacgaagtccttgggggcggtgtccaggctgcctgacaatgagatggtcttggggatgtgctgcagcgtgaggttggacaggtaaaccttctgagccaattggatggtcacctggccgcggtcaccctcaaaggcccagcaatttgccaggtgtcacgtttgggctcaaggatcacgtctgggggctgtgcgtagttccacagctggat

SEQ ID NO: 140277 - DNA, 497 bp, Homo Sapiens
ttgtagtttgttagaaataattttttatacactaggttataacttattcacatatataagcttattatcataataagaaaaggtttatatattttgggttttcttgttttaataaaataaatgtgctaaggttcctttttaatactttttgggaatatgttttgatgacagtagaaaatattcaacattaattcactaaacaaccaaagaagtaaaattttgatactacctccaaagttaaagatagcaggcatatcttaactacttcccaaaaagactagggagttaggtaaaagagtgaaggcatttgaggatttttcaagttccagatgaccagacagaaactgtaagccattggctacagaatgaatgatagcaaacactaaggtttttatgcactagacagtgtatgtaaacacttacttatcacagctcctgatatgagctgttaaccaataaatgagttccattcaggcattataaactattagatcctt

SEQ ID NO: 140278 - DNA, 502 bp, Homo Sapiens
  misc_feature (270)..(412): n is a, c, g, or t
tttgaaagatccctttctgctttttttcatttgttttcaagattaatttttgaaggtaaatgtgggcaaggaggtaaacaaactgagccactacatgaaggaacccgaagttggactccttctaggaggtgattttctacctgagcatgctgtacgggccttgctgctgctgttgtttttaacttaagaatgactttcccctgtaagacatctcatgagaaggcggggaaagcactactttacaacgagcatgggaggtgggcttatctnnnnnnnnnnnnnnnnnnnnnnnnnnnnnnnnnnnnnnnnnnnnnnnnnnnnnnnnnnnnnnnnnnnnnnnnnnnnnnnnnnnnnnnnnnnnnnnnnnnnnnnnnnnnnnnnnnnnnnnnnnnnnnnnnnnnnnnnnnnnnnngccagcattttgggaatcattaaggtctatgaaaagttggtggttgtgtaactgtaacagctgtattttaggaccccaggaattacgatc

SEQ ID NO: 140279 - DNA, 291 bp, Homo Sapiens
aaaactccacatatctcatgtctcatgttcgtctttgtctttgacaatgtagtattaatgcagctgcatgaaaaagtaagcaaaattaaggaatgagtctgattatgaaggttcattgctattataagaacccatagagcacacatccattccttccctaatgtatagggtgctgactgcataaaattgcttggaaagacattaaggatatgcaggcaattctgttgaggtatgcagtgggatgcttttatgtttggtgataaaggtggctctggaatttataatttcata

SEQ ID NO: 140280 - DNA, 828 bp, Homo Sapiens
aaatttaacactttcaaactttattgtcagtacagtcaaagcaatacaaagttatatggaactaaattaatctagaaagtagatttttatatcattcaagataaggagaagcccagattaaatatataaaattgttgttatttacacagctaacttcccgctttgaaaacaatcccatacgtaaatttcttttttggagcaaggtaacttggtgattgttctatctctacccaaaattcacccctatttggaaaactgggggctaaaagcaatcagaattcaccagttcaaaaacacttacgtccatcttattagcaacactaactacccagaggaaactaaaatagaccagatttacagcagtaagtaaatctaattgtaatttaaacattaccttattttagcaaaaggtgaagggaatcaaacgctagggggcagcatcaaactgttgtgggttaggctgggcagccttgcaaactttaagctttagggtatttttaatgagaattacacttacataaaagatgaattataaaacttccgttataaaggaaaaaactagttgttttgattccctacatttctcttccatttcccattgtgtactttcttttgcaactatgactggtatcactttaaaatgcactagtaataatgtccttctgatactaaactcatggcatttccaatactgaggtaagcactatataaacacaagctgacatttttagcctaaccataatggttaagttttgattcactcaattagcattttaaacttaattaaagagcttgacaagctctgcatattcatgtgtcataagcagt

SEQ ID NO: 140281 - DNA, 580 bp, Homo Sapiens
tttgctgttttttaatgaatttattgttttaggctctgtgagaatgcaataaaagttaaaaatgtatttcagaacacagtgcaaatgtgtctccgcatttgatggattgcttttgagtccaacacttccggcccgtgggcaggcaggccccacagatgggccgcggcatctacgagcagagcgagagtgcgtctataagggatggtcgtgggaggcacacacttatcagatttcatttctgttctcttctcttggcatagtagcaagagaatgtcgaagagaagctattgaagccaggtagagttagggaaggattcttagaagaggtcaaacgtgaagggcagcagtcatggagaaggtgcttcatctgaaggtagggcccagtcagtgccttgaagcggcaaccaaagactaggaaagcctaagccaacatttctcagtcctgttggggactgcgccagccactgctctaagacctcgctgccaggcctggcaggtggccagcccaggtgtccaggtgcccagatgccccacagcaagccaaggcctcaatcctcccttcacttgattttctgtgagc

SEQ ID NO: 140282 - DNA, 648 bp, Homo Sapiens
  misc_feature (334)..(334): n is a, c, g, or t
caattcataggtttattagtgaaaatgaggtgggttacataaattgttttgagagtattttccttgcttgtagagtcaataccaaggttggcatcaatatagggttaaacagtgatttgctgggaagatgtccttgtagatgtgatttttataaggtcatggtggcttctatcaaaggttgtggttaagcagaatccattcatggtcgttcttgttatcaggagtatgtgcatgggaaacctccttcatggtcattcctagttccatttgtcagggttttaacacaagtggatctattttgattctgacaactttcacagcctctttctaacanctactggtgaggaaggtgactcactctgtggtactttgcacagcacaggataaatttcacatccacatcccattttgaccacacaagctcatcctcttcactactgttggccacttgcattcccaggtgagtctccacatgacacactggagggtgcaggtatccctgagtttcctcaatactctgatcctggtgacaatggttgagggcttttcatctctgtaagcatcaatctctggggatgactctgatcagtgggtcctgtgtgccccccgcagctgatttcccccaagcattctgcagagaggtttgtg

SEQ ID NO: 140283 - DNA, 566 bp, Homo Sapiens
tttacatacttatattcatttattcattatataaaatttgggaaaaattttattcacatctttttttaattgaaaaatagagtttgtatacatttatggtgagcatcattgttaaagcaattaagtgaaacttgccataacaccaccacagtatctggaattttccttccggcctttcttccatgtgtaaatatgaccacactggtaccaccagcatttacgtgtgtcacacacagtgcaaagtgtttcatggacgtgatgttgtctcaaatattttgctcttgaggaaatgaagacgcactgggtgagtgtcttgtcaaagtcacacagccaaaaggaggaagctccaggattcaaaggagagtcggcctccaaagccacagctttcctgactaacgctgctgttgtcctctctcccgccctgaaaggtgaattattatcacaccaatgtttctgataattccctgaggctcagaagtgctggggagattgccatgtaacagacatggctggcatgggaacccaggtccactgatgccacggcggctctcttcaccttttgcccg

SEQ ID NO: 140284 - DNA, 795 bp, Homo Sapiens
tttttaaagggacagtgttctcatttttattaagatactataatttgtatagtcattcattaattattgatcatttgagttctttccagcttttcaattttttttggtgaaacaatgatgtaaactttgttgtacacattgctttttgtgattttggaaaatttccttgtataatctgaagatgagagattaaagactataaatttttctagttctaatattttattgccaaattgttaaacttttcaagaagtcataacatcaccttttctgggttcctccaaccagatactaacttaaattcctgaaaatgtaaacctcactaacaaggtccttgtggtttaatctagaaaacagaatccagcaatacgaaggaaattctgttatattttttagcttcttgcaagaggctgggttttgaagggaagaatgagtatctcaattatagaaataataggaattatggccatagaattggtgcttcatccccgaatgctcattatccctgaggtctttatggtcttctagaattgatttatggaaacgcttttgtgcaccagtttttgaaaaagagttcttaagctccagcaggttggtctgaggtttggtcactccagctctaggaatccaaccaagaacaggtcttgtttcttcattgttttccatattcaagaacaactcttcttctggcttacttaaaaaatgttctaaagtgaaagcttccgtgtcttgtttattttgtaaaacactaggtttactaaggctaacagggtctggacacatattatactgatc

SEQ ID NO: 140285 - DNA, 361 bp, Homo Sapiens
ggggaaaaagaaagtttatttttgcaaccagttacaaggagaaggtcagagtaactcatcagaccaacgcagttacaatattttttctagtgcatatacacattttaagctctctgcctatgtgtgggagtgcacctacaagcaggagtgtttctttcaatctgtatctaatcattagggtctggggtcttaatgggtttgtttttgcattccagccattgtactttagttaccagtttttccagttctttaaatgtttaacttatatattcatccagagttatagtaaaggattagtgaaaactgactgttctggttgctaatggaaacctggcctgccacaatccccactgtcaatttg

SEQ ID NO: 140286 - DNA, 482 bp, Homo Sapiens
  misc_feature (198)..(228): n is a, c, g, or t
ttttcctgagtaacactcttactccagatacatatacaggtcactcaactccttcaatttgtaaatctctggttaaatagaaaggtagcagatcagccctccttgatctctgccaacttaatatttgaacagagatttaaaggaaaaaatattacagaagtgggaatcctcaaaatactttctaaaactagctttggnnnnnnnnnnnnnnnnnnnnnnnnnnnnnnnatctcagaatttgtctatgtttacaatattatcaatgggtagacagctaattgcacagaatataaatgaggagaggtagatttttattaatgtgtacattttccttaattcctgatttactcaggcccaggcttctttgtttctggtcttggatctatgggcctgtgtaaatctttgtcacttagctaaaaggatttcttgaaaatccttgtagttgtttattgagcatttactgtgtactaggcactattgta

SEQ ID NO: 140287 - DNA, 525 bp, Homo Sapiens
gccaccataattaagaggaaccacacaccaggacatatgcagtagcgtagtaccagtgccattaggtccgtgattgctgacatcagcactcgtgtgtattctgatcattaaaacatttctttttaatgtttccctctatagcaccgtggtagctaagtcagagtggggggttttagtttctctgaattccatccttacaagttttcgctgaactagctcccagctagctgtaggagagatcacagaatattaaattattcagcaaacatttattaaactgcttctatgggctggggacccagggacacgaagctgacgtagatgtggtcccatcttgaaggggcctgtggtaccctgggaaagacggcgaaagaaacaactcaaatgaggtggaggaagggctggctggggatcctgcacaaagtgctgtgccagaggaattcatgtctgtccagtggacagggatcacagggatcaagaaggcacccagagagcttaggagagggcagagaagggcaccggttg

SEQ ID NO: 140288 - DNA, 341 bp, Homo Sapiens
atctcaactcatataacattttaatattgaatgtggaaatatttttattatttttaacagaagtcattctaactcgtgtgagatagtatctcattgatgttttgttttgcattctctaatgattagtgatggtatgcatgtgttaatatgtttgttggccacatatgtgttcttttgaaaactgtctgttcatgttctttgcccattttttaatggggttattttttgcttgttgatttgtctaagtctcttatagattctggatagtaggcctttgctgtatgcatagcgtgtgaatgttttcttccattctgtacgctgtctgttcaatcccccttgag

SEQ ID NO: 140289 - DNA, 531 bp, Homo Sapiens
gcttaatcctttatgaaaaggtacatgaagtctttaattcatagataagagattacttttagaatccctgaagccttgccaaatgttcattctcctatgagctaatgagtcagccactcttccagtgactatgccaggacagtctgttagaaactaattaaagagcagatacctttatcagagtatgtgtgttctaatgcatggagatcaggcaataggtgaatacagtttatgcagcagtaggtgaagaaatcaaggacgactatttttccacatagatccttgtagacagaaataggttcttctgtgttcagccattctaatccttccggaaactcgggtactgacaagtcctgctcccagccgtccaccttctgcagatactggtagaccaggctgtccttctcctgctgggtaacggcgtcgagcagggcgtactctagcgaggtctgcgcggggagcaggccggagaggctgcggccccggcctccgggcgccgccatgtttcagccgggctcccgatgcggccgc

SEQ ID NO: 140290 - DNA, 378 bp, Homo Sapiens
ttttttactatatgactttagagagatcaacatgaatctaaagtatgttcagacttctttctgattccttttgcttgtttgctctgtggagggcaggaagagaaaggacatctcgcacctgcctgaatcactgagtgctgagataccaccagccatgaggtgtaggaggtcaagggtccagttcaccttattcaatcactatctatcaggtggttttctctactgagtctcttaatgaggataatttctgaaagggatgctttcgtgctcaatggctgtgatgaatggtattatttccagtatccactttcctacatgtgagaggattctacataagcatgcattgccatgtgacccagggcctccctagcaatgatg

SEQ ID NO: 140291 - DNA, 370 bp, Homo Sapiens
tttttcagtgtttaggataaggttttattggaacagagacccacccattcatactgtctatggctaattttaagatacaagttgaatagctgtgaccaagccagcatgacccacaaaacctaaaatatttcttgtttggctctgggaagctaaaagacaacaaagaaagaattctccaaagatactgagtttctttgggagtgaacaaaaagaattataatccaagatgtacagctatggcaagccacgggtctggagaagggaagaatggggggaaagattttactggtaaaggagggaagttcacataaactcttggaaacaaagttgattggttcccaaggctcaaatcaagaattggagtccgttc

SEQ ID NO: 140292 - DNA, 387 bp, Homo Sapiens
tttaggttttatctatatagaaatctttatttttatttcaagtaatttcttcgaacttccagatgcaacttttgagtaaaattttcactcaaagatacaaagggttaatgaatggttcatggagtcacaagataatattttggatgtaggcctatttctgcaaggcctgtcttccaagatgacatctcacacctgctgtgttcacactggaaggaaataaaaggccatagttcacttcatgccatatttataactatagcgcttggtgtaattatacctgctgtattatacatcaggataggacaataaagattatatagtgtgagctcaatttacaaaacatttccttgaacaaaacgactatcccggaatttattttacagatga

SEQ ID NO: 140293 - DNA, 491 bp, Homo Sapiens
tacagcttcctctttgccccttcattgccctcaaaaagaggcccatctgcaggactcttatgcctcatcctatcttagctcaaaggtggaaatctgcacacagcctagaagggataccagatcttagtactgacaggcctcttcccagggttggggttgttccttctgcctgaaatcacaagcttcctggggcggagctcccgcctaagtgcaggcactgagggccgcctacgtgagcctcacggtcactcaccgggtgcgttatctgaaggactggaaggacatcacacccaattatttccccaaataattaccaaggactccaacattttgctactaaaaatgcattcctttgatctgtccacccaatgtcaagctctttcaaaagtaaatgctcctgggagaggcattcatgctatagtgttatgacttacaattcagactatagccttaatgacttattagggctatgtttttctcattccccttga

SEQ ID NO: 140294 - DNA, 404 bp, Homo Sapiens
caactgaaaggaaaattaaggaagtttttcaaagaaccctattccgagtaagaagtgtgttgcatgaatttctaaggtctctgaaaagcaacttattcactggagatgtgaggagccatccgcacatcacaattctatagacatcaaacgcatgaagcatttcggatctgctttaagactgaggcagactttccatctggacacagccgaccatccatgtgtcattacaatgaatccagcacttccctggaagctggaagggtcaaattcaacttcaactctgccacttcctgcttaacttgctgtttaaccttgggcaagctgccatcccacacgaggccgaaggtgtcggtttttaaaatacagaaattgggttccatgagggattatcaatatattgctgg

SEQ ID NO: 140295 - DNA, 511 bp, Homo Sapiens
tttttttccattcagaatgcagtcccattaggtgacaggttccactgcatggcctaaaattaatcaatgtttatcggctgcataaaggatgttgtagtgggatgttttatagagcaggtaaacggaaggggtggcggcctcagggaacacgtggtggttcagggcggtatccatctcgtccacgtactccacttgcagggcaatgctcagggcctgcgacaacgccgtgatctggatgtggtcacactccgtggccatgggctctacttcgtgagtgcagaagtctttgatgtccatctcctcatcaatgaagtgccggaagaagtctgctcggttcctgatgaaggccgacgtgagcaggcgcaggaactgcacgatgtggtccgaggcactctggtcgttgaacaccttcagcaggctggacactgagccatccttctctaccagttccaccacactgtaaaaagcattgaagaagtttctgaacttgtgctcctcaaagccagcagcc

SEQ ID NO: 140296 - DNA, 461 bp, Homo Sapiens
gatgccatgtgggaggactacgaagttaagtgcaagccaggtgaccccagcagacgggccctgcctcatctaccccgtaccactaccgcctggactggctgatgtggttcgcggccttccagacctacgagcacaacgactggatcatccacctggctggcaagctcctggccagcgacgccgaggccttgtccctgctggcacacaaccccttcgcgggcaggcccccgcccaggtgggtccgaggagagcactacaggtacaagttcagccgtcctgggggcaggcacgccgccgagggcaagtggtgggtgcggaagaggatcggagcctacttccctccgctcagcctggaggagctgaggccctacttcagggaccgtgggtggcctctgcccgggcccctctagacgtgcaccagaaataaaggcgaagacccagcccctcggcggctcagcaaa

SEQ ID NO: 140297 - DNA, 613 bp, Homo Sapiens
tttttgacagaagaaacatttttaattgttctggtcctgccccatcaccaggggagtcccggcactgctcaggctcactgctcttgctttcccctgggatgtcgaggacactttgacctcatctatgtcatagcccatgtgtttctcagatgccaccgccataagatctagtgccccctggtgccattgggcaaggcaggccagagaggccaggggcagctgggtgtgcaccaggccacagggctgtggggcatgcagccgatggtgcagcttcaggtggatgtgctgggtgaagcgactccggcagacactgcactggaagggccgggccccggagtgcaggcgcaggtgggtcttgaggttactggagctgctgaagcgcttgtggcacaccgagcacttgtggggccgctccccagtgtgcaccaggtggtgcttctgcaggtgggcaagttgagtgaagctcttctggcacaaggcacactggaatggacgctcttcactgtgcacacgcaggttggaccttgagaattgagagctgccaaaagctcttgcacatatgttgcactcgtacaggattttgcattcttcttttcagcgggtaaggaaggct

SEQ ID NO: 140298 - DNA, 618 bp, Homo Sapiens
  misc_feature (73)..(73): n is a, c, g, or t
agcagcagctactagacattcttctacaaaaggagtcaagacatgggggcggatggtgaccatgatgtctcgnaagtcgatggctgtgactctcccagtcttagcattgtcccgttgcacaaaggcttgctttgcgtgctccagttgtatttccaataaaaactgagtagattccgcatatgtcaggtgtctttttctttcttttccaaaatgtagttgcacaaattctgaatcccagttaaatggaatatgttgatgaattgtggtctgtccaaaaacttgcttaacatcctcaaaagttacttctcctttgccagctttgtcaaacagctgaaaggctaccataaacaaagcatcaggggcacacaggacagattcaaaggcaacaaattcttgaaaagatattaatccatctttggtctgatccaccactccacttaaaagttccacagtctttggattaggctggctttctccaaaaatgttcaagtatcgagtgacaaagtcattgggggacatgaaaaattcaccgtttttctcaatgcttgcatacttcaaaaatattgttctaagctcagctggatctgctctcttggttaaagccaccttggcggccgc

SEQ ID NO: 140299 - DNA, 540 bp, Homo Sapiens
  misc_feature (302)..(302): n is a, c, g, or t
  misc_feature (508)..(508): n is a, c, g, or t
tttagacttctctttctttttatttagcttgcggaaaggtacttgggacaagacctggagctgttgatgtacagctttaagctgctcctgaagctttgcaagacgcttaactcgctcatcttcagaatcatcagaagagttcccttcagaggaggcttcattagtgttctctctaccagtggtttctgtgatatctgttttgatgtaacataaaggcatactctcaacaggttcaatcggggatctttgaaaaatgcgtttcgaaaacatcctgaagcattcttgccattgtcacaccttcngtgatctggagggattgtaccttgtagcaaattcatgaacattaatctaacatctgccgcaaaatttgtatgcatccttatattcttggttatccattttctccttaatagttccaagatccatcggatttttgacaacgtcatagtagttatggagtcccaaagcattaacgtcaacaggattataaaagggccatgcatatganaaatgtttctttgcaagcatttccttgagaat

SEQ ID NO: 140300 - DNA, 870 bp, Homo Sapiens
  misc_feature (41)..(75): n is a, c, g, or t
  misc_feature (839)..(839): n is a, c, g, or t
acgacgagcgcagcgagtcaggtgagcgaggaagcggccgnnnnnnnnnnnnnnnnnnnnnnnnnnnnnnnnnnncagtcgacggtaccggacatatgcccgggaattcggccattacggccgggggaaacttgttcacttttcattttcaaaggagcctagttgaagtgctattatgagtgtgggctatggaaagacagcttttcctacactgataaagaaaaaaaatgaggaaattatttcatccccttgtgacatctgtgactttttggatttaataatcttgctgtttttcctctttatgacaaagaatataattgggaggatgaagtgtcttaaaaattgtagagaccagctcactggaatgtttttccatccctgtattcatggcttgactttgtgactgctctacactgcatgtctgacattgcagagtgagctatgttgaggtaaactggttggttgtcattattttgcaatcagcctggtctctcccatgaagatgtcgtgtgcataagcacaatcatcactgattagaagatcacagcagaatacccttggattagagagaagttcgtaccttgcatttctctgaattctagtctctcataagcactgctttgctggatgattttcactgctttgtgttaatgactttgagcgatctctcacatgatggggttctttagtacatggtaacagccatgtcatcttacacacctagcattgtgaatgctgtagtgacatcctttataggcaccttacagctcaaaacttttgtttcatttcatgccttacttatcaaaaaggcaggaaagtaggtatgatctctaaagaanaacaaacacccctcccaaatacaaaacttgt

SEQ ID NO: 140301 - DNA, 354 bp, Homo Sapiens
gaaagcagttattttctggagagacattttcccttcttttcactgtgtgttttcaaattcaaaatatgtgttcctttggtcacactatacatttttagaaaaaatatttacttatgctccaagccagtttggaagtgtcacactgtactttttacattttacattgcagcgatctcagatggtagtttaagtagcagtgtcttataaattcagatatgtcaacatatctgccaaaacaattatgtgaacccatgcattttggtgaaatgtgaagtgagtatcttgtaatgaaagtactcatattgagatttcaaaaaaaatcatttggaaaaataaactagtgaaacaataaaa

SEQ ID NO: 140302 - DNA, 441 bp, Homo Sapiens
tttccagttctaagcttcatcttttattatgaagacaatacacccttgaggttatgttcacttcatttggttgtagctggtcttttaggagggaatagactaaagccatcaacaaaattccccttttggggaaatttatgctttgtggttcttctgggaaatgattatggaggctgaaaagttccaaaatctgctgtctgccaggtaagagacccaggaaagcccaaagtatggtccaaagcctgatagtcagagagccggtggtgtagatttcagctcaggtctgaaggcctaccctccgggtgcagtgctatcgtgttggagaagaggcccctgggtggctgtgcgaagtaactcgcccaaggtcaccacacggccagccactagcccggcgggagtcgcccgaggcgaggcccacgtcagccggtcttgggggcccga

SEQ ID NO: 140303 - DNA, 680 bp, Homo Sapiens
  misc_feature (656)..(656): n is a, c, g, or t
  misc_feature (664)..(664): n is a, c, g, or t
acatttatgtaaatcctttattgaaacatccaagggtcttgaagaataaataaaatgcctattaaaatgcctatgtcttggcatataatagatgttcggtaagtggcaagttacttttattgttgttattagataagacatgagtgttattaataatgtatagtcctttataattagcattaatgctagcattgaacaggaccatctatactggaactatgacttccctgaggggtgccatgtggccctgatgagcctgtagcatacagcactgtatgggacacattcgtgcataggtctctgccttggaggctgatgagctttgtgggctacctgagtgagattttatgctttttattccatggaatcaaaagaattaacattaggaagggtggaactatggaggaggggttagcttaagccattggaatatcaatttcagggcaaagatgatttaacttgactgaacagagcactgctggggagagtcagtgggttggcatcagttggatggggaggtatttagggacttcaggatttagcatccctgcagttttgtgactgagaaagacaggctgtggcgatcggaggaggagaggcacctctgccttgtcactttgagctcgtgaggaggagaggcgcctcgtgccgaattncttggccncgagggccaaattccc

SEQ ID NO: 140304 - DNA, 343 bp, Homo Sapiens
ttttctcagcagcatccttgagaatgtgcgacgtgactgggttcttgaaaccactgttccgatactgctttcctttgctaagtttaaattccagcctcctaattctaatgttttcgtgggaccttctacaatccttcttttctgtatgtcttgggcaggcaaaggggggtattctccactagcatgttgctaaagagggcctctaccctttaatgaaactgttttacctgaataagctttgaaaaagaaataccgtagttgaatattatgctgtcccatctcctcatcagttactctccacaactttaaaaaacccaattcttaattcttaactacacagcca

SEQ ID NO: 140305 - DNA, 305 bp, Homo Sapiens
  misc_feature (149)..(157): n is a, c, g, or t
  misc_feature (235)..(247): n is a, c, g, or t
catgagacttaatttttcccaccctttccttcaccgtctgttttctttgatttcccccaaagcaaataagaaacaagaagttacaactgctagacttttctactgagacggggaaagtgctttccaaaagagaaaattattcctgaggnnnnnnnnnttaacaaagcaattttaacaatattattctctaggttagaaacagaggtattcctgttgactgaggttccctgaggcnnnnnnnnnnnnntcactattttaatacagccttttaaaagtgtgccagaaaaataaagattcaaactaaa

SEQ ID NO: 140306 - DNA, 797 bp, Homo Sapiens
ttttaatcatgcttttctttattcacctcatataaaagtctctttagaatgcatttgaacacaatatataataataatactataacatacattgtgagaaacatttgaaaatgataaaatgtccacctgaaacaatgcagtgttcatagacatacattggtcatgcacatttgtgccattttctgtaattactgagtcacaatgctgaactgaaagcatgaaacatattttacaaactgaaactgacatcagtaagaggcctaacaagtgttatcagaagaggcttcacatttgcgtaatttgctacatcagttcacattttattataaaaattcacattgttttattgttttcttttgtaatgaactggaacatgacattcctgcttaatggcaggcaggaggctacctcttcaaagtcagtagttcgggagcattcagaagaatcatctgtgagcaaatgtagtgtttccttttgaaccaaagccacaatgatagtaggatccagttataacccaactcatgcccacatagatttggatagaacctgggtaaaaactacatcccattgccccctgcccctatcaagctatacaaaagtaaaagctcagtataaaccatttagtatctaatgtgagaatattgtttccaaaactggttcataaaggggttgtgcagaagtagcaactcaggcagggaaagggcagaccctttgaacaaaagcccacccctgtcctctctgccaagggggccatatgtctctactaagtgacgtttgggttatataatacacaatac

SEQ ID NO: 140307 - DNA, 443 bp, Homo Sapiens
ttttaagcctggaagtcatttttatttatgtttcaaatggtaaaatatggctgtcttagggcatagaagaatgaaaaatcacaatcttcagctggtgatctttaagaactctgttcttgcatgtatccagtcttttatcttaagtcttattttcagagtcttgattaccaggagataattcttctgccttcttcctactaagtcagctgtgtccttcttcaaattagccctatttggtgagtgtccttatttccctctgtaaatgcttctcatgaaaacagcagtctgtttcatttcctatgaccttataaaagggctagagggaactagcaaggctctttttacccttctcttcttttggccatgtgaagacacagggttcaacaccttaaaggatgcagcaataaggcaccatctgggaagctgacagcagctctcacaga

SEQ ID NO: 140308 - DNA, 657 bp, Homo Sapiens
  misc_feature (512)..(512): n is a, c, g, or t
ccagtttatcctttcttttttattttaagatgtatgcatattaatcaatttaccatcactggggcatggcagtgtgggcggggagaattattcacattctcctaaaatgacagcagcagagagccttctgcctcagtggctctggctggtttcctgcaggggtcccagtggaaacccgtgtggccacctgttgccgtcttccatgagatgttagtggagagccactttgacgtggaatgatcctaatagatatagccagaccggttttgcggaaacgctttgtgctgagaaccgcaagctggtgcaccctgtgtcatatctgcccccagccagctggaattgtctgcaacacgcggtgcccggtgaggaggcaggcaggacggttgtgtgctgcatccatgagacctggaaattcagtttgcttttggaaaagagcattgtatccgagttcatacttctccaccccatcttgccaaggttgcggaaagtaaaaattggcagtattggccgtntgcagtcttacttaggggacgggcaccatgtgaaaaggtgggatcgtgcgagcggaggaaggacagaaaagcgaggaaagtactatgccgccagcgaccggcaggaggcacgtcgggcacgactcgtcaccgcctcgtgccaatt

SEQ ID NO: 140309 - DNA, 766 bp, Homo Sapiens
  misc_feature (671)..(671): n is a, c, g, or t
ttccaagaaggggacaaatgtgggaggccatcactgccccattttattgatgcaggctggacaggaggactcaccacctgagctggggatactcaggtcctggggtgctgaggagatggggctgcatctggagagggtgctgttggggtgtactctcatctggagagggtgctgttggggtgtactctcatctggagaggggtgctgttggggtgtactctcatctggagagggatgctgttgggggcactcccatctggagagggtgctgtttggggtgtactcctgggaaggcaaggggcgatagaggagcgggagatgtgtcagctgcctccgttttgggtggcagaaaatgtcacagggacctttcagccacaaagaggcttttaggccgtggttgggggtcttcagggtcttgctctgggcctggctgtatccatgctcaagagtggagaggggcagagggggtgggcaggcggccgtcagggtctggctcttgaatcaggtcccatggactccgcggaaccttcgctggctggcggcgtgcatgtggccagccggtcgcacacccaggcgcccagcttacggtcgcaagaggcgtcgttccagcgaccggagccccgcatcatcacgcagtcctcgccctggcttccggttgtgggctcccctgnagccccagtgctgtagtccacatggcttccatccacccagataaactcccccttcggtccaagttccgaagcccattcaagagccggggtggctg

SEQ ID NO: 140310 - DNA, 573 bp, Homo Sapiens
tctacaaggctttggtatttataaacacataccaatccttttttaatgtaaagcttaagtgaacacatacctgatcccacctccattaaaacaaataccaccacttatgttagagtctaacagtaatacttacttttaagtcagttactgcattagatagtaggaacagaattctctagaaaatggttatatggcctatgagatttaaccactggagttgcaggttcaagaagagactgccaaggattctaacactggcaccattaatacacctctctacctaaggagccccagaaaaatcactttccagggacaaagaagtccttaaagtgtatatggaaggtttcacatcttagcttcagtaccttgtatcaaacaccaatatttttgtttgccccacccccacccctgtgaccatttttttgagaaaatgctgtatctattcacatgatcactgaccagagcagccattatataatgtgactgcgttacctgagacaagttgattggtgaaggggtgggcacctgacccaagctgacccgtccctggaactgaaatcaagagatcaggtc

SEQ ID NO: 140311 - DNA, 704 bp, Homo Sapiens
  misc_feature (79)..(138): n is a, c, g, or t
  misc_feature (153)..(177): n is a, c, g, or t
attagctggccgtagtgttgcccgcctgtagtctcagatatttggaaggctgatgggagaggattccttgagcactgcnnnnnnnnnnnnnnnnnnnnnnnnnnnnnnnnnnnnnnnnnnnnnnnnnnnnnnnnnnnnggaagctgtctcagnnnnnnnnnnnnnnnnnnnnnnnnngacaatgagtattgtgttctgggagggtcacaagaataaaaataatgataaaaaatttaaaaagacaatgggtaaaacaaggttctcctctacctcagtcctcttagcacctctgggctgagaaacagcttttggttccccttatgtaggtctgggggttctcaactcagccctgcctcagtagagggggccttggagagccctgggcagtggggagcaaggtgctggcagaggaggctgctaagggcccaagatcagactgtccgcaccccagggccagctcttgccctagattctgggacctccctgcagccgccgcagaggttcgggcccctgagcccatctcgggcctcccgtaatgtctagatagtcacttttaaggccgtcacccacactcctggaatatctccgggtacagctggaagcccacgggcgggtccaggtctccgtgccagggtcagggtcacagacaacgcccgcgacccctcgtgccgaattcacacacccaggcctcgtacctagcctat

SEQ ID NO: 140312 - DNA, 412 bp, Homo Sapiens
ttgctcaagacgctggggttagacgtgctccggctacacagcggagtgtcagggggccaagaatatccctctcctttttcttccctcctgctggctttggttgctttcctaaacattgccccgggcggcaaagtcggcttcactcttagcccttgttagggaaacgctggatccaagattagctgcgcccttctttgcttcagttgaacaagcaccagtgtcgctgatttggcagtgtcggagcgggaggaactggtcttaaaaaggtacctcctgaactcgggaagactgctaaccctccagattattgttttgcatctgtgtgctgttcatgaacatacctcagagctgctcactgcaacttgaaatttcattatatttttaatcacaaagtttgcatcctacccttgaa

SEQ ID NO: 140313 - DNA, 602 bp, Homo Sapiens
  misc_feature (360)..(383): n is a, c, g, or t
ttttgcacactcattgactatcaactggttgtctatgactcaaattacataatgaatccagcacataaattatttactcagatttaatgccagcaactgttatctttgtatttttttcccctctgccagctaatctggctcatttcattggaattttggtcatgcccattctccttcggcactaaattaactccataacgtagtataaacagaacaagcttgtgtgtgatatgcttaactgttaatttacctaattaaactaattcaattaaatcatttacatctttttggtaacatgccagttgataccacagcagaagtggaatgtttcagaagatgattgttcagcaaatgaatggnnnnnnnnnnnnnnnnnnnnnnnntgagacaaccgtccaaatctcttggcttgaaaattaaatgatactgaaaaaatgcagctttcacggggcactgtgattagatatttttctgaaatcaattttctctacaaattggtattttaacagagtgatcacaatctattgtacaaaatattttaaacactatttgtacattcacatatttggtatgtttaagtaaagtgtgcttgttcacacaaa

SEQ ID NO: 140314 - DNA, 536 bp, Homo Sapiens
ttttttaaaacataatacatttttatttctttaaaaacgtatgacaaaatttcttctgccatcggccatgcttagatttatacattataaaatgatttaattccctaaagtacaaaaaagaatggctgaatctccaaagagttgataaagactgaagatgtttataaggcatgcttatgtatactatttcaagccatctacaggacttgagacaggaatgtttagtgtttgcaaagccatagtcactgagccagactttgtggtgatccagagatcctttcatttcacagaactgtccttgacggcttctcccaataaagatttacaaccttatctcttggctgtggcagtatgagaggatcttctttcagtacatatactaaagcttcattggagtagccacgcttaggaagtaccaagtaaatgacaacataaggccaaatgcaggcagcaggtatttttcaataatgaattagcaggggctccaagaatacaacaagagaaagtgatttttcacagtgcttgagaggtagagt

SEQ ID NO: 140315 - DNA, 451 bp, Homo Sapiens
  misc_feature (379)..(389): n is a, c, g, or t
aacttcaaaaataataaaagggtatgcagggaaaaatcttcctctcacctgtcagagctactttttaaatatgaaataagagaaaacaagtagctgcttataaggtgatgtgattacacttataaaagatgaatttagaaaacaacattcattgtctaatttaaatggtcaatagaatctttattttctttctccataagacatccagcttcacagtttcatgtgctacctagaactgatgatgccacaaatccttaaatgtcctaaatggtactgttaagtgaatcgtgcgattagaattttcacccaaacagaagggaaactgattttagatgtgattgggcttcttgaggacatttctgtggtctcgttttattgnnnnnnnnnnnagctttgttactatcttaaattccttggttatcagcctagcactaaatgacctttaattaaa

SEQ ID NO: 140316 - DNA, 340 bp, Homo Sapiens
ttttttttcaacagaaagtaagttttatttaggtatttatgaaaggtaacacgcatctttaaaaatatgatcatgatacatttcgaatgagaactgtgtgtaaaacatacaggtcctattgtttccctcgtcgttttgtcttttcttcagccagaaagtgatccgctgccagcgacagggagacacacaactggtccttattctaaagacccgacccagcctggaatggggcccggcgaggagttcttgcgccggccgcggggactgggcggtaatgagccgctagtctcggaaggtggtgctgttgggtgtgaggggagatccggcttgcgctgaaaca

SEQ ID NO: 140317 - DNA, 1106 bp, Homo Sapiens
tttcttaaataggcatttctctagaatttactatgttctcagggcatattgtagttttattaatagtgtaagcaaaatataaatgattaaaagctttgatgaatcataatacattgtagaagcaatagttaattactagtaaggctgctttggattatctgtcccatttttcatacccactgaaacagctggttgatatttggactatttggatttccactgtagggtaagtaacaccgagctcaggatgcgtggaagatgtcgttgtagcacagactgtaggtcgctctgtctgcacgtatgtttctccttagatgaagagcctgaacaggcggtcctgtgactcttatcatagtgtaccatatgatatggttctcccatctctcccatacacacttcataaccataagcttgatggtaatgggaactgtgttatactcattttctttctactgcacctttatgttggtgataagggcttaaaaatttgttcagttaaatactggattaatggaaacgaaagccttcttagtagctgagcgtgtaaaggaggagaacttgggttctgaagtcttctgagaatattgtcttgggtttttccattgtaattggtaaataaattactttagggaagttagcagataagactgtactgaacaagtgatcagaggtagaaaggactagattcatgggcacagggctcacctaattatataggtgatgcttgcttatatctaaagcattatttctctaaaaccagtgaaaaactttgcatttgcttcttttagctcttaggtggagggagctctcacattctggaagagggggttgctgctatttgttcagtttctcctccaaggtggccaaatgaatgtttgcaattccagtccagtttttggcagattgaaaaagtctgtcattgattgtcatatgagagtggaatctggccgatgtcaatgtttgtttcagtggttagataaactttgatttttagaagttattctttcaaataacagatttttaacactgttgagggaccaaattgcatctcttgctggcatgtcacttaagttatactggagagactggaagacttgctgtcagtg

SEQ ID NO: 140318 - DNA, 411 bp, Homo Sapiens
ttttttcagaatatgcctattttattaacatcatgctttaataaataactggctacttctaataaaattaagcctctgtttacaacagcccccaatattccattttgaccactctgcagaatttggtgtaaaaagttgaatgaaatgtagaccctgagctatcaagtaattatgtttcaatataaaaatagagaattactcttacaactgaagattgaacaataacacaaacaacctctttgtgggttttaggttcggtaaaattagttggggatcttaagtgcctgtctaaagcaggaagagacagaattttagtctttctgaagacttctgggaactcctttgaaagtgaatttgttacattatccagagcttttatgagctatcattttggctaaggacacaaggaag

SEQ ID NO: 140319 - DNA, 538 bp, Homo Sapiens
  misc_feature (47)..(47): n is a, c, g, or t
cgcagcacacgaggacagcatacacatagagatcttcaaaaaatgcncaagtctcttttgttttctcaaaggatgactcttcagaagctttgagggaaatgactctcatttccgtggctgaggagccattggaccaggccgtccacttgttcctgtgcctgctgatttcctggactctgcagacgtaatgcccttgatcggagggctgcagtgtcaagacggagagcctgtagagcgccccccgctgctcctccagcaggcgcagcctccgccgtttggcgctgcggctgaaattcccatagtactgcaccacccggagcttggtcatcttcaccatcaaggcctcctgggagtcggaggagtgtgcaaagaaccagcgcacggccagcaagctgtccttccgccttttctgggagacgtggcagaggagagtggcattctccccctccaggtagtcaaccacgggccccggggacacagtgacattgagggccgcacagacctccggagccggagcccgcgccagcagcgcggccgc

SEQ ID NO: 140320 - DNA, 480 bp, Homo Sapiens
ttttaagtgttgaaacatgctttttaaaatttattcattttatttttatagattcagtgggtatatatgcagatttgtcacatggatatattgtggaaagctgagatttgggcttctaatgttcctattacctgaataatgaacattgtatccagtaggtaatttttcaactctcaagtccctcccaagcccctcttttaaagtccccagccttgactatttttctctgtttgtacatgtctcccatttataagtgagaacatgtggtatttgatgttgtgtttctgagtattttgacctccagttacatccatgttgctgcagaagacataatttttttctacggatgtgtagtatttcatggtattccacattttctttatccaatcatcttttgatggaaacttaggttcattccatgactttgttactgcgactagtgcagtgataaacatatgagtgcagatgtatatatatata

SEQ ID NO: 140321 - DNA, 974 bp, Homo Sapiens
attctgagttttaatttattatacaaaagtaaaggttttaatttaatattaatagtagaaaaacactttcttacgtgtgccatatggaaagataaaggatctattctaaaattagctgtgttggttgataagctggtgtggattctgccacatccagcaaagaagataccattaaattacacagtttagctctctctatctatgcattaggaatttgacttccatttgaatgttaaagcatatacttgtctttaaggacacactaaaactattcaaattttaattacattcagacaaagatcatctaaccactgttgctacatagggaatatttagtttaattatcccttgctatctctattaatcagtttcctcaatttatccttaaaattttcctcaaatgcttagttattttattatttgctttttaaaatattcagtgtcaaaaccaaagtacacagtttaaataattaagcaggcatacttctccctgtctcacctgcttgattctaaattgcaaggtctaccatgtcaaattttagataatcagaacaacactttgggattaaataccaactgacttcatttttactccataagccttctcattgctactttgcatttttcttcactaacctatctgtttgttagtaagtttttcagttccttcttcatcttttctttcccttgtagctgtgagcactccagtagattgcatcactaggttgggtcctgtgagctgttttgttcttttccaagtgtctgattcagcgggccatagaccgcttgccagaaaatcgccattgcttctaggctgacgcttgcctacttgttttgatcgtctgagagcttttcttgtcttctttttaaagcagaatagacttggagaatatgagccttaaagtaaatctgcagtaaaaaagccccggccgtaatggccgaattcccgggcatatgtccggtaccgtcgactg

SEQ ID NO: 140322 - DNA, 504 bp, Homo Sapiens
  misc_feature (437)..(437): n is a, c, g, or t
  misc_feature (443)..(443): n is a, c, g, or t
gcggccgctgggcagcgcccttcgtccaggctcgcgccccagctgccgccgacgacagcggccgagagaagttggggtctgactagacgcttacggggcctcggaccccggcgccgcggcgacctcggaggaaccggctccttgcgtcccgcctccctgggagctccgcacgggatttgcagatttacagaatggctgcacattaatggaaagagaagcataaacctatcttctttcattatggagggaggtttggcagatggagaacctgatcgaacttcgcaaacagtgacgaatctcagcttctgacaccaggaaagatgagtcagcgccaaggaaaagaagcttatccaacgccaaccaaagatttgcatcagccatctcttagtccagcaagtcctcatagccagggttttgaaagagggaaggaagatatntctcanaataaagatgaatcttcactttctatgtcaaagagcaagtctgaatctaaactttataatg

SEQ ID NO: 140323 - DNA, 516 bp, Homo Sapiens
aatctttggttggcgttggataagcttcttttccttggcgctgactcatctttcctggtgtcagaagctgagattcgtcactgtttgctacaacagttgatggcccaaggacatctttgctatcaccaagaagcgaagttcgatcaggttctccatctgccaaacctccctccataatgaaagaagataggtttatgcttctctttcccattaatgtgcagccattctggtaaatctgcaaatcccttcaaatgttcctgcaaaagactgcttcaggcaaggataggaatgtttaattaccagcttcagtctcttggaggttagccacagttctttaaacgcagtagcaccaatggagattgccgtgcggagctcccagggaggcgggacgcaaggagccggttcctccgaggtcgccgcggcgccggggtccgaggccccgtaagcgtctagtcagaccccaacttctctcggccgctgtcgtcggcggcagctggggcgcgagcctggacgaag

SEQ ID NO: 140324 - DNA, 418 bp, Homo Sapiens
ggctatgaggacttgctggactaagagatggctgatgcaaatctttggttggcgttggataagcttcttttccttggcgctgactcatctttcctggtgtcagaagctgagattcgtcactgtttgctacaacagttgatggcccaaggacatctttgctatcaccaagaagcgaagttcgatcaggttctccatctgccaaacctccctccataatgaaagaagataggtttatgcttctctttccattaatgtgcagccattctgtaaatctgcaaatcccgtgcggagctcccagggaggcgggacgcaaggagccggttcctccgaggtcgccgcggcgccggggtccgaggccccgtaagcgtctagtcagaccccaacttctctcggctgctgtcgtcggcggcagctgggg

SEQ ID NO: 140325 - DNA, 731 bp, Homo Sapiens
tcttttataaattaagtttaatttagaaacttataaacgttttaatttttgagcatccagcttcagaaataaaaataatacctaaaatgagagtataaacatgtttattatttttcagagtttacttcctttcttcatttattagcagatagagactactgaccccctctcttgctgaatgttgtaaagaaattaaaagtttaggtagatgagttacccacacccatcctaaaacaccacagagccccctaatagcctcaaaggaagcacaactttctggcttttctataggggtttatggccgggatatagcacctacttgaaataaaatagagtcagagttcatctaaaccaccccaaaagtgtttggcattaaactcaaggattcaaatatttcaggaatctggaaactaccaattacttaataatgaagcaaattaagtgaaattcataaaggttgaaggttctaaatggcccagtgtaggaagaagagtcaagctgtcagacagcttggaatggaaatattacatttccagctgttggtggaaatcctataaaatcctgagcaaacagacgtaggtaacagacatgttactggcttctcagtaaatgcttaaattgctgtttgccactgtttttggttgtttgtaatccattcctgattcttaaggactcgatataaaaagattcctgcttattctcacaagctgtcacagatggaaaacaggggg

SEQ ID NO: 140326 - DNA, 1268 bp, Homo Sapiens
  misc_feature (1154)..(1188): n is a, c, g, or t
caattagtaatatttattttgataaatcaccttccacactcagattgatgaagcatttgttattgtttaaaaaagaagccttcattacactgctactcgttttcgagtggttcgttctgccccctcttaagatctttacatgccaaaccttgggtaattaagtcattttcattttgtcagcttaattaattcgaaggtgacctgagttttattgtagaaaataaacaacaatccattctaatgttaaaatgttttaagaatagtttttaaataaatagtaatttatcattctgtaaggctagacatactaaatttggtttaaagtgttacgatcatctttaaaaacaaagtgtcttaaaatagttatgtcacaaggtattaaatatcacatataggaatcctaagataagatgtgaaattaacaagaacaagcaatttctaaaattgttctttcaatcagaaattatctttagaacatttaattttcatctatcaccatcattgttatatagtccttgtaattaattgaatttgattctggatcaattgcagcagacaacatttcttccatttcctcttgagaaaaaggctcaccttcttcagtcatatacttgatcagctcgtccttagtaagaaacccacgtttagctgaatctaaaacctcaaaagctcgaagaaggacatcttctggaattggtctgtattttctttctagtagtatttctgtcatcaccggaagaaatttttcgaatcgaatgtatccagtgggttcttcttcctctacctctgcaatcagatcatgcagctctccttctgtaggacagcatcctaatgacctgataattgttccaatctctctcacatccactgtattattcgactcatggtcaaagacttcaaatgcctctttgatttttttgtgaaattctgctactattatctcctgtgttccccataacaccgtcattgtgtgatggtctcttcttccaccttccattagatgttcgatcagtaaagtccgaggccttatctcatcactgttgtatcccaggcccttccctgtccttctcgtccgccatcttgctgcggagccggtcgcctcccccggccgtaatggccgaattcccgggcatatgtccggtaccgtcgactgnnnnnnnnnnnnnnnnnnnnnnnnnnnnnnnnnnncggccgcttcctcgctcacatgactcgctgcgctcgtcgttcggctgctaagagggcgcccatagtgagtctataagtct

SEQ ID NO: 140327 - DNA, 840 bp, Homo Sapiens
ctgttcttacatttgtttattgtgatatttcactgttgcataccctgataccaaattagtgtaagtactgtgtaagaaaaaaacaaacaaacatgtaactaaatacttttccataccgttttccaagtcaagaatgaccagaaaaagtaggtagtctctcatatttgtttagcatgtccactttttacttattgttaaattactcagtctcaaattgtacaatgcttgaaaacagatatgacaatttctgagattaaactttattaaagttacttttccagaaaattcagtaaatatggtaatataggaacaaacttaggctcataagccttttaactttttacataatctttaatgatgttgatcaggaaattctttcattggtggaattacttctccagtctccagaattgtatcaccagggaatattctggacttcttttcaactatgccatatggtttttcagaaacatgatacttcatgtaataatgaataatccagacaggtacaagtacatgagtgaaaacaaagatactctttttgtataccccatggaccattttcctccaaggggatttattctccaaaaatttattccagaatttctccataggccccatcttctgtgggggcagcaccggctcccgagggctcagctcctggtccttcagccatcgccttctcagctctcgcagctgctgcagccgcagtttctcatccggagtgtaccccgtcatgtcgccgctggtaccaacgcaaaaggacacggcgcaccctcgaactacggactagttacttaagcgcgctcccgctctgcaaagcgaccttgcgggaacccc

SEQ ID NO: 140328 - DNA, 641 bp, Homo Sapiens
ttttttgatgacaaagattctttattatataagagatcctattatctgatcatattacctaataaattatatatgaatgttcaataataaaaataatgttcaccaatatgtcacatgcatggttagtgttttattctttgaagactgcttctaaaacatcgcactaagtaaagctgaaaggataaagtttaaaatagtttttaaaggataagttataacatatgtaatgactgtccactctacaaaatcttgatcttagagcttatgatacacccagttggcagtagcacccaggttttccaaatagccagtcatcacttttctcttgtctgcatagacttcttctcattagctgccttctgcttttcttgcatgatctcagagtccctctgctttctctgagaggcagtcaagctatcctctttcctctttcccttgctaatttcctgggttttcttcatgtttttctggcgggcaagttctcgttgatttccacgggccatgccgaccaccaacggagcctggaagaagagcaactcggaaaagcaacggttctctggcactctgggataccgtcaccaccgctgaccgggaaggctgagccctcgtgggccctccgcccggctgcgcctccgctctcc

SEQ ID NO: 140329 - DNA, 844 bp, Homo Sapiens
  misc_feature (11)..(11): n is a, c, g, or t
  misc_feature (34)..(34): n is a, c, g, or t
  misc_feature (44)..(46): n is a, c, g, or t
  misc_feature (48)..(48): n is a, c, g, or t
  misc_feature (85)..(153): n is a, c, g, or t
  misc_feature (162)..(162): n is a, c, g, or t
  misc_feature (168)..(176): n is a, c, g, or t
  misc_feature (183)..(191): n is a, c, g, or t
  misc_feature (205)..(281): n is a, c, g, or t
aaggcgggctntacgggtttgacaaggggggggngggcaggggnnnantgggtgacggcgggagcggatcaggtatggacccgcnnnnnnnnnnnnnnnnnnnnnnnnnnnnnnnnnnnnnnnnnnnnnnnnnnnnnnnnnnnnnnnnnnnnntaaaagaantacggnnnnnnnnnggtggcnnnnnnnnnatagattacgggcnnnnnnnnnnnnnnnnnnnnnnnnnnnnnnnnnnnnnnnnnnnnnnnnnnnnnnnnnnnnnnnnnnnnnnnnnnnnncaagggtaagatctttgagttcgggagggtgcttaaaagggtggaaaagcgtcacattaagataggctgaagagtaaagtttaaaatagttttataaggacaagttatgacacatataatgattagtcactgtgaaattttaatcttagagcgtatgatgcacccactggcaatagcacccaggttttccaaaaagccagtcatcatttttctgttgtctgcatagatttcttctcattggctatcttctgcttttgttgcatgatctctgaatccctctgctttctctgagaggcagtcaagctgtcctcttttcttttccctttgctaatttcctgggtctttttcatgtttttctgtcgggcaatttctctttgatttccacgggccatgctgtccaccggccggagactggaagacagcgacctggagaagcaaacggcggctttgcacgctcagccgttgccgccgggcgctgaagaaggctgagccccacaagggccctcgatgtggcgacgcctcgctcggccagccagccgccccgcccaccgacccacaacccc

SEQ ID NO: 140330 - DNA, 634 bp, Homo Sapiens
cctcctctccacgatcaagtcacggtcacagagaatatccttttcccgctggtcattgaggcccaggaggatgttggtgcagtggactgtggacttcatacacatacatgggggagtcaggcttctcatccacagacatgccgttcacaccatgtattttttccaggtcctgtgctgccttcgagtcttaggatgcagggaactgggcgaagggagagatgagaaggctctggcaatccattcagacatggaccccaaagttttgtggggcaaccttgtgacaggtcagtgagtgtccaccttgttcatgctgcagggatgggagcaagggatcagacatgtcacagtgcgaggaagttcttgaagattctcctcattcctggagccctcactttctgaagcagacagctgcactcgccggagaactttgcgtccttttccgcctcctcttccccgcgtcttcccggctcgcagccccctcccggcagccggcgaggtgggcagttcgtgggtcaccgaaagctcgcggaggggacgcgcatcacatggcagctcgttcccagccccccgagtgcgccgggaagggggaggggaaggggcgagggcgcccccgggtacaacgagaccggggcgg

SEQ ID NO: 140331 - DNA, 388 bp, Homo Sapiens
ttcccggcgcactcggggggctgggaacgagctgccatgtgatgcgcgtcccctccgcgagctttcggtgacccacgaactgcccacctcgccggctgccgggagggggctgcgagccgggaagacgcggggaagaggaggcggaaaaggacgcaaagttctccggcgagcgcgttcgttcacatagctcccagttttaacatttcgccacctactgaagacatcatttgggaccaagctgatgagcccttgacgcacagcagataagagtgttgctgttgatcatctttgcctgggaagttgaatgataaagccagatgaaagcatgctttctgatcatttgcagctgtctgcttcaggaagtgagggctccaggaatgaggagaat

SEQ ID NO: 140332 - DNA, 461 bp, Homo Sapiens
tttgggaatttacgtaccacgatatgtgtatttattttaacattaaagggggggattttgattattaaggcgaggttatcctgaaacctctcatcctgcagggagggctccaggagagtgaaagtgcccaagtccttttaaggcctaggcttgaaactggcatactgccacttccacagcaattgattggccaaagcaagtctgattcaagaggtcgggaaacagattctagctgttgattggaggagctgcaaagtcacatttcaaagaatgtttatataaacagggatgaaaattttggccaatttcacatacatctacaacatgaagatcctttctaagaaaccaccaaactgttttccaaagtggttgcaccattctacattttcatcatctgggtatgagagtcccaagtgctgcacatccttgtcaacatttggtatgggcagtctttttaattt

SEQ ID NO: 140333 - DNA, 204 bp, Homo Sapiens
ttaattattgtatactttaatattgcactttctgtaataaaaataaaacaagacagaatattagtaagaaaacagacaacttgaaggcagtataaaacaattattcctaacaaaggtatagagggcacccatcaataaccttaggatacacacttttatcaatagctcatagaacattttccttcatagacaacatcctaggcc

SEQ ID NO: 140334 - DNA, 321 bp, Homo Sapiens
ttttctggcctcaacaaaaattttattcaggtatacgtgagatataatagtatatagtttttccaactaccaactgatatcaaaaaaagctgataccattgaggcattacatggatgtttagctaaatctatagtgcttcttgatgctccttagttgtttttcaccgttctcggcggttctcagccttcttcctcgcaccagtcttttttttaggcattttccctcagggggccgagggacagggaatggcgtgaggcccacccgcgacagcagtaaatccaactcgtggaccaggactccgggaaagaaggtactaacag

SEQ ID NO: 140335 - DNA, 394 bp, Homo Sapiens
tttcactgtcttcactaaaattttattcaggtatacgtcagataaaatagtatatagtttttccaactaccaactgatatcaaaaaaagctgataccattgaggcattacatggatgtttagctaaatctatagtgcttcttgatgctcttagttgtttttcacgttctcggcggttctcagccttcttcctcgcaccagtcttttttttaggcattttcccctcgtgcgcgctccgggcaaacctcgctcactttcgccgggagaccggactcactcagggggccgagggacagggaatggcgtgaggcccacccgcgacagcagtaaatccaactcgtggaccaggactccgggaaagaaggtactaacagccagggaggctgacagccgat

SEQ ID NO: 140336 - DNA, 1024 bp, Homo Sapiens
gagaaaagtttcttcccaataagccttcatcccccaggaaggtccatttccctttttcacctcccagtttgccctgccaaatttcagggagcgtgttgccatgctaaggtccttagtctcccggagtttcatgcccccatttaggacaaaggaggctgttttccttttttcttgcttaaaccactttgctccctggtatgatcatcccagaaaccaagccctaccaaccgagaccatgagtgctgaccaagccgattgcatgaaacacatttaaatgtttctgcctctaaaacctggcagctggcttgatgctcaaattgatcatcttcacagagaaagttatggcaaaaagaacaactgaatattttgcctccatggtcccacacgcctcgttcacattcaacacacctcagcatcggtaagagggcaggcacaagcatgtgtactgagacatttccttaccatggcaaacccaagcttcacagaagtcacatattgcacccaccattgcaaggccagtactgtatacaccagcatgctttatgacacagtctgaagacttcatcatgcactttgttttcccacactgtgcacaaattggtaacttctgtacagaattacaaaagtagcaaaatgctctattcttctgccgcctctgacacttgtcacattccattgaggcattacatggatgtttagctaaatctatagtgcttcttgatgctcttagttgtttttcacgttctcggcggttctcagccttcttcctcgcaccagtcttttttttaggcattttcccctcgtgcgcgctccgggcaaacctcgctcactttcgccgggagaccggactcactcagggggccgagggacagggaatggcgtgaggcccacccgcgacagcagtaaatccaactcgtggaccaggactccgggaaagaaggtactaacagccagggaggctgacagccgattccggacactaggagacggaccggacgtccttttacgacagcagcgccttccc

SEQ ID NO: 140337 - DNA, 1083 bp, Homo Sapiens
ttttactttttctgttcaacacatttgtatggaaatgaaataataccttgcacaaactgtcaaaattgaactgtagtacgaaaacaatcagcaaaggaatggtagccaccaatacaattctcacggacgcgtgggtttgagacggtcaatccaaattctacctcttcatggtttacagaatcagataccccacagacaaatgttactcatgtaacccaactggagagagataccatctttgtatgcttggactgttgtataaaaatagtaaatctccaaggaagattaaaatctagcaggaaattgtcatcagaactcacctttgatttccagattgaatcaatagtgtgcctacaagacagtgtgctagctttctggaaacatggaatgcaaggtagaagttttagatctaatgaggtaacacaagaaatttcagatagcacaagaattttcaggctgcttggatctgacagggtcgtggttttggaaagtaggccaactgataaccccacagcaaatagcaatttgtacatcctggcgggtcatgaaaacagttactgagaattgttgtgctttgacagttaactctagaaagaaagaacactaccactgcaacattaatggatgcttgaagctgtacaaaagctgcagtaacctgtcttcagttactttgtaatttattgtggcatgagataagatggggaaaattttgttttaagtggtatggatatatttagcatattgaaccacacaagtgcttaattcattgttatgtaatctttgtacatataggcagtattttttctgtgaaacttcatattgctgaagacatacactaagaatttatgtagataatgtacttttatgagatgtacaagtaagtgtcttatctgtacagatgtaaatgttgatgaaaatgcaattggggttaatattttaagaattctttagtatattcttgggtgtggctatattacaaaatgggatgctggcaatgaaacaatacatttaacactattgtatttttattatatgtaatttagtcatatgaatataaatcttgtaacttttaaaattgtaaaa

SEQ ID NO: 140338 - DNA, 391 bp, Homo Sapiens
actattttcactctaatgtcttaaattacctacacttaattcaaaccagtatgtagccatttgcttttatgaagtctttccaaagcatccaatctagcttgccaaataaaaaattttatttttttcacaagattttatcaatttacacaatattaattatatattaataataagtacaattcgaatacacaggtttgaaaaatacaacagaacttcaataagcacaaagttcaactggtaagtgaagaatatggaagattatactggaaaagtagcctaacagtagtgagagaaccttttatcgggatttgcagctagaatagaaagtactggcaattctgacaagtcctttgttcacttctgctttcagtctctgtaaatttccttttgt

SEQ ID NO: 140339 - DNA, 487 bp, Homo Sapiens
tttttttagcagttttcataatttaatgaaaaagtattggtaaaaaggtgacatttgaaaaaggactgagcttatcttggaaaactggactatataagacaaaatgaaaaaaattaacaaagaaggttaagaggtaatacttcaaacaacaaaatgtagcaaatacattttggggtaattgaaatttacaactgaaggctccttcatttacctaggaatatcctgtaaaaatattacaactatatttccctgacgaatgatattttagtcaatactctcccaatggcattacatatggaatttggctgaagcactgttttgatgtttgcttttcctcccactcagaattgaaaggcatgaagggacaaaggctaccgcactggcctctgacataaggaatttataacacagctccatcataatttcattaccatgaaggtatcaaattaatatctactccagagaactcaaagaaaaagcacagaaa

SEQ ID NO: 140340 - DNA, 380 bp, Homo Sapiens
tttaacagtatcccaaggtatttccccaggaagaaaagagggttggggtggaagacataagtaggcacagttcacaagtaagctgttcccatggcaagaacttggaattaaacaaaatactgtgcttttctgagggtttatttatacaaaacaatacatagtaaacagatggtggctcttagaccagagcaagataaacagaaaaattattatatctaagaagaagtttccatagacatgaggcatagagaagaaacagtaaaatcacagaagcaaccacaatagcaatgactatatgagtattttccagaggaaacagcccatttaccaaaacacttccactactacatttcctctgacaaggtaatccctatggtgct

SEQ ID NO: 140341 - DNA, 1697 bp, Homo Sapiens
  misc_feature (64)..(64): n is a, c, g, or t
  misc_feature (218)..(218): n is a, c, g, or t
  misc_feature (362)..(420): n is a, c, g, or t
  misc_feature (425)..(425): n is a, c, g, or t
  misc_feature (570)..(570): n is a, c, g, or t
  misc_feature (660)..(660): n is a, c, g, or t
  misc_feature (678)..(737): n is a, c, g, or t
  misc_feature (842)..(860): n is a, c, g, or t
  misc_feature (996)..(1006): n is a, c, g, or t
  misc_feature (1604)..(1654): n is a, c, g, or t
ctcaagctgggtgcgggtcaccaacacgtacacgaaatatatcgaccccgacagtccggggggnagcagaagaggggtgagtgtgtatccatgctgacgcctgcagcggctccgggccgctggtagatacctctgggggtacgctagcagtctccccaaactttgccatgctcgcgctccccctacctctcgtaggagcgggatgtgtatttaccagnatatttctgcgctcgccggggggtccacaacaaccacccccctcgcatccgattaccgagctgcgggagtataggccttccctttacactgccggcgcttgttttgagtcgtcggtctgtttgtgaggggggatggtgtgctcnnnnnnnnnnnnnnnnnnnnnnnnnnnnnnnnnnnnnnnnnnnnnnnnnnnnnnnnnnnggtgnactatgggaaaggactgttttacgcgcggcaagaggcctgttccccggctccgctaggggcgtgggggcggggaggggttcggtcctgtcgcgggttgtcgtagtgggcgggaagtgaggaggtggtgtgtggcggcccccgggnggagataaggtgctggaccgcttctgcggcgcgggaagaggcgcgcgccgtgactcgtgtggaggtgtgatgttgggttgtctgtgctgnggaggcggtggtcctgcnnnnnnnnnnnnnnnnnnnnnnnnnnnnnnnnnnnnnnnnnnnnnnnnnnnnnnnnnnnnagagaggcgggaggccgggcgtgtaccgctatctgtgcccgggggggtgttgcccgtgtgggaaaaccaatctttttagggccagcagttgctcttttttccttnnnnnnnnnnnnnnnnnnnccgaaacggagagtgggggttgggaaaggttgttgagggggcggaggggggcgcgccagagtatatagcgtcggttattggaggggttgggccgagaggggtggtggtctgagggcgggaggagggtgtggcagtnnnnnnnnnnntattgttgtacaagcagaacctctggctttcttctatgaatcaaaagctcaagtcactgccatgagaccaggaggttaagcttagaatgcagcaacatccaggagcctagagaagcaatcatccccatggcgggtcccaagaacacctcattgttggtcctttcaggctctctgacagcgatggagaggcagtcttcctcccagagtcagctggtcccaacatgagcccactccatgaatccataaaaacagctggaaagagctttcttcatttccctgcatcttggcacaaaagatcttcccagtctccgttaacagcaattccaactgcgcaagcgtgagtctctctgaagccgccctctacacccagatcttacacccagtgtgttcctctttggggaccagcaaaccccagacccaggactccagaactttcataaaggtggacataaacattccatttgtccaagtgtgtatgtgtcaggggaggggaggttgccaggaatctaggggctgcagaggtgcgagaacctccactgcaggccccaggagccaaatgaggaggcagccactgtggaggatgagcttcactgcccgnnnnnnnnnnnnnnnnnnnnnnnnnnnnnnnnnnnnnnnnnnnnnnnnnnncctaggcctcgtgccgaattcggcgcgccgtcgacttcatact

SEQ ID NO: 140342 - DNA, 482 bp, Homo Sapiens
tctctcagtaatttttgaggtggctcctctggcttctttgcttttttgtgatctttttcctcctcttctttgttatcctcttccattttttcatcctcttcactgtctagaggctgaggaataagctgattacccacaaatacgtaagtgttaattctctgtttaactctctttcttttccttttgggtggagccctttgaggaatccccttggcctgcatctcatcatttatgaaatttctaagtgtgcgtcgaatgtaaatacgagccaagtcctgtagattcctgacagcacagggagggagtcccacagaatctggtttgccattatcattcttacttggttgcacaagtggagcaaatgaaacagcaaggatatttttactttcccaagtgttctgtccagttcgcataatctgtgttaactgatcctctataggcatgactaatatgcctccaacttttagtaatattttcatgta

SEQ ID NO: 140343 - DNA, 684 bp, Homo Sapiens
gcggccgcgtctcaaagagcatcctggtaccctgcacatctccgctggctgcaggctccctcacagtggcctccagttccttggcttgccctgtcagctcgtccagtggctttgtctcaaatagccagcgggctgcacgaacgtctcctccacctggctggggcctggttggctcctggtctgtgctgttggcaaaggagccttcctcaaacttgcgggaggtggcctggacgtcaccacacagcacgggctccttggcagctggcctctcgtgttctccaatggcatccagtctccagttctcaaagatccagcgcatgcactgaacgtcaccctcggtgggttccttgggtggcggcagtggcaggtcctccagggctgggggtggagggaggggcaggtcctctgcagttgccatcctcatggttggtgtgggggccacctgtgtctgggtgtcggccatccttctgagaagaaggggcagagatgaggatgggattgggagccttagatctagatgttcagcagggtagaggctggatgcaagggtctctcttggctgatggggtgtttgtggtctgtagcagctgtggtctcagggttcgtcgttcctctggaggttcttgttcaaattggttctgttctgctggctccaacagacaccttcttgctgccctggctcca

SEQ ID NO: 140344 - DNA, 488 bp, Homo Sapiens
ttttttcatggtcggtaacatttattgcgcaactctgaggccggggcggacccagctggggagatttactgtgggaacgtctggcccggccccttcctcccctccgggcgccgctggccgcctccgttcccggtccgggccgcgttcagcccctgaaggggccccgtggggcctgcgctagacccggagggatcgggggctccgaagggggccgcctggtgggtgtcaggacgagtctaggacctccgagagcgacggtgcttcttgtgactttcgattaatttctgggaacggatcttgagtgatgcgcgggtcactacctcgttgtcctcctcctcactctcttcgtcaaaaaacttgtccttggaagtggcaaggggcagggcgatgcgggtgttgtattcgggcagccttccctctaagctggcgaggaactcgcggttagcgatgtggcacagcatctcctgcacgtcgtggccctggagctg

SEQ ID NO: 140345 - DNA, 532 bp, Homo Sapiens
tttttttcagtcctaacctaggtttattagagagagctcttggggacagtatctatgaaagggaaggggagaaagcaggactaggcagaggggaaaatcagcctgtgaggcagtatccgagtgtggcagatgatcctgcaggacctcatgttcatcagccattccgtgatgtggggtgtcccacgaaggggtgtggccacaggcatggccactcacttcaacagaggcaactgcaaaaagggccttgtgcccttttctgagagcccccgctgcagggactgctcccaccagctggcgtaataaggcctttattcccaaaggaaaatgtgggagtctagtacatacgaccaccattctcatctttgaacttgtggaacacagcccacagctctgcaatgtcagtggcaaaggtgatatccgtgtcaaggacgatgactctctccaggttggcaggaagagtcttggtcaggacaagcttcatcagaccataaatcccagagtaatgtttattgtggatccatgacacttcaga

SEQ ID NO: 140346 - DNA, 556 bp, Homo Sapiens
ctttcctctgagtgaagaaagttattacaataacactgaacaccctcttcatgtgtgtttacacaatttatatcagttgtcctatgctctggtataaatgtgtattcttttagagtaaacaggaaaggaagcgtcttttcacagagcataaagacaatcaaaagacagccttcacgggggagtaagaatctgctcatgagtactggcagatgtctgaagagaaggcagctggctatgtagtactggtcacttgctctgttgcccagaccttgtggccttcatgctcggagtctctgcagccagtggataagcactcttccagtgggacacagcgtttggtgactgagatactgtttcctgtgacttccattgtgtgctgagtgtagcagtatctggtctctcgagggcagtagatgtctggagcccatcggttgcactcataattgtctgctgccttttcacaggtgaaacatttaaatccaccaggatatggtgtggttgaaggatggaggtagataatgtctttcactgtgaagtctcgggactgagcagcttt

SEQ ID NO: 140347 - DNA, 579 bp, Homo Sapiens
  misc_feature (514)..(514): n is a, c, g, or t
ttttgtcttgaatttcatgaaggtatcagcctgttctttttctcagtgtctcagttgttgcagtcatgactgagactctgtcaggtctccatggcagggaccagagactttgactgtcatggatttggagatttccttgccagtggctgagttatgaacagagcaagcatagagcccgctatgatttctagtaatttgggggataaagagcttttgtcctgattgctgaaacttcccattaattgtccaaaaatactctgccggtgggttagattccgtgaagcaggacaagtcgaggttttctcctgaacggtaataggtgaatgaagggtaaattctggggaggtctggaccatagaggacattcagggtgactgggtaactgcggatgccaccatatcggtcccgtatttcacattgatagggtcctgtttcatttctcgtgacactgggtagaatgagtatcctgttttcaatgggtcgctttaccccgggactgacggggaggctctgnaccgtttagccaccaaatgtaggggtagttctcactcctaagttcacaggtgaaagcaagacatc

SEQ ID NO: 140348 - DNA, 388 bp, Homo Sapiens
gcagtttaagatcattttattgaagagcaggaggtggtagaggtaggtaataggtgaaaaaagattgccatgtgttgataattgctgggtgaatgggacatggggttcaattataccatctctatgtttgtgtgtgcttaaattttaccctaataaaaggtttaaaaaacaaccattaggtaaatttgtacttcaagaattcccttagcttatctttccactcaaatattatttagcaagattgtcttggtcatcaaactaattcttctgagtatcaatacgaagagtttttctcccctagatgttttccccagttgtatcacagaacaaagggattcaactggagaaggaagccctacagggaattatgcattatgattaacaatgg

SEQ ID NO: 140349 - DNA, 474 bp, Homo Sapiens
ttttcgaaatctaaattatctttaatgttaaaatttaattgaccgtgtacataactatgcaatccctgctttctcacagaagtgtctaggattcattcaacagatcatagaaacgaggtctggcatttaacagacgagtgacagaggagctataccgatttatacaacaattatcaaaacactgtcatgtagtttactgtagctcaagttgtgcttgtatcatataacataggtttaagttcttttttcagtcattataataacagaggttgaagagacaactgggtaagtgccaacttttccaaaagagttctgacatgattttttttaaaaacatgtctagttatcaagttcactttcttcactggaagaaatgatgcaataattgtctttagtgtccttggcagcctttagtaattgctcaagtagcggcttcatctctctcagcctccagctcctaacacctgtaggttg

SEQ ID NO: 140350 - DNA, 430 bp, Homo Sapiens
tttggaaagcaaagacattttaatcacatgaacagccactccctaagttatctgtttcctgctctggctttcctcccttagcaaaccacacggatcggagcggaggggcgggaggggaagaggggccggtccagaggggtggaaagcttccgaatcacagggattgcaaaagacagaggtttcctccgccactgcagagacagggattgctggctgccttagtgggtggatgggaagatctgcagccaccctgctgtttgctgattgctggaggggactattgagtttgaaaaccatttgttgtttccagatcttgcacatccctctttgggtcccgtttgctcagcaagacctttcttccgactgcacctctctctcctgctgcagtcaccgcctgagttgggccaggcagaatctccccaaatactta

SEQ ID NO: 140351 - DNA, 416 bp, Homo Sapiens
tttgttttacagaattttttatcaagatattttttaaaacggtttaaaatgtcatttcttcagatgcattttgaataaattccagccctgtttgtagattctacgagttaagtcccagaaattagcaaagcattgatggagatttggccatagttctacaggatagattgtagtgccccaaacagatatccgttccagggggatgtgggtaaccgaaggcaggccgctggcggcgggtatcccggaataatgatgggacccccagacaggactcctctggtttcttcttccctcgtcgtcgtctcccagactaaatcccggaaagggaaagcgggatgtttgcgcccaccgcgctgtagctggtcctgacacttgcaaaatggtcagtggctcctgctcggccaggctgagtgtgt

SEQ ID NO: 140352 - DNA, 361 bp, Homo Sapiens
aggcccgcgcccgtcccggggagcggctctgccaggaaaacggcccgaccagtgcccggcgcctgggctgcgtccgagcccaccttcttccctcgtcgtcgtctcccagactaaatcccggaaagggcaagcgggatgtttgcgcccaccgcgctgatagctggtcctgacacttgcaaaatggtcagtggctcctgctcggccaggctgagtgtgtgcgtgtgtgtgagcaagggagcgagggtgtgcggtgtgcagggggtgcgctgtgtgtgcgcgcgtctccgggaaggtctcgcggcggctggagcggggactgacagcccgggcggagcagcgcagctccacacgctaaacctct

SEQ ID NO: 140353 - DNA, 950 bp, Homo Sapiens
ttttagaacatcatccattttatttactcatgattctgcaaccagggctgggatgcgctggttggttctgctgggtttgttgtggtcactcgtgggcgtgaagctggtgacacagctggggcctgatgtctgctgggatattggaaggttgaacttttctttctctttgtagtcttagaactggcactgaaccacttctgcattgcactgattaaagtcacaggccagcccagactcaagaggagtgcaaatacaagggtggtaattcctcagagggcgtgggtttcactggagtcacggaatataaaaggatatcacatcagttggtggagaaggcagcatatatgtgaataaaagggccctacctttcaactaccttctctatggatctcacgatcttgcctctagcatcatggtcttaacaactgttatatcaacacactaccttaaaaacattttttagggtataacacattttgagagcatgctcaggtaccccttgcaccccattagttagaaaataccccactcccgcatccaacccagacatctcatctctatcccctgatcacactcttggtatcatgagtccttgcctatctaggaggggccttggacgacaatcatagcttacgccaaagggaaatgtggaactgaaggcagagactgaggctattagggagaataagaagagtggaaggttttctctccatctctcaaatcacagcaggtcagtgactgccatctgtgactgccaggcctggggaaacagtggcaaacctgcctcaggaaaggggcatgaggacatttcccaagcactgtgtctttaagagtgttgggccagaaggcggctgtgtggctgggtggtgttgaaatgtactggggcacagggcaggacgtctttttaaacaaattcctaagcataacagcttccatgatatcaccccccc

SEQ ID NO: 140354 - DNA, 658 bp, Homo Sapiens
  misc_feature (538)..(609): n is a, c, g, or t
cagagatccccttgtttaccctagtccagggacagaggctcagatgtcatgcttgaccccacaggtacagggttaggggtgaaggtggctgtctcttcatgtcttcaccatggcttctctgccttcctcctgctcctggtggcttatgtcctgccgctcttgatacgcgactgtggtctgtcctgggatggttatgatgcatatgtgctattgttgtgaactgtaacattgaggtctggccttacggttggttttgattgtcccttctgctcccttttcttattttaatattttaccattttccattttaatgtatctgttgtcttttttggctaaatctcttttcagttttattttactgtatatcttttctaagtgattgcttagagattaccaatattcttaacctaggcctttcacagtttctgcagatcctgctttgtgacttcgagtgaagtgtggaagcgctggaagcacttagaccctgcctgtgagttgtcatgtatcatgtctgcaaacattaaaaatctcaccagannnnnnnnnnnnnnnnnnnnnnnnnnnnnnnnnnnnnnnnnnnnnnnnnnnnnnnnnnnnnnnnnnnnnnnnctatctcaaaaaacaaaccaaaataaaagttctctgattattttgcaaa

SEQ ID NO: 140355 - DNA, 829 bp, Homo Sapiens
  misc_feature (185)..(207): n is a, c, g, or t
aaaagcattcatgaatatccccactgccttatctgcctactatgtcaaaaacaggagagaaggccatggccagaatcatggaacatccaataaaggcagtcacttgttattctgacaagtcatttgttttcagttcatctgtcgcatctgtcaagaaaaacacagactgtcttctaaaagtccgnnnnnnnnnnnnnnnnnnnnnnncaatgacaaattccacttgtaccatagaagccatattctgcatgttggagaggcccctttgtggtccctcatccctgggttcttcctgggcatcctatggcctcccctctggtgacaggcagcaccccgaagacttaattttgattcttaaaaagggacagatccctccttccacccttgtccaggtacttccagagggtgggtccccttctcatgggaacatactacccccactcaccagaccacagtgatgagtccagcccagactgtgggccatgaaagcctaagctcccaaaacaaacaagatgccagggacactgcagccatctcagaggacaccgaaagacattttaaagccaagggaagcacagcagaacatcagctgctggacaccaagggagccacagctcgagggggttcgtgctccaacagcagatggagctacacccttcccgatgacgtcacatcctaataaagccctgtttgcagtggctgctgtgataaaaaagcaagctctgcatgaaatcaacatggaacaggaaacaaggggtggggtgggacggagtccaatctgattctgaagtttgagaagctgtacaacccattagtaattgtggctatt

SEQ ID NO: 140356 - DNA, 555 bp, Homo Sapiens
actacagacttccggagtcatagtggcatactaaattcaaccaaggaatatacccatgaagtcgaaagagccaggcttatggaaagtcaacagcaaactattttattcttgttttctatttaccaattcaaacttgctctgcaggtcactcctccctgcccctgggataaaatctagggcatgttctgtgactttctggatcacaaaattcacatgatttttggatcattctcagttaaccaaaaatttgtcctgtaacttctagctataaaaataggctctgttcagcatttaaaatgtccaatcccatgtaggagtctaaactttctatttcattttaagtttaagcttcctcttgattcctcccccaagcctggcccaggcttgcatttggcttcaggcattgggcgggtagcagtgtttcctctccatttttcactttcactcttccctccccaactagcttgcagggatttctgatcacctagtagagtctagaggcgtaagggaaggaggtcaccaaggggcaggccaggctttatgtgaatagtgctg

SEQ ID NO: 140357 - DNA, 754 bp, Homo Sapiens
tgcggccgccaactttttacaccccagggattttctacatttctctccattttatttctctctttaaacatctctactggggaaggtcgaatacaattgtctccatttgacaatattttatgcttgactctctgaaagtcagaaaattataggtgatcccttttcacttctcaaccttccttctcttgcttagaagacttgacattgccgatgcttgttgccagcttctgttactttgtaactatacaaggaagacacccaagagaatgaggagtcaaaaccccattcacttttgctgaagcttggtttaacaagatttacttctagggcagagcagctgagagagattaaaagtaggtagtaggcattcattctaaactgcagacattatgcaaggcatcagccttattttgggctttattataagtgaagggtcttattttgtattacttcctaaagacctaccatttctgtaatatggaataatagtatgtgggggtaaaaagtccaaaaactattgtcctttgattttagtttcaaatttaagatgctgatcacttcactaaaactgtaaatcagtagattgatacgcttattgattgcctagaattttattcaattttacccaaatgtattttatgagtcttttattttggcagtatgtattaggaaaaatgcttgttgatttactaagagctgaataataatttattccatgattgattcttaataaaccccattttattgcttaaaa

SEQ ID NO: 140358 - DNA, 613 bp, Homo Sapiens
  misc_feature (531)..(541): n is a, c, g, or t
tttgaatccattgctcctcggcgggggtcatgataatacaggagttacagaccgagtagttacccagttgctgactcagttggatggagtagaaggcttacagggtaataattataaatacagaaatagaatgttataacaaaatgtcatcatgtcatcagattttggtaaaaaaatgttcttttttcctctaggtgtttatgtattggctgctactagtcgccctgacttgattgaccctgccctgcttaggcctggtcgactagataaatgtgtatactgtcctcctcctgatcaggtgacaatttcatatttagagtccaaaacccaacaaatgctacactctttccttgtgagctttacttctgccaggtaatggcaattgtccttagaagaccagctttcttagggaaaagctttagccactgtttgctcaaagcataaaaagattctgaattagatgcaaagcctttttttggcccagtgcaagtctgaaaactttgtaatccttctgtgttggctgattggggnnnnnnnnnnntgcaagaaacctaatgtattatattttcacattatcttctgttcaaagattacatacttccattatcctgtc

SEQ ID NO: 140359 - DNA, 851 bp, Homo Sapiens
  misc_feature (578)..(578): n is a, c, g, or t
acaggataatggaagtatgtaatctttgaacagaagataatgtgaaaatataatacattaggtttcttgcattttttttccccaatcagccaacacagaaggattacaaagttttcagacttgcactgggccaaaaaaaggctttgcatctaaattcagaatctttttatgctttgagcaaacagtggctaaagcttttccctaagaaagctggtcttctaaggacaattgccattacctggcagaagtaaagctcacaaggaaagagtgtagcatttgttgggttttggactctacaatatgaaattgtcacctgatcaggaggaggacagtatacacatttatctagtcgaccaggcctaagcagggcagggtcaatcaagtcagggcgactagtagcagccaatacataaacaccctgtaagccttctacgtccatccaactgagtcagcaactggttaactactcggtctgtaactcctgtattatcatgaccccgccgaggagcaatggattcaaattcatcaaagaaaagaatgcagggctttgcagcctgtgctctaataaaatatcccgnacagcttgttcacttgctccaatgtatttgctgagtaactctggccccttgacacttataaaattcattctactctctcgtgcaattaccccagctagtaaggtttttcctgttccaggcggaccatacaacagtattcctgttctttgtcgtatgggcaagtttgcaaataattctggatacttggcaggtaactggatagtatccatgagtatctgcctaacttcatgtaacccaccaatcttgtcccaacccaggtctctaggtttatgc

SEQ ID NO: 140360 - DNA, 736 bp, Homo Sapiens
  misc_feature (618)..(618): n is a, c, g, or t
  misc_feature (720)..(720): n is a, c, g, or t
tttttaaataaatgtattaagcttttattaggttagaaaaaattctaagatggttagtatatcttagttacaagtgatgatcttttttcctttagccttttaaaatcaatatatggaagacatgcaatgctaagttcttcttttgtacatcctgtaagacaacacttttctgaatatcctctgcgttttctttggggatgatgcccccaaaacaaattgcttaaggttttaattttgtttctacgtttcttctgaaattttgcattctcatgaatatatacattgatattatgtgatgaagaaaattctcttgtcttaccaaggggtgaatatccctttttatccttatactcaggtagtgactgcatttcccaactgtttactgcttcttcccaagaagtagacactgggtttgtgcctcttccccgggccggggaagcggtttgcgggctttcgaactggtatgggctgtaggcttcgaccttctccgaggcctgtgcaatcaaccgtgagaaaggggtttcctcctcgaaacggaactggctccagttggcatggccgcagagtttttctatttctttcaccaagtacctgccgcacagcttccttgcactgctngatgtcgctcagttcacgagaaaaccgaaccagcaggagtccaagccacagcagggacaagcggaggagccgcggcatccctgtgaccccaggctagtcctnccgcgttgtgcaatgg

SEQ ID NO: 140361 - DNA, 634 bp, Homo Sapiens
caattttcacctttttatttatgttcctcattcttcagaaacataattgcagtttttattaactttgttttatggatctaatatttaagaagaagtctatcttttatgtcacagcaagaaggttaatgcacttacagattcccctgcaatacatcttgggcaaggctgggctgagctccttccaccattctgagaaatccctgtacttagcctcccctggccactctctggccttggtgctgggaggcagcctcttgatggaagctcccggtcctctgggccccaggatgccagggcacaggcattcacctggtggcagccacgctcatgcccactggcttctaatctcctgcatacccgtttctcatagaggagagctccagctggcatctggcaggtgcccctctgggacgaagcttccagaagaaggaacaggcagcaatcttcggtgttctgcagcctctgctggtgatacccagacaaacagggtctggagtggacctccagcaaactccagcataccacgtcccccggaacctgcagatcctccgccctccgctgtcgccagcggccgagcgctaagctgtccatgcagccccagggtcaaaccctcccggcatctcaggcctggccg

SEQ ID NO: 140362 - DNA, 554 bp, Homo Sapiens
cagtcgacggtaccggacatatgcccgggaattcggccattacggccggggtttttggaattttcagcctttttgtgctgtttttttctcatctttgtggatttatctaccttttgtctttgatgttggtggccttcggatggggtttttgtgtggacgtcctttttgttgatgttgatgaagctgttcctttctgtttgttagttttccttccagctgtcaggcccctgtggtgcaggtctgctggtgttttctggaggtccactccagaccctgtttgcctgggtatcaccagcagaggctgcagaacagcaaagattgctgcctgttccttcctctggaagcttcatcccagaggggcacccactagatgccagccagagctttcttgtatgagtgacataagggaattctaaattgatacaccatcaggattcaccctcaagattcaacttcaacatttttcaaagtccttcaataagaaggtaaaactcagtttcaagtttctttgtcaacaacaacctttactcctattaccaagaatttctattcaa

SEQ ID NO: 140363 - DNA, 449 bp, Homo Sapiens
  misc_feature (76)..(202): n is a, c, g, or t
tggaaggaagcagtaaccagttgggaaatgcagtcactacctgagtataaggataaaaagggatattcaccccttnnnnnnnnnnnnnnnnnnnnnnnnnnnnnnnnnnnnnnnnnnnnnnnnnnnnnnnnnnnnnnnnnnnnnnnnnnnnnnnnnnnnnnnnnnnnnnnnnnnnnnnnnnnnnnnnnnnnnnnnnnnnnnncactagatgccagccagagctttcctgtatgagtgacataagggaattctaaattgatacaccatcaggattcaccctcaagattcaacttcaacatttttcaaagtccttcaataagaaggtaaaactcagtttcaagtttctttgtcaacaacaacctttactcctattaccaggaatttctattcaacaaactgcaaagcagttataaaagtaataaaggtaaaaaaaagtggtaccatgaaaa

SEQ ID NO: 140364 - DNA, 537 bp, Homo Sapiens
ttttttttgcaacacttgtgtccagtacttgatttgaagttggattgcaagaatccattattttctcttcattagtttgagcaagagtctgaacaccatccacagaagatctaatgggactgttaaaaggctgtttgttgttggtatttactttcaagttagtgaaatttccaattgtgctgacattttcattagggttttgccactgctgttgaaagctggtccttatttcagatgacagcatttctcgactctgaggaacttccatagacaagtgtttagtaatatgctgagtactttgcaaaggctggcttccatatctacagttgtaaggaggaggaggaggtcttttgtcagtttgcgtggcatactgctgtgatggtacagctgaggtctgccttgatggtaaagttaatacagaatttggaagctgactatttttaacttgcaatgatgtatgtggtataaagttttgtttttgaatggtagaatctggtaaaaagctttgtggtgagtaacggtatagctttggaggtg

SEQ ID NO: 140365 - DNA, 562 bp, Homo Sapiens
  misc_feature (246)..(259): n is a, c, g, or t
atggtaaaatcttgataagcaaaagctttttattttacttcatttttacttttataaaagctcctaatgcaatgacgtgtgtcacctctctgggcttcagggtgttcacctttcaaaaggcctcggtgcttgtctgtcctgcttcctggcttgtggttagcatcaaaatgacaccataaaaatgaaagttgcagccttgagggttcttctggtttcatttccgaccacaaggttgccagagtgacnnnnnnnnnnnnnnaaataacacaaatcagttatcacttcctgcttaaagccctccaaaggttccctgttgcctaaagaataaactccaggcacctaagcaagccccacgcagccgtctgcatttttcaatccctccaacctcgccttttgctatttcccccaccccacctacggcacgttccggtcataaccaactagctcctcgctgaaactggctcacaccgcggaagcccgggtcggtgtcggggcgagccttccctccttttcctggagcccgtctcaggtctgtagccctcgggagggattgcagggctcg

SEQ ID NO: 140366 - DNA, 468 bp, Homo Sapiens
acaaaagtttttcactctcacagtagttttatttttcttttcacagtatttcaagtattttgatcagagccaattacttttaaatgtagtttttttcgaatgatgttttctttgtaacttatcttatttctttcttgactgtctaatatccgaggctttgttgtgctccattcttttctcatgcttgccatttgtctcgattttcttcaatgattttttcaagcctatttttcttactcaagataaagaaagacatagacacatccattttatatttcagcaatatttatcttaaataaacctacaaagcggttaaagtaagatgtcccactgaatgtcatagatattaggaatggcttatctttctcttttaactctctttattaaaagagagaaactgctaaagagtaaatatttgtttttttgaatgcatctctttagcttttgacccccacctgatctctcaaa

SEQ ID NO: 140367 - DNA, 356 bp, Homo Sapiens
  misc_feature (340)..(340): n is a, c, g, or t
ggaccattaaagtactgttttacttttcaaattgaacaactgcatcgaagcccagatgagtacggacgtgttgtgcatccattcagcaccagaaatgtggcatagccagtgggggtcatcagaaagcagtgaggtcacttgaacaggagcttgttttttattcagccttccactttttgtattctgtgcaacataaactcattcaatatactttattcccccttcaacattcctgtagaatagtgctagtttgatggctaaaattcttatgttgccacataaaaataccacacccatttgctataatctttataaggtatccaattagtttaaagatatnctatgagttttcattt

SEQ ID NO: 140368 - DNA, 545 bp, Homo Sapiens
ttatttaattcacttttattgtgcactttcaaaagttggatttaaggtagcttttcaggagaagttttaggacctaatgttggaaagaatgcattaacctcagggtctgtttcaacatctgtgacaatgttttgtattgctgatgaggttcttagctggacagtcactcttgctgccctccagacttattccggtttcttgggggcttattttcttctaatccaatgtatcccaaatttcagtcactttacgtcccattgtcaccattcttaccatttccatgtatcatctgcacaattatgtacttaattccttcttctttgaattggctttcattttgctcagttttcctgaaagctttccacatactgatgccttggccgcatcctggagagtctgattttgttggtctggggtgcagctctggcacagcatttctaaagccctcccgttgaaggaatatgcagccagggctgagaccacggttctggagggaggtaatatctgcaggttcttgaggatactccattaccctgagctcccct

SEQ ID NO: 140369 - DNA, 295 bp, Homo Sapiens
tatttaattcacctttattgtgcactttcaaaagttagatttaaggttgcttttcaggagaagttttaggacctaatgttggaaagaatgcattaacctcagggtctgtttcaacatctgtgacaatgttttgtattgctgatgaggttcttagctggacagtcactcttgctgccctccagacttattcctgagaggaaaacaaaattaatagaagataagtctttctgatatcaaggagtttaaaatctctcgtgctgttgcaatatccttcttaccggtttcttgggggctt

SEQ ID NO: 140370 - DNA, 929 bp, Homo Sapiens
  misc_feature (912)..(912): n is a, c, g, or t
tttagcctcaatagagaattatttattatgtccaaaagagcacaatgaaaacatccccaacaacacataaacctatatataaaatatagaatatctccagtatttttactttatatggcagcacgccaatatatgcaagagaacatattgatggggcagggggaaaactgatccgggcaatgacacagtcaggcattacattcggagaccaggtaaacagcaattttaatctgaaaagccagtatgagaggagttcctatgaagctgggatttacatacttcattctccgttcctggtcatttcatccacagcttgactgttgtcaatcatggttccttgcctttggagtggtactataaaggtacagagaatgcccatctcagtaccaaaatttcaccatgaaaaatcataacagaaatgacaaagcttaaagaaaagtacgccggatttcagaagtatttaccataataatttttaagaaagcttaccataaatacttccaaaaacaacaggctttacaaaatattatacgacatcctgtgtacagcagtaagtatctactcaggccatttgtcaagctgtttagtaattagtttctcatgtaccctcttgtctcaagaaggtcaataatcatctgatttcctctctagctaatgatctgttgttagcctacttttaacaatggaagaaggaactggtatatggtttctaggatcaaccagttctccttaagtctcatagtttctttgttctcaacatacatgttattgtgtacttacagaagcatctctcagttaggaaaaataaaatcagtttcagggctcagaaagtaaaaagggaaattctttccgacgcgtggtcgacgatatcccgggattccggagccgtaccagcctgctttttgtcaccancttgtctatagtcctta

SEQ ID NO: 140371 - DNA, 789 bp, Homo Sapiens
  misc_feature (710)..(710): n is a, c, g, or t
tttttactggatcttgcaaggacaaggaagtgttttatttatttacaacaaaaacatttgtaacataattctgtcttcaaaacagagaaccctacaaaatacacaaagcaatctctattggtgttgactcagggacattcgcagccggaagcagggctgggactgggagggaagccaaggactaattccgtctaaaaaaacaagaaactgccttaaaaaaagtagcagtgttctacttgtcagtagctgcgctttcccctcccttctgttacgaacacggaaaacagaaaacagcacctgtgaaaacacgtttcagccgcgtccatgagagatgcggccacaggacattccagcccctgctcctggaaggtggctgccacggctgcgctgggagctcccttccactcccccaatgatggagaaccacagctctctcccctcgttggtaggtgaagaaccttcaactttctcctgctgtagaaccatcgccacagggcgcgaacatgcggtgccacatttctttctctttatccacatagtccctgtaacagctagccagtttcttcagctcattattgatgtcatgattgaagggttgctccttctgggctcgaactagaaaatccccgggccttttgatactcagtcaggagaagacatgcctgtccacacctggagagggccttggcattctttttggtcatgatcanagcctgctctccatagcacaagggctatgggggggtcggctacctccaggtatgtaaaaagacagttcaggagaacagg

SEQ ID NO: 140372 - DNA, 344 bp, Homo Sapiens
tttaatgtgaataattaaatctttaatggttgaattctggacgtggtgatttttgttgcagggttatgcttttggcttaaatcttccttgtaccctccagatagcgtgccattcatttttttgtttctttgttcctttgcattcctccttgatttactgcgaacatttactgatcaactaatatatttcaggcacatggataagtacatttattaagtggaagtagatcatcataaaggctttcatcttcgtgatcttcacattgagtaggtggtcaacaatgtttctgaaacagctgaatgcaagttgtgactccacctggtgagcgttttcaggtttttctc

SEQ ID NO: 140373 - DNA, 405 bp, Homo Sapiens
catgccaggactccacgcacagtatcctttgtaagggacagctgagagccccccatttacacctggggaaacaggttcagagaggcgcagtgactagcccaaggtcatctggccagggcagcggagtggctgaagccggagcccgctccgggggtgtgtctgtccctggactcagaaagacaagtcccaacaggaccctgcctcctgggctgttggcgaatttaaaattgggacgcacgaagtcgcggccagcggcggggccccctggaagtcgccgcccgatgagcggtaactgttgtttatcagttgcagtgagcctcactgcgcagcaagggaaagcgagtcagggcaaagacgtgggaggggacagctcacagtcctagctgcgcagaaccccgcggccgc

SEQ ID NO: 140374 - DNA, 500 bp, Homo Sapiens
  misc_feature (118)..(140): n is a, c, g, or t
gaaaaaaacagctttttatttgttactataagaaccaattacagaatccgaggttaaaaaaacggacaaaagatctttatttttgagaactggcgtacaaaaggcagagggggaggcnnnnnnnnnnnnnnnnnnnnnnnccctccccccaaaactgtccaagacatttgtgggtcctaccccccaaaacaggctaggttcccacatgggcccagttccttggattttgtcctccatcggcaagcatggaggcatgagacaagtttcgaggtggtaacaccagagggcgcccaacccctccagggacacacactcacttgctcttttccttaattcactcctcactcccttcgacacgaaagggaagggaggtttgggtgccctgggcatccaccctttacctttaagcccacctcccttccccacaggtgctcagtcctccaggacaataggctcattggtgctggcaggatgtgagggtgcaggtagagggacagggg

SEQ ID NO: 140375 - DNA, 984 bp, Homo Sapiens
atttaaggcatctgtggtccactatccggatacttacatcaccaaataccccgacaggaaaaaagtcccacattctgtgagtccatataaacctactaggaatgaaaaatacccttggaacttgggaactaaaagaagaaaaagaatgcttcctaggaaagatttctccacagatttccagtgttctttgataagcacctgctatttaatttcaactggtatgcttttaaatgagattctcactgtaatgacactcttgagattaagatagtaacagtgtattttgttaaatgcagagacaatggagacttcctaacttacattttggaaaaatctgaaatgttggttcattccaaatagctcctctaacaaaagtctctcaattttaccttttctgtttttccccatgttttaatggattgtgaatctgagacaaaagtggaagcataagactaaaggagaaaaaaccttacttccaaagaacatttcccaaagtagtttacaaagttcatctcacacaaaattagcacctcactcttaccatgcaaaaataactgcagttataatttgaatgacagacaatttggtttttattgcttaatgatctgtgctttaatgtggggataaaaggcatcctctgaatggaataacattttatataaatagcagtaggaaaatgtaaataagcattgatatcccactgctgaacactttgccgttgtgatatgccctgaaaaactcagcttgaattatctcaagctctagataaaagagctgaaacccattaaagttgtcatttcaaaaggacttgtacacattatgttaataatgtatatacttccaaagagcctcttttaatgtcactgtcatatagaatgtccatattctactaatcgttattagaaaaaatttaattagggagaacagactgtttcccccttccaatctacctaagaataaacaggaaataaaagtataggaaat

SEQ ID NO: 140376 - DNA, 471 bp, Homo Sapiens
tttctaatagaggaaaaatgattttcatgcaacatccttgagaaatcaaagcatgtgagaatcatcaagataggtaaaaatttgaatatcagcatatttatctcttcaggggatttttgaacaatttctctgatgtttcaagttcagcaaaatacatacttctgaggtcctctttgcattgattttaggtatcttaggggaaatgtattctcccactaataatctaccagaaagcagctctgagcgtttctttctagtaactcctggggtcctgagacttgggacttggactcagcagtctgcattcaggtcgagttcagtcattgggatggaagtgatacagtcccccttgggagcgataccaaagtgcttaccgagcacttgcttcaagctgagatgactgaactctcctcccctctcctgccccttcctctgatatcctaaataaagggagagagttcccaaaaaaaa

SEQ ID NO: 140377 - DNA, 313 bp, Homo Sapiens
ttttgcatttcagagacttttaatactttcagtaattctgctattgctatctagaaggcagagccaggtgtacaggatggaacatgaaagcagaccaggagcatgactactgaagcacagcatcacagggagacggtcaggcctctggataactgcaggcaggcctgacttatgtcaggccctccataagagatggtggagtagagtcttctctaaactcccctggggaaagggagactccctttcctggtctgctcagtagcaggtgcttttccttggcactgacgctaccactagaccatggtccgcttgg

SEQ ID NO: 140378 - DNA, 735 bp, Homo Sapiens
gaaggtctgtatttacttcaaatatagcactcaatctatgacctgaattttcctttattcctgtccatcccttgaacaggctttgatgcaaatcccagtcagcatcccacatatcttcctgcatggctacaccaggctgcactttgggttcagatttggatagaaaaggcaagccaacatagcaatgatccccacactgtagtccaggatcaaaataaatgtttgcaatcttttgtttttttcctggctccaagtcttccttattgccccgtaatcgtttatagtaaaatcgcacatcttctgacaaagatcgtatttgctgtatttttaccttctgtgagaaggaattcataatatttaaactttgatgaactattttccctggaaaggaaggtggaagaaccacgtgcttagggaagcaggtcagtgagcctactgcaatcacagccttcacagggattgtcaggatctcatagtctgttgtgatctggatggctccatcatgaatcccctctaatttttttgcagtaagtttgactctgaagactgcataatagcctgaagctaatgttaccgatgattgatctgataaagaggatttttcacactcctggcaggcttgaaattattgtagttctattgcctgtgtgcacagctacaagttctattgatacgagcgtctcctatgatatgcgcactttttatagccgactcaattggatcctcgtgccgaat

SEQ ID NO: 140379 - DNA, 244 bp, Homo Sapiens
tcctgtgtgttcagatttttcttggcctctctgtgtagcatttcttcctctgggcatagggcatgacacttgtcatgtaagggtcttcagggaggagaagagagggtcagatagtcttcctagattttatggcttgctttggggtacagcagttctatcgtgcatgatgcacagtctggaggctggaaatccaagatcaagttaccagcatggtgaggttcttcgtgaaggctatcctcctggg

SEQ ID NO: 140380 - DNA, 388 bp, Homo Sapiens
ttaaaggagaaggtttaatttattggctcattcattcaggcactgaattcctgtcacatgctgtgtcctagcagcgcacactcagcatgtgggagctgttactattattgttattattcaagcatcatttatgagatgtgaactctttggggcaggccatggggctgggtcttgcctgtggtcttctgagtacctggcccttcgctgcctaggaaacttctattcatccttcaagggcccagatgcaatggctcctcctctaggaagccttcctggattcctagacagactcctggactcccacccagcatcaagactcctgtgtgggatgaagtggaggtagggaggcctccttgttttctgcccaaggtgttcattaagccagctt

SEQ ID NO: 140381 - DNA, 707 bp, Homo Sapiens
tttcaaggtatatctttacgttttatttaaggtagaggtcaagctagcgcttcgagaatcatacataatcagccctaacagtatctctattgtagcccccttctgggttgctcataggtatcttacgtgtcataggaaggaagtgaacagttattggaggaaatagcactcttctgttagtgttgcaggtttagggagtggacagtaactcatactgttttttggtgttgttcctatttgagtttggaatcaaaggagcactagacatagtaggcagatcaaatttaaaaataaaaacgatcttcattactgatgaaagtcagattagagactatatcctttttcagcaatcctagaggataggaggctcttgttctctccagtttacagttgtggctgatatacctctctgcccattttaccagcatccaggtggccaatagcagaagctgatggaaggatgtcaaccgaacaagttcttctgtgtatttggctgttcagtgcctcctctgagagagatgctcttctctgctgtctatgatgagatcattgtaaaccagcaagtggatgatggagctccaaaatatcattttagagtctccttcctagggccagtcctgttacgactatcttagggcaaattcccccggaagcagactcttggtagaggactgagtacaggaggtttattgggggaactctttcag

SEQ ID NO: 140382 - DNA, 586 bp, Homo Sapiens
  misc_feature (570)..(570): n is a, c, g, or t
tttttttttatggagagtatacaatttttattttattatactttgatactcttcttgaccttactatactcttaggtacacagcaacataccgtttgtaaacaataaaacatttcattaaaaataatccattaaaacttcaagtttcctttgtacactagagatactggattaaatgccttcttagaaatgccatgttaaccatttattttaaagtttccaaaatgcatgttttccagtggtttggtcttactgattttacttaatggaactatctatgatgctctgggatgtgaaaatcatcttatgtccccgacttccacaagtaagtaacaatgctttcacctctaatcttcatattgctgatttttgtttgaagtttgtgggcaagatttagctccataggtaaggacggaaacgcaggtctgacaagttacattaacatcaggactaaaagtcgcaggactacaaaccacacaacagctagcgcaattactgtgtagacgttcattttttccaaagcctggtcgacagctatccagacgtactacttgcaaactgtggtccacanaatgcattgctggtag

SEQ ID NO: 140383 - DNA, 300 bp, Homo Sapiens
attctgacttttaaaacaacttctttttccactttttaaaaaatgcactactgtgtgctgagcgcttttctgatcctgcatctggtcacggtcgcgctcagcctgtctacctgcagcacactcgatatggaccagttcatgcgcaagaggatcgaggcgatccgcgggcagatcctgagcaagctgaagctcaccagtcccccagaagactatcctgagcccgaggaagtccccccggaggtgatttccatctacaacagcaccagggacttgctccaggagaaggcgagccggagggcg

SEQ ID NO: 140384 - DNA, 539 bp, Homo Sapiens
  misc_feature (143)..(161): n is a, c, g, or t
cagacgggtacacagacgtgcaaaggccacgcgctaggagctcagcgaggacggccgcggtgcgggcccagccgccagcgccgttttcttcccgagggacgtgtgctccctgccgcgctcctacagaaacggtggagaggccnnnnnnnnnnnnnnnnnnnctcgggctcaacggaacaccctgcgcacccgccgcctcggccctagctccaggccctcttgccccaactctcagggtttcacctccccactcagggcaccgggaagggcgcgaccgccttcccttttccccactggaagggaattctgtcccggcaatcacggagacgacagcaaaagggatctggcccaggccgggcttccagacaccggcgcccttggaggccgccagagaacgctccagtctcggcccggggctcaggcgcacggactctgcctttgcagccgggtcgagggaaagagaggctccgcgcagcggctcgggccggcccaggacgcgggcgctgcaagatggcgatggtggcaagcccggcgcccgc

SEQ ID NO: 140385 - DNA, 240 bp, Homo Sapiens
aagggaaggttgaggtgggagtggggaagctagttctaagaacccctagtttggaacttctgcagggaagggtctcttggcccgtgggcaggaatgaagttcaggcccactgattacatccatccttcccgctccctgcctccccgctccccacacaccccagattcctctccagccacagtttacttttccggcggatctgggggtgggtggtaggttgggggcggaggggggaacttt

SEQ ID NO: 140386 - DNA, 810 bp, Homo Sapiens
  misc_feature (15)..(15): n is a, c, g, or t
  misc_feature (698)..(706): n is a, c, g, or t
  misc_feature (753)..(763): n is a, c, g, or t
agtcctgttcctttnccacatatatctagcaagcctcttttaccttataagggaaatcctttgtagcgtgtggaaggctttgattgcaggaaggggtggaacccaaaatgactcggccgtgactagcagtttttcaaaaatacatatatatgtatgcatgtacagatatgcgtgtatctcccaactccagacagctgaaaatctgccaaaagcgttgtttgccaggattcagaatttcccacataagggctactcacttcttaaaagacaactcatgaatcaagcacctctgtttgatctttaaaatcaattcctcgactgctaatgggtacacagttttttgtttgtttgtttgtctttggcgggttatgaaaatgtcctggaattcgataatggtgttggttgcagagtgtttttgcaacatcagttcctggcccagttactgaaggtggtaggaggagttaagatctaggcaattaaaaagaatgaaaggcacccattcatgggaaggcctcagtgacgtttcttaagacagtttcatcagtggttttcacaattctctgcatttggtgtttcagaggacactgcaatacgaaacacctgtgggagtgccctctttctgcttctaggaatctgaggctgagaaaccttcctgactctatttgtgtagtttttcggccacgttagcctcattctannnnnnnnncccccagtatgaactcagggcaggagagggagtggtttcctaataannnnnnnnnnngagacggaatccagcctgggcaacagagggagactccgtccccctgc

SEQ ID NO: 140387 - DNA, 616 bp, Homo Sapiens
  misc_feature (96)..(96): n is a, c, g, or t
cctccagtccctcaggaagccgtcatggaacgcctagcggacaccattatacgtcgctgtggtagctgagtgaacagccggggggagcaccgcccnccgcgcgcgggagagcgccgcccgcggtcacctgggcccgcggggcagagagttcacggttcctgcagcctcgggtcatgctgacgcccccgggcggtgctaacacgtaacacgcgggacctcgagagctaagaagcagggcgactaagacgcagccctcgcccaggagcccgtctctcccgcgagctacgcgttcccgcccaagtactccgggtaaccgaggggagtgaccgtcgctccccgcctcgtggcccgcgggcggagccggaactgtcgggacaccgcggacgtgtctttgggcggcatgttttatgttgcgaatctgtgtggatttttaaattctgtattcccctaaaatagcagtgtttttaatatgtaatgcttctaccctgaaaatcaccaagcgaaatttaggctccatgcagatatgtcacttgtttttccccctgtggcttcttgtatcccttggcaatctatttgggtgttaaaagccaacaggacaggccccctggggcgcagc

SEQ ID NO: 140388 - DNA, 966 bp, Homo Sapiens
  misc_feature (164)..(173): n is a, c, g, or t
gttgcttgtctttccaagagatgtaccattttctttgattcccaagtgcatttttcctgaatcttctgtgatacaggtcacatgataggtatgtagagagctaagcttcctataccaagttagaagtgaaatgactagtggaaaacatttaaactttaatcttnnnnnnnnnntaggaatcaatataaaaatgcacaaggtaatgtcgttttcatagttaaaatctgacattgtttatcaaagctagtcagttaagtggacacctgcaactcaaatcccataaacattttagaaacgccaaccacccctcctgaaaggtttgaggaatgaaatttggcagaagctcagctctgtgaaatagctcccgttttttttcttgggaccctacttagttccgtgggctcccattgggagctgattaatttctgccaatcagaacccatccctaacacatcagatgatagtggctttgacctagggaagaagaggttgagcgaagaacccccaccaggtatggtttgagagtccttagttggttttcttgggcgttaggtagtaagaaatccaccaggaaccccagccaaaaccttctcaagtgtcacttgggcagatttgggttatcattcctccttttgaacgaagtgagcaaacagcctgctttgtttggagaagttgtgggcaggggaggagggttggcaaggaacctgaaggaacccactgctcagccagtcagaagtcagcagccatcctccattttcaacatggaccgcactggacacaagccagacttggagcagtgcaacgagatcacagaccgaatgaccccagttcacacttggtacaaggagtggggctggcctggcgaggccgagcgcgaggccctgcagctgcggggaaagtggccatctttgcacgagcaggaatgtccaccactcccagcactcatctcagccttatccactccgc

SEQ ID NO: 140389 - DNA, 1175 bp, Homo Sapiens
attaattaaatctcttgaaatctcttttaggtatcttggaccttgttatgctgttgcttacttaaggtttatgactctcttattctcaccggcattatccatatatcattgttaactctaaaacatctccagcacagaagaagacaattttcactcttaatacagtataatatattcatagtgagccataaaattattttgacagtaaagcaatgtcaattttgaatctttgaaaccattatatacttcatagatttaatgtcttgaaatatttaaacaggtttgagaagtattattgcaactgataccttacatggattgtcttacaaaaatcagtacagaattatactgattgataaatgttcacatatataagaaatagtttgttgactggagcattcagtttccattgtttgtattcatcttctagtaatacaatatgcatttctcaaatgccctaatccgttttgaccatggtgcattcagtaacttctaggaagcattccactctgaaaaactgcataagcagatagattcttggaggatgcagctaaagttcgtgtttctatattgccactccatatttttcagtgttctttagtgcccatcaaaattttattccaacaagtttttatctcttgtaatagtctctttaggaaacacaagtcattcagttttttctgttcctttaaagatttattttcttccaaactctttgttggttgggcttcacccagggcagctggttttcttcctttaacctggccagtgcagttcaacagtattgttgtgccttctgaaacttttaataagtggagatcaaaatcaccagtgctattcattttaagaaattgcctcaacttgcgagcagcacggaataaaaacataccttccttattagcatcacagatatgtcttttaaaaaagttaaattcattattcaggcaattgctaccaatttctttcatgctgtctgaagcagagatccatgagcagaaacctccatagcaaccattgtgggggtagaaaaaattaaactgtaattggcaaattgctgaaggctcagtgtgaaacaacttagagaattaaaaactccaagggtacccagtcatagttgtgggggctatatacttttatgagtttgatctttaggagctctaactactaggtcctca

SEQ ID NO: 140390 - DNA, 542 bp, Homo Sapiens
  misc_feature (36)..(36): n is a, c, g, or t
agggatgggggcttgcactatctgatcgcctccctntgagccaagcggagaagcgcgcaggcttagccaaaaacgtcaagacgctttagccgccccgacgcggggatgccacacaggttcaaacaccaccaccccaaatcccaagcagttaacctctggtttctccgccgtgacgttcgaggtccctaaggccccagtattaataaggcaatactcgagcacctactactaggagtaaaacgcaccaggctgagtggagaagctggcaaactaacttccactttcgtggaacttctgtggctgactctacagttacactaaaagcccgtcctctctcttcaccctgtccccgggctcccacttcctccactggaggtggaaagtttgctccaggagcgcgaaaggcgcggagcgcaggtgccccaagaccccgccctacccatggtgaggcagtggaatctccgcgggtccgccacgttgtaggtggtggcggtgcagacaggtgcgtggtgctgcgggtgccccaaggccgccgcggccgc

SEQ ID NO: 140391 - DNA, 468 bp, Homo Sapiens
ttttttttcactttaaaaaagtttattaaaggtaaaatcagatttacagagtataaaacaataagggatagaggtgaagaggtttcaaacaaactatgagtacaatagaaagtaaattacctacctggggttctcacagcactttttctttacttctgcacaaagcctaatgtgttttttaaaaaatccttggaaaagtctcagcagtcatatattctcatgatttagcagttaaacaaaatgtccacaatccacaaagaaagaggggtggacctaagtgacagggtactaaacatatatactatgataagctctgcttcctctgttccagttctttaaattttgtgtctgtgttttttggggaaacggttatcatgcaaaatgactgtcttggaagcaggagttgaggaaaggaaattctgggctctctaaaaagccttcttgcctccttggtgcagtaagcagcat

SEQ ID NO: 140392 - DNA, 548 bp, Homo Sapiens
ggaaagcagttacatattgaaatatgttgtttctaatgacatttctgtggtttttaactttttaatgaatttcacagagtacaattggtaatttgtatataaagaacttggcaagagaatttgcttaatgtaaatataaacagtcacaattagtatagacccatcgatatatttttgataatttttcatgtatggtaaagttaaaatgacaaattgatattctgatataaaactcaaagttttgaagtcagtgggaaaaaaggaggtttttagactttcttaaaagacgttaaaattttaggacagaattttcttgatgttgtttgatctaactttgcactctttgataataatgttttagataatgtgcgtaatccaaattggtattgtagcctctgttaacacagacagtatatgttttaaactttgatgtaaacctttttagacccaaacttgtggaagtatcatgtgttaagttctctgtctctgtttctttgttcatttattactaaaatgaacttgttattaaagtatatgcaaatatgaaa

SEQ ID NO: 140393 - DNA, 369 bp, Homo Sapiens
agttcaagttttatttcttgcttctagaacggtagtgagcggtcttcagcctgagacccaaccctaggtaagtagctgaattggggttttgtcttggctaaagtttaacaaccagctggtcttaatttctccttaccattagagcactcagtaatcatataagttgtgtgatcattcattttgcttaactgtttgtttctgtttttattgctgtttcagtctttttcccattgggtttgacctactctatctgacttgatcaaatccaaaggaaatttccaaattatggggaatgaggcctttgaagtggctaaattcccaccctcccacacacacaaacgtggtatggtgggggaaaaaacggccagc

SEQ ID NO: 140394 - DNA, 1133 bp, Homo Sapiens
gtcgcctgcgggctctcgtctggcgtggttggttctgtcgctccgggattgctgggcccgcagtgcccgcgtgtcctgtcgcgccctgttgtcgagcgtgtgcgccggcgtgcggttctcttccgggtgcaatgtggtagcgtccaccgggctccctgtaggtcaacgtgcctgttcctatgcctgggcgttgatccggtctgtcaccgtgccttgtaagcattgcggagccgtggagtccttcgtagttgtgtcttggacctgtgcagttgtcgcggtcaatctctgggtcgccggctgtgccggtgtgcactcttgaggctgtttcgagcagcttcaccctcagccacttcggcagtccgcccatttggtttggtcttgctcggacagtttcttccggttcttcttcttctgttcctcgctccggagattcttcagcaaggccaggtcgtcggggtccgcggccggcacggtcgccgcctcctcccgcttgcggggcgggctcctccgctttttgcgggcgccggcgcaagccgcggcccagccgtagcccagcagaaacagcagcagcagcccgagcgcgccagtgcccaccaggatcacccagccggggtaccgtttcggctccagccccaggtcgaggcccagctcggtgcgcagaaagcctaggccgaccgagagcatttcccgcagccgggccgagccctcctcggcctgctgggccagctcgtcctgccagctccgtgcagccatcttccctcccgtcagagggactcgcaggatgacgccggggcgcggagacgcagtggaatagtcgagggaagcgaggaagggccgggccgggtaacctcaggccgagcgcatcgcggccgtccctcgcgccggagccggggatcggccgctgccaccgcggggagggcggaggggtctcccaggttccccgctgtcagcctcactccgccgccgccaggagacccgggaggcgggagggagtgtctccagtggcggccgctaagcggcgtctcggcgccagcagccaggctacacgctgtcctccctccctcgtgccgattaaaccacccgggcctcgttacctagccggtttgttgtggggcgtgtggtggtggggtggg

SEQ ID NO: 140395 - DNA, 933 bp, Homo Sapiens
gttcaaccaaaccgggaggcctcattcctttttcgtgggcatgattcttactcttcttctttctgccaaagaggctcttggtaactttggcaaacagactcctagctgggttggggggtgtcaggtctgggactgtcacgcagctgctgatagggagtcgatcgggggtgtagcccttggtaaagaagtcatggcgcaggttctggtcaatagaggggcggtctcggggtgaggcccgaaggatggcggccaggagctgccgggcaggcagtgagaggctggcaggcagcgtgtagtgaacctgcttgatgcagcggtacgtctccttcaggtcagccgtctcaaagggagggctcccgcagagcagcgtgtacatgacacagcccagtgaccatacatccgcctcagggccgtggccctgtctcagcagcacttctggagccacatagttgggggtgccacagatggtcttcttcctctgctccggaggctccaaccgggctgccagcccaaaatcccccaccttcagttccatgttctcagtgatgaaaaaatttcccaacttgaggtcccggtgcaagatgccgcgctggtgcaagtacttgaggccagaaaggatctgccgcaggtagtagcgcacttctggctccaacagggtgtgccgggccttccagatgtgggccagggactttcggctgcagagctccaagaaaatgtagatgttgtcagcgtcctcaaagtggtgcgaaaaacgcacgatgtggcggtgctgcaggtctcggtgcagctcaatctcatttaggatcttctcgcgctgatgcggcttggcgacgcggctctgcgggatgactttgacagcgtaggcgctgccagtctctgtgtcagtggcctcgtagcagcgggcgaagccccccttgcccaacaagcggcctt

SEQ ID NO: 140396 - DNA, 464 bp, Homo Sapiens
ttttttacttttctgatttttattacattatattttcaattgtgtggaatggactacataagatacaaattgtatttgtatctattcaaagcaggcactgtgaataaaaggtgcttccaggaattcccggtagaagagggagtgcagaacgggagagccagggcaaagcaggaggagcgcagccctggcaggaacaggtcagcatgcagtttggatcaatagggaaacaccacgtctcttcgtgtgcacaggcttctaaacttcatggggttgttttcagcatcacatgagaccctgagtaaaaggctcacttgagcctggggtatcgtgaacgccgcacacatggttgttattattcacttggcaatgccctggtcttcctgttccctagcactttccgcagtggcatggaaaggagagcataggaagcctctttccaaccggctgggggctccgttgtggcc

SEQ ID NO: 140397 - DNA, 459 bp, Homo Sapiens
gttcaagtgatccttccacttcagcctctcaaaatgttgggattagaggcataagccaccatgccaggcccattcaattctttatatgcgtcttacatatgtctgtagctggaaaatatactctgtagtgacagcaggagctaagggatcaaactccattacctcgtagtaattagggggctggagatcactttttgtcatcgctggatgattgctgggcaaaggtggcagactctggtttgatggtgctgctgcaatggtttgtagactaactggctgtagaaacactgaatttgaatgttccagaaaattatcatatgcgtggcttgaggtgaggttttggctggtcctttgggcaaacgggggtatctctgtattctccaaggctagcaagttcatctgtggatgaagactgggttttaagttgtttgttacatcagaacttggaaggctgaaatc

SEQ ID NO: 140398 - DNA, 457 bp, Homo Sapiens
ggcaataaaacaaatgcttaatttaattcagaataagagataactcttcaataaaatatatcaaattgtacaagcaccctttcaaagggataaaggtataccggagggaggggagagagaagaagactgaaatcgttttgagggagatgagaccaaactttttagggaaacattaaaattgtagcaccattctggggccttatgaacttggtgatcatggtttcatagcgctgtgatttttgagatttttcctcagccatgttttgctatactgtatatatgaatgttgtgctttcaggtatattttccagctacagacatatgtaagacgcatataaagaattgaatgggcctggcatggtggcttatgcctctaatcccaacattttgagaggctgaagtggaaggatcacttgaacctgggaggtcgaagctgcaataagccatgattgcaccc

SEQ ID NO: 140399 - DNA, 825 bp, Homo Sapiens
  misc_feature (123)..(123): n is a, c, g, or t
ttatactaggcgtctagcagcagggcatgctgtgtctcacagttgagttgtagccgcactcatgacttggcttgcaagtgacaccatggcagagcctcacatcagcagctataatgacacctngtagcagcaccgctgtgtaagcagatggtctccagactatgtctcgctgcaacctgacagcctcgtgccacgtagagtggtcctctcctccctcgagcatgcgagccagccagtagagggaggcgttctggtctgagccccgcatggacttgtgcagggcggagatgcagttgtaatgctcctcaacctgcccggtcatataaaatgtgggatcgctgtaggccctccttcacgtcattctctgtgatcagaactctactgggagaataggattgcccactcttcttacagaacatcttcctagagcttaacctagccagcaccgccagctgcagtccgttcaacccagctcgggcgtcaccgtcactgaggtaagccagggtgtctactgctttatcctctatgaacatggcgggctctgagctgctgttgctgctgtggctcagagggtcagtgggacggctagagtctaggacgtggattcccagggagttgatcgctcgcattaaaatagtcaccattgcctctactggaagcttctcaagaacaatcactcgacagcggctcagaagagcagcgttgacctggaaggaagggttttcagtggttgccccaatcagagtgatcgtcccacattccacgtgaggaaggaaagtgtcctgccctcgtgccgaattcggcgcgccgtcgacttcatactct

SEQ ID NO: 140400 - DNA, 991 bp, Homo Sapiens
gggcaatcctattctcccagtagagttctgatcacagggcatcttcctagagcttaacctagccagcaccgccagctgcagtccgttcaacccagctcgggcgtcaccgtcactgaggtaagccagggtgtctactgctttatcctctatgaacatggcgggctctgagctgctgttgctgctgtggctcagagggtcagtgggacggctagagtctaggacgtggattcccagggagttgatcgctcgcattaaaatagtcaccattgcctctactggaagcttctcaagaacaatcactcgacagcggctcagaagagcagcgttgacctggaaggaagggttttcagtggttgccccaatcagagtgatcgtcccacattccacgtgaggaaggaaagtgtcctgctgagatttattgaaccgatgaatctcatcaataaaaaggatggttttccttttgaaaaagctcttttcattttgagcttgttttatgacatctcgcacatcatttgtcttggcatttgttgcagataatgtcacaaaccttatgctatgtttcttgctgttgctggctatgatgtgagccagagtggtcttgccgcagcccggcggcccccacaggataagcgaggggatttcgttggtctccaggagcgagcgcagcagggtatcctggcccacggccttgctctgcccgaagtaatcctgcagcgtgtcaggacgcatcgtgtcggccagcggcttgccctgtagcatctgtcggatctcctcggcagccagcgcccgggggtgcgggcggcccccgccactggccccgaaggcggtggcggcttcggcagcgtccgcgtcccagtgccccgggtcgtcctcgccgtccgcgtccgcgtccccgtcgccatcgccgtcgcccacggcctcctcctcctcctgcgcctccgcctcgtcccagctgcgcggagacgcgctccccgccgcggcggcggccgca

SEQ ID NO: 140401 - DNA, 370 bp, Homo Sapiens
ttttaagagatatcctcattttaattgaaggctacatcaccaactttctacccgagaagtcgtttttcttcgggacccacaatcaaaggctttcctccggcatgagaaaggagtaacattcccgcctggtgagtttttagtgctggagtgactcccagccggcccctaccccgctcaagctcctgctgactgtcccagtgtgggtcctggccaagactggcaccaaggcagtgggatcctttataagtaggcctccagcgccatacaccagaaagcaggagcccacttctgggacactgggagagggtgcaggcagccaccagtacgcaaagcacagtgccctatccttcccggcagggtcacagttcag

SEQ ID NO: 140402 - DNA, 893 bp, Homo Sapiens
tcagtaaacagccttatttatggtgaatgcttggggtccctaggtcattgagccacgaacactcgtggaactgaggtgtggctggggatggggttggaaataactcgttaagcagaaaacagtgtattccacatgcacagaatacagaaggaactgagttggcagcgatcaagacagttcatgggaggaactcagaggaaaatcaatgctttctctgtgagaaagttttgaacacttttccctttaagaaaagtgaaaactgtcgtttaattttaaggaacgtgatcattataaaaacctggactctttcaaattacaaagttttgtttatgaaagcaagagtttgaaatgtccctttaagatagaatgaggaaaaccaggattatattaagccttgtttatcaacagctcataacaatgtgtgtttctgcatgcttttcccttactctgaaataggttttactttgcttaaattagtaattagtaaatattaatgctttattggtttaataatacatgtattaaaagcagtttattttcacagaaaaagcctaattatttggtattgtatgctacaaaagagaaatgccataattcccagtgggggctgtggatactggacccccataaccaggtgccagagatcacgtggtgttcaaagtccaaattataagcatagtgccgaggactctgaggatgacttctgcacatcttccgaaaagggatggaacagcagaatgagtgccatcatggcttggatggttggaggtgctttgggcatgaagaccctctaactgtgaagttagaggcttccaatgttagctctgttttaagtatatgcacaaagtcacagtctcatagctgagctattaaaaataaaatcaacaccaaaa

SEQ ID NO: 140403 - DNA, 805 bp, Homo Sapiens
aatgtacatcattttgtttttcataagcaatcagagaagggggcagtgctgagcatatatattgtacaatacaaaacagtgtaaataacacagcagtaacacacagatacgtaatgctaaaaacagtgctttctggatctttcttttactgggtgaacacttgagccagagatatttaaactctggggttcaatcaacccttcgcaattagacacaattaaatcctctgacattgtgaggggccagatgctacaggaagaatcatcatctaggtcggagctactctctataagcatttcgtcatatgatcaagtgaaaggatccatacaaaaatgacgcccaaacacaagccacatgatttcaaccattgctaatgacagaggtagggaaaagtctgcctgcagccacagcctctgccctcatttttaacatgataatgagcaggttcctgcaatgcagcacagccattttctttttcctcttttcactcatggaaacaaatgcattccagatactcctggagatttgagacattttcaggtgtggtcgagggtcaaagtggggtgttagctttcagattttgctgcttctccctgggcttccccactttgttctgtagaacttcgttgtgcatcttcttcaccttctgtcttgttgatatcaagacctgctaatttcaaggctaattcattgctgttgccacttgcagaagaaaccaagatatcatgtattgcatttcttctacctgttcttgcctgagcaataaatctgcatatgtatttccacatcagtcattgctaccaaa

SEQ ID NO: 140404 - DNA, 599 bp, Homo Sapiens
tttcggttaaaagatctatgatattaaacaaaatgaggcataaattcctagtgtttacagatgtcatacaataaaaagcaaattcacaaattagttgtagatgttaacattaatgtgatgaatgagcgtgtgctgagaccaaacgcctccagaaaaaagaacaggatgcacgtgccccgtgcaattctgtgaggttggcctgcctccaccggctgtggaaggattgcgaatgtctcccattcctctcgctccaaacttgtgcaataccttcccttgtacagcgcaccaagacagcatctggccttctcttgactctaaggcatcatgtatcatttatgaccgtctttattcttttctcagtagccctcgacaagcgagtagtatttcttggctccaagtctcataaacgtgtaaccagactccattggaagacggtaaccccacgcgatacggactgtgcttgtattaattctcttttaagcttactacagaaatatcaatacagtacttgagaattcctgcaggactcagcctcgcttcctcgaggagctctcagcctgcctccgcactcgagacggcagctttctctccctccgccc

SEQ ID NO: 140405 - DNA, 475 bp, Homo Sapiens
tttttttacatttttatgacgtaattttattgtcaccaaaataatatggaagtgtatgtatgtatgtactatttatacccttcctgtcccagcaaaatcttggagcattctactcagaagtagagatataatagtgcttagtatatcatgcagtagagttggggctttggaatcaagtatttctgggttgaaatcgtaacttggtctcttactgtgccattaagtcattactttatctcagcctcagttttcccacctttgttgcatgctattactgaatgtttactgaagctttctctccattctagaaattgcaggtcgtgtggaagtgacgtttcgtgttcttttaatagagatcctgtgtttctggtcccagatactctctgtggctaaagctcaaatccaggaaatgtaccttcttttctagaaacccaaaagaagtatggaaatacattcttgaaaagaaagctaacca

SEQ ID NO: 140406 - DNA, 529 bp, Homo Sapiens
ttttttttaaatttagtttaatgaattaaactcaagaggagaacagaagccgcatacctgtaacagccctgtaatattgttactctgttattttaggctaaagccaagaataaactaaggacgacaacaacaaaaaataacattttgttttgttcagacaagaagaacatggaagggatgcctctgcttgagataaaatggatgactaaacaaaactaattcccttttttttgtcttctctattatgtaaaaataaaccattaaatgtaagggataaaataagctttcaaagagttaactgaaaagataggtgaagaagcttgtaagaaaatatgtcctagctgtctaaagcttaacttcttcttgcctagtaaatttccatctcagcaaggagagtttaccaataaggactctcagctagaatcagcagagggagatgaacactaaaaaactggaggtggacagatggagttccagtttttgccttagtctgaaaccgaggcaagaaacttttcacagatactgaaca

SEQ ID NO: 140407 - DNA, 723 bp, Homo Sapiens
tttttattgttcattgattttaatgagaaagctaagagaggaaataagtagcctttcaaaggtcacacagaagtaagtgacagatccaggattcatatccaagcattctggctctagtgtccatgcttctcaaccattatgacccaatattcaaccaaatcaatactgaaggacacgtgaaatgtatccggtattttactattacaaacaaaaatccaatgaacattcttgaagacatacacaaaaataatggtttccataggaagttacctggaattgaaattttggttcaacctatattaaaatgtaaggcttttgatatagctaatagatttttgaaatgatcagtcttaacgtttgtaggggagcacactcctgcatggggaaaagattcactgtgaagcacagagcacctttatggttggatcatcttgtcattaaagttcaggcgttatctatcctgtaagtggcagaatcaagactgcaatattgcctgcttttctttttaactcatgttttcccttgactacactggtcctcaaagtaaaacccctgtgtcagtgtactattcatggaatactctgcaattataaccaccttctaatacttttaatacccaatcaaaatttattatacatatgtatcatagatactcatctgtaaagctgtgcttcaaaatagtgatctcttcccaacattacaatatatattaatgatgtcgac

SEQ ID NO: 140408 - DNA, 614 bp, Homo Sapiens
ttttagctaacgaataagaaatggtttttaataattggataattaccttaattctccacttcattttgtatgatgcaatgtattttgagttctgcaatgatgttctcagggatggcttctagaagcagaaaagccatgactgcaggggccacctggatagggggatgtagaccagcctctgccctggttagcaggaaagtagctgggaaagcctccttccctctcttggatcttcctccctttttattctggctatagccgattggactgggcagataagctgaggccacagaaaggccatgtctgggctggacataagggatgtcagaggcctccggggtgcctgggggagagtctgcttaatccaggtgcccacttgactagtagaaatcaaatcaaatcaaataagtgtcttctctttcaagttaatgctaagaaatctggcaggtcactgaactcgctaccgccccaaaatgccgagtgatgcatctgtctccatgaggttgctgtatgtttcagaactgggatgcaaagttcagcttcccgtgacacccgattttcagaagtatccttgcaagacattgccataattccaggtgatctgagtccctctt

SEQ ID NO: 140409 - DNA, 423 bp, Homo Sapiens
ttttgcttttatcaactggttttatttcctagaactgaaacattctatggttggttctcagatcaaacttccgaaactgcagtcaacaatttttcatcagagcccaagggagaggggaaggggtgaaagagacaatagatggagaaaggcataatgaccattaggaagagggtgggaggagacacatcttcctctgttatcagtgagctacatactagacctgttgatgggaccaggtgatggtacctgaatggaaaatgacactgtgacgaacagcaaagcctgactacaagtcataaaacttcaaacagaaagggagccttccagtttgtctcagcaatggaacagcaatgggaaagctagggccagcgtggaggcacacctagaggtagttcttaaaaattcttcttggaacttcctttt

SEQ ID NO: 140410 - DNA, 1135 bp, Homo Sapiens
  misc_feature (21)..(21): n is a, c, g, or t
  misc_feature (618)..(618): n is a, c, g, or t
  misc_feature (621)..(621): n is a, c, g, or t
  misc_feature (624)..(624): n is a, c, g, or t
  misc_feature (731)..(756): n is a, c, g, or t
cactctgcaattaaatttgcnggtgtcataatgtcttcagcaccagagattgtatatctgtaaatggtttttatgctttgaatgcaaaaacgttactacatcatcaatattgttcctgtatacgccttcaagtctttctgcaggaaatcccatagcaataatgtttggataaatataggtcaagtctaagtcgaatccatcctcttgatatctccttttgtttctgctaacgatctctttgatgatggctgtcatgtctgggagcctgtggctgaagaaaaaggaggagagagatggcagaagctgctggtggcggggcttcttctgcaggatggaaatggctctggacttggcggtagctgatgcccctcgctctgccgccgcttggctctggaccgcagccgggtaatggctgctgcggcggctgctggatggttgcagcgactgggcctgcttctcctcagcagccagaggcctggcagcggcggcagcggaatggggagaagacgaataatcctccgaacggctgcctccgccggcggcctccggagcccgggccacggggggtgcggcggcggcggacgggaggtttaaaaccggcccgggtccctggatgtnccnccnccgccgccgccgtgttggaggcagtagaaggggagagaccaactctccggcgttcccagccctggaaatggtgacaggcgactcagaccccctccctggagctgcannnnnnnnnnnnnnnnnnnnnnnnnnttctcccccccgctccaggagcgggaggtgccgccgccgccgccgcgcctcagccggctcccgcccgagcccacggcttccaccttccctttcaggagaagccgaggaagaggctgcacggttagaaaagacgaagaggaggcgagaaacgccgccgctgccgccgccgcaggccggccggctccccgagggcgctgcaccccgcggctgctcacaggcgctgagaggggctccggccagcggccgccagccgtctctcatctccctcgcctgagcccggcctcgcctcacagcggctcaactctcaaacttccatcatggtagcagcttgcgagagcctcgtccgatttacacgagctagtacttatggtggggtggt

SEQ ID NO: 140411 - DNA, 656 bp, Homo Sapiens
  misc_feature (26)..(26): n is a, c, g, or t
  misc_feature (47)..(47): n is a, c, g, or t
  misc_feature (61)..(61): n is a, c, g, or t
  misc_feature (81)..(81): n is a, c, g, or t
  misc_feature (103)..(103): n is a, c, g, or t
  misc_feature (128)..(128): n is a, c, g, or t
cagaacaagtgtcttggctcacagcncagaggcacaaagaaaacagnaagttttagggggntgaatcctgccttcccctgncaaacaccattctactttccgnctctatgaatttgactactcgaagnacctcatgggaaatgttggtgccaaatgaacttttctggttcttctgaatatgccactgttgctggagaaatgtcactgctagagaacagaagactattattccaaagggtatttgagactgactgaatcaggtctggaacattattgaaatgagacccacaaaagaagagatactgagtgtaactggatcttggttcatgctgagcttaaaatttgatcttctgaatatcagcagaaagactctttctggtgaatacagatcttctgagcaattatcgactgactttgtcattagactgccctttcagaagttgtcagtgacatgaatctttgctcccttcttcatggaatatttctggtctaatagcccctatatttcaaaagatggatataaacatcagatgaatatcacaggaaagctggattgctctgcagtgagtgaaacgtggaaaggcctttccccaccaagcagtaggccaaattgtcaccgtaagatgtatttgaaataaaatggttcatagatcaaa

SEQ ID NO: 140412 - DNA, 680 bp, Homo Sapiens
tgggtagtgtatattttgcaggtttaagacaactcaggacaataaaaacaatggactttacatgtgtatatatatagctctcttaggcaccataatcagtatgagccaacaatatttaaacttgattcaggccacattcagacatttgctcttatatacaaatatttaaattaaatacaatctgaaatgtgttctgttacatacaaaaaaggaaaaactatacaacgcagagcagtgtgtgtgttttaaataattacatttacatgtaagctaaatggaaccagcaatggtgctcaagtttttatcatcccttccagaaaatctttttctaccatctcttctattttttgcctggctttgctggaacatggtttgtggttctccagtttcatgtccttattagggaaggcatttgagtagaggataggactccctgagtgtcctccacatcggcttgtgactttgctgttgaagacttgactgagcacattgaagaacggcaggagctgctccatactgcgcacggtgcagatggtgagcagcaagtgccctggctcccaacccaatgttctccctgagttgtcttcctctggatttttctgcagaaaacaaaaagtgaactggtattaatacaacagacaatgtggtatgttagaaaaattaaaaatatataaactttg

SEQ ID NO: 140413 - DNA, 1857 bp, Homo Sapiens
cctgaaaacgcccatgtgatttctaggctgaaaatagggtaggatttaacggagtaacctagtccctttctgtctctgatttctgatcagctgatggagctgctagtaagaggggccgatcatgctcccagacgagtcctttggcttcttgctctccatcccaagcctgactccttcagcagcagccccctccttctgtgtccatctgatgcaggcaagcaggagcagtaagagggcatcccatgttccagttcaccttctatggggtgactaggaggttcccggtaactagggcagcccaggcccagcaggttgcaaaagcagctgcaagcttcagaaacccacttcctccaacaccagggaggtggcagagagcccatccaaaagcccactgggagaggcataagattctgtgccaggcccccaggtcccctctgtgtcaggtaggctctgctattggcctctgaagtaaaggcaaacacaaacgggcagggcagggtggcaggaataaaaaactctggacagaaacccttttaataaaggaaattccacccctcccaatccttccatggaagggtgagaccttaatgtgatgtaagaggaaggtcttctctggctttcagggaaacagctgcagctgaaacttaggggcccattccagggcacttttcaccacagccagtgcagccgctccaagtgccactgtcagccccatcactgccaatttcacaaagcggttggtccttggcttggtcaggacatcttttgttcgatcttcaggccgcagaagtccccgaaaccgctgccgcagcaccatatcaggcctctgctgggctgatgccagctcaaagtctttgaaagtagaggctgccgtcctctcagcttgctgttgggcagcggcctcccgagcaagttcggatgggggaaactgaacaaaaaggtctcctgctctgctgatcagtgtctcatagggcaagtcctgagggatctgggacaacaggtggtggaccgaggccatgtcacagtcacagtccaggacttcctgctcgcgatacaacacaatcacggctgcaaagtaaatcggcatcagtgggtggcaggccaggaagaagtcatataaccgcacgacgtgcctgaagtcagacaggacatgcccaaaccaggtgatgagccagctgagggcaaagatggtccctacctcagcactctgcatgaagtcatggagctctggattcacctggtcaatgatgggcatcagatagtttaatatatgcttggtgttgtccattgttggatccataaaatccctgaggtggtgggtagataatttttctaccagggatgttgccagcctctcgcctaccaccagcagaaatgtgaccacaatgtcatggtagccctggtagtagtgcagctgagggttgcgctccaagatgaggaggatgatgtcaatcagttcttcctggagccgttctctctgttcctctggcatgccaggagggaaccgccgcaatgaccgccggacgtccagcaacacttgttggtagtccttgctcatctgccgtaggttcttccctgatataggaggtgggtcattggcattgacattgaggagcttgggccacacttttcgtctgatctcatcagtcaggagccctccttcagtgatagccatgcgtctaagggcagccacatcagtgggatcactgttcagagcctggtgtatctctgccactttctttttccttttggcgttaaagtctgccttctccgcgccgccgtcccagtggccggaggtgggtccgtcgccctgcgccctcgtgccgaattcgccacccaggcctcgctaccttggac

SEQ ID NO: 140414 - DNA, 820 bp, Homo Sapiens
tttttgcccagcaaagacaaatatatttgtccctgttgctacaataggaagttaacaatctggcaagatatctgaacacaagcaaatgaaaacagttcacctaacacccatgcaaattataaatttcctcccatatacaaaatgatgagaaataacagcaaaaatgtatactttcttatttttgaacttttaaagttctagtttggtctttgaatcaaaacaaagtaaaagatgtttataaaagccatttccttttctttccccactatgctcatttgacttgctcttccccctatagggtaccctgagtcattcagagaaggagaattaatagcactgagttggtgatgaagctcctgttaggacatatggcttcacaaaaagaaatacttccagataagtcagagagacagttggacgtcttgagcaaatcttgaaagagatagggaagaaagcagaagttgttgggtggtgcttgtaagaaaaaggctcatacgatgaggaccagcttcttgtggatctccaggtctctgaccacagcactgaattcctcaaaggatatcttcccatcgccatccttgtccaggatgatgatggttttgtcgaccagctgctggagctgccagtccgtcaggttgttgcccaccatcatcttcagcacctggaagagctccccgttggaaatgtagccatctttatccatgtcgtaaatgctgaacgcaaacctcaacttctgcttctcgtcggccttgacgctgaacttggaggtccccaggatgaatttcttgaagtccacttcttcatcacccgtcggtgcgaa

SEQ ID NO: 140415 - DNA, 481 bp, Homo Sapiens
ttttacaatttttagtactttattctaatatcagaggaccagaatctaatctatagttgtggatacatctgtggaaatgctttcagagactatctgctcatgctcaggaatcgttgggagctgggagtcctggtgggcatgttcatgcttccagttacttcagtaactacctgtgattaaggagctgacttgcaacaccaggttactggatttctccaggatacactggctcccagggtctaggctgctggcacctggcccaagatggtccctacagctctcctggtgctgtgagatggccgtttgagtctgagggctgaggggtaggaaaggcttggtgagcttctggcggaagtacctctgaatctgatcaagctcactcagattcttcctgagagaagtcagaatggaggtttgggaggacaaaggtgatgtggtcagtttgtcatcacatggcaagggtgcctctccctgaagatgc

SEQ ID NO: 140416 - DNA, 685 bp, Homo Sapiens
ttttcaccatttttagccctttatcctaataccaaaggcccagaatctaatctatagtgggggatccatctggggaaatgctttcaaagactatctgctcatgctcaggaatcgttgggagctgggagtcctggtgggcatgttcatgcttccagttacttcagtaactacctgtgattaaggagctgacttgcaacaccaggttactggatttctccaggatacactggctcccagggtctaggctgctggcacctggcccaagatggtccctacagctctcctggtgctgtgagatggccgtttgagtctgagggctgaggggtaggaaaggcttggtgagcttctggcggaagtacctctgaatctgatcaagctcactcagattcttcctgagagaagtcagaatggaggtttgggaggacaaaggtgatgtggtcagtttgtcatcacatggcaagggtgcctctccctgaagatgcagggattcatgaaaccggcgaatgttctgcacatgctcttcatggcgtgatgcttggcttcttgtggtatcacttctcccaggagaggagaaatcaagctcctttgaggaggcatgagcaagttggtctagggtctgccttgccatgtggctggagaatgcagcatacgtatcagaggcagggaaggaaaagggactgtatat

SEQ ID NO: 140417 - DNA, 493 bp, Homo Sapiens
gtcctacagcatttagtactttattgaaggatcaggtggatttacctttccttttccacctgctcttttttccctccttgttgctgccaccatcactgctgctgctgctgttctcagaactctgggaatctgactgaccatcactgctttcttctgaaccttctgacagctctttcaccccatccggcacatctttcttcaaagtatatactcccattctacctggaaccttatagaagatgccctcttcacctctggagtttgtgtgaagcattgcattcaggcatgcaagaggagaagtcccacttctgatttcttttagtccttctctctggataacttgaagaatttctttatgactcatgggtgtattggggtatttttctaagaccgtcttggcggcctccgcccaggtcctgcccttcttcctacgtcccttttccctcatgtcgggtcttgaactgactgggaggctcccgtgtccgggctccgg

SEQ ID NO: 140418 - DNA, 498 bp, Homo Sapiens
  misc_feature (157)..(213): n is a, c, g, or t
atagtgcatgtagtttgatttatgtgttttcatctggaaaaccaagtgtcccagcagcatgactgaacatcactcacttcccctacttgatctacaaggccaacgacgagagcccagaccaggattccaaacacactgcacgagaatattgtggatnnnnnnnnnnnnnnnnnnnnnnnnnnnnnnnnnnnnnnnnnnnnnnnnnnnnnnnnntacagtgccacgtaacagcactgtacttttctcccataaacagttacctgccatgtatctacatgattcagaacattttgaacagttaattctgacacttgaataatcccatcaaaaaccgtacaatcactttgatgttttaacgacaacatagcatcactttacgacagaatcatctggaaaaacagaacaacgaatacatacatcttaaaaaatgctggggtgggccaggcacagtcacgcctgtaatcccagcactttgggaggctgaggcgggtggatcac

SEQ ID NO: 140419 - DNA, 456 bp, Homo Sapiens
ttttttttagctaagaaagaactttattatttctaataaatgcatctgggggtggggtctggagagggcacacggccgtcccctgccaatgcgttgaggcccacactccttgggagtggacagggaaagccccatgttccccggagcctgtcgccgtggcctgcagccctggacgcctctcacggaaccgcaggtcttcctccccggctttctggtcgcgtggccaccacagccccatcaatacagccagagcccggggccaggtgtgagtctgcccgcagctctccgtctccgccagccccgactccttggagcaggttctgaaggccttcctgggtgttagcatccgggtggggagcggctttggcggtggggaccggggcggccgggagcagcagcagcagcagcaacagcgggggccacatggcctgcgggcagggcggcggtcaccggtct

SEQ ID NO: 140420 - DNA, 478 bp, Homo Sapiens
  misc_feature (187)..(206): n is a, c, g, or t
tttttacggtaggtaataagatttactgaaaacgtctcggccacattcagtactggtttggtggatacatcagaaggaggttgcataacattaggcaggtggaggggctgagaggaagagatgtgggcacctgtgtgccagtgtgtccgtgctgggggacgcctgtccaggtggtgagtggaacgannnnnnnnnnnnnnnnnnnncgcgtgttaacaagaaaaacgaaccagaaaaggaaatgcattttatcccactgcacattgcaaaagtctcacgccaaaaaagctagactttcctctatgtatggcatcaaaagggagtaaaaaatgattggatcacccagattataaataaggttatttgtttctcaaaaatccttattaaaacattaaatatcagctcttttgggggagaaatacattcatttcagggagacctcggaagagtgaccatccttttgctctaccccaaccag

SEQ ID NO: 140421 - DNA, 413 bp, Homo Sapiens
gaaggtgctgtgaagttttggaaagaataaagacctgggttcagaatatgctgggtcagtaatttgctggctgtgtggttgtagtctctccagatggagtgccaaggctgcaaaggctgcgccgccccatcccgggggtcaggcaggctcacagatggacctttggaagtaatccagatgcagagcaacactgagcccatccatccagagccaagtgtcagtgtctgaatcaatgttcagcaagaactctttaataagcttaatatctagagtcctgtacttcctggctgaaggagctctggcaagttacttaccctccctgattctcattttcctcatctgtgaaatgggaataatcccaaaagctacctcacatgtgtgtgatgattaaatgagttttaccacgtgtaaaa

SEQ ID NO: 140422 - DNA, 570 bp, Homo Sapiens
ttttgctttataatttctaagcatttaggcagaaaagaaagaggcattaaaaatacaactcagaaatatttaaattttgatgaaataagagtcttgttagttgcagtctcttttgaatactttccttgggagaaaatatgctgtgaaacagtgatctgccactacacagtggttggggacattaggtcatttctagaaagcaattatatacacctaatggcttattccctataaaatgaactattatggtgtcagaaaaggctagatactttatcatctgaaagacaggttgctcagatgtatacaaatgaatttattctcttgacctctagttcagatgtcagaaatattttgtactaaaacagagataggttcctatattggaatatgttcaatatttactacctttctcttctattctctatccataaaactctgcctgattaaaatattttaaagtgtactttttacctgatactgttaatagcattgatgatcctggattttaaagatggctgctttagtctactttgattttgggaaagccattttaaacaaacaaatatgtgg

SEQ ID NO: 140423 - DNA, 1050 bp, Homo Sapiens
  misc_feature (52)..(52): n is a, c, g, or t
  misc_feature (108)..(108): n is a, c, g, or t
gggagatgcggcttcaaaagagaaatatgcccgaccccaggttctcttgcanagtgagaagttgacacaggggcgcggcgcggccgtaatattgtcagatatgccgangtctcccccctggagacctccctggttggatacggattcccagataatggaccctcccagaaattccaatcgtgggatttggttccagaacccgtccgggtttccccccgggggcgtgtttttaatgggggaggaattccaagccactaagtccatgggcccgggatgtttcctaggagaaccaggctatggcccatgttccacttaccctaggggggcccgcggcgccaaacgaagtggtctagaaagctttctcgaggggccgaggccggccgacatgttttaagggtattgggagtgggggaggcgcccaaaaacattattctttgtatgtgtttctatcacaatgtaagggaggttaattccagttctgaaatctgacacacagttgcaacacatgatttttaaatgagagttttcttcctttatggtaaaaaatccagtggacttctgaacaaatacttttgttcctctgtcaaataccattcttctgacatgtaatatgggtgtttttgtaggctctttatctgcaaaatttcctttagacaactggaaaacaaggacttccccattataacacaagagcctttcttgttcgttagatgacattgcttgtttgctagtcattccacaatatcaagtctttgtgctgatctaattttcaaatgcaaattgattccagttgatgtttctaaactggtttgttgttaggcaattaacagaaagatctgggacaataggcatcacaaagtagtttcagcttcatcagtaaagaagatagggtaggtaaatcaaaggtctggcttgtacttatgaaactcaacgcagcggcaacataccggaggccccacgtcgatacggtatccatctgctccaaacctcccgccagcgccccggccgtaatggccgaattcccgggcatatgtccggtaccgtcgactg

SEQ ID NO: 140424 - DNA, 559 bp, Homo Sapiens
tacttttgttcctctgtcaaataccattcttctgacatgtaatatgggtgtttttgtaggctctttatctgcaaaatttcctttagacaactggaaaacaaggacttccccattataacacaagagcctttcttgttcgttagatgacattgcttgtttgctagtcattccacaatatcaagtctttgtgctgatctaattttcaaatgcaaattgattccagttgatgtttctaaactggtttgttgttaggcaattaacagaaagatctgggacaataggcatcacaaagtagtttcagcttcatcagtaaagaagatagggtaggtaaatcaaaggtgtggcttgtacttatgaaactatggtttagagaaaataaacatattagttatattccatcaaaatgtatgaataataatgtatttaccaaaggtcccatgtcaggtttcctagatttctagaaaggaaaagcatgaaaattacacattctgaggtaaagctctaagaattcatcatcttttactacctattcaaagtttttcagatttcttaatatcaa

SEQ ID NO: 140425 - DNA, 524 bp, Homo Sapiens
tttgcagttcctcgtatttattcacaatcccacgaagtcaatggctcttcggtgcactgcaccggagactttcagctcagccgagctgctgttgagggtgataaattataggcgaaagcccggggacatgaaggcaagtcgctgggtttcagactgcctgattgcaaagaggtgacagtgtccttgccccgccgggcgacctaatgcgtacaagaccggggctggcctggtaagtggtgactcttagcctgttctctttgcttcttcctcctccccctgggagaggccgctgaggatccggaagcaggaatgtctgctgtgggtgagcctctgttctcttttgaacaagagaggctaggccctctgagcagccgcactttctcaatggcaggtaagtgcctcctcttggcgttccctgcccctcgcatgttctgcctccgaggtacttgatgttcctggtgaaatgccattttccccaagttgagagtgacctttcattccacagcctcatttccattccagcc

SEQ ID NO: 140426 - DNA, 492 bp, Homo Sapiens
tattttttaatgtgagtttactttcaatgtaaacaacctttccaaagcaacaccaaacacccaatacattgggaataaacaatgcactgcaaattgcatccccaataatctatcatatgtacatctcctatggataatgcaacatagcaataatcctttggtttaattgggcttgtgagcagtagcatatgcctcaaaatggtcccattgacattgttttgcacccaaggaatcaaattaatgcttactagcatactaagcactgtgtggtcctctctcccttgaaagtgcacatgtgttgctattagcattaacaggagtctggcctgggctttgaggagtgtgaacaccccccctggggtgcagtagagaggccaggaaatattctgctgatttcagtgggactgtgtgttctttgaaaagccctgtaatggttccagaggatatctctccaggtctggctgcaatgttaatagatgtgtctagtaataa

SEQ ID NO: 140427 - DNA, 120 bp, Homo Sapiens
tgtactgtgaccagctttctcttagtaacaattaaaaattaagtaggaaagacagaataatgtaagaaaaagccaagaatctcaaatattaacattttaccatttatacccggaaaaaaa

SEQ ID NO: 140428 - DNA, 491 bp, Homo Sapiens
ttttttgtgggtctatgctcgtatatattggatgtatttctggaagggtaattggatacattgtagattcttccagaagttcacaattttcttaatcggagccattgagagaaggcaagggaaggaagcatgttctttttgcttgtgtcagtaactcttcctctagctggagttttcatcaccttcaggcagttattggtttgggctttatgctatccactacagctgaaataactgctccagcagccttcgctccttccatcagggcgtgctctaccattctgatcactaatgaaatgacaaaccccaagaaagctctgtaagaagccatatcagagcaaatggggtcacacctgctggctccggggtacgccatatctgaggccattgacaaagtgctcacagttcccttcaatcaggctgtactgcacgatcttgttgaccatctttgttgtacgctggatgatcttgtccaccggcaagggcaggta

SEQ ID NO: 140429 - DNA, 651 bp, Homo Sapiens
ccttcccatcctgagagtctgtgggtctatgctcgtatatattggatgtatttctggaagggtaattggatacattgtagattcttccagaagttcacaattttcttaatcggagccattgagagaaggcaagggaaggaagcatgttctttttgcttgtgtcagtaactcttcctctagctggagttttcatcaccttcaggcagttattggtttgggctttatgctatccactacagctgaaataactgctccagcagccttcgctccttccatcagggcgtgctctacctgctggctccggggtacgccatatctgaggccattgacaaagtgctcacagttcccttcaatcaggctgtactgcacgatcttgttgaccatcttttttgtacgctggatgatcttgtccaccggcaagggcaggtacgtcccatctagcttgttattgaccttccaggagcagccatgcagcacatcctccagacgactgtatttcaccacggcccgattgctaaagatggaagtaatgctgcccacctcaaactcctcacttgggggagccagatggaccacgcaatcatcttctacatagatggcccagtgctcatagcccattcgaaaaatctcaatcaggtcttcaggtctggg

SEQ ID NO: 140430 - DNA, 342 bp, Homo Sapiens
  misc_feature (20)..(20): n is a, c, g, or t
  misc_feature (223)..(223): n is a, c, g, or t
  misc_feature (281)..(281): n is a, c, g, or t
agatgattcccaggtactcnaaagctacatcatagcagaaacggtattgctccggggcttccaccatgtttggcttgctgttcctcagtgtctttactgcatggaaaacatcgacaacattttgccggtttaccattttaacaacgatgcctatagcacagaacatgccacttcgcccgccaccatttaggcagtggataatcgtccggccttccccttcctngcattcctcctgccacttttccacctgaagtatcagtttcaagaatgaccttttgganccaggcacttctcgatgagaagcccatcctaggtactgaaactgtgcaccatcagataacc

SEQ ID NO: 140431 - DNA, 547 bp, Homo Sapiens
ttttgtttccttgttctgtttttatttaactccaaatagctaataacataaaaacattttaaaaaaatctccaatacccaactattacttttggttgacaacatttgattatttagttcttgcttgtttcccacatgtagtacagaatctatcataatattttaaaagtttgcagcaggcttaaaacctgaatatttagatcctaatcaaaaaccatgatgtagttattagttttgattttaaataccttgctcccacagaacttactaaaacgaataaccataaataggctagctattaattagatctcaatgaaatgcccacatacagcacatacatataggtagtatatatgcttttatcctttactactcaaaggatgatgtacagtggagttatatcataaacacatttaacttacattaactcaacaaatgaggtcagtgaaaaggaagccgtaaggaaaataacatgaaatcctgtggcgatcccacctaaaatgaatgcacacccttgagtaaacccaggtgggtgctgtccatccgct

SEQ ID NO: 140432 - DNA, 1134 bp, Homo Sapiens
tttcatgttgatggtatttctaatatttggaaaatgttataaaaaagaagtataaatactattcagattctgaaaaccatggcagacgcaaaattaaataaggagtaacagtaataaatgaattaaaaattagacaaaagcatattaaatgacaaaacagcaaagcaaaaatagaattgtcattaatattaaatagtatactgttgtaaaatatatgaaagtattaaaagtattataattaaaaatgattcttatcctaaatatgaaaataaatatcaaataatatgaaacataacatctaattgtttgataagaaaaaataacacaaagcagagaaaataaaagacacctcactattcccaatgtggttattatttatggaatggataaaacatgttgtagaaaaggtcattacagttaggttagcacataaaaaaccaacatgccacatctacctaaataattttgtagaacagctgaaaaagcaaatttcatcaaatttagacagcttatagtggaataactgagtatggtgaggtattaactaacactaagtttcacaacgggcagcttctagctggttcgttgaagctggatctcggccacgcaaggatcattggacaagaaatcagttgagctggaatagagctgcccaattgtcttaataattaatgctccacactgttttaattggctcaggctgcatcacaggcgcaggcatagtgatggcacttggagcataaacctggtgatatgttgcttgaactccatgatcagaataaggctctggaactgaagtttccatcagagacagtggaggaggaacacatccaccatcctgtgcaatttccactggttgataaataacctcagaaggttgcaggtataagaatggagcagaagaggcagaaggctgaggaacactccactgccactgtcctggtaaatactgtgtggtggcctggtagtgatatgcaggttgctgataaatgggctgagctaccatcacaggggagctacatacagaacgtgaaggccaaggcggtgggaccgaagttacctctggagtatgaaaataagcaacaccattatggtaagtataaggatatccagttgaagttgttagatacattg

SEQ ID NO: 140433 - DNA, 728 bp, Homo Sapiens
tttattgtattgcacatagttgagtttagacaattaatagctgctaccacaacatgtaattttttaaactatgcctttcaagtttcagcacatttgaatttcatttactatcctttttatggctaataataccatggcttgaagtaaaatatttgcaaatagttcaacatagtagtgagtaagggtattttaactgtattcacattcactccctttacagatattttgtgagttcaagtgaagggaaaggtaacgcgaattatgtattgtagattaaatgcgaagttaagtgatcaccattaatatgtaaaattatcaatggttttatggtttacttaaaataataaatacctgaatatgtattctgcatgctatagatgagtttctccagtatttttacagccagcagacacttgagtcctgtcttctaatgcttatatgctagaacagaaaggaattaaggtgtaagtctatttcatgtgatgcaagtgaagtcaccaaataaaatcataaaactgccttttgctaaggcaataaaactactaataacaggcctgttctacatagctaagaggtttaataaaaaatcgaattccttgtttaaaattacatgtctttcatcctgtcatccaggatactgtttaaagagtctctgttatgcactgctttgtttcttgctcagtggttctgtataggttttcttatacaataaaatacaatgaactttt

SEQ ID NO: 140434 - DNA, 536 bp, Homo Sapiens
ttttttacggttgaatggcattttgttttttcaaactggatccatcagctctgcctgactcttttccctctgcaccggtttctagctgacattcggtacttcttcctggcattacattgtttacggtagagttcaagttcctcgaagtacttagctctcaggagagccactctttgctcataagggtgcttctccaggtctgtcgctgttgaccacatcttccctgtggccttggccacctgcaccaccgaccagttcgggttctccctcttcagctgagcatagtggtcttggcagaagagtaggaaggatgatggaggccgtctgggtgcctggggatcccgctttctccgtttcttcctcttgccaacataattcatcatttcttcctggtatcgggctttgtcgagtttggccagggcttcatatttggccttttcatgctttgagatggatctccatttttccgaacactttctagagaactctttaaagccaacgtaggtatttggctgctgctccttgaatttgtttct

SEQ ID NO: 140435 - DNA, 760 bp, Homo Sapiens
gggacacagaggaaatttcaccataagtagggcaccttctagattgctcctcgggtgcagagacagaaatctctgctatccagatcagcagggtccagcgaaggacattatggttgtataaacatgggggaaaaagaccagctaaggcccaaggtgaatgtgtcttcttacatccattttatgctgaatttcagaaacaaattcaaggagcaacagccaaatacctaccttggctttaaagaattctctagaaagtgttcagaaaaatggagatccatctcaaagcacgaaaaggcaaagtatgaagccctagcagagctcgataaagcccggtaccagcaagaaatgatgaattacataggcaagagaagaaagagaagaaagagggacccaaaggcaccgcggaagcccccatcctccttcctgctcttctcccgggaccactatgctatgctgaagcaagagaaccccgactggaccgtgggtgcaggtggccaaggctgctggggaaaatgtggtccccaactgacgaagcagaaaaaaagccctatgaacagaaggctgcacttatgcgggcaaagtattttcgaggaccaggaggcctaccgcaaccaatgtcaagggcgggaaggggaaattccttgggaaccgcccaagaccaattttgaaaccattaaaacttcctttccattgggataagaaaaaaaccgttgcccggaccgtatccccgcccccccgccttgcaattgccattttcact

SEQ ID NO: 140436 - DNA, 568 bp, Homo Sapiens
tttaaagcaaagttaaacttcatgtaactatttttatttcagtggattccaaagcatgagttgggctgcttttgaatagtgggagacgggagtttaccccgatcacagaaaccataccaactgaaagacaaatcagcatcttgctggacgacccctcacagagctcctagatccttgaagtgtgaacttcagcagctgagaggtaacaattgtacacaaatcacactatcatgctccaacgaatgatgtggcccttatgaaacaagatgttagaatgaattctttatagtctcagcgcaaaaaagattcaagtactgtttaaggtttttgtttggtactactttcttctcttcaaacagtatttcctgaggttaactttcttggaagaagtggaattaatggagttctcacattcagcccttcaatttatcatcgctgaattcttgagttatgctcaaatgagtaatacaatttgtgtttagaaaacacaaagtggaaaatttagagacatttagattatgtttctatgttcatttcaaatgccttgggagcatttacttcttaaaca

SEQ ID NO: 140437 - DNA, 406 bp, Homo Sapiens
ggaaaacaaaagaaccagccattttattccaagacctatgttctggggcagcaggaataaataaggaagggaggggacgggggcagggcaggtaggttctacgtcttgcagcacatcccacactttgatcgatgacagcagccgcagcagaaaatgcagatggggaagtgggtgtctcgcctccttcgcctctggaacatgggcatccagctggccctggctccagctctgtcctggggttgcagctctgcaagttgtcccgtctgttgtgggaaaacagagccactggtcaggctggcgaggaggaggaggagcaggaggcaagcggcccagatctgggagctcagtgccatcgtgccgtctgtctggctgtcccactgctgggtcttgagcttgctctggtccc

SEQ ID NO: 140438 - DNA, 383 bp, Homo Sapiens
agaaaaccaacgttttattttggatagctgaaaacgtcccagtccaacccagtgtagggtgcagctgtctttatgaagcatgggtgtccatggaggtgcccagttgcccctcggatccagtgtgggtggccttgtttctgaggccctaaatctaagacgctgctgattttagggtgcactgttattatcagaaatggagaaacgctgccaattaaacgttaagttcagttcttattttatactcattaaaagagcgattttataattattgatgctggttgatggatacatgcctttcattatgttacgctcttttgtgtttgaaaagttttatttaaaaattatataaaagcagttcttttgggtatagatttgggtataca

SEQ ID NO: 140439 - DNA, 401 bp, Homo Sapiens
  misc_feature (306)..(306): n is a, c, g, or t
ttttaagtattttattatttattttacattcaaagggtttgatgatgtatgaaagaaacttttggagaatacagcaaattcccataggtccctctcatgcacagtgttgccaggacatagtgtctttatgtctcagcatcagaagataattctttggacaggcatttcagaactgtttttcttatttgtcagtaatggtcctgacttctggttttttaggtactggtctccttaactctttaggcaacaagttgttttcattatgccattttttcagacattgtggctcatgaatgctaatagatntttgttccatattcacgaccacaaatgtagcaaacaactgctggtggacgccgtatcattgttggcttagtgttgtggtctgtcgatgtgagagc

SEQ ID NO: 140440 - DNA, 433 bp, Homo Sapiens
ttttagagagaaaagggctttacttggcggctttgggtttacaagatcgttggtgaacaatcagtctgtctggcaggaaggtacgcccacaaacattacagggaaccaactggctgtgggcacttgtccaagcagcttcatttaaagcatcaagatcatagaagcctttggcagtaatggtcctgacttctggttttttaggtactggtctccttaactctttaggcaacaagttgttttcattatgccattttttcagacattgtggctcatgaatgctaatagattttgttccatattcacgaccacaaatgtagcaaacaactgctggtggacgccgtatcattgttggcttaatgttgtggtctgtcgatgtgagagccatgggatcataaaatgctgccctgatatgcaggcatggttgcctcgtgcc

SEQ ID NO: 140441 - DNA, 629 bp, Homo Sapiens
aggaggcttattcttagagtactttagtttcttatgtgatccttccaacagggctgagtttgtgttaaaagaaggccagagtggccccagttagattcatttccagagaacagaaaagtggcttcagaggaaaggaagaggaggaaaacaaatttgttgagcaccttctctgtgtcaagcactagttacgtttacataattctcttaacagtcctatgatttagctatcttacaattgaggaaactgacagagcttagggtacacagctggtaactgctagggcctcagtttaaatttgtgtccagattccatgttctttccactgaactgtactccctctattactgaaaatacgtcttgtttgggatattagttcccaaacaccaatttgagaaacctctccctggtccacaggaaaatgagagaaattagagcaatgtgattgttttttcataaatctaactgtactcattttaaaggatcatggagattattgctgttttagatgtttaaaatactgtctttccacacttgtaaaaaatgtagagtcagtttttttaaaatgacttttaaaagcctaatcaggcaaaacaggttgagaacttgttattgagctgtcttaattgat

SEQ ID NO: 140442 - DNA, 656 bp, Homo Sapiens
aggagtttaggagagagaggtgactccaaggtgacatcccgagaaacctggcaagcagttggaagttcaacacagttggagaacgagctactcagaaaaggatctaccgtgcatgaagaaacagattaacataattcaaattatgagcagctatatttgtagctctgctaagggaatgtagacatgtctacatatgaatatagccctcacctgtatagacactaaaatgtaattcaggtatttcatttcattctctcatctcctcacttcaattttaggtgagaataccaattcaattctccatacatcaaatttccttctcctgaaaaatattataggatttgtggacagaattacttttatgtaaagtcttcatgataactgaattggactacgttgtgtttgcacccatataaatctaaacaagcctgagagcagctttatctctaactttctgtctgactttctcctgatggcagcatgacggggctggtcattgatttccgggttctgtgtgtggtatggagggaaaacatcaaaaagagggcagagcacattccctcccagatttttccccaataaatgatcaagtaacttttcctgatgatatgaagacagaggataaaataaagattgattgtttttatactgttaaa

SEQ ID NO: 140443 - DNA, 606 bp, Homo Sapiens
  misc_feature (76)..(76): n is a, c, g, or t
gtttctgttgtggttgtgtggatgtttatgtagtgtattgatgttgtattggtttgtatttggttttgttgttttncccaggtttaaaaaattttccagttttattgttttccgttacatgttcactccctgttccttctcgccgcctggtctggtgggggcataggagagggagggaggactgaaggtcatacatttctgataatgtcgctttctaaagggctgtgacatttttgtacatcttttccatcttttagtagcaagtggttgctgcagaccagaagtgaaccaaataaagactcctgctctgtgcagctctcagactcctgctctgtgcagctctcacaaagatcacagctgcttttgtacattccagtaactgcatgacacaaaacggtacctgtgagcaggaaacacattcacaccatgagacatgcacagaggcaggtgtccctgagcgaagttgtgcagagatctaggcctaggggcagtcagctcctgccgcaacacaacctagaaaaccaaggcgagaacggccccttgccttccagcagcgagggcagagggcaaagccacttccctgtgaattccaggaggattcaacca

SEQ ID NO: 140444 - DNA, 487 bp, Homo Sapiens
ttttgacttttgacattatttattaggttcaaaaatgcttcacaaaagcctaacaatggttctgtggaaaccagtacatctgaggccctttctgttgttctgagcaggcattgatttgaagatgggcagcactcgccgaacaattccctcgcagcggtcaatgtaagtgagcattcaccaccggcctagaaagggcctgtgaacaaaccgtatggaaacgccgggttgggcgggggggtgctgaggagcaaacctttattaacctcttggaggggaaatgggtggaagcaccggccagcagaggaaggggcgctcctgccagattgccatggagggaggtgtccgcctgaggcctcctgtcccgtggggtatgaggatgcttggggagcatctccggcgccatggcaaccgcgccttttccgacgggatttccggacgcgcccaggagtctgctttggatgtcgtcggggtgtgcctgagcgcctgc

SEQ ID NO: 140445 - DNA, 521 bp, Homo Sapiens
tcctatcatcttggtagaaggggcgtggtcattgtgccgcgccaggtcgtccgcgtcgatgagcaggtcgtggtccgtgtccagctcccagaacttgtagtagatgacgtagaaatgctcgtacgagaagaattcggtcagctggttgatgtccgcctcctcctccagcagcgccacattctgcaggaaggagctcctccgcagctcggcgcaggtgatcctgccggaccaggaccggttcacggcgtagaagatccgctggatgacctgcgggggcgctgtcagtgcggtgggtgcgcagagacccccaggagcctcgccccgcacggagaccgggagccgggagaggggcgcgcccttggtctcagccgcacggggccgccagggcacaggcgggggcagagggaagggccctgcgggaggcgccgccccaggccgcggaaagcggggagggtctggccggggacgccccggagctacacgggcccaggacaggtgggaagggggtgcggccaccccgg

SEQ ID NO: 140446 - DNA, 662 bp, Homo Sapiens
agtgcgcctggcccttacaatctttaaactgtagaatgaatcaaacgatgatatagagaacctgaaaatgaagaacagaaaaaatgcctataattccactgcccccaaaacagtattattttgtggatttcctttttttactatatgtatattttacataattatacttacagtccacttataaaacactgcttaacgttatttcttaactgctactttgtaatttccatagccaccattttttatctccacactatatggttgtgccacaataatgctatgtctgtgttcatttaaagtgagagcaggccctaactacatcaggcactctcatgctcatttgctctctggagcttcctccccttttctgtctgcttagcccaactggtctactcttcattcctcagggcacagctcaagcatcagctccttagggaagactttcttgtcttacatcttctcccttcccagtccaaagttagaggcctctcttccatgccctccttgctctctgttacctctctgtgcttgtgtatcacaccactgagctacgcatttcatacagtagtgatgtgtcttttacctctgtgctcctcattagcaaaatgcctggtacttagcaggtgctcaaaacgtgattaaaagtgaatgagaaacaactg

SEQ ID NO: 140447 - DNA, 563 bp, Homo Sapiens
  misc_feature (64)..(95): n is a, c, g, or t
agtctgtaggtcttttcaatctgttgccccaagccaacatcctgcaccactgagaacaagggannnnnnnnnnnnnnnnnnnnnnnnnnnnnnnngcagggggaagggcagggagtatatcgtctacacaattggacaaattcatcttttctgctcttcacttcatgtccacatcaaagtccagcaccagcagcttggtttcttcagtcccattccgactcccaactgcacacaccagctttgtgtttgaggctctgatccgccacacaactcccccactccccccactctccaatgtgactaggtttcgaataaattcacccgttttcaagtcccatagttttacagttccatcatctgagctggtaattacaaagttcttgttgaactgtaaacaggtcacagcactctgatgcttgttgggaccttgcaatgtttgtaaacactgtcctgttttgatatcccagattttaactgtagaatctgcattcccagagacaagaatattgtctttgagttccattccacttgttaacgactggtgccctgttaacgtgtgaatg

SEQ ID NO: 140448 - DNA, 545 bp, Homo Sapiens
taccctgtatattttactttcaagataaaaatcacatactgtctggttaacataattggtgatgatgttgtagagaagagagatggtctagaaggggagaatattatattttaaaaacttaaacattttacatcatctgaccaaggatagagacagacaagtctgaaagacaggagtaagaaatgatgcctcaactttagagtttaggtacgggctccaggtgcctggggagcactgtgtctgacagcacagatgtagacggcagagtctctgggatgggaggctgtgatgtgcagggagctgtgcttttcctgtatgtttattgtggcaattaatcttccatgcttcttcttccctgagctcagcataaacaaggaaacaatgcctcctcctggatgctgttgcagccagtgtaaggcacttattcctaccgagtaactgcagttgattgtgataaattctccttcctgggcagtcaggttctgaggactctgctccacttcatttttggcggcacttacacagcttagctgaagccacaaaat

SEQ ID NO: 140449 - DNA, 494 bp, Homo Sapiens
ttttttaggctgtgactgggttttactgaggtaaaaggtaacatcggcagaggccagcccgcctcggcctcattagctgggggaactcgaagtacagtcagacagggtggggcaaattgactcatgcctcctcattctgtgttttttcatgggaaaattccgatgtctgcttgaccgcccgtggtgattcattttattccatatgatgaacatctgattttctaggaccttcatcttcatttcactgaacaacagccgttggaggatctcgtcctggagggcaaagcaggcatgcgttctattgacttcttttgtgttcacggccttgctgttcttggagtcgttttcagaagtctttggtttctcttcctcctgctggggctctgggagggtgagcttgtgttcatacttgaccaaccagttgctaagcaacagcagaaggaataggaacccaaacaaggctggcttatagctcatcagccaagctgccactg

SEQ ID NO: 140450 - DNA, 513 bp, Homo Sapiens
tacataaagtatacacacatatattttttaaagttttaaagcttttaaagcaaaagccggcccctcccctctcccagagggggcggcccctcccctcagagtaggcggggacagcagttgcatggacagctttccttgtgagccacaggtccctctggacatactgctgcctggccacaccccccttccctttcatctttgtcattgaccaatgggcttggagcattaaggccacgcccctgttctgcattctatgggggccctagttatgcctcctcgggctcagtcacacagctgtctggtaggcaagtggaggtgttcatcagtgctcactgggattttgctcacgtggccccaaccccgcctccctccccaccccgcaatggcagaagaaactcaacagagcaaattggccgcagcaaagaaaaaggcaaaggttggaagagacctttagaacagctggtccctatgccgaccgggtgcccccactaagtttggcatcaatatgatgtc

SEQ ID NO: 140451 - DNA, 809 bp, Homo Sapiens
ctacgagaaattcaatttctttagctgcctctggaggtaacgtgctttcactgttgaattccaagtcccctcttaagaaagagaacgaaattgacatggcataagtaggaatgcctagagttggccaaatccaattaatatctccgaatccaattagtatctcctaccaacttttgaaactcatttaatggttttaatgtgtcttttcttatttctattttttgtggtttaattttcctttcctctacctgcattcccaagtaatggaaaggaggagaggtttgaatcttatcagatgctattgtcagtcccgcgttggcaacctctgtctgagaaatgtgtaacggtcaattaatttgtctctcgtttctgcggcacacaaaatatcaacataatgaacgatataacagtctgaaaacttgtctctaactggttgcagagcttgagctatgaaagtctgacaaatagttgaattattaagcattccctgaggcaatactttccactgaaacctggtggctggttctttattatttaggctggtatagtaaaagcaaatttttcaaaatcctcttttgccagaggaatggtaaaaaagcaatccttcagatcaattataattaaaggggaccatggctggagagggcaaccgggatgggagagcccccatgggttgaattatggcattaatggctcttaagtcagttagcatacgccatctgccggattttttctgaattacaaacaggagaattccaaggcgaaaatgaaggctcaatatgtcctttttctaactgtttctttgctaa

SEQ ID NO: 140452 - DNA, 600 bp, Homo Sapiens
gtggcttaattttctattctctatctgcatccctaaataatgaaaaggagtagaggtttggatcttatcagatgctattgccagtcctgcgttggcaacctctgcttgcagaaatgtattacagtcaattaatttttctctcgtttctgcagcacacaaaatatcatcaatataatgaatgatataacagtctgaaaacttgtctctaactggtagaagagctcgacctacaaaagtctgacaaatagtcggactattaagcattccctgaggtaacactttccactgaaacctggtggctggttctttattatttatggctggtatagtaaaggcaaatttttcgcaatcctgctccgccagagggatggtaacaaagcaatcctttagatcgattataattaaaggccagtcttttgcgatcatggccgaagagggcaacccaggttggagaggccccatgggttgaattacggcgtttacggcccttaagtcagttaacatatgccatttgctggatctcttctgaattacaaacacaggagaattccaaggcgagaatgaaggctcaatatgtcccttttctaacgttcatttgat

SEQ ID NO: 140453 - DNA, 621 bp, Homo Sapiens
tttgtggtttaattttcctttcctctacctgcattcccaagtaatggaaaggaggagaggtttgaatcttatcagatgctattgtcagtcccgcgttggcaacctctgtctgagaaatgtgtaacggtcaattaatttgtctcaacatcccttgtagcctgtactacatatgcagaatctgatataatattgataggttggtcaaaatcttgtaacactgtaatgactgcaaccaactctgctctttgagctgattgatacggagttttgattactcgttctttcggccctgtgtaagccgcttttccattgctggaaccatcagtaaatactgttagagcattttttaaaggttcacgtctggtaattttaggtagaatccaagtagtcaattttaagaactggaagatttttgtttttgggtaatgattatcaataattcccagaaaattagcaagaccaatctgccatgcaccagaactgataaaggcttgtctaacttgttgcttgttgaaaggaacagtgattttatctgggtcatttccacacaatgttattattcgtaatcttccctgaccaattaatgtagccatttgatccaagtacaatgtaaaagtctta

SEQ ID NO: 140454 - DNA, 416 bp, Homo Sapiens
acaggaatgtcttgtaaaacctcaagactccctattgattattcccttacatatttatttacaatttatcagggtaattggtggtgccttatgaaaagtataactcgatttcttgatctttgagcatgttttgtgtttcttgtgttttctaaaagaatattagatatggttaattgcattacatctaaaagatttaaaaaattgtgtgtatgctcaggttccccacacccatacccaccctaacccctgtcatttacattggtggcaactttaaatggtaaccaagcaaaagtacattttgataatgagtattgataatcctgaggaaaactagtgagtatatgggagccacctttgacctgtgccaaagcagtttctaatttcatttgctaactataaaataaagaactgagcca

SEQ ID NO: 140455 - DNA, 702 bp, Homo Sapiens
  misc_feature (506)..(543): n is a, c, g, or t
gcggccgccatggcccccacgacgctgctctagggtcctccggggcgggcggggcagccgggcatggctctaaggggacgcgccccggggcccccggagggaggggggtccttagcgccgaacccccatgcgtgagtgggggacccggcggggggcgtcgagggtccgggcgtggggtagggcctcaggagcggcgggtcatgcaacggtggcgacaacggggcttcttcctcctccaccttctccacgtcccgcggggcaggggcgccggcagcgcctcatgccgcggagggctgctgcggagacgcggcccgactcccgaccagaccctcggacgcccggcccggcccgcactttaaagctctccgcacgacgtcacgggcagccagcccgacgtccgccagcgccgctccttagcgggctcctcaccgcgcacgcgcagtgctgccggccaccgcggctccgcgcgctacgggcatgcgcgtgcgtgcaggccgggtcggcannnnnnnnnnnnnnnnnnnnnnnnnnnnnnnnnnnnnntccgccgcccctcccccactctctgaggggcttcaagggaacgctctcaaatagcaacctgtcttcacgccgcgccgcctccaggaccgaagggctccctctacaggggtgcgctcatattgccaacagtgtcgccgtgccgcgtcacggcatcgtccg

SEQ ID NO: 140456 - DNA, 831 bp, Homo Sapiens
  misc_feature (720)..(736): n is a, c, g, or t
actcgtcggcccggtgtggctggctggttgctcaatctgtaagatcttctaagaagctttatgagatgtagtgagaaccatctgtcctggggatgagtctgtctgtcggctcccattcctcatgggttatgagttgctccacaggattctggatgtatacagatgctcttcatcttaggaaggggttacgtcccaataaacacgtggtaagtcaaaaacactgtaagtcagaaacacatttaataccctgataagcccatcataaagtcaaacaattttaaatccaatcattgtaagccaggaccatctgtatacccaagacatatacaaggatgttcatagcagctttattcaaaatagtgaaaaacaaaacaatccaaatgcacagcaattggaaaacagacaaataaattgtggtatatttatacagtggaatactatgcaacaacaaaaaaggatgaagcataatactacacacagcgtgagtgagtctcacagacacagtgttaacagagagaatccagacacaaaagagcctatctatgcatgattccatttatatgaagttcaaagacatgcagagctaatctatggtgatagagataagaatggtggttacactgaaatgggaggatcgctcaaacccaggaggcggaggctgcagtgaaccatgatggagctgcactccagctttggagacagagcgagaccctgtttttnnnnnnnnnnnnnnnnntgattgttccattctgtggtggcaagtgggggcttgactggaagggaacacaacggccacgggttgagcagttgagaaccttctgtatcgtcagc

SEQ ID NO: 140457 - DNA, 716 bp, Homo Sapiens
  misc_feature (543)..(543): n is a, c, g, or t
  misc_feature (656)..(656): n is a, c, g, or t
tttgaagataattaaaaatcaaatatttattaaaagtaccataatacagacccatttcaagtaaggacaaacacaccaacatatttcttagtagtttcctcacaatagattattaaagcatagaacaattattcatattcataaagaaatgacttcaaaataggttaaattgttttccatctactctgtttaataaggcaagaacaaatgattcactttagacaaatagtctcatcaaaaaagggctaaaatagtaaagattcatcacctaaagtggtaagctttggatatctgaaatataaacatgttagtactctgatgatgccagataaatgaatttaggcaagaaaacacattgttacaaaaagcctgggttctaaatcaggattactgagacactaacaatttcagatttttgccttcattccaagaagcaccaacccagttttctttagactgcctgggctggtttgggccaagatctagtcaaaatgtagtctgccagtgatgtaggtaaataagatagagggatgaagaaaaatntagcatcccagccagctgaatatcgagttcgtggatgcaccgatgtagacatgtccatgcagcagtggacaggttcaggttgtgctacaattaacagcccttccttcatgatnttgtaaaggcatcaaaatactgctgcccattgtctccctaatatgcttgggggcttcttt

SEQ ID NO: 140458 - DNA, 2033 bp, Homo Sapiens
  misc_feature (37)..(37): n is a, c, g, or t
  misc_feature (70)..(70): n is a, c, g, or t
  misc_feature (276)..(316): n is a, c, g, or t
gcccaataaaacctgagcatttatccctttgtgcctncaggtttcaactgtcaaccgttcttctgctttntcggctaattccttcctaatggagaccggggagccattcagatgtgaaaactcgtattagggagatatcgaaaggactagagttattctgcatcctcatttcataggctgcttgtctcggattactggctacttgagaacctggtgaatttcttgaacccaaggcatgaggagttaatattccactaggagtgaaagctggttgannnnnnnnnnnnnnnnnnnnnnnnnnnnnnnnnnnnnnnnnaaaactgtcctcatcatcctttctctttttaaaaatgctatcctcaacttcaccaactgctaacatgatcatctgtactctttgcagattgacataaccactttctgtaaggtaacccccagttttgtgtaccacatttttgtatatgttaaccaaacggtcaattgcattttccctaatctctaacgatggcaaatgagggaggaagtcatttcccacaaagaagcacatgaaaacccagtcatcaatgctcctctcaacatcaaatgtgaatggtaggctggccattgtgagttctctttccaaatactcacgaagaacattaagccgaaggaagataaactctccttctgcacaaggaagactatcggcaagttcatcatgctttcccttcttttctcttggcaaaccttcacaatctttgacctcatgtccaaactgattacaaagaccacatggtttgggcttgtttggtttgaattcttctctaataatggtaaagttcggttcatgtgtggcaaggccaagcataatgagatcagcatctgctccacataaacaatgatgagtatttgggtcatggttaggctgggctctttgccttctaatgtaatccatgattttatgttctccttcaccaggagcactagcatcagataaaataactgtcaaatttttccacccagggtcattatttaaacgatcagctatgtaatagcgaaggcatttagcaagattgtccatgaattcagttcctggtgtaatacagttgctgtcaaatctttcttttatttcttctggaggaagaaagccaccttttgccaatatttcttccctgactcgctgcttctcgactgctgcttccattccttcttttgatgccctgaacctccttgaacgctgctggttcattttagcacgtggtgccactccatctattgccatgtagagaagtcttcttggtcttacaatactgaaaagtctgtcaatgtactcaaaaattgcaaccatcatttcatcttcattttttggtgctggtttgtcttcaggatgagtacagggatggatgattccattcatatccaaatacagattatcaaactccacatcatttggattaggtttactggcatcaactggaatctttacaccattgcattcttttggcttctcttccacgcagttgactatgatggacgggtacttgcggctgagccagcggaagaacgccgggactcccatagcggcacacggctggcgcctgctgacgttctcttggactccgttggctatggtggacgggtggttgcggctgagccgagcggctgacgagcgtaaccaaagagacgggagcagcggcagagggcaccagcacttcctcccacgtgcgcgctggagaacggaagtgacgtcacggcgccgccgccggggaagctgggaaggaggcttcgctggatgagggagcggcggaaaagggccttgccgggctgtttgtgggaggcggagtccggcggcggaccgggtggcgaaggctgcagctcgccctcggtggtcccagccccggagcgcgaggccgagcgcgtctgagttgcgggggctcacgggcgactgctctgccggggctccgccgggatctcccagccccagccctccggctccctgtgcacagaatcgctgcgctctgcatgcccgggaggaggtctcccttgcccgtttg

SEQ ID NO: 140459 - DNA, 773 bp, Homo Sapiens
cattactttagtttttaatgaagaaacttgtttaaaattgtaaaggaaaaaatgggaatgggacggcaaaatcttagcagcaaagtggttaaacaaattgaaaatattaatgcacaaacattaaaatattaaagcatatatgttgcatataaaatacagtacagaaccaggagttgcactatactgattagtgcttaacagaagaaatgattaaatttgttcctcccagaagtatatacacagttcatttccacagcattttcctatatagccagcaagttattttcttcagttattcacaccttgatcaaacctgaattataaacttagcacttacaaatatgaaaattcattcacaaggaaaaacagtatttccatttcaccaataaaaattttgaaagttaacagtctattctaggaaaccaagtttagctgaaaacttcagggatgaagatcatctgttgtagcagcattcaaatatataaacagtaaaaataagacttaaaactgctgcctacagtgtcatgttttggatttagttcatccaattgatttttagtacaaaactagaaataccctcttcttcataacatctatagttatcaatatattttcttcttttcaatgtgaaataatacttcaagatgatctatatacacaatgttgtcagttcaagctgtcatataaatataaatgctttcttaaaaaaagtattttacagaccccggccgtaatggccgaattcccgggcatatgtccggtaccgtcgactg

SEQ ID NO: 140460 - DNA, 836 bp, Homo Sapiens
  misc_feature (654)..(683): n is a, c, g, or t
aaaggtgtggaaagaaaaaagtgttttgggggagaaaaaaagggtttaaacaccaaggtcctatttttagggaaaccaagtttaggctgaaaccttcagggatgaagatcatctgttgtagcagcattcaaatatatagacaggttaaaaattaaagacgttaaaactgctgcctacagtgtcatgttttggatttagttcatccaattgatttttagtacaaaactagaaataccctcttcttcataacatctatagttatcaatatattttcttcttttcaatgtgaaataatacttcaagatgatctatatacacaatgttgtcagttcaagctgtcaatataaatataaatgctttcttaaaaaaagtattttacagacagatagtgtatatacattgttcagtttgatctggggcaaaagaaaaaagctaacacaagcttaagtgtgatatataaaaagaatgatacataaatgacgtttaaaaacctgcatagaaaatgagcttcaaatagtagtgtgattttaatttttatcacctctgaaacttcaagccattaaaaaaaaggcacacttctcaactttatccctctaagggaatgttctttaaagaaccctttccttggttagagttttaatgtaacacttaagnnnnnnnnnnnnnnnnnnnnnnnnnnnnnngacatttgacttcaaggtactttaaagtttgttggaacatttacccaactattttgtaaattcggacgcgtgggtcgacgatatcccgggaattccggaccggtaccagcctgcttttttaccagctgttcaatattactaatgcctcccttt

SEQ ID NO: 140461 - DNA, 998 bp, Homo Sapiens
  misc_feature (107)..(152): n is a, c, g, or t
  misc_feature (446)..(476): n is a, c, g, or t
ttgtgccggcgcccgtgtcccggtgtggtcgttcttgtcgtgctccgtccttcttgcttctcctctctcgtcgtcgcccttatccgtcgtcgtcctgctccttcggnnnnnnnnnnnnnnnnnnnnnnnnnnnnnnnnnnnnnnnnnnnnnntgccgcttcgctcctggtctggtcgcgtgcgtgtccgtctccgggttctgctgccttctgttcttggctgctcgctctcggctctcctgttgcgctcgcgcgtccgtgttttccgggttttccccgtggttgttttgctgtattgttttctgcgcccccgtttggggttccccgggtgtttcccccggtgtcgaccagagtgtgggctctcgggtccccttttgtgccttgtgccccttttctttgcccgcttttttccgccaccccgcataagggtcccccggggtggtgtgnnnnnnnnnnnnnnnnnnnnnnnnnnnnnnnctgtcagaattattctgtttttcttaatcagacagttccagtgcaatttccaggaatgaggcagtagacaaatgagcagtcttccaatctgagtccaggcgtttgttcaagctcttgctagttcttgctagctcttgctagttttcccgttttccctggagggcggaccgggaggtggtgccgggtctcggtccccagtgctctccccgcgtggaccggcgcgaggcacacgcgtactctcgctgcctccgctcttggaggggcagcctgcaacacaaaaggggtgtgtgggtgtgggtgtgtgggaggttttccagggccaccagctggtcccagctggtcgcccccaccctacacacaccccttcggggcgccaagcccccctctcggctgagcaccaccctggggacttgcccggggtgcagcctcaagttgccgctgctaactgctgctgccgctgccgctgctgcaggaggagcctcggccgatttacaacccgagcctcgtacctagccttatttt

SEQ ID NO: 140462 - DNA, 559 bp, Homo Sapiens
  misc_feature (181)..(181): n is a, c, g, or t
acgtagcactgcacccagctctcttagccttattttgttgttgacttttttcattgtctgtgttaaatatctaatttctattttcatgtttctgtgttttataatatatccatttaaatctattgagttgctcttctagccttttaggcaaataaaacaactcatattttagaattaatgngcaaacaaataatgtgcttttgccttttcagaattttgtatgggcgaatgaagaataagactgggagtaaaactcaggggaaatttgcttcaggcacccgcatggccattgtcctgcggtttctggccgggacccaacctgaggagatccagaaatttttagacctgctgtttgaacctgtgaggcatttcaagaatggtaactatcagctacctctcactctaaaacctgttgtttgcggtggacttttcacatctcagggtacatttcccatgctcctgggggtctttctaacagggttgttcctcccaattttgatggcaatctttttgctgaagggcaactcattttaaacttcaattaaattgcgtgaaactg

SEQ ID NO: 140463 - DNA, 541 bp, Homo Sapiens
  misc_feature (309)..(339): n is a, c, g, or t
tttttccaaaacacttaagaagttttattgaaaacgataaaatacagtaacaccagattctcattttaaagtaaaattaacagcatcttccagaacattcctagaactgaaccattcttgtcactattgaaaaacaaagccaagttccaaatccaaaataataaatgaacgtgctgataaacattcttcttatggttccagcccctactttagttattttcctaaattttacatgtgtaccttttcaagaaagagtaagttttttaagtgatcaatatttatgagaactggactttcttcatataattnnnnnnnnnnnnnnnnnnnnnnnnnnnnnnntccacaacgcaccctactcaaactcagataaaatacacatttgttcattaaagctcacctgctttagagaattttttctcttcacacattagcacagtaagccaatgtttgatccatgctgcaaaagctacacaaaacgaaaagccctggtaactccctagggaactcttaaggcaaagcaaaagcaaaaaccttatgctac

SEQ ID NO: 140464 - DNA, 716 bp, Homo Sapiens
ttttaatttgctaaactttattttatacatacacgtttacatttactagtcatggtgtcaacttgttaacacaacgaagccctaatggacccgttttgaaattagaagctggacagttacaggctttggtctcttcaagaatccaattcacccctgggtttcgcttggcacacaccccaggagaacgtcgatgcacacagctgtgtagctgcaaacggaaaccactctcttttctctcgtatttttcagtcagactcactcaggattttgaaatgaatcatcacgagaaatttgttttaaagttgaatcactgagaacatctaacaactgttcacattctttatcacaaaaactgaagtcggaaaagacgccctgaaaacttgcaagggctaatactctatgatagaatattactactgttcaccatgttaatacatttacttactaccatacacctgaacagtcacggcagaacaagagcatgtgaatgacgaaaggaaacttgctttcagggtgtcagattatagaacatgcacaggaatttcttccacttctaacctcgctcatcagtcacatttacaagaaactcaattttaagcaaagagatgcctgaaataactaagacgtgtacaaaaacaagttaacctatgaacacaaggtaatattctgatagtcttcgatgtgacttccaacatatctgagtagtcacttttcag

SEQ ID NO: 140465 - DNA, 590 bp, Homo Sapiens
ttttgggagtccacggtgtttattgggccaccccacgcatggccgtggcccagctgggcacaaccctcaccctggtctgtcatgcctgtttttcctacactcagcggcaaagctgcaggagcagggctgagcctggaatagcccttcctagtcccctcttctcagcccactacccatccatcagtcaccagccgtcacctcccctcccgtgctccaggctgggggagggagagcccagtggtggatccagcctgaagtcctgccctctctcatctgtctggaaaggaggtagcacctttttcgggaaacgggttagggagtaaagactgcaccctacatggtcctggtggtgggggggataacagtaaaggaatttgcaacgttttaatgccatgcctgatttttgggtcaggagtggtgacttgggtaaccacttggcgggggggcctgggattccctgctgtgtgccgtgataacagcaaatggtgataaggagaaagccaagacctgtggcctgatgcagggctgggggcggggggtgatcacttcagcaggcacaacacacttcactggctgcggaggtggagggg

SEQ ID NO: 140466 - DNA, 553 bp, Homo Sapiens
tttaaccttccaaagaagtgccttcatttatttacagggcttaggaaaggaaaaaagctctacaaaagggaaatttcaaaatagggcttcagcaggggcccaggtggagtgagtagttttgataaggtccaggtgggactcacttccaggtggtgaggaccgctctccccgagtctctcgatcggcctgctctgggccccagagactgaccctgacggcttctcagctcccggtcagccccgtcaccctgggccaattcttcatcatacagaatctcgtaattgccgaggacttccttaggtggcgacttgttccatttgcagtctgggatttcaccattcgggacggcgatgttgagggtgtcattaatcaggttgtacttgaggattcggtcattggcagtgctggacgtgagagacggggacgcattcacctcgatcagccagggcttcagcttgtcgtcgatgatgatgtcgtagccatagcattcaaagcagtgcttgtcattgttcatcaccggctggagagagagtgaccagtgggtgacatggcc

SEQ ID NO: 140467 - DNA, 510 bp, Homo Sapiens
tttttgttttcaaagcacagcttttcataaaaagcaaggctcacatttaatagatgctctggtacataggtgtgtgttgagagccgctggggactcaggaagcccagcagccccgggatccgccggtggtcagaactcatcatcagaatcgtcatgggcccccctgcagaccttgaaggtccggggggtggtcagctgtcctggggaggccggggccaggttcacccagccgggcccgcggggcagcaggtggctttcattgagtctgatgacgcggtagttctcatagtggatgttgtgggttatgtccttcaggtcttggaggtgggagcggataagcaggtctctcaggagaggaaattcacagtgcgccatgttctccacttcaatgatgccccacttggtcttccggcccaggacacacctcccgttcaccaggtgctcttggtcagcccctaccacggcaaaagggattcggtccagttgtcattgttgatctggtccccgaag

SEQ ID NO: 140468 - DNA, 527 bp, Homo Sapiens
cgatgatgactcatcttttatttctgatcttacttatctagttttatgtcctttatgctcaatttaagctcttccatgctctgcatttcccatatccatttttcttcctcccaaggggcatgaaagtatttggtgagctaaaagatgttggctttctcttcctgtttcttgctcaaaccccagtcggttctccaagctgtcattaaaccatccatccattcattcattcattcattgataccagtttccctccaccactctaactggagctgagcaattagacacatggtaaccttgtgtgcaagaagttaagaagtctaccagggactccagaggccaaaaaattgggcaaaaattaggcaaggggcaggcccacttggaccccatacttctccctcatcagttagcaaagggagagtctctttttccagccctctctccctctgctcataccttggtgaaaggaaataatgacccacaatgtgaccccatgccgaggacggagaggggagagagatacgcaaggg

SEQ ID NO: 140469 - DNA, 488 bp, Homo Sapiens
ttttaagaactggaaaaagaaaggtaatatatattttaaggaggtcccattttaggggagataataagcttgggttaggcgtccgaagtcagaagatatagtaagaaacacacacgcaaactccagcagccaccagctagacttgagtagagagagcaggtccaagtggaggtggaagttggaaagttgcatctgccaggcagggcgaaagtggcctacacccactcctggagcaccctgcttgacgagcaaggtagacgaggctgagggatactgctggtgatgacggtggtcgtggtgatggtgctggtagctaacagatcttgagcgtaccaggccctgagctgagtcctctaacgggcagaatgtcgctgcatacggacagcagcctcaagaggacaaggtgatttagtgactctagcctcttcccgcggtgccagcctgatttcaccctcttcggaacacacaagcgaacctccggggaggga

SEQ ID NO: 140470 - DNA, 669 bp, Homo Sapiens
ctcttggtgggaggtaaatttttgttgaagttgttatctaaaagttattaaaaatgtcccagggcagaaaaaaagtaaacagaaatatggtttgtaagatgcaagtcaaacttggaagtggcattgatgtggggtggggcggcgactggagtgtcactgagcccaggagaggtcacaggaaggcagattctcatatcctgcttaggaactagatgtttatgatgagcagaagtaatcgatcatggtgatttttcctgtcaaaagtctacagatctgacattccgttttgccatctcatggtgatataattaggtattactctatcggatcagcctcctgaagctcactggtagatgtaggtttagcagcatttggtggctttgtagaggaattaggtggaagtctatgacgattactctcctcaccagaagtagaggaatgtctttttcttccaaattcatcactaatagggggatcaacacggaagtcttctaacctcttataactacagaggtattcctgaagttttgggtcaatagactgtgtcttagattgagaatatttcaaataagcccaaaacttttctagtccatacagctgaccagattcgtagtcttttttggcttcttcttgggaatccctgaaaatttctcggctgaattttttttc

SEQ ID NO: 140471 - DNA, 806 bp, Homo Sapiens
tttctttttcttctttcttattatcacaattaaacaccagaagattttccccaaataaatactgatgtaaatgttgacttcaaggacaaagaactttcataagagtctatttctcaggcatttcaccatttcttgagaccacaggacacaggcagcactgtttaatgtgaattgtcactggactccggtgaaatattccttctgggagagtttattggtacctgaagctcactggtagatgtaggtttagcagcatttggtggctttgtagaggaattaggtggaagtctatgacgattactctcctcaccagaagtagaggaatgtctttttcttccaaattcatcactaatagggggatcaacacggaagtcttctaacctcttaaaactacagaggtattcctgaagttttgggtcaatagactgtgtcttagattgagaatatttcaaataagcccaaaacttttctagtccatacagctgaccagattcgtagtcttttttggtttcttcttggaaatcctgaaaaatttctcgcctgaattttttttccagtccataactataaaacctgaacagacattctaacccatacctgtaattgtcttttgcgtcttcccgagcaagttgtctaaattcctcatacattgtgttattgaagtgatctgtgaagagtaaggaccacaaacgatagagggtattcattgtcttggactgaccaattaccaagctttttctctcacttaggcatcttcgacgatacttgatggagccctgatggtggtaaacctcagtggctgtaaa

SEQ ID NO: 140472 - DNA, 413 bp, Homo Sapiens
accagtaaatcttgggctgatttgttacacagcgatagataacttactacgtcaggatcatggttactggaagactggtttatgtcctgttggtcctccccaccttgccttgcttgctctatggaaggggcttccattatgggaactgcctggggagaggctcatggggcaaggaactgatgcctccagccaacagccagcaaggacctgagggctgcccactgccatgagtgagtctggaggcagattttccaccctgagatgcctgcagctccagccagccccttgactctagccttgaggaacctacagccaaagccacccagttaccctcacccagattcctgactgctggaaattgtgacatcgtaaatgtttcttgttttaagccaatacatgttggtgtaatttta

SEQ ID NO: 140473 - DNA, 276 bp, Homo Sapiens
acatttttataatgtgtatttattattcaaatagcttgacagcaaagtgtttgaaaacgaagagcaggaattccgcggttcctgcccggcctcgccatccagctgggagaagagcatggtcatttccttcacttagtccacggccactcggcgctcatccccagcacagccctccccaggctgcggcaaagactgttgctgtcctgctgagggatgtgcccccggggattcaatcgagattctgtaagatgtgggggatgtggcggggtggggggt

SEQ ID NO: 140474 - DNA, 473 bp, Homo Sapiens
  misc_feature (448)..(448): n is a, c, g, or t
tttggtaacttcctatattgctggagcgaactgatggagcagggcacctgtggacaaacgtttttatgaagccaaataccatttacaaaccagggtggggaaagaacgatgaaaagttcttgatggaagggaatgaggagatgggaaggtcagtttctggcttgccctctgtctccaactactccgcctggagaaggaaaatgctgggaaaatgaatcttcggctaaagacgacgctgctctaagtttgaggcaactgggaaaagaaggccatatccctaaagttatcccagtttagggtctgccacgctaagtttcctcagccccgacggacgcggtcccgcctgcaatcgttttccgactcctggccaactcaagctttatcctcgcctgcgccccacctccacgcctgtccgggacacccgtgaaacgccttgaagccgccattntaaacagtgctatcgcgagatatac

SEQ ID NO: 140475 - DNA, 1100 bp, Homo Sapiens
  misc_feature (286)..(294): n is a, c, g, or t
ttttttaacatttaatattttttgcctagtgtcatggcagggaaagtagtatacggtttcaccgcacatttgcatattccacattataggggctttctagtttccggtcatcaatttcccaacgaatgcccttccctatacctatccatcccaagccaatttctacattgtgctgcaatgcttagtaacgtcagtgaaatagtattcaaagtaaaaatcacgactcctcccatctccctgcccaatctaaaaataggtgcatgacagtgaattgctgaccaggcannnnnnnnnctgagtaagacaccttctgggcctgctgtcatccttactccgaatggtgctgcaagccagagtcaaaacatgtgaaataatacatgaataggtctataatactttttaacagctctttacaatatacggtcacttataaacccagcgttaatatagagacctttgtgtgtgataatattctaattgcagcaataatagcatgcacaccagagttcatctttagtccacaaatagggggcggggacagtgaggaagaagaggcggtggggacttgaggatgggggattgtgtagcctgctctgctcgaggtttcccgggaagcccacttcgggatccaagtggctcaagttgtcttcttggtatcaggtttattaggagacgccccgtccaccgacatatttatggaggttgcacatatcctcatcacagcagcgaccgagggcagcctgccagtcacaagaatgagcgctcccagccagaggtccagggaccagcaggagaggtctgaggggccgctcagaaaagtgacgcatccttcacttcgcgcgggaaaggggcgagctggagtgcagggcggggccagggaaatccttgcttttccacatggtggaaacatcaatgccggatttacagtgcatcacctcgaaaggtcctctctgactgctgggtggcggtggtggttttccagcattttccttcgggcctgatccaccgcctggtttagggggcacaggtgggacccggggtcggtcaggaacacatcagcaaaagctccacttgcgatccacgtctgtgacaaggacacc

SEQ ID NO: 140476 - DNA, 464 bp, Homo Sapiens
  misc_feature (196)..(196): n is a, c, g, or t
  misc_feature (198)..(223): n is a, c, g, or t
ttttttgtgggagatgttttattggctttcactttcctcagggagccagcggctcccccagcaggtccccacggtggagccgagtgagctgggagggatgggtgcttacttcgtttcaaagagatctacatatctacagagaggatggagaccagaaaggaattgggaaatggaatcatgagggctgggccctcantnnnnnnnnnnnnnnnnnnnnnnnnnncgccaacgcatcagaaacagacttcacaggatgcacagaggaagccagaggtgtgggcgggcccggggggccggggctgcgagggacctcaagggcgaatgccactggcctgtccaaacgaggcaggagagaaagtaagaggaggaaaacaattgagaacataacgattgtgacttcgtcagccgttcccccgacgcctctggaaactggccatttcgtttttgagtaagggcaagaagtg

SEQ ID NO: 140477 - DNA, 1819 bp, Homo Sapiens
ggcagtgagccgcccccgagcactgtgatatgaacagtggtaagaaagccaggctgtacggtcggaatcccgggatatcgtcgaccacgcgtcggcttttgcttatttccgtccatttccctctctgcgcgcggaccttccttttccagatggtgagagccgcggggacacccgacgccggggcaggctgatccacgatcctgggtgtgcgtaacgccgcctggggctccgtgggcgagggacgtgtggggacaggtgcaccggaaactgccagactggagagttgaggcatcggaggcgcgagaacagcactactactgcggcgagacgagcgcggcgcatcccaaagcccggccaaatgcgctcgtccctgggaggggagggaggcgcgcctggagcggggacagggcggcggccaagagcggggaaggtggatctcaggtagcgagtctgggcttcggggacggcggggaggggagccggacgggaggatgagctcccctggcaccgagagcgcgggaaagagcctgcagtaccgagtggaccacctgctgagcgccgtggagaatgagctgcaggcgggcagcgagaagggcgaccccacagagcgcgaactgcgcgtgggcctggaggagagcgagctgtggctgcgcttcaaggagctcaccaatgagatgatcgtgaccaagaacggcaggaggatgtttccggtgctgaaggtgaacgtgtctggcctggaccccaacgccatgtactccttcctgctggacttcgtggcggcggacaaccaccgctggaagtacgtgaacggggaatgggtgccggggggcaagccggagccgcaggcgcccagctgcgtctacatccaccccgactcgcccaacttcggggcccactggatgaaggctcccgtctccttcagcaaagtcaagctcaccaacaagctcaacggagggggccagatcatgctgaactccttgcataagtatgagcctcgaatccacatagtgagagttggggatccacagcgcatgatcaccagccactgcttccctgagacccagttcatagcggtgactgcttatcagaacgaggagatcacagctcttaaaattaagtacaatccatttgcaaaagctttccttgatgcaaaggaaagaagtgatcacaaagagatgatggaggaacccggagacagccagcaacctgggtactcccaatcaggggggtggcttcttcctggaaccagcaccctgtgtccacctgcaaatcctcatcctcagtttggaggtgccctctccctcccctccacgcacagctgtgacaggtacccaaccctgaggagccaccggtcctcaccctaccccagcccctatgctcatcggaacaattctccaacctattctgacaactcacctgcatgtttatccatgctgcaatcccatgacaattggtccagccttggaatgcctggccatcccagcatgctccccgtgagccacaatgccagcccacctaccagctccagtcagtaccccagcctgtggtctgtgagcaacggcgccgtcaccccgggctcccaaggcagcagctgtgtccaacgggcttggggccagttcttccgggctccccggcactaacacacctcaagcaatccggactagagacctattctcggatcccaggaacgaaggggggaggccagagtatcctcggagccagctaggtcccagtatgacagggcccaaggaggatcatgagaagcgagaaaagaagaggaaggacggaatggaggacaccagggaaagaccacagcaag

SEQ ID NO: 140478 - DNA, 632 bp, Homo Sapiens
atatggacccccatgccagtgctgctgcaggagggcccatatactagggtctgctgagctgttgtcactgatcggtgggcgctgggggggtagggtagcacaccagctgtcccaggctttgctccgggcggtaactgcacttgggcagggaatatagccttcctgggcacaactagctgacaatgacaggttgactgtgtacccccaaccaaggagctggggcccaaggccagtcctgccccagagacactccaagtccgccaggggcacagaccagttctgcagtgactgtccctggacaatgggtctttattctgagtttcctatggtttacaaagagggccccagcccagccccaccacagatcccagagataggggcccagtctccatgggggcaaggagcatagagatgttttccaggaaggggctcagaagctgcactaggccccgagtccccatgtgtctccttgaattgatgaggatgctcctgggagggatgcgtgactatgtggtgttgcacccggggctgcaaacgtctccgtgcagcccccagagagaggcccatgggctcagaccaggctttgttgtcctgctctgagtatcctgagattaaactgaattgctgaatga

SEQ ID NO: 140479 - DNA, 508 bp, Homo Sapiens
gtcatgcgcaggcttctccaagagcagcaccagctctctagcagaagtgaggaaaggggcaagggctgggcggggatcacacagcacaacggcagcgcaagcaggctcgctgtcttgtgggccaccccacacacagccagtctgagctctgtctgtgctgttgctggaaagaatgagagaacacacagagagaaaaccgtgtctagggaaggcgatgcctggggctggaaaaaggaagcactctgcttgcccagaggctggaaggagctgctctgttccctccattcacccctgcctggctaagacctgcggtattcgggagcgtctgcacgcaagtgttcagtgtgcatatatggggagtcttcagttccgaagtcagccccgtaggtcattcccctaccatgctgggagcacgtgtcgtccacacagagcgtgcgtgtcaaaggatcaatcaccatcacagttgtgtgctgatttattaaatgtttatatgtccacagttaagtta

SEQ ID NO: 140480 - DNA, 688 bp, Homo Sapiens
taacttctacttttttaatgtgagaaaacaggcccaggaaataaaaatatgtcactcaaagccaatgagtgacagaatcagaactagaatccacatcttctggtaactcgtctagagtgtgttacactacataaaacttcccaaacgtaagaagggagaaggggaaacaaaaattcttcaagtttcacccccaccacattctgttgagggtggagggaagtgagtatttcctggccttgttagctgctgtcctcctgcacccttaaaatatgtaaaaatacttatcctgcctcaaagactgcaagagtgacattccacaccgactgtaagtgcacagtccccggatgtctcttgtcatcaccctcaatgagaggaagagggaaagttctgcagcctgccttggccctagtgagactcttaaccagaccagaggtgggaggtcaccacctcactttctgatctacacttcctagaggaaggacaggtggggaatgggacatcctactcccttgggcccatgggaggcccaacttcacatccatccaggaaacccaccaaagctattactctaagcccagatccgacccagtcggcaccaaaccacaggaaggataagagttctaggtgcagagggaggaacagagagaggccaagccaatggctgatacaacgcagaccctgtaataac

SEQ ID NO: 140481 - DNA, 697 bp, Homo Sapiens
  misc_feature (156)..(202): n is a, c, g, or t
  misc_feature (498)..(593): n is a, c, g, or t
ttctccaggatgaacaaataagacaggatttattggcaggattgaattggggcagggtagggggcccagcaggatgtgtggccggagcacactgcatagttccaacctgcagccccctccatgagtgccacggggggtgggtcccatgagccatgnnnnnnnnnnnnnnnnnnnnnnnnnnnnnnnnnnnnnnnnnnnnnnngggaatttttaaaaacttagtagcagaagttagaaaaagaaatcttggttggtggggagctgtttccaagagacgaaacggactgattttaagcctggaaacccccccgagtggccctctgcaggcgggacggccccgcgggtgcccaggctgtcgctgacgattgatgttctcacccccgcccgcctcggctctggccgcagaaggaaggaagctgacgtttattgagggtctgctctgggctgcgtaccgtacacgggtgacatcgccaatttcccccaggtgtgtcatgcctnnnnnnnnnnnnnnnnnnnnnnnnnnnnnnnnnnnnnnnnnnnnnnnnnnnnnnnnnnnnnnnnnnnnnnnnnnnnnnnnnnnnnnnnnnnnnnnnttcgtccaggggccgcccaaaaaattgccattcccgaggtcaccatgggctcactccatcccctttcgcttcctgttggcaggtgataaggaacaatatggact

SEQ ID NO: 140482 - DNA, 818 bp, Homo Sapiens
cagtcgacggtaccggacatatgcccgggaattcggccattacggccgggcaaaacgatttacaggatgtaataattataatagtcaatcccttatggatgcttttagctgttcactggataatgaaaacagacaaactgatcaatttagttttagtataaatgagtccactgaaaaagatatgaattcagagaaacaaatggatccattgaatagaccgaaaacagaggggagatctgttaaccatctgtgtcctacttcatctgatagtctagccagtgtctgttccccttcacaattaaaggatgacggaagtataggtagagacccctccatgtctgcgattacaagtttaacggttgattcagtaatctcatcccagggaacagatggatgtcctgctgttaaaaagcaagagaactatataccagatgaggacctcactggcaaaatcagctctcctaggacagatctagggagtccaaattccttttcccacatgagtgaggggattttgatgaaacaaagagccagcagaggagagcaccactgaagaatccctccggtctggtttaccttgtgcttctcaaacccagacatgcctaatggggtctggaaggaataatgactgtgaacggtgttcacgattgccttgtgcctaatgaagttagggctgatgacacatgaaggttatgaacatgaagaaactcttggcactacagaattccttaatatgacagagcatttctctgaatctcaggacatgactaattggaagttgactaaactaaatgagatgaatgatagccaagtaaacg

SEQ ID NO: 140483 - DNA, 667 bp, Homo Sapiens
tttatggaatgtatgatctttattaatttttaatccatcaatctaaaatcacacatactagatcaaacagaagtaccacagtatgctttattttgcaggtattaattggttctctaaatcgatacatccaaaactttagttagcagcaagcatcagttcttccaaagcagcttaggtgaaaaacaattgtttacattcaccagttcaaagtcgtactgtctgatccactgttgtattgacataaaattgaactcagtaggcaaagctaattgaacactcagctcatagattttgagcttcctttatcttattggagttgaagcagtttttaaccctctgttaatattctctattttaattctcaaagaattaaacacacatattttctaattaattaagatagagccatgataactattgaggaattagtgatattagtctcatacccaaaaggtagaacacttttaaatgaacccataattttgaatgtatctgaatttccagtttatatgcttagcaaggtcacaagctgattttattaatctggcttctagataatcatctcaaaaatatgtattgaaacaaagccactgttctttatgatgacatcattttaaccaaatgcttttataacaaataagcagttgttctcaaaagagaacatttt

SEQ ID NO: 140484 - DNA, 417 bp, Homo Sapiens
ttttttataggaatataatttttaatctcaatatacagtccatccagtgcagagaaattctttcctggctccataactgtgggagcctcctgtgcacgagagtctgctggcacctggggtaggctggggcaggcaccaataaggttagcacccctggtgtccatttgtcctccatatagggcagagtagaagaatgaaaaagaggaaggcagagttgagttagcagagcaagaagcaaggagggaggacagggtgacatcgtcgggaaatcaggtctgcaatgttccctttcctgcccagttggccctgatggagggtcggtggctggtgatccttcaaggctcctagatctgtcctttgtctcccatctccacacaccaagtatgcgctggtttgggtccactggggaggatgcca

SEQ ID NO: 140485 - DNA, 362 bp, Homo Sapiens
tttttaccttgcataattatgtttaataattcaactgtgacactaaaacgtatttttaaaaagtcaactaaaaccagatggttccagattccttatcataagtttccaggagcatgctgtagtggaattagcattgaaactttgggacaacaggcagctggtgcagaatgagagatgaactgaggcaatgtagggtgggtcaattaaaagtggttttggaatccatttacagcagcaactgcagttctgagtagtgtgatgaaatcttgggccgtcaggttccgtccctctcaggacatgaatcttccctttgtccagcagatccacgctgtaacagcttttcacctgtgagtcacttagcc

SEQ ID NO: 140486 - DNA, 1313 bp, Homo Sapiens
gtttatgcttgcatgaagtttattgatacattacactggtggcagactcctccctgaaatgttgacccagacagcgtcatttctggatcagttttcagtttctgctttgcgacgtttgtgagcagtagtcacggttacctccccagcaataccgtaacttccaaagggagcacatttgtcaccagatcctgaactttttttagctacatcttctactgggaaagcaacagaaaggaaaacagggctttttggcctggggacatcttgtccacttggaggattagcattctggggacttagggtatgtttctggtatttctcatctgcaggaacagcaatgggcacttgcattgcaacatatctcaagacatctgactgtgaaacgacagcatgtccgggaagaggtttccatccctgtgcttcctgaacatttgagcctactaagataaaaggtggggcactggtcttcttggtgtcgcccatcacataagttggaaaagtgacttttggtggatgctgctgaaactgtggatccttaggattaggtaaatagagggttgcttggggaaaaggcccaggtgcaggtggcggtgatgggtgaccttgttgattcttatcagttagacaataaagggtccacatgttagaacatggtggtggttgtcctcgttcacttgttgccattgctaacatttgagcagcaagctgagcttgggtcaggctgggacgtaggcaaactctggtgagacagctgttggaggtggtgatgagggtggggtagtagtcttaggggtggctggtttggaagaaagaccaccaactgcttccgtttgctcagtgcctggcacagcataaactgatggaaactgggtggtttggtcactatattctgttctggttacattgtcctcgtctgtgtctgtagatttttccatctgggtaggtactttagattctacagatgtttttcctggttcttttaaacattctaatttcttctgtggtgtcgttccttctgaccatttctctactttaatctgatgaaattgtttaaccagatcttttatatccatagtagtattccctctatacatagtaagttcttgaaaataagctgctgcaaactggttgatgtttgatgggttggttttgagaacagctctgctaattccctcgagcagagtcttgaggccatagggtacgacaagtctgggctttgaagaaatcattttggcaggatgtctgtaactcaactgctttccggccgcgctcttaagagcttcctcgttgcccccttgccggcggctcctccc

SEQ ID NO: 140487 - DNA, 924 bp, Homo Sapiens
ttgcaagttgtcatgaagataagacagcattgtaggggtgaggtgaccctagattagacaggttggctgcagaaggcttctctgagggtgtaacacttgttttgagagctaaaggatgaacgggaggagcatcatgagtaggagggaggcaggagctttctggatagaggcagcagcgtgtgtaaagagcttggggcactagaagaactggaagataaatggtgtgactgcagaatgatgagtgagactcaggaggcacgacatgaggctggagaggtgggcagggctgtgcaggtctcagtaaggagtttgattttattcaaagtgccagggaccattggatataaattcttcataaactgcatgcagaagagagattaaaaggttggcagaaaggaataaaaatgaaactggaggaccaagctggtaaaaattgcccccaagggtctatcagaatcctaactcacttagaccaataagatcagtggttacttacgaacaatacgtttgaaaagacctatgaaaaaacacgtgaaatttggagtttctctgtctctcatgtttcctgtaagtaattcgctagatatagagactcgattagattttgattcagtattttaggcaaaaatattttttgggtggtactgtgtacttcctattttgtcacaatgataggcatataattatatgtttagttccccactttaatgatgctaaaattaattagtgagttcaggtgttatgcctgattccttcatcataaacttctccatcaagtttcaccaaatcattttaacagtgattaataatcattggctagatacactatttcattagagttgcaaaataatagttttcctagcatttcttctttatttattggctaattttctttgattaagcactttcctaaatggagtattc

SEQ ID NO: 140488 - DNA, 800 bp, Homo Sapiens
  misc_feature (103)..(103): n is a, c, g, or t
  misc_feature (225)..(225): n is a, c, g, or t
  misc_feature (236)..(236): n is a, c, g, or t
cccgatctgaatatttcctatgatgtcagctcccatatctgacctttttgaggagaaagaatcctgaatgtatatatttatttgctttacagaaaaaaatgtntcgtaataaattgcctattttggttaacatagcacatggagatatcatctgaaaagttataggccactgccactgctgaatcagagcatgcccaatatttgaggtgctcctgatttcctgcnagctgaactcnggtagtccagtgccctagctggtaccacatctattcccatccagagacattctctggcaagtgttctcagctgaaaagtggttggggatgattcttaccttggtaattaaatgaagctacacatttgggtaatctagcaaatgaagtattttttccctcttggcaacttgtgtcagagttactctggtctgagtcaactttcgctggggaaaacctatggaacctactgcaaaaagattgtccaaaatgcctaagaaaatactcctctgatgcatttagccttcaaccctacctgtcttgctgaagggagaaaaatgttttagtacattataggcccagcagcttttattcatgtccaccagctagttgcacagagaatcatgtgtacctaactaaggatgatctaggataagtaactcctgttttatattgagtattttagggaagtctttaaaagacttgttttatatctataaatctaggttattacaaatacaagaattttgtaccttaaataagcctcatttctatttcttcttcattaattctccatctagtcttgcg

SEQ ID NO: 140489 - DNA, 429 bp, Homo Sapiens
tttaattcatttatttatttttggattgaaataagaacaaaaatgttcatattttaatatgtatgtttctatagagaatattctgtttccataccttacattgcagtctctaagtgggagcagaagccttccatgtgatcttgagtgtctttatctccttgtaatttgtcctcagagataacaaaattctcagttagactgcccttttaccttaagaagcatgactgagttctttcctttcatcttcaggctgccagttagtgacttaattcagttttaataaagtcatcaggcttggaaaatgcagattcattccaatttatgtgtattatatcttttgcccattatatcttttgctgggccagtctaatcaccagattttacagatgaagaatgtgaaactcaagcaagttaactgattcatcccta

SEQ ID NO: 140490 - DNA, 514 bp, Homo Sapiens
gcggccgctgctcccacctcagcgacgcgagtaccggcggcgggcgccgtggctgcggccgaggtgactgtggaggacgctgaggcgctgccggcagccgcgggagagcaggagcctcggggtccggaaccagacgatgagacagagttgcgaccgcgcggcaggtcattagtaattatcagcactttagatgggagaattgctgccttggatcctgaaaatcatggtaaaaagcagtgggatttggatgtgggatccggttccttggtgtcatccagccttagcaaaccagaggtatttgggaataagatgatcattccttccctggatggagccctcttccagtgggaccgagaccgtgaaagcatggaaacagttcctttcacagttgaatcacttcttgaatcttcttataaatttggagatgatgttgttttggttggaggaaaatctctgactacatatggactcagtgcatatagtggaaaggtgaggtatatctgttcagctctgg

SEQ ID NO: 140491 - DNA, 526 bp, Homo Sapiens
gaccctctctgcctgcacaactcgtcgctcttcgcgctgcagaacctgcagccctgggccgaggacaacaaagtggcttcagtgtccgggctcgcctcggtggtgtgagcgacgcccgtccgatcggcgtggagcgccgggcccggagcggtggagcgcgcggctgcctgcgtccatggtctagtggcagccgggcgcgtgaggagcggcaggccttgaggctgtcgtcgagggctcctccaccaccggccggctcccaagccagcgttgcgcagatgcacggccagctcagaggcggcctttcccgccatttttcacttcactgccgttacgccctcgctggaacctgaggcgccgagagggcgggacctgcatgacagtatccaatgatgtgcggggagggggccgggctggccaatgggagctgctttcctgagggactcgaaattctccggcgggtggtcgggagctggggctctgaggggctctagcggcgttgcgcgcggtgcctgctgggtctgtacca

SEQ ID NO: 140492 - DNA, 551 bp, Homo Sapiens
cagctatgcaagcgcttccagcgggcgtcgctctcctttcgggggtggtactttcattcggtcatcctgtgagtgttccacttccagacggaggccgagcactcacaccgcggcggaggtacccgtcaccgcagaaccgggtggctggctctcctccagggagaaagcctgtcacttattcctcaacactgttgggaagttacctagaaaagtacagacagaagacctaggcttgcgttttagaatcgtggagtgttagcgctggccaaatcgttggacacaatgtaagcttgatcaggaaaatgagctccagggtctcacaggcggggcctggaatcttggcgcaatctgcgaccctcactgcctcctacagtcggggctgagcgttctttcaaacagccaaagtaatcacttaagtccagcaatgatctccttggagaaatcaaaagatcctccctaagagacggccttggagggcatcgcccctggggctgggcacagcacgtcttcccggccccggcgcgggaggagggtttggggacagcggccgc

SEQ ID NO: 140493 - DNA, 550 bp, Homo Sapiens
caggggcacggcgtcggccccctcctcgccttcctcttctccacagctctgaatccccgaggaggaggatttggagagagtaccgctgctcaggccctcgttccggcctctctcctcgaccgtctcgtcctgcggggtggccgcactgtcgtcggagtccttctgcgagccggcgtcggcgctcttgcggacctcgcggctcttcttgtgcttgtgcgccagcttcttcacgtgcccgtgggccttgccgctgctgagccgccgcacggggctggtgagccactttgcgcaggggtgttgcccgggccgcttggggcccggcgagctctgggccccgatcatgtggggctggagggaagccacggatgcgggtggactggcgtcattgctggagacggagagcgagtctttgtggttgaagatgccctccatttccatgctacttctggagtgggcgatgcacagtgaaccacaggggcccaggccttctgccgctggggagcggtcagtggtccgcaccagacaccagtcaggcttgtcatgcggccgc

SEQ ID NO: 140494 - DNA, 1295 bp, Homo Sapiens
caggaaaagttgtactttattttcaactcaaattcaaggacttatattgatgcaactgaatatactgaatgcaaagcattctggcaacaggctaaaagccagcatggctcagatctctaaatgcaaagacaccacgaggggaagcccaccgctgttccaaatgcatgggcagcttcaccagaaatggaagtggacacctttggcttttggccaaagtctgaaaatcctctgcctttctcttcagatttctggagaaacaacagcctaattcttcctgtttcttaccgaagtgacagtaaactcacatttaggtcctgagaaatccggaacatggcttggcctttgtggttgaagatgccctccatttccatgctacttctggagtgggcgatgcacagtgaaccacaggggaccaggccttctgccgctggggagcggtcagtggtccgcaccagacaccagtcaggcttgtcatgcggccgctccagaacttccacggtctggccccgtcggatggtcagctcgttgctgttgcaagcggtgaagtcatggatcaccactgtcagctcacagccaccagagagcttatcgctgtccagcgtgttctgagacgtccgtgaggcgatggaaatcgtatcaggctggctgctgccgtctccttggctgtccagatcctctccatccctccttcccttctgtcttgtggcgggagcggtcttagggatgtgaatgggctccttcagggctcccttcaggtggatcgtccgctcctggatgacttcgcggatatgctttatccagtcctgcttgttctctatgctggaagccttaaggacaattttattatctgaagttggtgttctccccacccacagtgcaaatttgcaagggtctccttcaacatgttctgtgacacccaactctgaggtaaacaatttgcttttataaaggtacttgcttctcccactggaatctttcacttctttactaaatactaaggacatttcaaaaaggaagagatgccgttctcgaccctttcgaattaagggtttttgggtcccacactttggaaggattcctgtaggatgagttctccctgagactcaatgttttcatccaaccctttcagcatgctgaggtgcatggcatcatttggctcgcttcggcacgctgagcatcacctccaggccatcttttaatctctcccttccttcctcacagcacgtcaggagctctttttaaaagaggcgagtactcgctattcgctcgaactggttaattaagtaagaagaaat

SEQ ID NO: 140495 - DNA, 570 bp, Homo Sapiens
ttttcaacacaaatattactccatagccaatattaaatcctgtaattctccaatcatgatattctctatcacacctccctgcctttgctcctacaatatttctgttgacctttctttattcattcacctggaaaactcctactcttctttccagacacaagtcaaatgttacctttcctgtgtagccatttccaaccactccacgaaaataatgtggtcctttctctgcacttccacagctcatttcttatgctctcaatacaatgtattgtaactatttgttcacttatgtatcttctccactagatctccactggattcactagagcacttttaaaggaatattgttcatttttctttctatcctcagcatttggcacaggtcatagaacataatgaagctccaacaaatgttgaatgaaataatgaatgtgcgaatatttttaaagttcctagaagtaaatatggattttagatttttataagatcttgcatcacaaaaaaagcattgagtactttgcctttctggttttatttttacaagctaaccttcctttaaagcttaaaaaa

SEQ ID NO: 140496 - DNA, 843 bp, Homo Sapiens
  misc_feature (652)..(652): n is a, c, g, or t
tttcaaagagtccaatgttttattatcgacattaatatttgttcatgctgaagatttagggatgaagtaatgggcaaaaaactgacatataatcgacactacacaggtatctcttaagtacatagtaatattttgctaattattggactaaaaaatataaaagatagaaatacatcaattactttgtgtttcatctttctgcatgtacttttacactaaatacacagcaagtacttatactcggttaaagattatgcttttttctttagcaaccaaaacatgcttacccttggttaatcagaacgtgtttcaaaagataaaatttcttaaagatacgcatggcatttagggctttaaacctatactcttgctggattggctgcttgatgattgctctctttcttttgtaatttccatctcaattttggctttgattttctcccaatctatttggagaccttctgcataatgcaagtatcgtttattagtttcctgtttaccaaatgtctccaaaaacttttgacggtaagcaagaactgtatcaacatgtgttttgtattttacagccaattccagtgccctttcccagttgtagagattaatattgatctggattgcttgataaacaaggccagcctgaagaagtactatntcagcctcctgtatgttcccactaaacagtagtatgtgggccatggttgatactttagatggaagattgtttatagaattgatgtactgaaccttatcaatatcaccaattgctgcataggctatttctgcagtagtcatatctcgattagcaactgccatagcagctagactagctcacatggtttgttc

SEQ ID NO: 140497 - DNA, 913 bp, Homo Sapiens
  misc_feature (205)..(205): n is a, c, g, or t
atgaaaagtgcgaagcctccctttttctccttttgtctatctggagggcagcgatgtggatatctcactttgggtgggagaagaggagcatgactttttttctgacatttctgattcttcctgtagctcatcctgctgctcggatgtactgccttcacttagggaatcatcatccccttcatctgggtcatcctcatcttcaccncccacttccctggggagagcccgctggggtattatcaccagatgcagaggagcgtttcttcttatgaacaaaaacatttttccgcctctttctcctcttactggcttttttcagggcacaagctaagttactatgcccaccaggtggcctcccaattcttttatttttcttctttccgtaatagtgtgtgtatttggtctttgtaagtacagaacagttctcagaacacttatccagaaccatccgtggaccgaagaggttaggacagcattccagtttgatacaggtttgccggcagaattcagtcacccgatctgctgttttcactatctcaacagtagcccgataactctttcctttatatttggcttttaggacttccccacatccgtgccacacagagtctttgtccagctggagctcccgaaggacacggctgggtttgtaggctgcattgataagtaaagtgaggacctctctaaggaccagaacacagttcccaggtcctacacattgaggcatctgcatcaagctgctgctccccgttcatttccacagcatataggcaggctatatcctcccaaaacaaaggaaaggcctatggttctgctaggatctgaagattacttgcaggtttcaagcatctgttcaatgggtatccacgggtccaaatgaaagtgaacatctaacccatctcctttacagtag

SEQ ID NO: 140498 - DNA, 1068 bp, Homo Sapiens
  misc_feature (94)..(94): n is a, c, g, or t
  misc_feature (175)..(183): n is a, c, g, or t
  misc_feature (340)..(372): n is a, c, g, or t
  misc_feature (770)..(804): n is a, c, g, or t
attgggggaggcgacgggattttatggactaagataattacttaggggtggaaattcgaaccaagaatttggaccccaatgtgtttttggattntgggagggtctaaatgccgggggaatgccctccagggagggaaagtttttgttccgtttgcataattttcgggaaaaaccnnnnnnnnnaggtcctccgcaaaaggtcgttttgttcaacccccggtctcaagggtcaaaatcttttgtttcatatgaggccccacatggtgacggagaacttcgccctcccagggtcttgatctgcccctgcttctgctccccacttcttgttgcccgggtgggnnnnnnnnnnnnnnnnnnnnnnnnnnnnnnnnntgaggtaactcttcttgccgctcttcttgccgccgcccttcttgacgcggccgcctcccgacgacgacgagccgccgccgccgctcttgccggccgccgccacggtgaccagcgtttgttcaatgtagtcgtcgtcgccgccggccggcgcgggcaccgggatgagaatctgatcctcgaagccgtcctcggcgcgcagcccgtccgagtcgtcgccgcccaccacctcctcgcgcgtctgcaccaggatcacctcctggtggtggtgcacctgggtcgggtcgtcggtgaccagcggctgcagagcgatcatgggcggttgttgtgctggtgatgctgctgtgctgttgcacggcgtgcccgtggccgcccccgccgccgtggtcgccaccgccgcnnnnnnnnnnnnnnnnnnnnnnnnnnnnnnnnnnncccaccactgtggtctcgatggtctccaccgggatggtctccacctcgatctcgtgcagctccacgatctcggccggcatctccgagccgtccgtggcgatgtagagggtgtcgcccgaggccatggctgagggctccgccgccacggccgcggcggcctcggctcctcggctgcgggcgggcgggcgaggaggcggccggccgcctcgtgccgaattcgccacccaggcctcgctaccttagaaccgttatagttactgccgt

SEQ ID NO: 140499 - DNA, 1047 bp, Homo Sapiens
gggagttcggcccaatggcggcaccgctgcttcacacgcgtttgccgggagatgcggccgcttcgtcctctgcagttaagacgctgggcgcgtcgaggactgggatttcaaatatgcgtgcattagagaatgattttttcaattctcccccaagaaaaactgttcggtttggtggaactgtgacagaagtcttgctgaagtacaaaaagggtgaaacaaatgactttgagttgttgaagaaccagctgttagatccagacataaaggatgaccagatcatcaactggctgctagaattccgttcttctatcatgtacttgacaaaagactttgagcaacttatcagtattatattaagattgccttggttgaatagaagtcaaacagtagtggaagagtatttggcttttcttggtaatcttgtatcagcacagactgttttcctcagaccgtgtctcagcatgattgcttcccattttgtgcctccccgagtgatcattaaggaaggcgatgtagatgtttcagattctgatgatgaagatgataatcttcctgcaaattttgacacatgtcacagagccttgcaaataatagcaagatatgtaccatttgacaccgtggtttctcatgccaatactggtggaaaatttccattgttcgaaaatccgagagaaccctgaatgttacgttcataaccttattaagggattagtgtatatttccaaccttgacggcctgaaattcttggagctcattattgaaacactactcaagttggatgtgaatgcctccccggaggtatttgaagatgacgagaaacaggaaatcacctgtggggaccgatccccggaagggtggggactatggatcgccagggcttttggacccttggcaaatggggaccagaacggcgatcacgacgcgcggcaaatttggagttgagagacactcacctggtaaacgcatggaatcaatgacaggattgtacacacacattaggtagggacaacgacgtaggacgtcttataaaagcacggcggcatctcc

SEQ ID NO: 140500 - DNA, 1466 bp, Homo Sapiens
ttttttttgtcccggcgctggcttttattgcctcctggcagaaaggaggtgtcccaggccaggccaggcaggaaagggctggggccaggggagtttcagtctatgtggtggaggctcagatttggagctggaggggttggggcggttcttagagctgagcttggggccaagggtccctgggtctgggctgggagactcagtcagaaataggtattgcttatcctctgggactatgacagcccctccctggggttgggggtgtgacagggacagaagccgacccagggggtccctgagagcccaggggcaggaggatgcctgggactgcatctgcctcctgcggggcctggacagggagggggccagaccacagcggcccctcctccggtcattgtgcgggcctctgaggctgtggcaggtgcgcggtgctcacagctcatcgtggtgccgggtcaggtcctcgccatagttggtggcctgactgcccacaaacatgttccaattacccaggatttccgctttgctcagccgcccatccttgtccgtgtcgctctcgtgcagcaggtggttggcttccaccaggggctggtcctgggcagggggcagcacccagtggcccacctcactcccatccaggtgcccatccttgttcagatcccggaagtcccggaactgctgcctctccgtttgcacccacgccggctcctcctccccaggctcggctgagtacagatccgcgatgtactcctccacctggacatagccatctttgtttctgtccaggtcctccagggtttcagcaatcacgatgtcccgcatgtgagggaactcctcggggtgcaggaaggctgtcagctcctctcgagtggccatcgagtccccatcctggtcggccacccggaaacgccgctcgtcccgagccagcatctttttgtaggtctctgcatcctccacgtcatgaaattcttcaccgggcgcgtagtggccataggtggcgttgcgcagctcctcccaacccacacgcccgtcgcggtccgtgtcgtacgtgtcccaggccgcgctcaccgagtcccgtatgtgccgctgctgcgtgtgcgcgatccacgcgcgaagctcggccagcgacacccagccgtcgccgtcccccgcgcggtccatgcggtccacgatccgccccagacgggcctggctttcctctggggtgagttggtcgaattccttggccacttcccgtcccaggaaagcctcatggtcgtactggaagttcccgtgggcgtcatcatggggagcgtcgctcaggggggccgcctggtgcaccctcccctggccatgagggcctgcgtctggggatggcttcccctgggccccgtgcctcagtagcaacagaagcagcagaactgatggtcgccacatcatcggtcccctgttatccagcttcgctccgctctccacgctccgctctgcgt

SEQ ID NO: 140501 - DNA, 352 bp, Homo Sapiens
aaagtttgttgaaaagaatattgtcttattctataaaacatttcaaacctagttagagatttgtaatcaaaaaacatttgcgcagaaagcagcacttagggctgcctgttctataccctacagtcagacaggaaaagaactgaaaatggcacccttctgacattctgaggcagctggactggcagccaagtaaaggagagtgatgaggtggtgtggggagggtggggaggcagcgcgagggtgctctccacagcaggtaggagcaggcaggagtggggacagagggagagcttgtgactgggacagtgaaaataaacgattggctcttatcaatcacttgcaccaaaaaaaa

SEQ ID NO: 140502 - DNA, 492 bp, Homo Sapiens
tctgagaacacaatgtatttcaaacacacacagagactattgcatatcatttttagttgaggtcaaaattattaaagccctatttccccaattaaaagcaaggagttctattagtatgtcttcttcatttatatcccagattaatataaacccagtctagaggtatcacttctttccaaacttaacttcatttcagcagcatacatggaatattgacacttttcaaagtttttatcccagacccattagatctacaagatactagaaagaattagagcaaagtgagtgggcctgggtttgtaggatcctcacaaacttctcttggattcttcttttacaaagtttctctaccatacaaacatacgttttaaaagccaacactattgaggttaggtatgcccttcaggggtgttgcctagaatggttaaatcccattcagcttaaaggaggctaataatcatggtgtggaatttctccataccagcagcatgg

SEQ ID NO: 140503 - DNA, 1991 bp, Homo Sapiens
  misc_feature (254)..(314): n is a, c, g, or t
tggagagattggagagttggatataaaaagaccggcttggatgaaagggttttttcacacagtatatgcaggagaaagagctatgaaaaaaaatattccacaacaccgtatttgcttaaataaaatgtgccagcgggcgggggggcgcttatattttgattttttggagcgttcgctctggagaagtccgcctttggaagaaaggtccccccgagaaaaaccctttcgtaggaatctccccttggggggaattnnnnnnnnnnnnnnnnnnnnnnnnnnnnnnnnnnnnnnnnnnnnnnnnnnnnnnnnnnnnnagaattcccaaagcccctatttggtttgagcccggggtatttccttaggggaaaccaggtttatggccccagtttcccctttcccttaaaggggccccggggggcccaaaagaaaaggttttataaaaaatttttttaggggcccaaggcggcccccacaagagaaaattctttcgtgtgagggttgctgccggggttcagcattttaagggaggcgtttcttgtggtggggttggtttgtccgttctggttccgttctatttcaggtagaaatcatgtttccttttaattgaatacttaattcacaacgtttcctctcttgctggtactctggtaataattaggtccccacctctcaagaacattgcacctgactcgttttagattgagtgtgtacattggccccgtttcctgtctttctgactactctggtaatagttaggtcagcctctcctttcacttagaaagggattatgaatggaagggtccaaatcttcatcatccaaacacagaaaaccaggagctcaacacctacatggaaaccaaaatgtatcaggaataaagtacagtaccctttcacatactcaaggtcaagatgggtttgcagaaatcatatctgaccatctggcctctggtagtagatatggccccatcccagcatttttaagagatgtttttgttgtattatttccccaaggggtataaaatctaccaaaaggaatataatgaatcagaataaatcagctcactcacaagaaacgttcttgggtaatggtttttagttgctgagcttattcagcacattatttaaaagtggcaaaattcagggcaatctgagaattcaaaagtggcggccacaggtttgggtaggacacacatacatacaacccccatttttttcagtgtatatgtcaagaggtcaagacctcaagacctctgatcatcaaaataagttattttgtatattataatgcacaggacaacagaaggaaactttcttggaaggtgatgacaaggccttttgcaaaaggtccactccaaaaggactggtgcccagtgccttgtggccttcattaacttgatccctcctcttctttggttgcagtggcctcaatgggagctgtttcttctgcttgttctgctggcttcttctctctttcctcttcctcatcctcatcctcttggggatagaggtctgggtatttctgcatgcattcctgcatggcccggaactggtctacacagtctgaccccttgatctcctccgtgctatagtggaagcaggaaaaggctgacttaaactgttctccacagggaccgctggccattcccccaaggcatgggcagttccagttaatgtttccatttggcagtatcaatccatgctcctcgtatggatcgttggggtcatcagccaccaattctgcactgcttggagtttcatgatcttctttggttacaaatatgattcgatccttcccttcctgccggcaataggacatggctgcagcccgtccctgagaccttgcagaagcggcggtggcggcagctgcacctttacgccgtgacctccctctcctctggcagggcgggctcctccgaagcccgcgcggacccgccccctcccaggcctgcccgccgcgcgcctgcctcggcgccctcgcaaccgcggccgca

SEQ ID NO: 140504 - DNA, 647 bp, Homo Sapiens
acttggttttatccacctctggtgaaacatgagctcacttggtgctctctggcctctttattcccatctccttaggctgaccctgacaagtgccagggccaggcttggaccaagcagtcaactgagtcagcctgccctgggaaccaggcaggggagggagcttacggacgggctaggctcaggagagtaagagagagcagatgaagggcagaagtccgtggccgcagaggcagctgagcatgagggatggagcgtgctgctgtcctgcaggtgccgttagccctgttttgcactggtggattgatctgctcaggcgcacagggagatggcacagcaggacccgccgcccagcctcgctgagggcatgctcccgcctcacctccagaggctgttgggcggaagccgagagctgcagcagttggggccagcgtgggactggaggcccaggtgaatcttgtggggcaggggacggagctgaggctgtccggcccgggccctccccacccaaaggccctagaaccctagccttcaatccttggggtttgcttctccgacgcgtggcgacgcgtgggtcgacgattatcccgggaattccgaccgtaccagcctgctttttgtacaactgttctatagttcactattgcccc

SEQ ID NO: 140505 - DNA, 1621 bp, Homo Sapiens
  misc_feature (130)..(143): n is a, c, g, or t
  misc_feature (1219)..(1241): n is a, c, g, or t
  misc_feature (1273)..(1301): n is a, c, g, or t
  misc_feature (1366)..(1424): n is a, c, g, or t
  misc_feature (1494)..(1552): n is a, c, g, or t
ttttcaaaagatactctttaatagtggaaactgagggttacacagtaaggttcagacttcagcaggaatccttgttgtcaagtaaaagtttaacctagcagaagcaaatgagacccagatgtcctcaccnnnnnnnnnnnnnnaaaccctggtgttctaagcataaaaaaggaaatagaaaataacacagaccactctattttaatatttttaagtagcataaatcataatggtttgtatactacactgtacaaataatatactgttacttttgaaagaaaatgaacttcttatagggttttctgaaatagttactccatacagctaagatcttgaccctttagccattgctacagcagatggaatacaagctttgaggttccaagtcttccagttgtgcctgtttctgttgccactgagggatgagcctctcagagccctgtcgtggccctgtccatctcctgcgccaggaaacacaggttccgcaggtggacgcgtgccgatgagtacagcttctgtactttgctttctacaagcctccttcccctttaagagaacttgcgcttcttcatggcttccgccttgaccgccaagctcttggcacagatggtcaggaccacaatgagaacgcccaccacaaatgtcaccaggggccagaggaagcaatgcaggaggacaatctcatcatgagtgcgatgcagaagcacatcatctggtctttgatgttgattaaaatagcaagtaaatggctgggaaccaatctcatctttccagtactgttgccaattcatgacactttccaaattcttctgattttctctcttacagggagggatataggagcacttggggttggtcaggagctggtgctcgtcgctgtgcagcagcgccctagagttggactcagggttgttcacgtagacctggacgcaaggggtactgcgaaggtggccccctgcagtcggcgccacaggtgaaggtgcaactcgtacacctcgccgatctgctgcaccgacagcaccgtgcaattggccctccgtggcttgcagatcctgcagcgcgggactcagccagcagaagcccgaagatgaagagcgacacgacgccggagatgatgagaaacaagccgagccggatgctcttgtcctcggcttccgtgtaactcgtaagccacccggagcttcgccatcgccccccactctcggcggctggcgtgctnnnnnnnnnnnnnnnnnnnnnnngcgccgagcccgactgcctcgggcgggaggannnnnnnnnnnnnnnnnnnnnnnnnnnnnacagcaggggagtgggcggcgagggggagcgcgcgagaacaaaggggccgaggccagcgacgccnnnnnnnnnnnnnnnnnnnnnnnnnnnnnnnnnnnnnnnnnnnnnnnnnnnnnnnnnnngcagcagccgcttcagagcctcctgcaccctcgggcgcggggagcgcacggaccgctccagcttccagcnnnnnnnnnnnnnnnnnnnnnnnnnnnnnnnnnnnnnnnnnnnnnnnnnnnnnnnnnnntcgggtgtctctctgtctccatcgcccgctggccgctactccgctgactcgcccggcagctgccccaag

SEQ ID NO: 140506 - DNA, 583 bp, Homo Sapiens
ttttaatttatattaaaacaggtttaattggcccacagttcagcaggctgtacaggaagcatggcactagcattctgcttctggggaggcctcaggaagcttccagtcaatcatggtggaaggcaaaggggaggcaggtacgtcacatggacagacagggagcaagagagaagggggagggaccacacacttacttaaacaagcagatctcatgagtactcactcaccaaggggatggtaccaaaccatttatgagaaatccaccccatgatgcaatcaccttccatcaggccccacctccaattctggggattacaattcaacatgagatttgggcgaggacacagagccaaaccatatcactctgccacggtgttctgcggtcccctaagcaccgcctgccatcatcaccagctttgcttctcttcgcctgcagcgcctggtctccatgaacatgcctctgaacagcgacgggacagtcatgttcaatgccaccctgtttgccctggtcaggacggccctcagagaaacagagctgtcatcccaagtccagtaccaagccaaagaagcttctctcttggac

SEQ ID NO: 140507 - DNA, 571 bp, Homo Sapiens
ccgggcgccccgggctcccgcctgcgcgagcatcccggggacctggagcgggggcggtgtcggggcctctcagagactctcaggggagcaccgggcttggcggtctccccggatcccttgacggaaggggagattggctccagcctcagagagggctgcagaaccctggatggatgggaagtctggagtctccaggattcatggatgggaaaccctacttggctgtgcttcctgctaacacgaggccctgcgattgctgagaacaacagccccgagactgcgcggctccggggggaaaaaaacctggccccctttcaagccttgacagaaaacctttcagagccctgaactcccaccagcccgaggacggctccgatagctctgacaaatgagccgggactgtgcccagggctcccaggctgggaggggaccccggctcccttgttccttcctaaggtcggaaaaaaaagcgcgtgtcccttcctccaccacagaggaacagagaagtgtttgcattggtggatttttaaatacttgtttatttttattaaagtgcaattcacatgaaatt

SEQ ID NO: 140508 - DNA, 498 bp, Homo Sapiens
ttttggggggaaaaaatttaaaacgagaggaacaaatgagaagattgggaccaaggactcaggaagcaaggtgggatatgttcacccatagaccacttagctcccggcatacactccggctgcgtggatcacttttacatgctgggagtcaacttcctattaaaatataaatgctaagactagctcttcctgcctctgcttgagaaacagacaagctgtaggccagcagagagcagagaggttctctatgattgtgtgcggaagtgctggcgggggtaaagcaaaaacctcccttccaggagaactgtttcgaggcttgcagccagcccacagcactgatgggagatggaggaggcttggcaaaaacccaaaagaaaggtgtggcttctgtctgtcccagtgctgtggtactgcgagtcatccagttgccctctgacaccaccttggctcatgggaggaagcaactgcaaggcagctgaatgtcaggtctatgcaaat

SEQ ID NO: 140509 - DNA, 2770 bp, Homo Sapiens
  misc_feature (1141)..(1141): n is a, c, g, or t
  misc_feature (1263)..(1263): n is a, c, g, or t
gacgttgctcgagagggcggcacgtgtagctttgtttgtgcgtcagccctcgactacgggcggggtggggatgccagggctgtgtgcgtcgtatagtacgtagctgtcttgtatgtcgtgaggtttgcctccggtgcgtgccgagtgcggagtctcgagatgctgtgtgtgagtaccggctccgcattggagtgtgtcgcgcgatctcgtgctagatatgcaaggcagtaccgcttggcgtgcacacggccgcattgtcactgggggtgtcctgccagccagtgtggtcccagacctggccgtcggtcggggccgcgtggtggggcacacgaggtttttcgggaccccaaggctgtgtaagacaggtaagtgggatctttgtaggcagtagagagtgccacatgaatcccagggagtctggtgttcctgtcacctgacgacttgtaggggctggaagtgggggagcccaagcaggagacagtgagagtggtgagtttcacagacagggagggtcggcaggtaaaggtgaggctcagggaagtgttgaacgtgcaggcccagaagcgtgcagaggccttcaagtacctgcagcccagaccatgattagtgcctccccccctgtggggagagcatgtctcccccagaactgaggctcgagaggacaaggggcaggctggggtggggctgctgagcacacactgggtcagcccggggctacacggggctggtcacgtgaggggacctctaggcggagggcttggcttttttgcattccattacacaaggacagagcacagacgtggccggggacgctggcagagccagggtcgctccggacaggacagtgttagcgcagggctttcaggagtcactcttcttcttgctcttcttcagaaaggacggggtacggaacttcttcttctttttggacggggacttgcctggagacccatcgctgccagggtccgcggcggccccctcctcgacagctgagggggcagcctcttcagccaattcggggctgggtctggggctggctcggggctggcctcagtaggggcctcagtggggcttgggggtctatgggcttcctcctccttctctaacattgggaagccgagtgcttctgaaggttcatcangggacagatcggggagagtggcttaaaggtggcagcatcactgtcatctccagtagtcggctccggcacaaggtcttcctccagcttgatgggagtgctgggaggcgggtgggggaccgcangctggtctggaggactcttttctttctgttctctagcctcgtccagattctcttcagagcccttctgcttcctctccaccctccctgcggatattcctccagctcacggtctgtgagtgtgtgaaggggttggggcccgtggtgctcacaatgacgtggggctggtactccttttcaatgatggccttggaggccgtcaccagctctccctggacgaggctcctgtccatcactacaccacacaaaacctgggactgagggccagccgtcttaatgtcctgtaaattctgctctcggatcttgttcctcatctcctggacctcttttgggttagtgttcaatggaacaaacaggttagggacagcagaggtggaagttctatgtccatcctctttagtccacttagtcttcgacttgggactgcttccattctgcccttcctcggaagcttcgtcgccccggccagagttcagccatcttgtcttctcccgctgctgcttctgaaaactgtgtctgagtggggagcaagtgcccgaatcaccgtcactagcaaaggagtaacctgtgacactagcaggaacctccacatcgctgtattttttagacttctctctcagagcagggtatcgataagggtagccagttctgtagcccagattatcgagcatccgcatgagggcttcaaattcctgctcaccaatctgccacttgggaggcgatccagtgccttcccctaccggagaccctggggaacgggacttggctttgtacttctcaggattcagcaggactaagttgtctggtcctcctgcactggccagagttcgaacctggatctcacaggcaaccacaaggttatggatgtaatagaaggcctcctcaacgctctctccaactgacacgagcccatggttccggagaataagaaccttgcttttaggccccagatttttctgaatcaaaactttttcctcttcatcaaccagaatgccatggtagtcatgataagccacttctccaagggaaagcgcctccggggagattggcaagaggccacatttcattgcagagaccgcagcccctgctggggtgtgaatgtgcacgacgcacttcacgtccgggcgtgcagcataaattgcagagtgtaaggtgaagccggcctgattcactcccagattagtgcttccacgatctactatatctccttgtagattgatcttaaccaaactggatgcagtcacttcactgtaaagaagcccaaaagggacaatgaggaagtgttcctgctcggagttcactctggttgtgatatgattgtagataagctgagaccacccaaagagatctgctagtctataaaacgctgccatttacaccgtaataacttctctcctttgtcatacgcatagaatcagatcctctaagatcgttcacaggagtcaccataccaagaatcatgttaagccctcgtgccgaattacacagccagcctcgtactagccgtatt

SEQ ID NO: 140510 - DNA, 1092 bp, Homo Sapiens
  misc_feature (1069)..(1070): n is a, c, g, or t
ggagccgacgggcggtggccgcactgggaccccggaatcccgcgcgctgcccacgattcgcttctgaggaacctagaagattgtacaatgaatggtgatttcgtgctgcggtggtgacctcaccacccccgaccacagcccctcacaaggagaggtacttcgaccgagtagatgagaacaactcagagtacttgagggagaggaacatggcaccagaccttcgccaggacttcaacatgatggagcaaaagaagagggtgtccatgattctgcaaagccctgctttctgtgaagaattggaatcaatgatacaggagcaatttaagaaggggaagaaccccacaggcctattggcattacagcagattgcagattttatgaccacgaatgtaccaaatgtctacccagcagctccgcaaggagggatggctgccttaaacatgagtcttggtatggtgactcctgtgaacgatcttagaggatctgattctattgcgtatgacaaaggagagaagttattacggtgtaaattggcagcgttttatagactagcagatctctttgggtggtctcagcttatctacaatcatatcacaaccagagtgaactccgagcaggaacacttcctcattgtcccttttgggcttctttacagtgaagtgactgcatccagtttggttaagatcaatctacaaggagatatagtagatcgtggaagcactaatctgggagtgaatcaggccggcttcaccttacactctgcaatttatgctgcacgcccggacgtgaagtgcgtcgtgcacattcacaccccagcaggggctgcggtctctgcaatgaaatgtggcctcttgccaatctccccggaggcgctttccccttggagaagtggcttatcatgactaccatggcattctggttgatgaaagaggaaaaagttttgattcagaaaaatctggggccctaaaagcaaggttcttattctccggaaccatgggggctcgtggtcagtttggagaaagagccgttgaaggaggcccttctattactcccaataaaccttggtggnnttgccggttgaagatccaggga

SEQ ID NO: 140511 - DNA, 284 bp, Homo Sapiens
ttttagcccttaacagttgtttaatgcaatttgttaatgaacgtaatggtggggactaataatgaaagaaaataaaaacgtctaaacaggcgccaagttgctggcaatgcgcaattatttccttgtcaagtttttatgatttaatgagcccctctgggactgacggctgtcagtcagtcgtgactttttgacaccattacaacttcaaatacagcagcaggcaggctgttttcctcggatttgaaatactgaaatgatctgacagttttaaagaaaagatgtgc

SEQ ID NO: 140512 - DNA, 995 bp, Homo Sapiens
gaggcctgggtggcgaattcggcacgaggaggatgtcccaagcttgggtccccggcctcgcgcccaccttgctgttcagcctgctggctggcccccaaaagattgcagccaaatgtggtctcatccttgcctgccccaaaggattcaaatgctgtggtgacagctgctgccaggagaacgagctcttccctggccccgtgaggatcttcgtcatcatcttcctggtcatcctgtccgtcttttgcatctgtggcctggctaagtgcttctgtcgcaactgcagagagccggagccagacaccccagtggattgccgggggcccctggaactgccctccatcatccccccagagagggtcagagtatccctttctgcgcccccacccccctacagtgaggtgattctgaagcccagcctgggcccaactcccacagagccaccccctccctacagcttcaggcctgaagaatataccggggatcagaggggcattgacaacccggccttctgagtcacctcctgcctggaatcttgccatcagcaacctcttccccagtgcctccttggatcaagctagagactgctggcaccccaggaatgtccctgcccatcctgccgtgtctctgttcattcttggatttaacttattactttttctgcttctgtttccaccccagctgcctctcttgtccctgagggttaggctggagtgacagttttccgcccaccccccagcccaaagaaagaggctgccggaaaagaaaatgctgaaccattggaggtgcccaacagtagaaatgggctactgtgaggggtagtaagagccccatttctggaggtatgcaaatcttgactggacagccagctctgagattttatcagggcacttctatacctgtgggacattggactggatgagccctgagccagcttccactcctgaatagagaactcactgcacccacccacaacacatgataaacacatgtcctca

SEQ ID NO: 140513 - DNA, 381 bp, Homo Sapiens
ctgaggccccagacgcagctgcatcctggagtccttctgagaaatgtgggacctgccccagctccaccccaggggcagcgagggaggcgttggatggagccaccccacggctcctctgtgaaggtctgcacgtcactcagaaagttgaagcaaaccaagcagggttggagcccacagttcacagccggctgcacaggggatgcaccaagcacagtttcctatgacaagtggaaacctgtgcgccacagcagcagatggctccgaagaagtggagcgttttcatcaggttcaactttgaaacctccaccatcaccatcaccagcaccgctgtgtcatgctgataacttgaggacaggcaggacaaggccttctggcggccgc

SEQ ID NO: 140514 - DNA, 946 bp, Homo Sapiens
  misc_feature (898)..(898): n is a, c, g, or t
  misc_feature (935)..(935): n is a, c, g, or t
aggcttattgttttctctgtatttacctaatattttataacttttataatcagaataatgtccttcataaatttgtttaattgaagtcatctacttctaacaggacagatacacaactatttgaggtttacaaattacatctttgataagggaaatggtttcgtgacatgtacacagttgctattaaaatgtaactctatatattctatatgattgtaaatattttatacaacaatacaaataaaatatttttctattatatttattatgttgaaacacagtagttgtttcctgttagctaatataaataacataaataacactgtcaaacaagaagttggaagtgctgacaattctaggcttcaagatttaactcatgctgcaattacaccctttcatgcggtttggagttatcccaatatttgttcagtagattaaaatgaatgcatatttaaacaccatttataagccattattgtgtactttgctaaagcagtctatataactgttttgttatgtttggcataaaggaaacataaaaacattgcagcatctaggcaataaagtgtcaaaaggagaacttaacttagggtatttcatcattgaaagtagtgggaggggtagggaataggaaaacactaaaatggttctgaatgaaatttggaaagtggtagttgtttgttttggtgacagtggcatgtgcatgcttcagtggaaaacatctggtgataaaaatggacaacagaggaccaatgctcctaagggaggaaaaggggctgagtaagaataagaaaagtgggcattaacgtccaacactgatattacaggttttgcagctgggatctttctttgcatttgcagtagacaaactcatgagctgatgaccagtgatttctgncacggtgcccagagaaagatccacagggtcagtgtanatgacttctaa

SEQ ID NO: 140515 - DNA, 475 bp, Homo Sapiens
ttttttttgggagaattatgtcagtttactgaatgaatacatggctcgagtccattcagggtggagtgaggcctggcaggtgccctcagcagtgggaccccaggccactggacctggcagggcttctgggctaagggggcagcaccaggccagcctgccaggggctccacagtcccacgctgcttgacctgtgctgtctgggactagactggtcgctgtggctgcccatagatgctcaagccagaccccaaaagagagtggcacaaggtgaaaatctaactgtgaacgctttggtttcagtttcagtaaagaggaggagggagggaggcacttggggacgtataaagaagggctggcgggagaggtctccgccgagctccacagttggcttccttgctagacgacctggctttgagaaatgctgccttcatttccatctcccaactccgaattttcattttcctctgttctgggt

SEQ ID NO: 140516 - DNA, 477 bp, Homo Sapiens
ccatttgatagttttggttacaaaatagaaatacagaaacggaagtcatttattgtattatgccatggaaagtggatgactctcatggtgcaagtgcagtctatgtccgaaagagggagtagtgaaatcacagatagcatcatggtttttctgactttttgcttctgatatttcccaacttaagagccagaggagagtagggaactgggaaagaagagtttcagctgttggatgaacagatctttggagtaagcagttctcgcacactgcagctttagagccattgagcagaacacccagccaccaatgcccttctgtgatttcccaagtcctttcctttaacctaagaattaaatacttttaaacattcaataattatcaagatgatatccttgttgctagaagcttttaattctacttaaatgaactggttagaatctaaaacgtgttcattgttaaataaactggttaaaatct

SEQ ID NO: 140517 - DNA, 559 bp, Homo Sapiens
gatgctattttaagtgggatttccttaacttcatttttggtttgttcattgctagtgtgtagaaattcaccagatttttgtatgttgatcttatatcttgcaaccatcctgaatttgttaatcagttctaagctttttagttgattccttagatattctatacattaagatcatgtcagctgtgaatagagacaattttacttcttcctaatctgaatgccttttctttctttttcttgcctaattactctggtgtcttagctcaggctggtataactaaataccatagactaggtgacttaaagaagagacatttatttctcatagttctagaggctgggaggtccaagatcggggtggtttcatggctgggttctgatgagggctatcctcctagctcatggatagccatcttcttattctgttctaagcagaaagacaggaagctgtgggtgtctcttcctcttcctataagggcactaatcccatcatggggctccatgctcacgatctcatctaagcctaattacctcccaaaggccccacctcctactaccat

SEQ ID NO: 140518 - DNA, 552 bp, Homo Sapiens
  misc_feature (87)..(120): n is a, c, g, or t
tcacaagtatcatctttattttacctatagtattttaaaaatcgcaacataaattcctccccagaaatattttttacagacacatcnnnnnnnnnnnnnnnnnnnnnnnnnnnnnnnnnngtcttttggcaaaagcaaaatcagactaacaggaaacacatcagccctactcagacactatcttctggcctgcaatgaccaatcctatttgagacaaaagctctcaggctggtgagctgtcaaatcgctctttttcttccaccttcccaggatcattggtttgagccaagggtcccccatggtactgggctgtgattgccgcataggtgcagccatagatggcagctgccaacatcatgagacacacaatcccacacacaacgccagtgatgatgacagtggcaatggcatgacgcaggttggccggccttggcttgggtttgagctcgcactccaagagttctcgctcccccgcgttgtggttctcaggaggcctcaagaccacaccgggggcagagccgggccactgagcctgcgaagacactggatcag

SEQ ID NO: 140519 - DNA, 419 bp, Homo Sapiens
ttttttatgttctttttgtttttagggcatgtctcactaaggatgtacaatgaaattaatgtttttaagtcacatgaaattgtctctttctttgtggacatgccacaaatcaatagttatgtttattccattttggttttgatgtttaggaactgatttttttaatatttcaatttgtttcataattatgtaaaaatatttatgtggtttcaaaatcaaatctacaaaccgaagcatattttgaggtatttgacctgttcctttttctctctgtcatatctcttcatccccttatatgagataatttttaaaaatatgtatggtttatcttttcatttaaaatcaatgtattaacagtacatgtataatgttatacccacacacatatatttatatcacaacttcctggataaatgttg

SEQ ID NO: 140520 - DNA, 550 bp, Homo Sapiens
  misc_feature (114)..(115): n is a, c, g, or t
ctgtacaggttcatatttgtagcgaaagtcgtttttgtcccagccggcgatcggagtgggccttttctttctttttgttcatccttaacattttttgctcgctatctaactatnntgacgactctgtaaggttggtttgtaaattattctacggaggcaaaaagggaaaataaaaacttgcccttccctggctgacccagtcgggaaggtagggaaggaggtctcccgttgggagagtctctgttcctgctgtattatacaaactgtaccatagtcctgggaaaagggtggactcaccgctgttgttttatgggaagtcgtgtcatcctaggggttggggctggcagagcctgtcccctccccccttctccaggagccagggggtgactggagagacagacccacccccaagcagggctcctctccccagggtgagcacaggacctctgtaagctgcttgtgtattgtccactttgacgatcagtcattcggtccgttgatcaataatccttcgatcttgtctccaattaaaccgaggctttcaccgata

SEQ ID NO: 140521 - DNA, 491 bp, Homo Sapiens
  misc_feature (253)..(274): n is a, c, g, or t
  misc_feature (354)..(398): n is a, c, g, or t
ctattttcctattaggttgttttctcattgatttatcagagttcttcatgtagtcttgagactatttatctcttctcccagtttgtagtttagatttcactttcttaagggtttatggatttaggttctaattttcatatggtcaagtatgttcatcatttctttttaaattctttttgtggcttaatgagtctttcactaccccaaagtcaaaaatatatttacctatattttccacacaaaattatatagnnnnnnnnnnnnnnnnnnnnnngagacagggtctcaccctgtcccccaagctggaatgcagcggcgcaatcacagcccactgcagctttgaactccggtttnnnnnnnnnnnnnnnnnnnnnnnnnnnnnnnnnnnnnnnnnnnnngtgcatgccactacgcctggttaatgttagttaatttttgtagagttgggggtctctctatgctgcacaggctgggctcaaacaaaactcctg

SEQ ID NO: 140522 - DNA, 486 bp, Homo Sapiens
tttttataaaacagccatttctttattcttatattgaataacactatgtgagagagtagatatagtcactgtaataaccaccatgattacagagatgagctttaacatcattccagctgtttgcagccagagccacgtgatacaaaaacatctgtgactgctctcaggccaaggtgacaggtcctgcagtggtttgttgcctgcattcatcaaggaaggaaatactaaatttcgcctggaggttagtgaaaacaatgatgtaactttttttctcatcaaagttctctgaccttctgacttctacccatggaatcatgggagcccagcatgtccaggtgaaaattcttgccttggaaaaaacctccgaggcccagcttgctgcctcgtgtggctctgcacatttctgagtggatgacaacggtctcattgtcccaggagctgttatttcttctgcatacgggtggttgctgagggaggtcagggtgc

SEQ ID NO: 140523 - DNA, 373 bp, Homo Sapiens
ttttttgggttaaaaagttccgtttattgggggtatcgctgcagacagtactgcctgtcccagaagtggatttcacacagaccagtctctcgcagcagagaggggaagccctccttcccaccccagatacactcttccaccttgtcctagcaggtaggaagaaatagggctgtgccccttcctttccctcccacctgccttcccatgggcttcctttgtgaaagctggattgcctttgagaaacccctgcagccctgagcccaccccttgccccgcaagaaacagccaggttggagggagagaacagcagcagagggccagccacaggctcgatggcatttattctgcaccctgaccaccctggcctcaactg

SEQ ID NO: 140524 - DNA, 140 bp, Homo Sapiens
gaaggaaaatttgtattatttcaattatttttatctttaaatttgtggtattttggttgtatattctagcaggctccatcctagaaaaagaagagcagcaaataaattttaaatcacattcagttgtcttaataatgtag

SEQ ID NO: 140525 - DNA, 586 bp, Homo Sapiens
ttttttgtattatacaccttgtagaactcattttgctggctgaaagagtatggaataatatatctcatgtcattttttagaagaaaaactatttgaaggtattttttggttttccttaacatgtatccactgtaaacgtttgtcgtgtacaagctcagagcttggacagaattttttgtatttgtaaattggtttaaatacatggaattttatacaggttttctcctgtgttatatatgcattatgtgcaggtatgatattttcttcactactttttctatcttaatatagtgtggaattttattgtattattcttccattcttaatactgtaccacattcctgctcagaaactgctcacttccttaaattgtcttttttcccccagcgtgaaatgtatccatttataactgcctattgcctgttctattagcatccaaaaatgtggaaggcctcccaaccaccatttctgctgtgtccttaggatgtgcagtaaaaaatatagacctaacagtttatgttatagaatggctttatttactttggtgactgtttatagtttttaaataaaagactaaacatttaaa

SEQ ID NO: 140526 - DNA, 1058 bp, Homo Sapiens
gcatgacttcattggcgtcagcaacgttttgctgttcgggtttagccgccatgtttaagttggccgggtttcgcaccactgaggtcatggatactcaggcctctttgcgtgtttcttcaacactgcttctaaggttaaccgcgttacatttgttggagaaaatcctgggaacgctgaaaaggactagtgggtggggtgcgagggtggggtcttgcccgaattaaagatggccgcagtcagctctgccccgcgcaatttcacgtcaacttttggagctgcgggagccggccagttggcctcagcgcctccttacggaattggcgtaaggcaaagaggcgcggctggaagaaccagactgagaaagtgccacagggcgggggccgcatccgcccctcggcttctggttactgacccgacggctttgtgagtgaaagtgaagagacacttcgaggcaggtgtctgtgctccccattcatccctgtttccgtggctatcttgactttcggggtgaaaagtgaggttaggccctgtttccccgacccttccctcgcgccatcacactctagtggcctggcacagccccagaggtcggccgctgtagcccccattgcggactcgccacattcatattggctcaccttgtcggtgcccggttcggtcctcttggagctcacactccagttgaggaaatgaatggacacaggaactactgggtaacaaaatactaataaagggctgcgattgtgtgagtttctactgtagcgatgaatgtcgctgtcattggaacgttccccaagtgccttctagtgaaagccttacttcactcggaataacctgtggtcttttcttgaacgtgatggctctcttggttgtattcttcatgcacatgtgttacttttcctgtttaactacatgttaaagaaatgtgtatgttcctgtttaactgcatgttttaaaaaagtatgtgtatttttaagttataggcacgtgcaagaaagttcagagcaaaatagcttatattagtgaaacaataaatgtctactaataggagaatggaa

SEQ ID NO: 140527 - DNA, 497 bp, Homo Sapiens
  misc_feature (196)..(420): n is a, c, g, or t
ctaaggagcaataacctaatgagtatgtaatactaatgtgtcagttaataagggcaattacttttgctcttattttcctgttatatgaaattaacaacatacctgctgcaatataactcatttggtacaatttaggtgtttcgagaaattcaacccactaagatcattagcgtaattcatttttatgctacacatnnnnnnnnnnnnnnnnnnnnnnnnnnnnnnnnnnnnnnnnnnnnnnnnnnnnnnnnnnnnnnnnnnnnnnnnnnnnnnnnnnnnnnnnnnnnnnnnnnnnnnnnnnnnnnnnnnnnnnnnnnnnnnnnnnnnnnnnnnnnnnnnnnnnnnnnnnnnnnnnnnnnnnnnnnnnnnnnnnnnnnnnnnnnnnnnnnnnnnnnnnnnnnnnnnnnnnnnnnnnnnnnncttttggatgtaatgaaaaatggataaacaaacggaagactatacagcaatgagaatgaatgaactacaaatacatg

SEQ ID NO: 140528 - DNA, 670 bp, Homo Sapiens
  misc_feature (403)..(528): n is a, c, g, or t
ttttttgattttaggtaacagaaacaaacttctttattcgatttctctgggaaaaaagtaaagaaaatccaaacattatctgttctggtcaacacgtgtaaggctcagtcctgttttatttctccccttccccttcaaatcctttttccttacacttgattctacatactgagaaaagttccagtgcatctaaaggagtatgtaaccctgagaatttatcaacttattcccatgacgcaacaattgcttagacagcatttgggaatgcttctattcagagctagtgataagcctcaagaggaagtcagtcttattggtttacagttgcattttaggctcatgtatagaagagctaatatagatttcagagtcttacaggtgtttgaaatctaggctccacttnnnnnnnnnnnnnnnnnnnnnnnnnnnnnnnnnnnnnnnnnnnnnnnnnnnnnnnnnnnnnnnnnnnnnnnnnnnnnnnnnnnnnnnnnnnnnnnnnnnnnnnnnnnnnnnnnnnnnnnnnnnnnntgtctttattccctccttctttcctccctgaccccgatttcccagaaaagcacacttctgaggtctgacttctgagaggttacagacacaatcaagcttgatgcttgccaggaaatgaggggctagacttgagcgttaggga

SEQ ID NO: 140529 - DNA, 637 bp, Homo Sapiens
  misc_feature (121)..(121): n is a, c, g, or t
  misc_feature (166)..(166): n is a, c, g, or t
  misc_feature (169)..(169): n is a, c, g, or t
  misc_feature (171)..(171): n is a, c, g, or t
  misc_feature (176)..(182): n is a, c, g, or t
  misc_feature (185)..(189): n is a, c, g, or t
  misc_feature (373)..(408): n is a, c, g, or t
atttgggggggaattcccaagcccctagttcattgccccgggttcttctttagggaaaccgggttagggccactggtcccctttacctactgggggcccccggcccccaaacgaaagggtnttagaaagttttttcgaggggcggagggggcccgacatttttttnttntntacgnnnnnnnttnnnnngcgggtgtaatccgataactttattttaattgaaaatggaggcataacatgtcctagaaaaataaagatttaggatacaaaggagacacagcggcagggctgcccccagggatgagggaatctttggtctgggccggataatgaggacaagggcttgagtcgaggggagctggtgaaggaagannnnnnnnnnnnnnnnnnnnnnnnnnnnnnnnnnnntggcaggaaatgccacactggggagggtctccagtctcaggggcgcggggctgcctgtcctccaccttcggattccaggcagttgtgacaacaccagctatcggcagagctattaatagtgtttcagggagtgacagggagagggctctgggggctggaagtccggccctggggcagggtgttccgcttacagctagtaccaagtggagggggcagggcccctgagtca

SEQ ID NO: 140530 - DNA, 433 bp, Homo Sapiens
  misc_feature (392)..(392): n is a, c, g, or t
tttccaacaaaacactttattcattttttttctatatagctccttccaaaggtaattccccctgcagcctagccagtctgacctctctctccatgcttgccacttttgcagaacaacaaaacaacattgggatgagattcaacattgggattctccattggtgggcagcaggggtggaatctactctggggcacccacctttagggactggcaagtggggtcagatggtcccgctgctccctactggctacgacgtcgtttcttccttctgcccgtgacaaaactgtcacaccgccttttacgaggctgtgagggtcgaactactcccaaagcttagggtttctccctggggaccacaagttgagctcctgaattggggtgtctttcagtangggctggacctccagctagagctcgcttcccagacttggca

SEQ ID NO: 140531 - DNA, 1384 bp, Homo Sapiens
  misc_feature (828)..(828): n is a, c, g, or t
ttttttttcctgaaccaaaattttattttaaattaggtttttagtgcatatgaaaattgttcataacacatgacacataaagatgttggcacatttgaactacaatagaaaatatttttatacaacttttgaaattacgaatatgattatttctcctgtgaaaaaatgcagtttgcttaaatcagctttgttatggaatatcaagtaggtttaaaatttttatattattgtttaataaacttttaataaggctgtgactctccttgatctacacatattttttaatgtattgaatactgtagcagctttttctctcatctctggtggaacacatttaatatctaaatattcatagagtttagatctagaattacacagcatgttaataacagtttcgatgtcatcaattttattacttgttcgtcctactggcaataactgggacttatacattgtttttaatttatgttctgctgctgctgctagagcaaggcttcgttttaggtgatctttagaggcttcaatatcttctctatatgctgggttgctggtgtcactaagaagtgcctgttgcacttgtgaattaatatctaaaatttttttcaaaatgtcatcattattccaactctctgggtgctttccaaactcttcgggtttttctatcgcagtttcacctgagagctgaggaacatcttctgattctgtagagatctcaatgcccagtgctcttatctaaagttgtgaccaggtgacttgtatgaggtaacatatggacttgtagatgattcagtaacaactggcaacattcttggtgcctcagtttgtttntgcagctggctccggctctggctctggctcttcattttcaatataaggttcctctgcatgcaaaacaatggaaaacattgtttggtttgatcgaccagaatggggtactttccgtgtgtttttctttcctatttccggtgtgaagcctcctgtagggaaagttgtagtttcttcactgataggattggttaaaacatcattctcagttgaagcgtctccatgtgtaactagctccttaaattttgatccctttgatgctatagaataaacatgttttggagagttagattttttctcacgacctggctccccagagggaacacttcgtactaggttctctaaaacttgtatataatgattcaagttttgctcttcatcaggtgtcacagttatgctcggataagccggcacagacgaaggccatagcaaaagcgcaactagaaggactaagggcttcataggcgtcgtccgtagcactctgccatgcgaccggaacgtcctggggccaccaggctgggaacctcaaggccgaaagggaaggtgtcagcggagtccc

SEQ ID NO: 140532 - DNA, 443 bp, Homo Sapiens
gcggccgcccggatgctccggcccgacttgtgccccgaattcccctggagaccctcgcactagcacggcgtcaggaggaggcttcgggtgacgagacagcgggcaacggctctggtccagagcgcgcgtgtccgccgttggaagcggtcacggcggaaccctcaaatcgccccctttcctagagacctcagcggagccgcgagcaaccgcgcagcccccgcgctccagccctgcgccctaggcacacgccccagagcagcagctcgggttcggcgccgactccgcgccgagaccagcccgctagggtaggactcacagcacccagctcccaggagggcacgcagaggactaccgagccacactccgccccacgctcgcccgcttggtacttgccaccgacccacgcgagcccgtttggtactagcccgccgcccctcgcgccc

SEQ ID NO: 140533 - DNA, 354 bp, Homo Sapiens
tttacatcaatctcaattttttttaaaaaggcagatggttttacagttgttttatcaaaactcaaagaacaggaaagcccaaattatttcaacaaagtcagaccttttaaacagatgatagctgcccaagtcatttttatgaaacttctttatatcaaaacctaagtctaaaaagagaaaagtgttgaccttgatacgggctgtgttaggcagagatttcaatgaagtcctctctgaagaggtgacatttgatctgagacctgaagcaccagaaagaggcagccaagccaggaagaggcaggaatgggaaggtctagggaaagactggtcctggcaggcggaactgcagtggca

SEQ ID NO: 140534 - DNA, 619 bp, Homo Sapiens
tgagtgtttgtgctttgtgcagttggggatctcactttgctgaattccttttccactggcttctgatgaagaataaattgagagggctgatagggatgttctgctgattcttattgtttgggacaagggggtgtgttggcaagtctcattttgaaactgtcacttcttccagaatatgcaacaggacagatatttacacaaataatgtggaaaattgattgtatgggcctgctgggccatagggaatttcccttttggaatcaaaatttaggagatgcaattctgagacccctgaagctaactgaaacttccatttggaagatcctattttcttgagtccttctgtgtgagctgcttcaggtttcatgctactttgcccccctttgttgctatattttgtaccagcagaggaagggggaaaacccctcatcttttgatgtttatttgactattgaggctaattgttcatttgctgaaaaaaataaaagcccaagggtctttaaaatactccattgtctgtgggtgtttgggcacatgggcaaatatgagtatttttgcttgtacatgagtatattttttgtccgtgtgtgttaaaaagtgaaatgtgagcaccaagctt

SEQ ID NO: 140535 - DNA, 532 bp, Homo Sapiens
tctcggtcaataatttattagtaaaatatacatttctcattattaaagaataaaagctttcagccctgctgaacacacatctgaggtctcaagaaaaccagacaagatagctgactctcccacatagccctttccataaaggcgattcctaagcttaaacacacacaaagctggggctgtccctcttgaatcccatgggaaacaggccccaagatcaggggacctggagtcgggagcttggggtgcagtctgctcactgacaccctctcgaagagcacgcaggggaacctggtcctgggatggagtctttctggggatgccccacgtctgtgctgcctggaaccgggtgcccagggcagccggctcagcaggccccagagcaggggcaggtgtggctgggaggggctgtatatgtggcctcctgaacacagcgggagaccagcggccacctggagacacgtacacacacacgcacccgcaagcacacagctcatcccagcctggtgcctgcagacagctggggctacacgtg

SEQ ID NO: 140536 - DNA, 441 bp, Homo Sapiens
ttcaatgccagggcccgcgaggtggagctcgagcacgaggtcaagcggctcaagcaggagaattataagctgcgggatcagaacgacgacttgaatgggcagattttgagcctcagcctctacgaagcaaaaaacctctttgctgcccagactaaagcccagtctctggctgcggagatagacaccgcctcgcgcgatgagctaatggaagccctgaaggagcaggaggagatcaacttccggctgaggcagtacatggacaagattatcctcgccatcctggaccacaatccctccatcctcgagatcaaacactaaggcacggggctctctgcagagcagccttaggaccctgggaccaagggcagaccctgcccaaggatgcaggcctaagccgggcctcacactcacactgtaaatgtctctctggccaccatgaaa

SEQ ID NO: 140537 - DNA, 196 bp, Homo Sapiens
ttctgctttggccataataaacatttatcctgatgccttaaacactagacaactcagcagattacatgaaactactgtgctcaaacactggacagtaggaagcacagtatttttatctatgaaagaagagaaacgaacaaggcagatcctatgataacccagatttctgtgtggggcactttctagaccacccagc

SEQ ID NO: 140538 - DNA, 881 bp, Homo Sapiens
ggggtttttgggggtagattcgagttacaaaatggccgcccggagcgtgttcggcgcggttcccccagctgtctctggctgaaccggcgctctcgcctccctgccgaacacagcgtgaggagcccccccagggatatggtgtttgagtctctgggcttgccgagcactaagtcctctgagttccgcagcgcagcaccggaagcggccgagcgcgctcagcccggcgacccctgcgggctccagacccctgcgccgctgcgccccgggtttcgccgcaaccaagacccagcgagtgcagcggcggccgccgaggaggttcgaaaacatggccaaaagaaatgccgagaaggaactgacagataggaattgggatcaagaagatgaagctgaagaggtgggaacattctccatggccagtgaggaagtcttgaagaatagagccataaagaaagcaaagcgcagaaatgttggatttgaatctgacactggaggagcctttaaaggttttaaaggtttggtggtaccttctggaggaggacgcttttctggatttggtagtggcgctggagggaagcctttggaaggactgtcgaatggaaacaacataaccagtgcccctcccttcgccagtgcaaaggcagcggcagatcccaaggtagcctttggttctcttgctgcaaatggccctaccaccttggttgataaagtttcaaatcccaaaactaatggggacagtcagcagccctcctcctctggccttgcttccagtaaagcttgtgtcggaaatgcctatcacaagcagttggccgccttgaactgctccgtgcgggattggatagtgaagcacgtgaatacaaaccccctctgtgatctgacaccta

SEQ ID NO: 140539 - DNA, 848 bp, Homo Sapiens
  misc_feature (541)..(561): n is a, c, g, or t
aaaagactcagccccagtgccagtgctttcctggttcaacaacccaccacaaaaccttagtaaaaggatgagccaaaaatgaaaaagactcgactctacagtaagtcagtcagggatttcctttttaatggtttaagacatccaaatggcaagccaggaatagataccattaaagggtctcataggactaaccttaccagagccagaaatctagctctctggaagagatgcaagattctagaaaagtaaagggaagtgtcggcacatctaaatttagtgaacacaaaattaatttttatctagtctgtgacggagggaataaagtttttcatgtatcaaccacctcccccagtcaggtttctccctttttgagattatgaagaagctgagacatacttcttaaggaggtcgtgttttagaaggaaaaggcagaggctatccatcattatgctggctagatgcgcttctgaagaagccggattctgatgttcttaaccaaaatggtgaggtcatggaagtcccatttgcttggagattttgnnnnnnnnnnnnnnnnnnnnncccattcccataaagtaattgagttcagcctttggattatttttggtttggtttttctctggttttgggtgtgatgtaagaagagctttttagttttgttttgaataacatcaatccttgcacactctatgcaaaaattttgtaagcatttcaataatgctatgaattacaaggaactattttaactttattacactttctgtataaaaaatttgtatttaatattatttcgaccacagtcttgtaaaatatattaataaaaataatgattggtaagaaggaaaaaa

SEQ ID NO: 140540 - DNA, 446 bp, Homo Sapiens
aggggtcttatggtttttgatttcttcttaggcctgtttaattattttttttcctcagttgactgttggcacctggttcctctgtaaactatattccttggccttcagtctcaggttggcaatgctgttggccatgttgatgccctgtgcagggctattgttggcacatgtggcagaataagtagccatggcgcttttcagtgtcttccgttagaatccgttatgaagcccctcgtgtaaacaacatcttgggagggacgaggatctgtacggagacgctgtcccccaggagagataattcggtgggtctcggagcaggacaaggtacgatgggctgctccacagcattcacgtctcctgagtaggatttgaggaggggaaagcgtttttattgggctagcatgggctctctcattcctgcggaactttggcttctcggttctgaa

SEQ ID NO: 140541 - DNA, 421 bp, Homo Sapiens
agaatttatgtttattaggcactaattctgggccaattctcaaaactatcctgtgtggtttcagaaccgaagagccaagttccgcaggaatgagagagccatgctagccaataaaaacgcttccctcctcaaatcctactcaggagacgtgactgctgtggagcagcccatcgtacctcgtcctgctccgagacccaccgattatctctcctgggggacagcgtctccgtacagcgccatggctacttattctgccacatgtgccaacaatagccctgcacagggcatcaacatggccaacagcattgccaacctgagactgaaggccaaggaatatagtttacagaggaaccaggtgccaacagtcaactgaggaaaaaaaataattaaccaggcctaagaagaaatcaaaaaccataaa

SEQ ID NO: 140542 - DNA, 614 bp, Homo Sapiens
catgttgatgccctgtgcagggctattgttggcacatgtggcagaataagtagccatggcgctgtacggagacgctgtcccccaggagagataatcggtgggtctcggagcaggacgaggtacgatgggctgctccacagcagtcacgtctcctgagtaggatttgaggagggaagcgtttttattggctagcatggctctctcattcctgcggaacttggctcttcggttctgaaaccacacctgcactctcgcctcggtgaggttcacccggcgggcaaggtcttctcgcacaaaagcatcaggatagtgtgtccgctcaaagacacgctccaaagcctgcagctggctgctattgaaggttgtcctattccttcgctgctttctcttctttttttcttctgagttcagctggtcattgtcctgctgcggggtgtcgctgccgctggtgagtcccggcgactccagcaggctccggccagcctcgcccacgttctcatccgcctgtgccgccaccatgtccccggcttcctccaggtctagcaggtgactgacggagaagttctttttcgcctgcagggtgtcgaggttgcccgggctgtccaagcggccgc

SEQ ID NO: 140543 - DNA, 523 bp, Homo Sapiens
ttttcttatttcaatagacagaagactattttcagtgtcctggatgaaaggattcttggtgccatggagcataaacccaaggaacttctggaggcacaaatcgattaggaaggtaagggtatgtagcttgtggtaatggctgatgagaagcatattgtgaaaaaattggctgccgaaaattagaagcaggtatttgagattgaaaatacccattcactggcacaaagccatttgcttgtggctcccccgcaaaataagtaaaatattgagagtacagaagattagaatgtgtgccctgggcagtacttgcaactgtggtcaacagcccagaaggagatggctgtacttcatatgatgttatcccttggtatgtctgggtaatggcattgccattgctgttgctgtactgataaacacaccaagcagagtatggatatgaagttccaaataaatgctcagaagaattatatgttgggttacatgcagactgtggaagttcattccaatatgtggcagcattctg

SEQ ID NO: 140544 - DNA, 373 bp, Homo Sapiens
atgtgcacctcattcattgtcggggtcctgagatttggttaccatagctgggcacatggcaggatgtgcctgcgtatctagcccttcatataatggcagaccctgagactcaaacaggcttttcctggccagtggtttcaaacacgtcctggtagttcactgctggagggagcacaccctgtgcaactcaggtggtgaaggactcaaaagcttatggctaccctctccagactgcttgacttacacctttttcctattgttcttgctctacagccttttagaggaataaagcccagttgggagtctaacatgctcctgagtcttatgagtcctgtttgtgaattatcaagcataaaggtggtcttgagacatc

SEQ ID NO: 140545 - DNA, 1125 bp, Homo Sapiens
ggggtttctcaggacacaccgtttattccacgggggaaggcactggaggccagggtccatttgcgggctctggaccagtctctgcctcccccatcccatgtgtggggacggatcacctcatagcacccccagaaggctgggtcccgtccatccccagagaactccctccaagttgctgccctgttgtccttctactccaggccctttggcaagagctggggaccaggggctggagacaaatggcagctctggtgggccagcttcagaggccagctggggggtccgggaaaggggttgggccatgagccaggcagctccgaagcagtcactgaggccagggagcctgcacccaggtcatggggcgacctggctctcactcctggcctgggtgctcacctacagaccacttcacttcccctgtccgcagcgtcactatgtcctcataggtggctgtctggtcaatgtccaggccctcgtaggtgtgatcttcctccatgccagccttgctgtcatccttgtccagcagcaggaagataggcacgatgatgaagaggatgatcagcagcgtctggatcatgatgataccatccttcagcgtgttcctctgcttcagctgtgccaaggtgctgaatcccatgactcgcagctctgtgccgcagccctggtagacctccgaggtgttgttgcacttctgctgacagaagtagatgccattgtcctcaaaccggatgccttggatggtgagggtggcgagagattcgttctgggactcttccatgcggcccttttccagcttcagctgctggggattctcgtccatctcctgcttccagagccagctcacattgccggaggcgctgttcatgtagcagtgcattttcaccgtgaagccccgtttcctggctatgaaacgtgggctctgccagatccgcgaacaagcactacctttgggattccggtaccggtcctccgatctggctgctggtactggctcagctgagagcagcagcagcaacgccaccatccagtggctgggcacaggagacaacgccagcctggccatggtcaccgctctgtccccgaccccaaacccgtgacaacgtccgaggctccttggaggaaaac

SEQ ID NO: 140546 - DNA, 427 bp, Homo Sapiens
tttttttggtttctcaggacacaccgtttattccacgggggaaggcactggaggccagggcctccctggggtgggagtggttgcgggagaggaatgatgttcctgtggctcttctggggcccagttgggtccatggcccttcccaagctctgctgggaggccctcggctccgagtccatttgcgggctctggaccagtctctgcctcccccatcccatgtgtggggacggatcacctcatagcacccccagaaggctgggtcccgtccatccccagagaactccctccaagttgctgccctgttgtccttctactccaggccctttggcaagagctggggaccaggggctggagacaaatggcagctctggtgggccagcttcagaggccagctggggggtccaggaaaggggttgggccatgagcc

SEQ ID NO: 140547 - DNA, 1040 bp, Homo Sapiens
tttgccacctagaagcgaagctttattcaaacggaaatctgcacttggacagaaatcaccgttcaacagcaaaaactatttctgttggacatgccaagccatggcccctccccatggccacctgcccagagaacttgtcaccatctgctcttaagcttcacagaccctgccctgcctgccccagcggggccagaacctcctgacccaccttggaagggacaggggaggactgagggacctcggcctcctggctaagcaggctctgccaccctccttggtgccctctgaggttacagcctcttgaagcatcagatctgagccaagctgagccccccaaggagggtggggatggggctccagagttgaggggaagaaagccagggcaggtggtaggtgccttcccgacttctggtccccacctggcatagaggcccaggggcctgactctcctgatcttgccccccacatcctgcctgcatgggggtcagtatatcttctgacgactgggtagaatggcctctttgatgaaggagaagacaaccaggatccctaagcgtttgccccgcttgcctttggtgaaataattggagacgacatcatctcctggctgcatggtagagggcaggacgttctccccggccgaaagtgacacaaaaaacgcaaacggaattatccacaggcagaaagtgaaataggccaggacctctgagaagggataatattcttctgcaaaaaactgaaatgctaggtaatgattcaccaccactagtccacacgacaggatgaagttaggcgaggtcagcatgatgaaggggaaggtctggaggaggccaaagtagacgaggttggtgaataggcccactccaatcatgctggtggggaagcgctcaaagacgtagaggccaatcagtacagcggtggagaaccagatcatgtattttatgatcctgctggtggccactgtgtattcttctatcagttctgccaggtaatcctcgtgccgaattcggcgcgccgtcgacttcatactctctaacgaa

SEQ ID NO: 140548 - DNA, 705 bp, Homo Sapiens
catctctttcttcttccttttcagtgcgcgttcctgattttgctctttcaggttcttctgcaggaagcggtctagcaactcgttctctggatgtaactctacgtctcttctcatcctggtctttgtcttcttccttgatggactcatccgatttggctctttcagactcttcctgaggtttccgtttggcagggccctttgcaaaatgagatgtgatggtggtttgcctggtgcttttccttgtaatcctggggctaggtgaaggttcaggcttagcctctccatcggacttgctcctcctgggcgtgcgaggtttggaaaggggtttgggggggctgttggcatctgccattcccactctacgggcttcacttcttgcttggttcccgttttctagacgtccattcacttcccggttgtaagcatgagcaccgttctccaaggacaaatctttatttaaaagggatttgactttagccaggtagccctcctcggataattcttctttacgtaatttggtttccaagtcacataactgattctttatttctgtttgcagaaattcgtgcaagagattcaatttctccttcacacattccttttctgttaagctgtctctttccacatctttgagcctggctaggccggcccggctcccggccctagaaggaggggccttggcgtctgcgtccccagggcggccgc

SEQ ID NO: 140549 - DNA, 490 bp, Homo Sapiens
  misc_feature (278)..(351): n is a, c, g, or t
  misc_feature (382)..(430): n is a, c, g, or t
gcggccgcgggggcgaaggccgcgctggggccgcggtggccgtcggccgaggctggcttgctgggggtctgcgaggcggggaaagcgcccccgccagcgccgtgcacgttctcggcgggctccaggctgcggcgccgctggctggcatccttgggcttgctcttgttgctacccatggtcctggtagaaggcaggggctgtcccagaggacctgggaggcagcctggggtcttggcacaaacaccaggtgtggagtcaggggtctcgaaatagaggcnnnnnnnnnnnnnnnnnnnnnnnnnnnnnnnnnnnnnnnnnnnnnnnnnnnnnnnnnnnnnnnnnnnnnnnnnngtttcaaatcctggctctgtctctcatagcnnnnnnnnnnnnnnnnnnnnnnnnnnnnnnnnnnnnnnnnnnnnnnnnnccggagtgaacatggccacagaagattcctgggaaggttggaactgaccagtgtgaggat

SEQ ID NO: 140550 - DNA, 394 bp, Homo Sapiens
  misc_feature (41)..(41): n is a, c, g, or t
  misc_feature (79)..(79): n is a, c, g, or t
cgacattagaaacaatagtgtacgctgtggacgcctcgttntgttcaggggctgccggccagggcttcaggacgttctngcggctttccccgcgcggcctgggctcccgcggctgcttttcgggcccatgggcgcagccactgcgccaggctcaaggggggcggccccgtcagggcccgccatcttggaaggccttttttgccggttcttcccgctgaggaagtgtcgctcaagacgctggcctatgagttgtgatttctgccttttccccttcctccttggctaagccagaccagaaagggccccgtgcgcaacgtgcttcacaatctctcagggaaagcggctaacgtggcgctactccgcctcccctgttccttacccttggggcggcccc

SEQ ID NO: 140551 - DNA, 605 bp, Homo Sapiens
ttttttttctttattgtaaaactctatattttattggctttataccttatcattatttctttgacattacatctttaatttctggcatttagattcccttcttaattggtgggactatttctacaaataattttttcaggaaagatacatgggtggcaaatgtctgaatccttgcaaggctgagaatgtctttctgtggttatatcatacggccagtggcttggatgagtgaaggatccgtgggttacaaccttttccctcttaaaaccttcagatattgctctgggacttctgtcgttaaatgctgtcacttactctgagggccaccaggctctttattctttgtccctaggaatgtccaagaaggagctcttccctaattttgcctgattccctttttccctataattgggcaactcaaatctttctttaactcaaaaagttttcttctattatttctgtattgattttctctcctggaaatcctattatgtggatttatttcctgtagcatggaaactgcactttatcatctctatggtgtggttaaattcaacatcattttaatgttcaacaattttctactttcacatattcatttccat

SEQ ID NO: 140552 - DNA, 1133 bp, Homo Sapiens
tttctgtaaatttagtttgtatggtcgtaggacactctcacagtaactggatacccaaaggataacagaaatagtctcaacaaagaaaactagattttctaaaagagtaggatgtgttttcaagttaccatctttaacttctaagaggtcacctttacatttactgaagacatcttttaactggtctagtaaagacttaaaactattttctattcgttcctgaatctccattgtatcctctaaaccactggtatccagctcataaatatcattgacaagataaaaagagcttatctggcactgagaacagccagaattaaagaatccacccattctggtaggtacaggaccaaggaaaggatactgaatatccttctcaataaatcgctttcctgtctccagggttgcctccagctgttgaaggagcaaacgaagaatatcaatccgggaggataccccattctcggcagtcttctccgagttctttggctccacagggtggttgagacttggaagtccacttatcagcctcaatgttaaggatcggattcttaaccacaaggtctcctcctctaaggaaagtttcttatgttcttcagaaacgtccctgtcttttggatcccagctgaaaaaaacatttaagtctctgttgtctcgcaaatcttcccatggaatgtcatcttcttctggcctaaggttcattgactttatactttctgctaaactggttgatatatttgcttcaagtagaaggtctaacagcatccgttcagtacggacttgtgcaaaatgaagagaattattcagcctgttcctaaaagcgataaactctgggatcttctcaaatgcaccatatttgtaagcttgaataatatattctgaggtatctttctggttggagtgaaaaaacctgagtgcgaagttacaggattgggacgcagcagcatactgacctagagattcagcatatcgggtcaaaagataaccaatggtatcatgctggatatgcttagcatcgaggctggagtaaagatccaccactggttcaaatgcacccagcatacagtagattcgaacaagcagcacggacgcgtgggtcgacgatatcccgggaattccggaccggtaccagc

SEQ ID NO: 140553 - DNA, 642 bp, Homo Sapiens
taagtgaatgagtaataagcggacatatatgtacatgcacacactgtagtataggagaagacatataaacagctaatttgatacagtgcaggatatgtactgatcaactgggtagattttgccatacatatgtaagttaagatttgcaggtaaggtggtatcttacctgcttggagagatgtgacgggagaggtatattgtaaagaacttttggattctatgcttaggaatttggactcttctttgagtgaaaaggatgttaaatcagtccccacttcttcagggaagtgacagaaaattggagtgaagtggaggatggattttgagctaggagagccagaagaaatgctgaagagttaggccattgtagtattctgagcaggagatgatgaaggcctggatcagtagagtgattgcagaaagtagagtggagattcacatgagaaattgaagggatttacatagaagaactgcgttagaatttgttgaatccattgcctctaatttcctgatagatatttttagtgtaatccttattggtgaatttgcaatttttcctttcagactatttctgttatcctttgggtatccagttactgtgagagtgtcctacgaccatacaaactaaatttacagaaaaaa

SEQ ID NO: 140554 - DNA, 547 bp, Homo Sapiens
tttagggtaccagcattcttttaatttataactccagaacatcattccagcccaggggaagaggagtttacgaaaggatcattaaattgcactttttaggcatttacttgctatgtgacctacatagcaagtaaatcagaacagagtctgacaaggatttttgtgacatgtatattaaggtaatacttcttgacatctttaaaaccataaattgaggttttgctcagtgtccatgttgttcagggtgagtccatgtgtctctccttgaatcttcatgacacagggggaggacgacttcctccttgacaagtgacaaaactgaagcccagagaccttaagtagcttatctgaggtgacactgctggtgagcggaattgctagaggttcatcccaggccgctgcctcagaagccgtgcgctctccactgcccctccagagagaaagtgaagaaatctgtgaactgctaaaaatgtttaagtagctgatgccttttctttgggtctccctgtgtcggagtccctctgcgatgtggccttgaagctcttcc

SEQ ID NO: 140555 - DNA, 465 bp, Homo Sapiens
tagcacaatatggtcaaaaacctctgatccaattcaacctactcatcttaacgattttatcagcatttaataagtttgttttggccatcatgtgttatagttttgtttgtggttttgacacctcattagaggtttcatcagtgtaaggagccaacctaagagctcttctcacaagtttcccaagagagaaattgcccctccaaatgtgaggagtctcactttatatagatagcatccacacttcttgcagtggaaaacaaaccttataaaatgtaatacgtttggtttcctaactttttcatgaccctggggtggtagaaggaagtgcaagttttatcacttggatttagagacaaggaaattgaaatggagagagaattgggctcacatgcaggcagcatgtctagctgcctccatcgtgtgatctgaggcaccccatgaggcctatgattactgtaaacctct

SEQ ID NO: 140556 - DNA, 492 bp, Homo Sapiens
tttttagttaccaggagcaattctttatattatccagttgcacaacacacttcttgaataaatgacatatcctaatttaggatacatcaccagattcaagtcagagagtatcctgtgccagtcaataagagtgcgggtcactggaagatcccttcgtagaatttttctcagggcttcattggataactcctgtaattcttccaagactgcagcttgaaatttgttctcttgctcttccacaagccttgcaaaacttagagccagttgagcttggttaactatttccaagctttctttcaggtccttgggtatttcaatatgaaggttgacacacctgaagaagtgaggttgcacaaatattcttcccgttacttgggttagaaatgggttaacttggaaaatccatttagatttccaaagtccgttccagcactctcctgtttcatagttgtgatcttcaatgcaagctatcaagtactccttacttttgac

SEQ ID NO: 140557 - DNA, 482 bp, Homo Sapiens
gtagataaaaatactcagtgtttaaggcagtagagataagcttcatgaatatgtagacttactttatctctggaattcgaggccatattgacttttagtagcataccagttcactttttttagtgtgaacacagacttttaaatatgtggagaatatatgttatttaaaacattaaaaatattttctctccttgttagccagacctgttgtggaaatttttgtttgtttgtttggtgtactgtaggactgtgagacgaataccccgttttgctatgtatcaaatttctatttatttgaaaacagatggaagttatttgtgaagataattccatttactataaaataatatgaagaaaagccagactctgaggactccagagacctgaaagtagtctatacttgtcagcaatgaccgtcacatagcttgctacattcaccagctcatcaacagcaaggggaaagtcatagcaaggaaaccact

SEQ ID NO: 140558 - DNA, 582 bp, Homo Sapiens
tttaaacagtcattgattttatgaaacatttacttcagtctatcagatttgcataacttcatttaaaaaaatattgtggtcatttctacaagtcacggtgcttctcccagaaagcaagggaagggctggccactggatgtgcgagcttctaccagaggggtgaggtcgggcgctctgaagggtaggatgagatggaggccacagagcgcctgtcaccgaggaccttcattccacagagtgtctgcctggatctcggatggtcgtaagccacagagcacctgtcactgaggaccttcattccacagcatgtctgcctggatgtcggatggtcggaggacacacagcgcctgtcaccgaggaccttcattccacagcgtgtctgcctggatctcggatggtgggaggacacacagcgcctgtcactgaggaccttcattccacagattccacagtgtgtctccctggatcttggatggtggctcttcagagtcaatcttttccttgatgttcaccgataagtcagagaatggcaacaaatccttgtggctttgcaggtcaattcttattgacctgtgactacca

SEQ ID NO: 140559 - DNA, 976 bp, Homo Sapiens
  misc_feature (141)..(156): n is a, c, g, or t
ttatagtaagaaaatgtcaatttaatcatttactttagcaggcaagcaatttgtaaacattcagtagcggcagcatccaagttacaaacaatttaaaaagaaccaagattagtgattataatttttccttccctttccccnnnnnnnnnnnnnnnncgatttggaaatgaatgacttaaaaccctacaaacattgaacattcagttatgtcttctatcagccttctatgcatcctctctgttttattttaaaagatgcaaagggaatatttatgtcttgattcaatgcctctttgacttcgagtggcagggtatcaaaaaggtgtttttccccaacaaggccggcttttcttgagcatccgacactggcccagctgggttggcaggcggtccaagcagttaccccttcagctggagctgagtgagctgggagaggtgaccaactttctctgggagtgagggtgatgcatttctgtcccagagttcaaagtcttcaactttatgcaatttagacaattgttttggcagaatgtccactttgttcccagtgatatgcaaatgctgcaggttctgaagcaatcgtatttctattgggatcattgaaatgttgttgtagctcacatctaagcatctgagtttctgtaagctaaatactgccactggtaaggattcgagcttgttgttagagaaataaagtgactccaagtttttgacatgggtaatagagggaggaatagtaacaattttgttatgccataattttaaacaagtcagtcgttttaaatgctggaaactgatgatttcctcaattgtgcgaatgttattggactttaaatccagttcctgtaaattagagaggctgaaaatagcatgtgggattctctctagctcacagttctggagttccagctcagcgacattcatcattttcttaaggctgttcagtaccaagagtttagtgccgtcattatgaatcc

SEQ ID NO: 140560 - DNA, 780 bp, Homo Sapiens
  misc_feature (24)..(24): n is a, c, g, or t
aaattatcatcttgggcacatggnatgaaaatatcgctctacagtgcttgttaggaacaatgaaaggtctgagagtttaccctgcttgcagctcagttagtctaccaatttcagagatgctggcagaagaaatgagactcccagtcagagacaaacaacttcattattcaccgcacagcaggcagcatgagcttcttgtttgcattggtacctttgtgccttccataggggagacgcagggctgccggggctggtgctgtgtttacagtgggtctgcattcacagccaaggatccctgagtttagggaacccccaatcttaagaagtctgccagtaaacccagccaacttttcctatggaggaagaagctatctttattatcctggtcaggaatcaaacttgctctctgcctcagaggaagacactaatcttgctgtacaaatgtccttgaaaagagagtcttggataacacatggagaattgcctcccacccctgcaacaatattctagcgagataaaggaagaatccaagaaagaggacaatacaggatacacttatgtaaaaattagttacagttgaatatgaccaggagaaatgtataacattagaaagaaaataaaatggaattgctgtgagatggttggaagacactcccttgaccagcagagtttaagttgcatagcattacgtttacatttcattctatctggcttatggatggaaccacattctaattctatgatgaataaagtttgcatgactttttaatgtgataaata

SEQ ID NO: 140561 - DNA, 448 bp, Homo Sapiens
gttttgttttgtttcgcaaaataaaaacaatacacattccaagagaaatgaatgcatctgttgacacgtctctatttctcatttacatatgtacacacgtcccttgagtcgctgctgttgacacggccctgtgtggacgggtcaggcccgaggcccgtcgggagcagacctgtagctctctgggggatcagggcttccattagggagaaagtattagcagtttcttaaaaaataaaatggctacacggaacatgatacatggataaagcttcaaaccaagaagatgggggtgattgcctgtacttggcccttcccgcctgcctgctggctccctgtccatcttgcggagtggcggcagaaacatgcctgtgggccgggtggatgcttggcatgggaaagtggcttgcagaggcctcgtttttgctgaggttacttatggctccaagta

SEQ ID NO: 140562 - DNA, 382 bp, Homo Sapiens
tttggtggtatgaataaatgccgtttattctctttctgacgggataattttcaaagcagtgatttttataaaaactcaggaagaaaacaattttgtttcatttccataacagaatccagaccttgagcttcaccctgcgatcagtgattacacacacaccgcaccgtttcggctgcagcggctcctgctgtccaccggctcccgtcctccctgcctgtaaccgtctgtggtgattcgcggcactgcaggaccatgatggcccggatctgctcggacgctccgcctcagcttctcatggccgccctcgctattgccacccctgcccaggctgcatcaaggaggtcaggggccaggggagaactcttttgttattgagaagttt

SEQ ID NO: 140563 - DNA, 571 bp, Homo Sapiens
  misc_feature (172)..(215): n is a, c, g, or t
  misc_feature (387)..(387): n is a, c, g, or t
atcacaagtaatttgcctttttattcatatagaacaaaatttacaaagtcattcatacagtttttgtgtttttttactgacttcgaaaattgggaatattcaaaatacacttttaccccactccattctgtcattatttacacatatgtacaagaaaaatgaaagagtctcnnnnnnnnnnnnnnnnnnnnnnnnnnnnnnnnnnnnnnnnnnnntttcttgtattaaaaagctctgctggtcgggtgggtgggagggtgggcaggagggcaggcggcgcagtcagatggaggtcccgtgggaggtgtccagagcctctggaaggacgcctccaggcacgggctggaaggacatggggatgggggtcttcaccgggctctgcccgancaagcccccgttgggtgacctgtgtttgcactgaatgaagggcatggtctccgagctgctaacagcagctgcaggttgctgctgggccctgatgagagtgtccgcctggtgccatgggtgttctgctctggcagaaggtagctgaccgagagctgctgttttggtactcctgtgtcggcttcaa

SEQ ID NO: 140564 - DNA, 493 bp, Homo Sapiens
  misc_feature (87)..(139): n is a, c, g, or t
gggagaggggggatttcttttggaattaaaggttttggggacttgagatgttttgtttgagctaattactgaatgatgccctgcctnnnnnnnnnnnnnnnnnnnnnnnnnnnnnnnnnnnnnnnnnnnnnnnnnnnnnacatatgagaacacagttataaaataatacaaggtttcttgtccttaaaggggttctccgaggcagggactccgaccagcagggggtcgttccgggcatgttgctcacagtagctcatgaggtcagacgccgctttggagaccttgatgcgctcaatcccggcttctatgcgtagctgttccaccagcttccgggcctgggctatgttgttagtggctgacattgtctgccatcagctctgggccccgttgttcagagagcttttttagttttcccaggaatcacagcttgctgtacaccctgtgcaggaggtctcgccgtctgcagcaccgagatcccgaaaccaagatccac

SEQ ID NO: 140565 - DNA, 886 bp, Homo Sapiens
  misc_feature (497)..(550): n is a, c, g, or t
tttatggagtaacaattttttaaataaagagatatttccaaaaaacttcatgatgtcacctcccgccccccatctcaattttacctctacttaaaaacaacacaaagcattccagtgaccctatgaagtctttttaccaatggccaattctcccggaactattgccaccgggcgaagtcacctccctttccccctcggcgccggtccacaattgaaacggcaatcgagagttttaaaaaattgttaccccatcgctgggggatttcagttattccgaatgggaagtggccgtaaagcctccatcccttttggcccaaactgagagggccatggggtcggacctgaaaattcatctccacctacaaggtccattctaccccatccgggcggtgggaacgccttttttggcggggagaggggggatttcttttggaattaaaggttttggggacttgagatgttttgtttgagctaattactgaatgatgccctgcctnnnnnnnnnnnnnnnnnnnnnnnnnnnnnnnnnnnnnnnnnnnnnnnnnnnnnnacatatgagaacacagttataaaataatacaaggtttcttgtccttaaaggggttctccgaggcagggactccgaccagcagggggtcgttccgggcatgttgctcacagtagctcatgaggtcagacgccgctttggagaccttgatgcgctcaatcccggcttctatgcgtagctgttccaccagcttccgggcctgggctatgttgttagtggctgacattgtctgccatcagctctgggccccgttgtccagagagcttttttagttttcccaggaatcacagcttgctgtacaccctgtgcaggaggtctcgccgtctgcaccaccgagat

SEQ ID NO: 140566 - DNA, 536 bp, Homo Sapiens
  misc_feature (102)..(155): n is a, c, g, or t
acgccttttttggcggggagagggggcatttcttttgcaattaaaggttttggggacttgagatgttttgtttgagctaatcactgaatgatgccctgcctnnnnnnnnnnnnnnnnnnnnnnnnnnnnnnnnnnnnnnnnnnnnnnnnnnnnnnacatatgagaacacagttataaaataatacaaggtttcttgtccttaaaggggttctccgaggcagggactccgaccagcagggggtcgttccgggcatgttgctcacagtagctcatgaggtcagacgccgctttggagaccttgatgcgctcaatcccggcttctatgcgtagctgttccaccagcttccgggcctgggctatgttgttagtggctgacattgtctgccatcagctctgggccccgttgtccagagagcttttttagttttcccaggaatcacagcttgctgtacaccctgtgcaggaggtctcgccgtctgcagcaccgagatcccgaaaccaagctccactccctgcgctcgggccccgcggccgca

SEQ ID NO: 140567 - DNA, 446 bp, Homo Sapiens
tttgtctctggtttcctttatatgccttaaaaataacggactggggtgagggattgaactgggagggcagagacctgggctgtggatggaaatgtgagccgttaaggaagagtgcattctggcaagccaggctactgcactgagcttcagcttctgtaaaactgaatggcgctgtgccagatcatatgggagcaggagggacacatacatgatcactttcagtttcacgtcaaatgtggcacagaaacttctccattcctcacttttactttcaatttccctgcccaacttcagttcttcgtgggattttagacttgaaagtgactacagagggtgaaatccaactccccagtggctggaatctgacatccggtttcccaaactccctcctcccaggctggatggggtctcctcctctctgtttccccagcccctgagcttcctga

SEQ ID NO: 140568 - DNA, 530 bp, Homo Sapiens
  misc_feature (503)..(503): n is a, c, g, or t
tttagaatttttaaatttttattgatgttcttacaaggcttacagctgaatgaagttaagcattctgcatttcaattatttttatagcagtaagaagaatgtagaaaacagttacacattcatcttaacttgttgtcagcctactgagagcagtcttcagagattctcctccaataccacctagcttcatttttctggcctctacactcacatcagtattccaaaaagcctgtatatccagggtacctctctgctgcatcctgagaggcccgtgtagagcatggcctgctgcatgcatggtacaattctgccgctctcttgttcctctgtgtttatccaatcaatccagactatattgactaggccttcattaagagacacaagaaatcactacaaactaaaactagcccaatccttgaagataattcttaaagtgtggtctacagaccacctgtttcagagctacctaggaagtctgcctcgtggcgcctcgtgccgaattnctggcccgagggccaaattccctatag

SEQ ID NO: 140569 - DNA, 681 bp, Homo Sapiens
tgttcactggctcacttaatgtcatacaactctttgagattggtataatctccatgttatagatggggaaactgaggctcagggaaattttgtatgagggctgctgtctcttaactagtaatgttaagatacatgtcttagatcaagatcttcaaactaaaagttccatacacttttcattatgtcacatttataatcattcatccttaagctatatttttatcaaaatgaaaagtactaggaaggaatggcccttttgaagttacatattttgtaaaagcagatcatcattacttaggatttttttggcttcacctgaaacatgaaagcaaatattgattagacatgaggaagttcagaactagaagcaagtttggattatgaaggaaaattatggctccacagattttatctgttactgaaatgagtttacatggggaactcatatttctggttcactgaggccttgacagccaatttatttggatgcctttccatggaagtacgttgcatgggaattcagctgtgtagatgagaggggaaaactaaccactcagccacaccatagcaagcatactcatctctgggagatttaaaaaactgaatcgcaaactcattatattgtatacattaatatgtgcagtttttgtatatcaatgatacttaataaagctgtttaaa

SEQ ID NO: 140570 - DNA, 447 bp, Homo Sapiens
ttttttcacattcacagactctgtttattttcatcctattcaaaacagatacatctttgaacacaaaggatgccagagaatcctgtttatcaataactgtcagatgacagatgattcagagtattatgtgacagccggtgatgagaaatgttccactgagctcttcgtaagaggtaaaaatgaaatctcttattgtggtcaccaggagctgttggcttcttctcccagggataatgatcaaagtgaaagtaactgaggctcctctacactggcagctattatggatcctaatgagtcttctggtttgttgaagaagaattaatgctggaagtgttgtggcttgtgaactgttgtgaagcagtagaaagaggattattcaaaatctgatgagtagttgtgacctcagatgtaaatgggtgtggcttatatcacatggatgaactgagg

SEQ ID NO: 140571 - DNA, 463 bp, Homo Sapiens
ttttttaattattttcagttttatttaataaacatcaatttccttgtagaaaacatagaatttctaccaactaaacaatattgtaataaggataaatgtatcaaatcacagataatgttgttaaacgaagatgctgtcttgcagatccattcatgaacaggcctaaactggcagtgcctattgttcatttattatgggtggatttcccattttacaaacaaaccttttatttatgggaagaggttcagcgtttcgcaatgtctttagtatgtatttcccgataccggaggggcagaattccccctctgtccatcaagtgacatctgcttgcagctgtagggaattttgcagggtactcttttccagagataaataatataaagatataacacataagaggtaattccctggtaaccatatatgtcccccaatcttgtcttgtcaaactataatttgcttatgg

SEQ ID NO: 140572 - DNA, 873 bp, Homo Sapiens
  misc_feature (35)..(35): n is a, c, g, or t
  misc_feature (80)..(114): n is a, c, g, or t
aaggactgataatcatatagggcgctactctcaanaccgaacgacgagcgcagcgagtctgtgagcgaggaagcggccgnnnnnnnnnnnnnnnnnnnnnnnnnnnnnnnnnnncagtcgacggtaccggacatatgcccgggaattcggccattacggccggggggagttctatataaatgtttctttggtattcttcagcctgtgatttaaagttttacaaaaagcagagctttttcctaagttacttttcagttaggtaactgtgtgatccagttcttccagctgcttctataatgaggcacatattaatacagtttttatatggtatctatgaaagagttcacttcatagagaataatacttgagcaaatgtatccaagaaagcaagcaaatgaaaagaaacctatttatggaataaactccagatctgaaattcagtattttagaaaaatgccagctcttcttactgtatttattaaaacttgtaataatgtgatttttttcaaggatattagttcaaattgaaatggtttcacgccacacggaaatctttaagttatttgttgaggtaccatatatttagggtgctaggggcaagtaatgttaatatgtgcaataggaactactggtttgaatgtgtaaatgggtgatctctctgagtcctggcaacatccagcaaaactactgcttattctccaaagaatattgggagctctcaatcctcggtgatatgggaaagagaactgagtatttgccctatgactgagctttctataggaattttattaaagaatgtttaattttgttgtccttcttaatgttctcagtcaaataaatgagtgagctggtttcggctgctcttggaatggg

SEQ ID NO: 140573 - DNA, 848 bp, Homo Sapiens
ttttaagtgaataataggtttatttgcatatacacaagagaagagttaaccgttactgggtgagaaggaggtaaggcttcagcagaggaaggcaccttgacagacaaacaagagactctcagcttattaaatcaagcatagtcacaaacttcacttgccccaagccaacaacttaactcatttacctgctgtcctagagaatcattaacaaaaccagctggaaaatagagagaaatgattttacatatctggacctgccacttaaaactttatgtacagaatgcaggaaaaaaacataagaggcacttccaaatagttcttgatctaatcagtgccatctgtcctgctattaaaaatatctattatggaagaaattgggtattaaatgtgccatcaaagttggggcctcaattctaaaagagtttaggcaaaggtactctagaagtggttcctgccaggtttccagacccacaaccatagacacaaaatctctggagatgagggtggagcagctataaagcaagcatttctcaccctgctcatgtgtgtgtcttatggggcctatcacccggtaagctgagcctaggatgctgggaagcctctgccaaggatggaaggcatacttgctaaaaatgatctttcttggcttctcaagttaaccagaataaactctgatttctcttttgagtacccaaatgagattaaggcttttaacatgaaaagaccaagttctgcatttgggaattgtaactaccaagtagctagttcccaagggaactttaactacttcttttcaggaagatatgtatccgattgtcctttgagaagtcagaagaggctaagtactt

SEQ ID NO: 140574 - DNA, 416 bp, Homo Sapiens
  misc_feature (232)..(232): n is a, c, g, or t
  misc_feature (260)..(260): n is a, c, g, or t
  misc_feature (306)..(306): n is a, c, g, or t
  misc_feature (310)..(310): n is a, c, g, or t
  misc_feature (315)..(315): n is a, c, g, or t
ggggatagaggacgtttattcattatggtaacacataatctgctgaaattcattttgaacgtgcttttacatagcagtggctaacataaaatctgcacagaaatgttacaagtggctccccagcccccacagccgggaagtgccagtcaagatttaagcatccccaaaacaaagcctttattcctgggggggcttattggcaggggaggggggacagggtgactgaaatcanctggctgggaggggaaaagggagaaaancacaggaaggactcactggcaggaatagggtggggggatggggganacangccangggcaaactgtgaaagctgttacctgttggaatagctagcacgttatcttaaacaagtgaagaaaatcgccgaagagtgaaacttatttatgggggaaaaa

SEQ ID NO: 140575 - DNA, 438 bp, Homo Sapiens
tttagaagtggttataaaacaaaataatatattaaatgcatgggagcaatatagaccagagctggtaaggaaaggtttggtgttggcattttaattcttcaggcttctggtcattgttaccagttgtagcataaattcgctggaatagtggtgtggcattaagacttggaacggtcaaaaaatcttcaggggttcacaaagttgagtgttgtttaaaaaatgactttcttacttaatcttccccttcctcagccaactctgtttctttgtgtaccaccactcttgtgaccgacatgtcagggtgctgctctctggcttccctgatcgcctgagccagtgcctggtcatgatcaatatctccatctcctgtgatcacaatgcgtttctcaattcttgtttcagaaattccaccttttacagtctttccttcaatgagct

SEQ ID NO: 140576 - DNA, 822 bp, Homo Sapiens
ttttcattgttaaagaaattattttattttgagagttacaaagagctgcacggatgtgaactcattgcgggagggccattggcagagaaggtgagctctttcccattaatagagagacttcaatgacttgctttgataatagaccagaactcttgggttgatgtcatcataactgagcttgctccaaatttaattccatggaacatttgtaggccagccaaggtgaagccatcgtggaatctccatactcagtaccttgatgtgtctcaagctggctcacagttccctgtggatgcgatgatttctacaagaactcattcttttcaaccacttcaagagctcactgacttaatgcttcatacacataaggatgctgggtttttaatttttaattttgtcatactcaaaagtcacttattatgacctgagtggcaactcatttcatagttgaggccagaattttttatattccctgctacttgatttctgaacatcagcaaaatgcagaagtgtcttttgaaaaacctaacactgtccacttcaagcttgttttcacctcggtctaagttaaacccaaaccagcagcaaaactgcaagattcccatttgccttagttacttaaataatatacaaaatgtttcagatttgtcagatcatttgtgttagtatggataatcacattagtgatgaaatctagcatacatatagcaatggatgagtgtgggattggaagtccagcagtcctgagtttgcttccttcactattccttaactcaagctcagtgtgaccttgagttaactatttagaccaaatatcagttt

SEQ ID NO: 140577 - DNA, 671 bp, Homo Sapiens
tttgttccaatatagctttattccctaccccctcctttacccctcctttagcaaaagtgtatgaaacatgcatcgttggaagacttctgggaaatgacaaactatttgtagtttaattacaaataccatattagtgatctgactacatattactcagtcatacaaagtcatgataaatcaagtacaaaggtcatgacaaacacagtttttagtgatttctatgcctaaagctttatattcccttaatatgctgtgtaagaaaaaaataacagctatgtgtgcaatcccaggggaagagggtggaaacttcagcagtctacagtacctcaaagcagttgtgcaaggctggaatatattagatcttcagtagcccctggaataacccttgatgcagagctcatgggtcactaagtaatgggatggtcttcagttgaaatgagacttaataactcttgaatggtgctttgctcatggacatcaagctgttgttctttggctagactgagggccctcatgccatattcctgtgcctttgaagaattcatcatcaggtagtaaagcatgaccaggatcttcagaacaaagatggttttttggggggctttgtcagatgtagattctcgaatgttcaagattgaagtcaggatgcgaatggcttctgcttcttgggc

SEQ ID NO: 140578 - DNA, 448 bp, Homo Sapiens
gcggccgcgtggtcgtccgggcccgcgggagactgggagggagagggcctgtcggcggcgctgcgcgtggtggcgatggccaacagcgctctcaatcccttcgtctacctcttcttccaggcgggcgactgccggctccggcgacagctgcggaagcggctgggctctctgtgctgcgcgccgcagggaggcgcggaggacgaggaggggccccggggccaccaggcgctctaccgccaacgctggccccaccctcattatcaccatgctcggcgggaaccgctggacgagggcggcttgcgcccaccccctccgcgccccagacccctgccttgctcctgcgaaagtgccttctaggtgcttggtggtcagagacgggtcatctgtcgctaaggcgcaacctccagggaactcgaggcctgccagggtctgtccagatcacaagggg

SEQ ID NO: 140579 - DNA, 666 bp, Homo Sapiens
tttgctgctttaaaataaatacgtttattagatcaattttggttggaacagtgtgctgagaagaggcctaaaaagaagcatataaataaatgcattattattgttaaaatttaaaataaaacatgaaaatacttcaagtatagagaagaaaatagcaatgatccataactgcgcccccaaagataaccatccttcagacctccctagataccatggggctgccttgctaaaactttgcacaaatatatgataagcattttccccagcggaggtaattttgaaagggaggttggacagcattttactgtgggagtaggcagacctgggcatgagccatgtcagggttgagggatgacatccctgatcctggggggagaggcgatggcataggaagggccagtgaaagaggcaacaagaagcttcaagacactaacttcatccacctggccactttgcccaggtggactttgggcatcaggaagtgttttatgccactgagtgaagacatcttctcccattggatgtgcttatgccttggtaaaataagaaagccaggctagtgcagctctaaagttcccttcagcctatggtttgttccccttgaaggaggagttgatgttctgcttgccctgagtcctctcaaggattcagccagggttgagcatg

SEQ ID NO: 140580 - DNA, 464 bp, Homo Sapiens
attttcaccattctttaactcataaatagtagtttctttgttttaggatgtgtttgggattcgtatacccagctaattctattttcaaaggtttgaggtttgatcattttttttccctccaaataagagtcatgataaatataaccctcattatgtgaaaatatttcaggtcggctactccacctcatccccccacctagataatctctcagtttcctcccagttgaggaaacagaatgactaatgagtgacagatggacagttcacagatacaatacactctgtaatccaggagccacaggtcttcctatgtgtttaaagggttagggctggagtcaagagtctgcaacgacaatctttaattgggaaaaagggaaatgccctcctaaatgctctttctccacctcccttgttcctgacagtaagtaatggcacaaatgttctaaagtattcttcttcagttt

SEQ ID NO: 140581 - DNA, 448 bp, Homo Sapiens
  misc_feature (405)..(405): n is a, c, g, or t
ttttttgagcagatttacatttgatgtttatttcatgtaaattattatacatatctcaattagtggtattacaatattgctttctacatggataattatatattcatatttgtgtttgatctgttttcctaattatagtatgaaaataaaaattcagctttgttaactgtagtgtaactgatatgcatattggtatgtttcatacatttgcaattgtcctgttgacaatcatcctagatttaagtagaagtctttaaaacttgttatttctctaagagaaaaaaattaaggatttccagggatagttggctgttcccataaagatctgcaaaatcctatatatccactaggtggagatctcagcttcaatcattttagaagaacagggctttgagatcgacacanatgatcctctcttcttcatcttttctcgccaatattcaagact

SEQ ID NO: 140582 - DNA, 613 bp, Homo Sapiens
  misc_feature (561)..(561): n is a, c, g, or t
  misc_feature (589)..(589): n is a, c, g, or t
tttaggtttggttttgttttttattcttttcaggctccagaaatcaccctgaagatttcttctcatcttcctgccatggaagcccaaggcagtgccttccaaggtgccttcttctaccaggtgctgcaaattcattcccagatgtgggttataaaattctgtccagccggtgcatagcaggcctgtaacacttaggatgcttctgcgagccatggtaagtgtttcccaggaggccaacacggccgtccaccacattctttttgcgggggatttgtaaccaagattgaaagggctgtttcaagttttcaacctgataaatactcttcggattgctgactttaggaatgacacgaggttccttgctacaactttcttcatcgcaggaagtgccagaggaaacgtctgatgaggctctactaactgcataactgatttgttgatatagttcccattcctcccatctgcctttaaaagaagcaactgtaaatggatggtttttctcaccatacctacagcatacttcaaagggatctacccatatggtcatttcctttcgaagtncccagtgagaaaaatctacattactttncacacatgccctttctagaatgga

SEQ ID NO: 140583 - DNA, 568 bp, Homo Sapiens
  misc_feature (375)..(383): n is a, c, g, or t
  misc_feature (448)..(505): n is a, c, g, or t
acctctgctttttttgtgacatttaagaaaccatcaccaaatccagagtcatgaagatttgcccctatgttttcttctaagatcctttggtttttcttttaaaaaatcagtttcctaccaatttagtgtggttttaaaagggaacagagctcgaacatgtatattcaatcccccttcaacagaatctcccaaagtgctgggattacaggcgtgccacagcgcctggcctacaatgtaacttttttccctcattgtgatttggagtcatagatgttggcacctaatgcacattcattctcactgctgtatagtatgcattataagaatatacaacaatttatatatcccttctgtagtcacttggtattgtcagannnnnnnnnaaacttttgctaatccagcagctgtgagatagtatctctttatagtttattagtcagttgcacannnnnnnnnnnnnnnnnnnnnnnnnnnnnnnnnnnnnnnnnnnnnnnnnnnnnnnnnnccattgggctatttgtctttttcttattgagttgaaggagctgcttatttattctaaatattc

SEQ ID NO: 140584 - DNA, 1381 bp, Homo Sapiens
  misc_feature (542)..(542): n is a, c, g, or t
ctatttcaattttatattctgaatacaattggctgtttattaagaatgttgagctaccgaggtatcatgtataataaactatatagaaataggaaacacttctttgaataagctacatacataaaatatgatatctttaaagatatattaattaatttaagaaatttgcttagatgcctaccgaataaggcactgtgctaggagctatgtatgcagttgaataaggcacaaccctactcttaaggagcttacagactagcagaatttgtaagacaccgtgtaagatgtaagctggaagtgatttctaatgtaaacagcagcgaatactttttgcattgagcgttagtttagttgtctttgcaaaagcttctttcttttcgtaatatgcggcctcattcacaaacacggggtacacggtacagtctccgcccagtgggatcgtcttcccatcaagagttaaaaacatgggatccccaggatgcagtggtttccagtcttgatcctgcagattaggatggatgatagcagcaatttctccattntcatccccggggtaatcaactttctctataattttatagacctcaatggcgcagggaggaaattcttttccttcattgaaatgatgtataaaatcaagagcatgtttaatcatttttctcatttgatccaagatatcagctctcagaaccccttgaggctgaggaccaacttctatacccacaggatacttggctatggaacgagtggtcgcatatttgagggaaggatgctcaatcagataaacgtagcagggtagtggagccagagaagtcttaatgtaatgaaacatctgaattaaaaagttattcctggaatcctcaagaataagagtgcaccccatgttagaggtggtgttgtgaaggtcaaaaataatgtcataggaatcttcactgtcttttggaccaaataaatgatttatttcttgagcccttctcacttcatatggcaaatcttctgacatttttttgccaagattttcaaggtcaaaaatgcgattcaggtcacagtcaatatatctggtacacttcttcactgctctggggttagtaataaatggttttacctccagccctgttctctgaatctcagcgccattctctagccaatgcttaaccagaaatactccggttagctcattcccatgggttcctccaaagatagcaaccttttgtatatgttcttcagcaatgtgacaagaagtcatttcaccaagtagtttttatctgatttctgcaattcagaagagagatcaaaggaaattcgattttcttaagaaaggtttagaaatgtaaatgagactttacccaaagggcaaagtacagaattcccttgagtggag

SEQ ID NO: 140585 - DNA, 468 bp, Homo Sapiens
cctgacttcatctcgtatctgctcctggtaataatctcattttgtaattttgctctttagtcacagggcttcatttgggacactcacatttttgttctctttgtgattatttgtgattaaggagttgaggttatgactttaaggtgcttttgattccagagccatgtgccatataatcatctgtggtttgtgggaatgtctttgccgtgatctctctgaagtctgtgggcacattccagaccgtgctggtcttctgtccgcaggcttcatgcagagaatgaagtgtccttgctttctctttcctaaatgagtctctgcctctgtgagaactgggtccaccttctctcggttgctcttctttgtgggagcctgaatggtaagcatggccagcgtcctgtgaggagttgtagccaaatgagcagaagctgagcagctgactgggtgggtgcggcctctgcatgctgcttc

SEQ ID NO: 140586 - DNA, 664 bp, Homo Sapiens
  misc_feature (95)..(192): n is a, c, g, or t
ttcaagtcactaacacattcctttattttcttcataacatctatcaacatctgaaattctctttttgtttctcaattattgtttttctgctcccnnnnnnnnnnnnnnnnnnnnnnnnnnnnnnnnnnnnnnnnnnnnnnnnnnnnnnnnnnnnnnnnnnnnnnnnnnnnnnnnnnnnnnnnnnnnnnnnnncccagcctcttgcctatctgcccactagaccccaatagatgctgtggggagtctgagtctccgcattagaaggcctaaaatgagccaagttactgcaaagaacagggcaaatggtggaagggtatttggagtccccacatgagggttaagaggttcctgttcacacatcgaggatctgctccaaaccccaggagcctgttctttcctaagtgtggcagagaatgctacgtgccctccaagattattttttccttcatacacagtaactagtctcctctgtggcgaggtgtggccatgtgcctatattctggacaaggatttgtgcaacgtctagattaaagggaaggagtgatcctttagcttccctaccttgccccgaccagctggctagaatacggacaggagggcaggagctggaattgccaaactgcgcctcaagatgggagccagttttaaaaatggcaggacacat

SEQ ID NO: 140587 - DNA, 554 bp, Homo Sapiens
ttttttaggactggcactttctgcgtgatttatttcatctcggcatgaactgacaaacatacgaggctctgcactatttatgcccaggattttaaaagtcaagcattaataaatacattaactacacagatcacaacagctgccctgaacttggccttcaacaggtgtagtttacctttaataaatggtaacatttgagaatcgcttagagcttgaacaggctttggaggagctttgatctcacatgagaacccgtctcctgtttcatatgcgttcaatccaaatccatccacttggcgtgtctgaagctcctgccagcacagtgtctgtgccgggtgcccgaaggctgcacagtccaggcttcctcccggatgtggaaaacgtggaaatgatgtggccactgaaagaaattcaagacaactgaaacaactgcagatttccattttcagctcgtgttttcttatgaacaataacattgcagaaggggaaatatcagaaagttgattgatttttaacccaaaaatagaactttttgtaagctaggaaagcatcta

SEQ ID NO: 140588 - DNA, 195 bp, Homo Sapiens
aaagatggtgtatttcaaagtatttcatattaatgtactatatctacttgaagttccaatagtacattatgacataaaccaaaagatctaacaattctgcttagctttttggttaagactccatgctttcattaccagaaaagggtcttacgtagtcattatgattcatggaattctattccatgaagccttaag

SEQ ID NO: 140589 - DNA, 726 bp, Homo Sapiens
  misc_feature (531)..(531): n is a, c, g, or t
  misc_feature (545)..(545): n is a, c, g, or t
ttttttgaacccatctctgaaagctcagctgccttcatgggggacacagacggggtgggtactaaggctccataacagagccaaaaactgagctgagggcctctgtgggggctactggaatgcttgatggaaacgaggcagggtggtgctactcaggccagacgtgaagacaggaggcaaggagtgcagaggcccaaagttcagtggtcccccagctcctggggaatcttgaggctgagcttgcaaagtggtaagcaggggctgtgcctcagcctgggagtagcccatgaccaggcctcctgtggccccaggtgggttacacgggggcaggttgagtggaagaaagcccagtaggtgggagaagtccacattagcagcgcagagggcctcagagaggttggcggggctcttggcaagcagtgcttcatctaggagggccgcagcggccgccggctgaggtgaggcgggctggggttcagcggatgagagagacaggcttccaggaagctccgccagaaaactatccacctncactttgggcaatntgtcgggcaagtatgaggtagatccaagctggtattctggagggagctgagctggggacgagataggtgaggattcccagaggtagctcatacccatgggcagcgtgttgtgcaccagggagtgtggcacgcccgtgctgggcatgggtaggatgtgggcaccatacatgcccatgggcac

SEQ ID NO: 140590 - DNA, 805 bp, Homo Sapiens
tttattttttttaaaattacttttattcaatcactcataaattaacttgtgcttctagtcatgcttacactctaatcatactcatactatcctgtccaatgtgcatgcacttaggaggaccaaatcaccaaaaaacatctcttaggaagcagaaaagaggacagaaagagtaccagctataaaggtaaagctcatttggatgctattgatttgtgtttggtgtttctttgataattttagtattctttattactttctgcctcaacttcaaacaactgtttcaaatctcaaacatttcctgaccactaaggtttagaacattgccttcatgcataagtgctgattagctcttcaagggttctgaaggtcttagtaccatttgttgcatgatgctgttggaatctaggtggctgtcaagaaataatgcccccatcttcttctcccagattcaatccagttgagcagttgtctgaaggtagaattcttcacaggtcctggaattatgatggcaggaaagtcccaggataggttgtcagcaaactggagaatcagagaagccaatccatgtttgaaagccttaaaaccaggaaagctgatgacgtaactcaattcaaaacctaaggtctgagaaactgttggccactggtgagaatcctggagttcaagagctgaagacttttctaaacattgaataaggacaatttcctgtgccccaaaatgctataaataaaactacaagtcaaatggcacactggccatcagactaataatgcgtagataacatggcttgagaaatgatgaacct

SEQ ID NO: 140591 - DNA, 690 bp, Homo Sapiens
tctgttctgaataactttattgcaagtcacataatcttggtttagacttgacgcaacgggaggttacagagctgtaaataacaactggtcattaccttattgagtttagaaaactttcaagttcgtgacatatgttaattgcacttaaatagacagtgagagaaagatttataaaggcatcattcaaaaggatttttacatttgggtgtgccttactcgattacaaaaatttcaaaccatcttcccacctagggcctagggcgagttttctctttccctgggactgaactatcacaaagcactaaagggtttaagcaaacgtgagtatcactgaaaagcactagaagaaagtctcaatgtggctggaagaaaccagaaggcaagattgcctgggtgagaaagaaaacataaaaatctgtgtgtgagatcacaagcagcaacttctctggtgttgaattcagatgtctttcccacagtcggggcacaggatgtcggtcctctctgtgaggaaagccacgccccaccagtgagagggagcccttcttacagttaaagcagttcgtatggcactgccgttcctcaaaagagatgtatttttgtcccaccaagcccgctgatgggggttgtgcacccagaacacttcttggcatacaagtcacagaagcaggtcaggcgctctgggcgaatctc

SEQ ID NO: 140592 - DNA, 449 bp, Homo Sapiens
tttttcatgaaacatgccaacatttatttgctcattggttaaatattctctacctattttacatggaatgccaggaaaaccagcagagggcttctccattatccataatctgttaggaccacttatatcatgctctggggtgcaaagaagagacacaagaaagaccatcccagctgcctcaggctttcaacctaatggtagtttcctatgtttggttcaaatgttcatgccaagttggggaactgaagacacatgacaaatgagacttcactctcttttgagagggaagctgggagtaaaagcaaaattgaatcaatcctgggcacagtctggcctttttcacctcccaggcctcaagagtgaaaggggtacgagaagacagggcaggtggcctctggatccgtggcaaacaggagagggaacatgctgagggaagccccgttatttag

SEQ ID NO: 140593 - DNA, 577 bp, Homo Sapiens
gttgtttgtgctttggcattacatctaagaaatcagtgtctaatctaaggttcatatagatttatggctgtgttttcttctaagacttttatagttttagcttaccctcaactttttaacagactgcttcctctgcatgttctgacttttctctagaaatatggcttcttattcagtccatgtgctacaagagtggatgcagtgcttttgagcttttatatttttaactgcataggaaaacatttttctttatggtttcatcatggaattatcttatattttattcattttattgtctgtcttctatccttaattgatatcttggtcattcacccacatccagtaggaaatttgaccaactctttcttatcctattcatgtctgtattatctttggcaatctgagtgtctggatataatgtcttggcaacattgtcacctctcacttcatcatacatcagttccagcagtcatcacctacaccttgtttcagcaacctattcccattgccagatactggaccttactattcttcagaaatactaaatgcctgtgtctgtactctggttataactttc

SEQ ID NO: 140594 - DNA, 922 bp, Homo Sapiens
tgaacaagtatcgaaaccagtattgcacattcaatgatgatattcaaggaacagcatctgttgcagttgcagttttccttgcagctcttcgaataaccaagaacaaactgtctgatcaaacaatactattccaaggagctggagaggctgccctagggattgcacacctgattgtgatggccttggaaaaagaaggtttaccaaaagagaaagccatcaaaaagatatggctggttgattcaaaaggattaatagttaagggacgtgcttccttaacacaagagaaagagaagtttgcccatgaacatgaagaaatgaagaacctagaagccattgttcaagaaataaaaccaactgccctcataggagttgctgcaattggtggtgcattctcagaacaaattctcaaagatatggctgccttcaatgaacggcctattatttttgctttgagtaatccaactagcaaagcagaatgttctgcagagcagtgctacaaaataaccaagggacgtgcaatttttgccagtggcagtccttttgatccagtcactcttccaaatggacagaccctatatcctggccaaggcaacaattcctatgtgttccctggagttgctcttgggtgttgtggcgtgtggattgaggcagatcacagataatatatttcctcactactgctgacgttatagctcagcaagtgtcagataaacacttggaagagggccggctttatcctccttttgaataccattagagatgttttctctggaaaattgcataaaaacattggcgaaaaatgcatacccaagaaaacaccggccccccgtttatccctgaaaccgcaaaacaagaaccatttggtcccgcttccagaatgtataggaactggattatgaccccggaatcctcccctgaattg

SEQ ID NO: 140595 - DNA, 621 bp, Homo Sapiens
ttggattggagaaaaagaataatttcctggtggaggtgaaggagagttgtaacatcctctgaaaggctttgaaaggagggtttgagtctggggttggtggtgggtgaatgggggagaggagggccctggtggcccagggaggcctctttccacccctggatgctgtgactctctttccagcaacgacacctctctgctggctgacagtttaatgagcattttacccagggcattcacgccagtaggaaatgttgtgagatttacaagtgcccattagttaaaagttctcagagccactgtagattcagcactgcatatagtttctgtttgggacttccttttgcttccagtgttggagatccagcataaaaaagggccgcacctcagggagcttctgtgttctcttaagcattctaaacagccatgggtatgaaatagtgagctcctcatagtttgataaattataaaaccccaccgctctcccacagagagctctagccttttaaggtaaacatgtggttcccttccttaatgaatgattcaggatacttcagtgatgatggggagcatatggagaataaataagccagagtaagcagaaagtcaactgagtccgggtgg

SEQ ID NO: 140596 - DNA, 446 bp, Homo Sapiens
  misc_feature (16)..(16): n is a, c, g, or t
  misc_feature (61)..(61): n is a, c, g, or t
tttttaaagacggtanatggatctaacgacaaacattccggggggggtttttaaacaccanggggccgcccaaggaaccatcgttaaataaaacagacctgaaaataaggcaattctcacgtatacaagcacactcacacagaaacctgttacttttaggatcattaaattattcactattttaacaaacagctgtaaaataacattacagtgaagaaaaatgtgcacaaacttcagaaacacagtttagattgtctatgaacacaggtccttaatttgtattttttcacatatgtacagtctcttgattgtaaagagaccacatggctcaaggggttaacttctcattttctccttccaactcggagctcaagatttaatcaaaaccatttagcctatttaaattgctccaggttttgcttagtaaagggcagcagaggaagact

SEQ ID NO: 140597 - DNA, 809 bp, Homo Sapiens
acctgctgagagctgttgccatgaagagaaatccaacaggagctgtgcctgtagataggcgagaccggctactgccagagttggaggtgggagaggctgttaaaacttaaatgaaagcagacacagcagtgaaggccagagactggagcacaaggaggttttagtcggcttgttgttcctggtgttcccgttcattccagccagcaacctcttcttcagggtgggttttgtggtggcggagagagtcctttacatgcctagcatgggctactgcatcctttttgtgcatggactgagcaagctctgcacttggctgaatcgatgtggggccaccaccctgattgtgtccactgtgttgctgctgttgcttttctcttggaaaactgtgaaacagaatgaaatttggctgtcaagagagtccctattcaggtctggagttcaaactctgccccacaatgccaaggttcactacaactatgccaatttcctgaaggaccaaggtcggaacaaggaagcgatctaccactacagaacagctctcaataataataaagcttgggattatctatgctggagattcagaaaaacactgacagatctgccatagacctccagagctctccgactgttcggttaccctggagaaggtttctaacattctaccttgtgtgatgggagtagaaagtccagagaccacccaacaagtcagcccttcctacacaaaaactcccaagaaatgcctcagctaataagccccgaaagagaaatagtgattctccctgaataaagtcaagatattgatgtgtaaa

SEQ ID NO: 140598 - DNA, 453 bp, Homo Sapiens
ttttttcaagttgaaaagctcccatttatttaacatttttttaaagaattaaatattttccttatttatccaatttgcaaacgtaaagcaaggctgcatcatctctcctttttccgcatccttctttccgtccactaaggtagttctctgggactgttgacagcttctgaaggtgatttgatgtgaactcccccctgactcctggtttgtcagagccctcctggaggtttcaagcaaaggagctgagcagtttgcagtagctactagatagaggttcataatggaatagcagcttcaggtttttaatccatcattagaaatagttgttttgcaacttgagagagaaaaagtagaaattttgtctggagagtaagagaccggccagttagtcctaataaatccgagggtttggggagcctcttttgagataggtgatgcattgctcattattag

SEQ ID NO: 140599 - DNA, 436 bp, Homo Sapiens
ttttgaggaaaatgtttgagtttttattcttgagtactgtcagaacaacttcctacacattgtgcccatgtgctttagttctgatgggaacgtgttaaagtcagacatgggtgttgaattcatccacgaataagggctgtagttaaaatcctctcaggaccctgagtgggagtgtggtgctagagaaaaacagcaatcactcacacaaggtgtgaacagctctcctgtgtaagtaaaattctgaaaggtaattctccctttctcccatttctggatgtgtgtagactttaaatggtttaatgagcatggctttgaagtttaggattctaatggccctagtccctttgcccacatgattgtgtgtgctttagtcactaaggcagaaggtcattactttgttctgtgcatctttggaaattgcaccctcattcttcag

SEQ ID NO: 140600 - DNA, 914 bp, Homo Sapiens
ggtccaaacaaacacctaatttatttctggggggttttgttcagctgtcctaatttatgactttacattccttctggtgctaaactgctcaagtagcctcttgtatcaagtgtgacctgattccttaagaattttacttaatgagaacctctaagctagaaactcttgctaggtgtttcatgcaccttattttctttaatcattacaacaactctaagattgggttctctccaccttataaatgatgactgttttagagaggttaaggttgcttaaaattggtgagttagtgaggggtagagccacgaatggatttctggtcgctgcctccatcgtcagggcaagcttttcccacgactccagcgcttccatttgtcagtccccaggctagaaagccacagtgctaatttagtatttatcaagcgtttgtagtgtcctgggatctggcacttcgatgagaaagctgtgacggccccaacttctaacagcgagtggtaaggaggacgagggacacaggagggaggagactctcgccaaagcttagcaccaacagaagtggtcccccgcaggttgctctgcgagcgccacctcttccctccaaccgaggagaaagtggcgcgcctttgaggagtccgaggtcccggcccaggcggcagcttgggtcctggcgggttccggacgggcgcctcagggacctggaagcaaccgcaccgaacgcgacggagagcggcgagacgactccaggaggcgcccgagctacatcccccggccacaccaaacccgggtttgctggcagatgcggctcacgacaccccttagggtcgcagcccctcccccggaagtgacgtgtagcgactacggcgtctgggagggacccaggagcagtcggggggtttgagagtggcggcggccgc

SEQ ID NO: 140601 - DNA, 550 bp, Homo Sapiens
ttttttcatggtttctgaaaaatcttttattcatccattcatggaatgtctgtagacatacattatcatacgggtttttgggttttggtttttagtgcttactgtgtgctagaaccatggctgtggggattcagggatgaccaaggcagagtccccgacctactccatggagcttgaaatgaaggtcccctgacaatgatctagcctaagtgtttgtcaaactgaattccaggaagctaacttgtggtctttaaatggctgggatagtggaagaaagctaagcagacatgctctagcccatctctagcacccatcctcggctttaacccagggcttgcactttggttattttatatattaggattccctatgagatttgtttagggggtgaaaaaaagggttattcatccagcattcagtccttttattttaagtaaggaaaattagattcttgagcctcagaagcactcgtgacatctttggtgacagtttggagcatcctgccggtctgctatcaggtcgtcatgacagattacccagaaggtcagtg

SEQ ID NO: 140602 - DNA, 1322 bp, Homo Sapiens
  misc_feature (418)..(470): n is a, c, g, or t
  misc_feature (541)..(574): n is a, c, g, or t
  misc_feature (1058)..(1105): n is a, c, g, or t
ggtccggaattcctccaaaagcggcggcggcgcgggacgcttccatccccttgaccctccaatcacctcgggctcccatttgattggaaggcggctaaggctttaatctcccccttggtgcagctgcttttgaagtgagtttcctcgccagagccccggctggacacgcagcggctcgcatcgcagagcgcagcgccggcgcggggccgcgagaacgcagcgcaggggagcagcccgaggcggacaccgcgagccgcccggcactcccgcagtccagccggctcctctagcccggccacggctccgctgcgggccacccaggattactcgcgtctggctccaggcgccgagaaggcgcgctgggcgcccgtggccgccgcgccagctcctcctcctcccgctgctcctgctcccgggnnnnnnnnnnnnnnnnnnnnnnnnnnnnnnnnnnnnnnnnnnnnnnnnnnnnntgctcccatgcgcgcgggtgggtcatgagcacagcgccctcgctttctgccctaagaagcagtaagcacannnnnnnnnnnnnnnnnnnnnnnnnnnnnnnnnntgcagaccctgcctggaccagcgcgctctctggaaatagctccggccccggcccaggctcgtccccggccggcagcaccaagccttttgtgcacgccgtgcccccctctgaccccctgcgccaggccaaccgcctgccaatcaaggtgctgaagatgctgacggcacgaactggccacattttgcaccccgagtacctgcagcccctgccttccacgccggtcagccccatcgagctcgatgccaagaagagcccgctggcgctgttggcgcaaacatgttcgcagatcgggaagcccgacccctcgccctcctccaaactctcctcggttgcctccaacgggggcggcgctgggcggtgccggcggcggtgctgcgggcgacaaggacaccaaatcgggccccctgaagctgagcgacatcggcgtggaggacaagtcgagtttcaagccgtactccaaacccggctcggataagaaggagcnnnnnnnnnnnnnnnnnnnnnnnnnnnnnnnnnnnnnnnnnnnnnnnngtgtttcgtcggagaagtcgggattccgggtaccgagcgccacctgccagccattcacgcccaggacaggcagcccgagctccagcgcctcggcctgctcgccgggaggtatgctgtcctcggccgggggtgccccggagggcaaggacgacaagaaagacaccgacgtgggcggcggtggcaagggcaccgggggcgcctcggcgaagggggaccc

SEQ ID NO: 140603 - DNA, 698 bp, Homo Sapiens
gattttaggatgtgtttcttctttatcacgggggcctcacaacacttattacacctcttcttcctctctcgtgttgtctgctctcccgattctccgtcgtccgcccgtctctcgtgcgtgcttttcgtcggagaagtcgggattccgggtaccgagcgccacctgccagccattcacgcccaggacaggcagcccgagctccagcgcctcggcctgctcgccgggaggtatgctgtcctcggccgggggtgccccggagggcaaggacgacaagaaagacaccgacgtgggcggcggtggcaagggcaccgggggcgcctcggccgaagggggacccacggggctggcacacggccggattacgctgcggcggcgggattaatgtggatgtgaaccagcatccggatgggggcccgggaggcaaggctctgggctcggactgcggcggttcatcgggctccaagctccggctccggccccagcgcgcccacctcctcctcagtgttgggctctgggctggtggctcccgtgtcaccctacaagccgggccagacagtgttccctctgcctcccgcgggtatgacctacccaggcagcctggccggggcctacgccggctacccgccaccagttcactgccacacggcgtggcacttgaccccaccaagccgggcagcactggtgggggcgcagctgac

SEQ ID NO: 140604 - DNA, 1178 bp, Homo Sapiens
  misc_feature (959)..(1009): n is a, c, g, or t
  misc_feature (1054)..(1138): n is a, c, g, or t
gcggccgccaggccattcatgttgagggccgccatctgctgcatctgggcggcagcgaaggcagccatggggttcaggtagcccgccctgcgcgactgatgccatcagggccgcttgctgctgcatcagtgcctgagcgtaggcgccgtaggccccgaaagggatggccatggggttgaacatgcccatctggccagccatctgctgcattcgccgcatcgtgcgctccttgtcggtgtcggcgaacttgaccaccagactggacgaggctcccggcatggtctggctgccgtgtagcgcgttgatggcggcctgcgcctcggcgtgggaggagtacttcacaaaggcgcaccccttgctgttgccgtcgggcccgcgcaggatggtgcactcctcgatgttcccaaaggcctcgaaaaggcggcgcacgtcgtcctcggactgttgcttgttgagcatgcccacgaagagttttctatcttgtgaagggggctggcgcaggcagctactacctcctcggctctcgctgtccgcaggcttcacctggatcggccggttcatcccgggcagagtcttctgctcgtgcagcgcgctctgggccttcagcgctgactcacgctcgcagtaggtgaggaaggcgcagcctttgtgcatgcctgtgaacctgtccttcagaaccgtaagctcgtagattttgccaaactcctcgaagaggggcttgaggtccttctcatccaggttgcgggggatctgcccaatgaacagcttgatggcatcgtggtccttcatgggaatggtcgacgggttccccgggctgtggcttaatccgttcatgtgcccggcactgcccgggctgctgccgagcccgttggtactgaggcttgcgttgtcagcctgtccgtttgctaacgtggccatctttatatacatagagaaaatcttctttccttttattcttnnnnnnnnnnnnnnnnnnnnnnnnnnnnnnnnnnnnnnnnnnnnnnnnnnnacacgcacacgcatacacacactcgggttctctccccctcggttnnnnnnnnnnnnnnnnnnnnnnnnnnnnnnnnnnnnnnnnnnnnnnnnnnnnnnnnnnnnnnnnnnnnnnnnnnnnnnnnnnnnntgccgaattcaacacccgggcctcgctacctagcccgtag

SEQ ID NO: 140605 - DNA, 1030 bp, Homo Sapiens
  misc_feature (888)..(934): n is a, c, g, or t
  misc_feature (1005)..(1005): n is a, c, g, or t
cggggggagccacccgggacaccaccggggacggaaccgggccccgggtgaagcccccaacaagagcccatcatggcgaaagcacgggtcagaccccgcgacaacaaaggccttgaacaggcggcgtagcccaggcccaagggagccagggtaacaccatcggcaccatctgcgcatcgccgcatcggcgttcatgtcgggtcgccgaacttgaccaccagactgacgaggctcccggcatggtctgctccgtgtagcgcgttgatgcggctgcgcctcggcgtgggaggagtactttcaccaaggcgcaccctttgctgttgccgtcggcccgcgcaggatggtgcactcctcgatgttcccaaaggcctcgaaaaggcggcgcacgtcgtcctcggactgttgcttgttgagcatgcccacgaagagttttctatcttctcctcggctctcgctgtccgcaggcttcacctggatcggccggttcatcccgggcagagtcttctgctcgtgcagcgcgctctgggccttcagcgctgactcacgctcgcagtaggtgaggaaggcgcagcctttgtgcatgcctgtgaacctgtccttcagaaccgtaagctcgtagattttgccaaactcctcgaagaggggcttgaggtccttctcatccaggttgcgggggatctgcccaatgaacagcttgatggcatcgtggtccttcatgggaatggtcgacgggttccccgggctgtggcttaatccgttcatgtgcccggcactgcccgggctgctgccgagcccgttggtactgaggcttgcgttgtcagcctgtccgtttgctaacgtggccatctttatatacatagagaaaatcttctttccttttattctttnnnnnnnnnnnnnnnnnnnnnnnnnnnnnnnnnnnnnnnnnnnnnnnacacacgacacgatacacacactcgggttctctccccctcgttactctacacctcgccctcgggccgattncaaaccagcctcgtactagctagtt

SEQ ID NO: 140606 - DNA, 456 bp, Homo Sapiens
tttttgattccaaagcttttgttatttattgccactatatagtgcgagcacacaattgccaagatgatgaaaaccatgatgtgggtaaaaaatggttcctgctgcccagctcctcatagagattggcatcatccacctaagggagtgtagtgagggcttttggctgtgtggatgttactgttctaacagtttgctaataaaaggcctaaatggcaataaaagcccagctacttgagaagtgcctatatggccagactttagaatgtaggattgaggggcaagtgcatgggtgaggaggatagggaactggattcttatggctggagggctctaaggaccacgtggtcaggggccttaatcttgaggacactggggagccaatgaagaattttaagctggtgagtgccatggccagatgaattcaaagatatttctacagcacttacattttacaaa

SEQ ID NO: 140607 - DNA, 533 bp, Homo Sapiens
tttaattataattttacagctaaataatggggactaatttcctacagagattaccatctttatacttttctgcatttttcagttttttgttattttataaaaacactcaaagtttttgaccttcaaaaattagaatattctggatcatggtaaacgctgaccaccaaacacatctggtacaaatatcaaagcaggcactggcctggtggttaactggactcagtatcatgtttacgtagttaactatgagcacaaatgaactgttcatcactcatatcacttcctttctatatatacaacgtataattatcctatgaataaccagtactatgacgttaagccttagggttttttgtacttattaatagtggggtacagatggttttttttagtgtactgtacattaattattaattatctctggtctctgaaatcctgtcataaaccttcccccttccccttatataacaatgcgtatgaagcatgatttgtctgcactgactacaaataagctgtttggcagaacaagtctg

SEQ ID NO: 140608 - DNA, 600 bp, Homo Sapiens
  misc_feature (131)..(140): n is a, c, g, or t
tttattcttctttttcaactgtattgcctacttcacagcataacatagttacagggagtaactgagtaaacaggtgtcaattgctgagaaaaatacctcattgtggtggtgaggtggagttaatctttacnnnnnnnnnngagaaaaggaatttttcagagcattttcttgagtaacagaaggacttttgccacctgacgctcttggcttttccattactaaaacatcacattcttgaattgtattcttccacatctagtctttcccagagacagattgaacttcaaggtaaaagtgaattttcagatgcggacaagctaacttctaaggattatgagtaattcgactcatcttttaaatgtaagttgcaacataaatacctgttttcataagttgaagatctggaaagtttcattttggtgaagcgtatcttgcttaagacagacgattctttctcttctgacagaaaggtggctagaaaggcagatctttgaaaattctgttgaattttactaaatccataaaggttgagctgtcgaacaaaacttttgatagcatcagtttgaaatattctgtaaggagcctttgtttccaaaattt

SEQ ID NO: 140609 - DNA, 559 bp, Homo Sapiens
tttaaaacttgtattaagtgttcctaacattcataactgataattgcttcaaagtgggaaagcccagaatgtggcatgtacataaaattgtagacctgatgaagatgccattcagatgcccctcgagaaggatgggctgaccagctgcagggagtgcagtcagcaggtggcttccagctcccagctcctcaacatcagtctgagctgcagagaaaaacatacccttctgggcgtggcctgcatctggtgactgagcaaggtggagagataaaagcacgactgtttcggctccacatgggaaactggcaggcaggacttcctccgagttccccactggtttggcaaggctctatctggcctgcagggcagttcaacctcttcatctttctcaacttcaattgtgcttccacctgcttccttacacaggtgttgatccctagttagcttcttgcaccctaaactctgtctcatcatctgtgtctagacaatccagtttgctgcagttgtgtctggaaagagcaggcaatcaaatgggattttggagctgaatcattcaccg

SEQ ID NO: 140610 - DNA, 446 bp, Homo Sapiens
ttttcatccagaaatgggttttattctcagccgagggacagcaggactggtagaaactgtcaggccacacggctgcctgcacagcacccccatgcttggtagggggtgggagggatggcgggggctggctgtccacaggccgggcatgacaaggaggctcactggaggtggcacactttggagtgggatgtcgggggacagcgttctctggtagttgggccacaagactccacaaggatagcacagtgactgattcccagcgctagaggcgaggcggttggccatgtgtaggtgtgtatatatatgagtatttatagatatttatagaacagggcaagggcataccacagaaggggcacaagttttcaccaacggtcacacctgaatgtatcagctcaccactacaacagattaaatcacagatgaatggggctggcttttgggct

SEQ ID NO: 140611 - DNA, 941 bp, Homo Sapiens
caagcatggaagaaattttattcaggaactacagacagagtaaataatactgtgcacagacgagttaacaaattaattttcctaatatccctcaaacaatatctgtgaagattatttagggagaagtgaaaatagacaaaacccaattatccaacatcacattaagttgcttaacttgcaaagttttcaaagaaatattttcacagaattagagaatgttatcaaatatataatgaaaaatatctcagtaccccagtccattttccatcaggtgagccttcgacaagatttaaacatctttttatcattcttctgaaagcaatctataccgattatctggtatagattttctgcaaaggaaaactggtctctcagagacttgagtctctttaaggctttaaaaagggctttcagcaagtatttccttcttgtaaaatagtaggattcagggtaaattacttgcgaccttaaatcatactggcagcttgtcatgccttcagggctcaagtagaagatctttgtcatgacacacacttttttagtgtaaccaccaatttttgccagcttctgctttaaggttagggcagtttgtgtagaatagcctttaaactcctcatcctgtaccatgtggaaggtgtataggactggaggactgtcctgggaaatcagaagagcatcacagaggactttgtggttctcttgcaagcccagatccacagaccagctcctagagaagatcagtgagccctttctgacagagtccatttcttcacatattaattgcttaagtccttcatgttgtaagaacagttttctgcaaaggttttctggagtatacgttatccttcctgatagccctggacagtgatgtctctgccgttgccattccaaaagaggccaactgtggggagcaggtaatgacgtatttatttgagagatca

SEQ ID NO: 140612 - DNA, 1055 bp, Homo Sapiens
tttcaagtttggttttttaattaaattgaatctattgcagctaatctcctatttttcattaaacttacaggaaaataatcagacttcatacaatgtaagtataacttgtataaaatccaaatgaagcaggaattttggtgaagcagggtatggagaatatatatgtcttaaaaatacaatgtgtgaaaaacatagcctgttatgtctagagttttgggggtatgtgcagttatttcatgtaatggatttttatcaaaacacaaggaatttttccaccagaatacttcctgtgttctatttactgcactgaatccacagcctgtcttttctcgtgtcacactggaatgctgtacttcacatcttcttttttttaatgggaaagattccgaggatgtctcttctttctgagtatagatgactgtaggtaaaatacatacctataaagagcatcatgagatatattttcagcacatatgggaaatagatggataagtcaaagggcagcttggtggaataagtgccaaatgattcaaataagcagcgattgatagatggcaaatgcttcagcaagaacacacaaaggataaattggcatccatagtgtttgactgagccatgtcaagacagcataggatattcctatgactgataacatgctataagtgtacctaaccatatccatagattccaaagacgaataaacacacccacatatttctcttggacttcctcttgactggtgatcaccacaaaaggatgattattctttctgtgagctgcaaaaccttgggagaagatggtttgactcaatgccacatatatgtgcagcagttccaggagagatacggattggcaagtcgcatcacagtccatagcataaaaagtgtcaaccattgaatcttttccaatgaaaagaatctgactgtcatatttgtaaatatccaagagtggccacagaactggattaagtaatagatgcaaagatacgcattcttcctatacctgggctgcagccaggcgggcagcgccaggccccatggccgccgccgccaggc

SEQ ID NO: 140613 - DNA, 1144 bp, Homo Sapiens
gtgtccctccctttgtgtgccttcccactgtccttccttgttgtcgcctgtgatggtgtgttgggtccgctgcttattggtgtccgtatgggttgccccacgctctgtggccctttatttttgcttttcgagtttggctccgatctgtcctaggtgtgcttcgtctcgggatcctctcttcttggactccatctggatgggtcccctgcgttggccgtgtgcgtgctgttcgttctgcgtccgcctactcctatttcgtctcctcttctctccaggtcagcttctttctgatcttccccctctgtacccatttacagccttgcatcctacacctctgccttaaaatgtttttagatatactcccagcagagaagattcttcagacagctggcaaagtccctcgctccgaggaagggagtaacaggcaggattatttagttctcttcatataggcgactcacagtatggcttttttggggcttgggattgcggggagacagccaattgatagtaacaggaggcctgacactgatgaggggctttgacgtggaagggcacccttccagggagggacgccctgtcagtacggaacagagcccgtgtggggaggggcgctcggctcgaatggcgacagcggcggcagagtcaggaggtcagtacggtgggcttcggtttaaatctttaatgcactggctggctgggcagcggcggtggggctgcggcgggggaagccacgacccgagcgctggggagtaggacccaggccgctggacagacagctcatcaggcctcgcagaggctccagcttctgctccccggggtgcgccgagctgtggggcgacccgacactggcatgaggcggggcgggagctaccggattccccccgatgggtcctcagagactgagtcccgtccatgcccggggcgggtccgcggtatcgcagcctcctcacctccgctccctccgccacatgcgaaggcaggggaaaaagtagaaacagccccagtagatctcctcctccgcctccagcgccacctcgtatctcctcattcccgacatgtcctgggctccgaacgtctccgttactattacgtcacagggatgccgttgcgcactaggtttgcctgtcccccggaaggggtg

SEQ ID NO: 140614 - DNA, 332 bp, Homo Sapiens
cggtttaaatctttaatgcactggctggctgggcagcggcggtggggctgcggcgggggaagccacgacccgagcgctggggagtaggacccaggccgctggacagacagctcatcaggcctcgcagggctccagcttctgctccccggggtgcgccgagctccgctccctccgccacatgcgaacgcaggggaaaaagtagaaacagccccagtagatctcctcctccgcctccagcgccacctcgtatctcctcattcccgacatgtcctgggctccgaacgtctcctggggagcggcatgattgaatcagggattccctagccccaggt

SEQ ID NO: 140615 - DNA, 793 bp, Homo Sapiens
acaggtccagagcctcgaagccctgggacgattaatgcatctctcatcgtcatggtgctggcccggaccgagctgcctgccctccgctaccgcttcaatgcccccatcgcccgtgactcgctgcccccctactcctggcactatgcgccctggaccaagtgctcggcccagtgtgcaggcggtagccaggtgcaggcggtggagtgccgcaaccagctggacagctccgcggtcgccccccactactgcagtgcccacagcaagctgcccaaaaggcagcgcgcctgcaacacggagccttgccctccagactgggttgtagggaactggtcgctctgcagccgcagctgcgatgcaggcgtgcgcagccgctcggtcgtgtgccagcgccgcgtctctgccgcggaggagaaggcgctggacgacagcgcatgcccgcagccgcgcccacctgtactggaggcctgccacggccccacttgccctccggagtgggcggccctcgactggtctgagtgcacccccagctgcgggccgggcctccgccaccgcgtggtcctttgcaagagcgcagaccaccgcgccacgctgcccccggcgcactgctcacccgccgccaagccaccggccaccatgcgctgcaacttgcgccgctgccccccggcccgctgggtggctggcgagtggggtgagtgctctgcacagtgcggcgtcgggcagcggcagcgctcggtgcgctgcaccagccacacgggccaggcgtcgcacgagtgcacggaggccctgcggccgc

SEQ ID NO: 140616 - DNA, 912 bp, Homo Sapiens
tctggatagctttattgaagtgtcgtgtacaaagcatacatttcatgcacttaaaatgattaaaaatcaatgatgtttagtatattcgcaaagttacaaccatcaccattactgaaatttagaaagttttcatcacgacacaaagaaacgttctatcaattagtggtcatctcctatttcaacctccctgagacattggcaaccactattctactttctgtctccatgggtttgactgttcttggtacttcctataagctgactcacataacatgcaacttttagaaaggctgaaaaccacaaataccatgttgagcaaaatgagcccgacacaaatgctaggatgtctgtactttagtaattgtgtgcatcctatttcaataattgatttagaatttttgtattagagcaaataacataattcattttcagatttatgcaatcataatatttctattttaagaaatataaaatgtatctgatgcactgtaaacgcaaatgctttacttctaaagcttatgcttacaatgatatatcattgaagatccacactgcgctgatttaagtcgatttacttgtagcactgcacagttaagttcagcattatctgagtcttttatcctgtaatggagaaaaatccattttctgttacattttaagcaaatgattcatgagacgaaagcattttccatgtattatgtttgaaagccaaaccatttattgtcacccatggatgatgactgctgttacgaaacacaccaatccatgaggaaggtaaaatgctggccagaaatttcatttcttcttcattatctatagaaagcagactggagttcttcgaagtacaggccagcaaactctcttcccaagttcttctttccttaccaatgtaataacaactgttggaatatg

SEQ ID NO: 140617 - DNA, 983 bp, Homo Sapiens
  misc_feature (604)..(616): n is a, c, g, or t
  misc_feature (857)..(866): n is a, c, g, or t
cagttttcaaaactctgtaattatgtatttacacaaattacataatcctgtatgtatttacatacaattacagattatcaagtaaataacacaaggttgtagtgttaatgagatgaaatagaataaaaacaccagaaggcagccatttgtttatctacaaaacaggacctggcagggcaggttccccaacactgacctagcatgtccttcaccactgcttggggacattcacatgacagatgggaaggttgttcagcccatgctcggtaagtctttgaccacagtgcaagtgttggcaccaacaagacagtggtttggctatctaagcatctgtttgtgaaaccagaacccccattccacagtggctcagggctgccattcactgggctttgggtctcttaagacaagaactggatgcaaacccatgagctggggatgactcactctactgcccaagagacaatgcccacaccgaaaccctgagccatccactctcccagttcgactatttacataaatcgcatgagtcaatatttatttatttacagaccattacagtttattgtatcaattgccaaaagcatataacaatttgctcgtcttnnnnnnnnnnnnngtaccaaacaaaattaactccaaaagtagaccttaaagtagcgttttataggaatgcatgaagatttttgtctttttcacaattttctttcttttaggtcgattatctaaggtctcatgctactttaagactacttttggctgtcacctaaaatcaattttttcagtgctacatagtatacctatgacatcctagaaacttgattcttccctgtggtcaaatgtttaatatttttcagccnnnnnnnnnntgccttttggaaaaactaaagcctgaatatgtgcacattttagcagcagcaaagggttaaataataaataagaatactactttttggaattaaatgcagtttctgtttagaaaggaa

SEQ ID NO: 140618 - DNA, 512 bp, Homo Sapiens
  misc_feature (473)..(473): n is a, c, g, or t
ttttttgggacaagaatattttttattattgaaaaatacacaaaggtgaaaggttgctgagcagctgattttccatagtacaacagagtattataagaaagagggaaatgtatctgttatatatggcagtttacatttctaaggcatttaggcttaagagcactaggtcttgcacagctaggtgcattgtcttgagtttaaatatactgaggcacaccaggcaggcaaaggattcaaaactatacattaaaacttgttcatgcatttgtgtcttaggattttattccctaccctccttattcatttttttcccacatgggttttggagttgttcatagaacactggaaataatcgactcttcaagagtttgtttacaatgacaacaccaatgggacacaccaaacagaactacttcacagatacattctgtctcttaccaaaatgaagctccagtaagaaaaacactgatttngcaaggcacagtggagaacaggtttaatgcttaaatata

SEQ ID NO: 140619 - DNA, 699 bp, Homo Sapiens
tttatactcatgtttatcgtttattaaaacaaaaggatgcagattcttatcaacaaaggaaaaagattctcagggcaaattccaggagactccaggcacaaatttacaagtgtccatcacagtagaatcacatgcagatacacttcaatctcccagtaatgctgcatacaaccacatgtgaattcttggcaattaaagcagcttatttattttttgatgtcccaggtttttattggtggttaatcacataggcttgcaatgcccacgtggcaaaactcagcaaattcagcttcctttccatgatccctcatgatttgattatttctgggtttctaatgggttgtggacttagccagtcaccctgtctcagttcacaggccctaattgacactggtctctactatatgctgtcatacaccaggatacactcccttcctatagacaagacacaagaataagaatagtttatatctctgctacctgtactacaggatgtcttatccttatctattcttggggcaatggcaataataatgaattaatataaattatgagtgacctcagagatggggtccctaagattatataaatgtgtccttctgcatctaagaagaaccattgccctatggttatttaggcctccatctgcgttaaagtgataaagtgatgctattgagtcataatacaagctcattaccg

SEQ ID NO: 140620 - DNA, 1122 bp, Homo Sapiens
cagtcgacggtaccggacatatgcccgggaattcggccattacggccgggatactgcaatatgacattacactggcattgttggtaagattcaactatcttatgtagagaagttatataatgcttatattgataatcaaatgtattgagatattgagttaaagcctcttcagaatgtaatctgggtgaataataaatggcctgagaaaacagaattcagctaaccattatctaatttcaatgctaaatagttctgcacagatttatcaaaaagtaaaaataaaagcagattgagaggaggaatgagtaattttgtttctacaaaatattaaagtgtatgtaatgggcttgtaggatgcattagtaatttttaaaaatcaatctttaccctacactgtgtccataaaatgctaggcatattcatgttaatattactgttgttactgtcatataaatgccatattcaatgtagatgctcagaaaaatatgattgttttgctacaggagagattagaccaggacaatcaaaatatggattaggcaagaatgtgttaactcagcagcccagggttttttcaaccctgcacattcaaaggtaaggtttgtttttaggactagctagcttctgagttctggaaatagtcttaccgtgaagagtgtttttgtatatctgaggccttgggtttatggtgaatgactgactttatatgcctgaggccctgagtcatgctgtatttatctgaaccatgtggtatcaatttaaccagatacgtttattctaagatatgatttatgctgaaagcctgcttttgttctagagggatcatggaaaggaagctgaatttgctgagttttgccacgtgggcattgcatgcttatgtgattaaccaccaataaaaacctgggacatcaaaaaataaataagctgctttaattgccaagaattcacatgtggttgtatgcagcattactgggagattgaagtgtatctgcatgtgattctactgtgatggacacttgtaaatttgtgcctggagtctcctggaatttgccctgagaatctttttcctttgttgataagaatctgcatccttttgttttaataaacgaaaaacatgaaaaa

SEQ ID NO: 140621 - DNA, 756 bp, Homo Sapiens
cagccttcgtttttttatttaaaagggtcttaattttcatagagaatctacacaatgcatgtataataaaaacatatgtcactgtcaaatatagatgtaaaaagcttatgttcttctatgttttaactcttctctctagctaattggaaatatctttaaattcatgtccaaactgagataagacgttggtacacttcaataaaaatgtataagcattacaagatgttaaaactggatcctacaagtttgagcccagccttgttttaaaaggggagacgaggatttccttagatgaaaattgtggagagaacgtacctgatcatcatcaacctctactggctgcttcttaatgataaaggtgatggactcaagacagggctggaccagggagatactggacctacttgggtccagtaatctagacaggtgggcaccaggcaggaagtgccaaacgacccaaattccataacagcgttctggccaagagactgggtcactgagtcattatttagtagtgaaaaccactcaggaattggacgccgaggtgacggttctcagggagtatctggagatcagcagtggtccagaggagctccaggcccttctgggcagctacctgaagaattgctgcttaggatggaatcatgcccagcctttgtttctaaaattaactgtgtattttttatattctccagtgggaaaacagccaaaaccatttgatctctcaattctagtgaggttccagcaggtagtctc

SEQ ID NO: 140622 - DNA, 453 bp, Homo Sapiens
ttactcagccatttattctgagctcccaaggaggagctgcaggcaagtcctgtgctctgagagtgcttattctctgagggggagacatagatggacatagataggcacagctcagggtgatcaggactatgaagtagagaccagtggccccttgggaacatagggaactctgcctgagaggcttaacatattattttgagttggatgaaaaggatgaactttggttttgtgaagagttcaggattttggtgaaggcccatgcagggtaggggttataggactgtatttatgcaaacgtgtcagggctgcaaagccagctacacaatggaacaggggtgcagaatgaggcctatgtggacgaagcaatgagggtctgcgtataggctggatgggataagtgtatgatgtcagttctacgttggacgagaattgaggtcaggagtggagcaagtt

SEQ ID NO: 140623 - DNA, 577 bp, Homo Sapiens
ttttgccgatgatatttgctttatttgttactgggcttgctccctcccccgcatcccgctgctcttcacacttgcaagctcacctgactgccaggtggccggtctggagcatggcgagcaccttcgagccccatagatggcagcacaggcctaagaaaagtcgtaccagaatggtgtctcccttccaaactcaggccgggagagatagagccacttaggggagaaaactaatgtccagagtggcagaaaacatcctcacatcccgaagggtcttgaaccctaacttcttgccccaggacaagaagacaaggcagagtaaagagaggctcacagggagaggcaagtgacagttcagaacacaggtgcaccatgccacgcgactgtgggcgtctcctcacctctctgaggccgtttcctgaactgtaatcaatgagttattcatgaattcattactgtgagtttgtgtgctggacctggagaggaccgtgagtgacattttcctagttactttatatctttttaatgtatcttccccacttttttgtatctccccactctaacactggagttagccccc

SEQ ID NO: 140624 - DNA, 666 bp, Homo Sapiens
cttattaatatttaattttattttccttaaagcagacataaaattacatttggaagaaaataactttgatgtattatttaaaccttctaggataaaaatacatgcaagttcttctaatcattcagaactaaaaagacatatgaggtgtaaaattgatatttatttttgttattctcaatggaagatcagagttatagtatgcttctcagaaactattgtaacagtttacttcatggtacaaaattggccatagaaatttttcctggtgaatggcagacggggcagctaatatttccatgcttatttctcaaatgtagaattcaaaagagaggtgttgacagaaaaaatacctaacacctgcaatgggaatacgttagaaatgtagtacttttatttttcatgatgttaatgattctaatctaaattaatcaagctaattaatgtgtcgcagtaagcactgatgcaaacagatttcattaataagttaatgtaagtatatgaaaactctatctctaaattgattcctttgaaaaatttctgtaagaaccatagattcatcagaaatgctcacaggacagatctatacatgttacaaatggacaaactaataaataaataacataaaaaatagtcaagggtagatgtcctggcttcactaccaaatca

SEQ ID NO: 140625 - DNA, 273 bp, Homo Sapiens
  misc_feature (260)..(260): n is a, c, g, or t
acgtttctttagaaaacaaatgtatttcaaaatatatttatagtcgaacaattcatatatttgaagtggagccatatgaatgtcagtagtttatacttctctattatctcaaactactggcaatttgtaaagaaatatatatgatatataaatgtgattgcagcttttcaatgttagccacagtgtattttttcacttgtactaaaattgtatcaaatgtgacattatatgcactagcaataaaatgctaattgtttctngatttaaacgtca

SEQ ID NO: 140626 - DNA, 477 bp, Homo Sapiens
tttttttagttttcacaaacagtattaggagatgacttggaattttctggggaaatcattgaatatacttctgagcgcaaacccagtggcacagggagtccttggtcgccagggctgtcatcatttctggaggagccgtgttgcacctggggccactgagacccagaaggtgaggccgtctgatggggctatggggagaatcccacaaaaccaccatcacacacccacgttggccccagaggtccactttgtcatttaaagcttacataatagaaataggggaccccttgaaaaccttttcctctctgatttgggaagctgaactcttttttcatgacaccaaagcaaacggcttagcagtcagggtggggctctactttcctccctcctagcctggtaggaaagtgcgtccatgcgattggtgaatcagaatgggccttcttcctgcatatcatttctccactcctttcttctaat

SEQ ID NO: 140627 - DNA, 645 bp, Homo Sapiens
  misc_feature (233)..(243): n is a, c, g, or t
attgctttgcatggtactgcaaaactgcatttattgtgctttcatcagaaacgcttctttgagacataaacattgcctgtttttcactccgtttttaaaaaacaaattaagcaggcactcatttatgaaggtacttcaggtaaaagagaggaaaggttcccaaaagggatgtgtgggggccacttgagggctgtctttcatgtcaatctcagccattcctcaggaatttctannnnnnnnnnngacacttgcccaagtggcaatcccaccctgtcccctgtccctgaccttggacacggggagcagcactgtcccacggagggggagacagaagaagggaagatggtgagcccagccactcctcagcccaattgggtttcctcagcaacatcttaccccagactgtcctctctcttcgctcctctgctccagacaggatggtttccatgtgctgcttctctgcgatctttctttcctcttatgtctttcattatgaaaccaaagtgctagagggatcgggaactatgggggacccacaaaatcccatgttcatgaagaaggaagagaatgctcgtgggaggggggctgaggcctgcagacatggggatggaaagttgccgccttagtcatctgaggctgctctaa

SEQ ID NO: 140628 - DNA, 409 bp, Homo Sapiens
  misc_feature (11)..(11): n is a, c, g, or t
gccgatccccnacctttctcaggacctgaaaccccttctgccaaaagcatattgtccagtctcattagctggggatcgggagggtcctcctcctgggctcctctgatgctgagacctgttttctctttgatctcacacaggacgctgaagagcgctggtttcattctgtgacagttcagggcatgtttctttgcttgcgcctcgtccaagctctggtcggtgatggtcatgatctggtggaggatgtcgccgatgtcctgcttcctgccgtcgccgtccgccccttcgtggccgtgcgggggaggcggcagggccatgcccccctgcaccgagtggccagccaggttcaccccggccagagtctgcagcatcctggattgatcgtccatcccgccgcgcgcgggcggga

SEQ ID NO: 140629 - DNA, 487 bp, Homo Sapiens
ttttttttgcaaaggacgaagcatttacaaagaagaccttgacagtgctgcacagatttgaaggcgtagggtgcaagtcattcaggtgccgttgtcaggaggaacctagccatccaggtgaacagatgcccccttcttgcagcccactcgcatgggcctggtggactccttatttttggtagtggcagtgaagaggtcgggtccctgtgctggcaaagcagtcagtgacattgacatcatgagtactgttgtggcagctgcacatggaggggctgttggtacagggcagtggtggagttctgcagaaatctgctatggtggtcagattctatgaatgaatgtgtggatctgctcgcatttacccctatagatcagccaacggcgcctcatcatcacatcacagtatcggtggtgtcctctagggacccacgacctggggttgtctatatgtcgtgttgagaagggcagggctggaatgaagacagtt

SEQ ID NO: 140630 - DNA, 882 bp, Homo Sapiens
tatcggcagcactgaagctttccattctttattttcatcaggttcaaaatcaatttccaaacagtctcctacatttttcccactgccatggggtcctgggcgtccgggcccccaatattcacgcactcgcaccacgcactcatattccctcaccccaccatcacggccccaaagaaggtcttccctctcgcgaagtccaccatatcggggtgactgatgttgacgtacaccctctcgcccctccggagctgcaccaggccgccgaaccccacgctcgtgtaccagagaggcccgtacccttgtctcctggccgggtccagcactggagtcaccgtctcggcgccctcgagcagcagctcgggagtgcccggcccgtaggcgccccccgcccggtacagagagctgcgcagcgtgaccgagcggccctgggggtccccgccgccagggggcgcccggccccggtagccgacgagacagtagaggtaatagaggccgtcctgcgggagcgccagcccctcggcgtccgagaactgcgtcccgctcgtcagaaacgcctgttccttcgtcgtctcccagcctagcccctgccccttcagcggagcgcctatgaggtgggcagctgggagcccggggctgagatctgtttctggctcctcctctggcagcttctgaaaccccagtccttgctgggccatgtgccccggggtcggccgtctccgttaccagtcctcccgtgatcctggggcactaaggccagcacagccaggacagtgataggcaccgccagcaacaaggtcacacagagaagtggctcctgccacagctagcaggagggaacccggtgccctcggagccgctccgacacctgcccggacagacgca

SEQ ID NO: 140631 - DNA, 1227 bp, Homo Sapiens
  misc_feature (102)..(185): n is a, c, g, or t
  misc_feature (1110)..(1144): n is a, c, g, or t
ctaatcacacagaggaattttattgtaagttacatgcaaagcaaattagttcttcaggaaaataaataaataaatggatcaactaagatatactaaacctcnnnnnnnnnnnnnnnnnnnnnnnnnnnnnnnnnnnnnnnnnnnnnnnnnnnnnnnnnnnnnnnnnnnnnnnnnnnnnnnnnnnnctttaatttctctacagtcaaagtttcattcacagggagctgtaggtcagttggttgttgaaaacttatttgagaaagtcaaaaaataattgctttatttctctgtttcattagtactaattcacaggatctttgtaggttttatctgaaagaaggatataaaaacttaaaagtcagagcagggaaaggggagtaataaattattaagaacaaactcagtgagacttgacttcacttatgatacatgggtagaaagagcaaaccagccttcttcattctgtttctcaatctttgctcttggattaagaggtgtgaatctcccacttcctgaggtggcatttagtggagaacaagaattaccagtagccccggaagatcttcttgtatttatcccgctgacgggagagacagtactacattttgagctttctggggcttctgctcctggaatagatacctcaattgtcctctttgctccttcagtccatgctctgagaggtaactgaacaggtgacattggtggagaaagattcaaaccaacaagtttctgctgctctatcaactgcagtagttttccacgagcctccatactttgtcgattcaattctgcaatccgttcctccatactacctggtgttagagactgtgctactggaaaagtagaagtcatgtcacttgcactttcttgtttgttcaactcccggagtccatccccttgctctcctctgggctcaataatattattcatatgtgccttgatagctgaattctgcaatgtcaaatcagcaattcgtgtcattatgtcctttctttgtattaatgactcatttgttctcagctgctgcccatctcccagtactgggagctcttctgacccggccgtaatggccgaattcccgggcatatgtccggtaccgtcgactgnnnnnnnnnnnnnnnnnnnnnnnnnnnnnnnnnnncggccgcttcctcgctcactgacttcgctgcgctcgtcgttcgctataacgcgtagcgccctatatgagttatacattttttt

SEQ ID NO: 140632 - DNA, 512 bp, Homo Sapiens
tttttttacatatatacacgaaaaacattttattgccctttcaattgaagtggtttattactttaaaccatttcaagagcttatcgatagattctaaggttctcagcaggtcttccctccatgctgtttttttgaactgtgtagtcagcaatgcccagatttggtaattgtagttatcaaatgaattggattgaagctttacaaagcacagcagctactcaagttaaagcttcagagtgaggatagatcatgttgatgctaaaacccaataccccttgttcattaaagcatttagaactggaatagtcttgttccttgcttaaaatccagtgttgagaaaaggcaaatgattcaaaatgttcagtgctcttagactgttcgtggtttttaaaaaatattttcctggtaacttgatttttgcctgcaaagaaattaacagatacaatactagttcactccttgcacaagcctgtctggtagatactgaagtgagaagcttaaaaaacaaaaca

SEQ ID NO: 140633 - DNA, 294 bp, Homo Sapiens
agagaggcctcggggggattctggggcctggtaaagtttgggaactgctggtctacaccatgaggagaaacgctggacccggcctaaggagagggcctccctcctgtctgacaatgagccatgagaagaccatgggaaaaaaaagaggccaccggaaaccctattgccgaggtcctggcaaggaagaaaaggacagaagagctaatttccctacaagaacacgggtctaggaaacagaaaataaaggaagcttccatttcatgggcagagacatctcggcaaataggctgagcc

SEQ ID NO: 140634 - DNA, 354 bp, Homo Sapiens
tacattacattttgcttattttcatataaaaggtaagacagagtttgcaaagcatttgtggctttttgtagtttacttaagccaaaatgtgtttttttccccttgatagcttcgctaatattttaaacagtcctgtaaaaaaccaaaaaggactttttgtatagaaagcactaccctaagccatgaagaactccatgctttgctaaccaagataactgttttctctttgtagaagttttgtttttgaaatgtgtatttctaattatataaaatattaagaatcttttaaaaaaatctgtgaaattaacatgcttgtgtatagctttctaatatatataatattatggtaatagc

SEQ ID NO: 140635 - DNA, 604 bp, Homo Sapiens
  misc_feature (374)..(374): n is a, c, g, or t
  misc_feature (403)..(403): n is a, c, g, or t
  misc_feature (548)..(548): n is a, c, g, or t
  misc_feature (586)..(586): n is a, c, g, or t
acatatttaatcaattttaattaattttaactagctaattttaagtctttaattagttaagaaaggcaggatttcacataagaattacagatttcaagcttctcttgaaaagttggaagcaccaaacacccaagcccgggcgctggtggggagcagcgggggaggccgagctgctgacgagcgggtctggctcagagcagcgtccaccctcggccctcacaggccccgctgccctgccgccagggcttgagcttgcagtcttgggtccgcccggtctttctgtctgcggtggaggtagagacgctgacgtgctcagcttaggagtctcaggtctccccgggccgcaggccgtgaggacctctgctggtcatccncggggtggctgcagccaccctcttccggngactggaacgggagcgtccttgtggccaggaggggaccctgctggtggccgcccgatgctcaggcccctctttccacctctgtgtgccccaccccagcttctgttctcggctttgacctgtgacctccgaccttcaaaggattangggcgggtcttccttgaaacctcagaggatcgtctgtnccgtgtcaccctcgtgcc

SEQ ID NO: 140636 - DNA, 204 bp, Homo Sapiens
ccttaattctcatatttttctgtcatatttctcagtgcctggtacattatcaccattaatccatgccagttatgtacagttttgcatgtttgttttttattttactcttttctctccttcattccctattcctgttcccccataggtgcccagtctaatgtatttgatatctgtccttagagcctccgtatctgtgaagactag

SEQ ID NO: 140637 - DNA, 951 bp, Homo Sapiens
tgtaatggtcgaaacctgtaggcaacccatatatccttccttaggtggttaaaacaaattgtggtttatgtattaccatggaatacttgttactctgcaataaaattgacttattgatatccataacaactcaaataaatttcaagggaattaatgctgagtgaaaataatcacaaaaggccatattctgtatgaaaatattcatataacattctcaaaatgataaaactatagagatgaaaaatggattaatggttgccaaaggttagggatggtgggaggaaaaatggggagagggttggatggaactattaaaaggtagcaccagaaaggtctttgtggtgatggaacacttgtgtatcttgattgcagtggtggttacacaaatctataggtgctatacctatacacacatactgtaccaatgttgatttcctttttcattttatgtaagatgtaaccatgaggggaaagtgggtgaagggtgctatctttgcaacttcctgtgattctatcatttcaaaataaaaagtaaaaaccaacaatggcaacgaaaacccaaaactaaagagctgtaaccaactaaagtgtgtgaaactgatttgaaaaaaagttataaaatacatgttttaggacagttgggaaatttgaatatgactggttattagatggtattagggaatttttgttgattttcttacctgtgacggtggtggtagtttgaagaatattcttaatcttaagggatgcatgttgaagtatttggaatgaagtgttctgatgtttacaactttcaaaaaaatgattttaaatatgtattgagagatcaggcaaacatagcaaaatgttcattgttgagtccacatggaaaatacgggtattcaatgtgccatactttcaactcttctgtactctgatattttcaaaataaaacatttgaggggaaaaaaa

SEQ ID NO: 140638 - DNA, 597 bp, Homo Sapiens
atctcgctgatggacattcagattcatgtatattatagacataagcactgtgcaactgtactgtaacaccatctcttttggatttttttaaggtatttgctaagtctttgtaaacggaaattgaaaatgacctggtatcttgccagagggctttcttaaacggagaataagtcagtattcttatgccattactgtggggctgtaactgactgtcagtttattggctgtaccacaaggtaaccaaccattaaaaaactctaaatgatatttagttaaagggactcttggtatccagacttagatttcaggatatgctgaaacaaaccagcattcttaaggaactgactcaccttcctgagcaaaatttctaaacaagcatttgtgtccaaaattgtcttgataaatgtttgccaaagaggttcagtaagtgtttttctagttcagtagtcatatgcccagaaatgtaagagaaagtttacttccagttccgctgtaagatctgcatgcctgactttccaaatgtaagagtgatttacaaaaatgaatatttcaaggcatttgctactaaaatcggtgatgttgcacctttggccttaa

SEQ ID NO: 140639 - DNA, 879 bp, Homo Sapiens
aaaatttgggccaggggggggaaaaaaattttatttcgtcaattaaagccccctcttccggtttgtagtttgcccaatggttccatcggagccaagggaactaacaatgcccctttggtcctgttgcccccccatctccccagtcaattgcccccattcttccgtggcaacttttgggatgctccgggagcatttattttctgaatgagcttgggtggagttctgtggggcattcttctgaggatggttcttttaggaggattcttctgggagctcttcttctgagagcggtttggtggctattgatctttgaaggggcactctggactccccccagcaaatctactttagcagccacagaatcagccttttttgaaggggcaggggtcaaccaagacactgcagctttcttgtccaggggctgtcctgacccattgctggaagcagctgtcttcttttttgggaaggaaggggtcttccaagtgccatcgaccgtaggagtttcccctttctttgaaggttcagagtgcaacttaggcgccttgctagggggttggttctttttactcagaaagcctctccgttctaagagcctccgcttcttgacaaaatttcggtgcttggcatttccttctaatgcctttttgggaggaggttccccaaaatccagattgagcagtaaagtagacatagggacaatggaaggcggaagagtagttgggaagagtggcttatggatgaaaagaggatgtgggactcattctctgctgaatcctactgtccaacatgtggaggtctgtagtacaccctcccagacgggtccagctaagaccggaagcgtccggagccggatgcggaaatcgtgtgcgccgacgaagc

SEQ ID NO: 140640 - DNA, 1579 bp, Homo Sapiens
cattgggtatgttttctgcctgtattacttaagttgttggcaccccattgccggatttcagattgctaacatataagttggcataacagtgtgtccggaccaccgactgttcgtagtccacaaagtgcagggggaagatttcctcgtcatagcaaatctccgttgtagtgaacatgttacatggacccaagactaacatgccccgtggtcctgggcccaccatctcacaggcaatgccaccatcttgccgtgcaactttctggatgctccggagcatttattctctgaatgagcttgggtggagttcttggcattctctgaggatggttcttttagaggatttcttctgggagctcttcttctgagacggtttggtgtctactgatctttggaagggcactctggaactcccccagcaaatctactttagcagcaacagaatcagccttttttgaaggggcaggggtcaaccaagacactgcagctttcttgtccaggggctgtcctgacccattgctggaagcagctgtcttcttttttgggaaggaaggggtcttccaagtgccatcgaccgtaggagtttcccctttctttgaaggttcagagtgcaacttaggcgccttgctagggggttggttctttttactcagaaagcctctccgttctaagagcctccgcttcttgacaaaatttcggtgcttggcatttccttctaatgcctttttgggaggggttcccccaaatccagattgagcagtaaagttagacatagggacatggaagcggaagagtagttgggtaagagtggcttatggatgaaaagaggatgtgggactcattctctgctgaatcctactgtccacatgtggaggtctgtagtacacctggggaagaaagtgatcctggtaattgagctcctaggcctgggagaaaaatgaggtaagctcgatctccgtaggacttatggaaggaaagacatcagagcaatctctcagacagaggggaaatgaaaacataacatgaaatgatggagggagcattggtgttagccagcaagcctggattctagtgaagcccaattcaccagccatttggtcttagtaaggtcattaccgcgctctaggtttgagtctcatttgtaaaatgaagggagtggaggggcttatagagctcgaaccctctgagtctaagaggctagaacacgtgcgatctatactccgcctaggaaaggaacatctaggtatgctcaaaaacagtgagaagtatggcgtagataacctctgggctacccaggcatccgcagcgtggaccaccgatagagacaccaatccaggcatccctttcccttggctccaggccggaattgggggcaatctccgcatgcatctcacccaagtccttctcccacgcaaggaccttgacaccatctaccagcgcgggggtgggatcgaggcttgaggcagcccacctggataagcatacttcgatccccgcggtacagatcgatctctcacgctcacaaacctaacctcccagacgcctcgtgccgaattccacccccaggcctcgtactagccta

SEQ ID NO: 140641 - DNA, 1746 bp, Homo Sapiens
  misc_feature (1608)..(1608): n is a, c, g, or t
  misc_feature (1615)..(1615): n is a, c, g, or t
agccctccccaagaaaaattaaacccctttcccatttaggccccggcaaattgaacacaaattaggatttgtttcccataaatttccccctgttaaaaaaattacttttttcccaggaaattgattaaccagaaaagggtgtcccttcggtttttaacacaaagaacaattttcagttccttcttccctccctaaataaatatcatccaaaggagtttattttccctttctttcgtctcttcccaaaaaggaaggaggtcgtgtttctttcggtccctgatgggcacatgtccgggttgctttgaatttcattctgaaagtggaggctgggagactgcagctgggcaggggcctgggccctctgtgggctacgcagatactgctgcttctttcctcttcagactgtcttttgggcccccaactgctggacccccatgctgttgcttcttggggagatgtgatgttgcacacattaggaataaaaacaattactagcatacagcattgggtaaaagaagggatggagatggggcaggagggtgggaagtagaatgggggcacaaaaaccaaccaaagaaaaaataaccacactgaaagcttctacctattagaacgtgtcaggctgtgaatggactagcctgccttctgtgagactgcttgctgtgcgactgtaaaatgtacaggaatctaatacgtaatttgaaatcctacagcagtctacctgctagtccagcccagcaccaccacccacactgtatcctcgattggggctcgagcacctacagagtgaagggcattccctgctggagtctcctggccagaggaaggcctaccagagccttctgacaggccttgaactctcccttatggaacatttccactggctgaagaggtcggttccccatcctgtcaccaccaacctctcacaggagcagtgaacggggctttccttgctacacactgactagaagcacacctgtgtatggaagaattcagtgtgatattttactactgagagtaataataataaaagatgtttaagaataatttcaactacattctcagtcagcaaagcaatcattaatggattcctattttattccccaaagaggaaaaaaggactgagaagttcccattggcttctcccatctgccttcccttctcagctttcacttcccatgtggctggggacatgcacgatggagaaggtgagaggcggtgataccaagtaactgagtgagataaacagcagttcctctctctctccctccggagggccccggggggacggagagttcctgatggatttttctttttgttgcactgcgaacatttcgtgcacactcagcgggctggtggaatacttacaccctcttgacagcgagaaacagaaaagagggctgccacctgcaggggactgtgtgggccagtcctgcaaacccaacatgccatggtttatggagccttcattcccaggttgccactttggcctcagtgtggagggttcatggtgccttgtccccgttgctgtttctgcttctgctgcattaacagctgctccagagcagaaggtccaggatgcatcatggaactggaccagatagactntaggctntccatgaggacagcagaggaatcctccatggaagggccatggcctgtccaggtgcccactcgagtgctggcctgatgccaactgctctcagaggatgacgttgctgagagataatcaatgcccaacccacc

SEQ ID NO: 140642 - DNA, 534 bp, Homo Sapiens
ctaaggaaatttaaaagtttttccatggtaagaatttattatttctgaaaactaaaagtttaagttattacaataaaaagcttgccaatgtcttagccaccacttctttttgtcatcttcctcattaaagcaattcatccctctttttccccaacctttctgaaaatcaaagtaaaattttttcagctcctactcaatctggagagacacactcctcctgtaactattcagttggttaacttctaaaacactctacagaagggaatagacaagttttaccttatttccttcttctttgaattggggattaattatttttacaaaagaataaaacaattgacgaattctggaatctccaataaatgcaatatgtttatctacaaggcagttctttgcttcactgaaagcaacaaagaaaaattaattaaaataagtaaaatcagccatcctggcatttcaaagcacaccgtttttgaagaaagtgatccagattgttacacataccattatattgctttataagcaggtggccag

SEQ ID NO: 140643 - DNA, 589 bp, Homo Sapiens
  misc_feature (14)..(14): n is a, c, g, or t
atcacatgtggctntgcaatggaatcctcagtccacactttgatacactgtttcatagaaccattaacttcaggatgccacagaaaatccactttaactgatgcagtcttgtcttcaaaaggaatgttttcatgcttatttccttcttctttgaattggggattaattatttttacaaaagaataaaacaattgacgaattctggaatctccaataaatgcaatatgtttatctacaaggcagttctttgcttcactgattttgtatttatgcatcatacaactgtgaggttgccaaactttctctccaagaaatctgccacttgagagaaggtattcacacgaatcattgcctcggtagcggcgggaggcgaggtggcacgctgcgagcagcagcacggccaccagcgccagcaccttggcgctcctcacgctgaagtagtggttgatctcccgcttgcccaggttgtaggccagagccgccatcttggttcctccatgacaacagtgcgcggcggagcgggaaaggggcgccgcacaggggcagcactggggctgccgccgctgcagccaggcgaggagcggccgca

SEQ ID NO: 140644 - DNA, 174 bp, Homo Sapiens
ttttttctcttaaacaggtttattttagcagctcagtatattacattctacatatttgtcttttaatgtgtttatatttctgcctgttctgcatagatggcatattcattaacttttgtagctgactttttcatttgctatttgctgctacctggcctgaagagtcaggaggat

SEQ ID NO: 140645 - DNA, 1792 bp, Homo Sapiens
tttttttgagtggcaacttcacgacttttatttgtggtgcctgtgctttatctcgaaaataccttctccccctgccccagacagtgggcggggagggggcagcaaaaaatagaagacgtccctccctattgcacatggaccctatatacaggcccacctggctgaggctggcgggactcttggcacattcttggatccctgctcaggaggggaggggtgacggggtggcatcacacgtgagatggggacctccaggcggccactctggtcctggctactgatccttgcacttcttggtcctcagttccttcctggtcccgtctctggccctggtcccctctggcaacgtccccctgcttggctcggcctcccacctccatcctggcctcgggtggccccctcggctcctggggactctgctcccctcccagtccggaggtcccaggggggctatggcttctctgagacttcccccggagccctgtcactcgtgttcacacgggggaaggggtgcgtgtggcagaagcagctgtataaatacgggtgcgggaaagtccctccgggtcacttggagagtttgctgatgacgcggatcaacgctgcattctcatccttgaggcgctggttgtcagcgcggaggtcagacagggccttcagctcctcctccagctctgcggccttgcgttccagggccctgcgctcgaatctctccagttccaggagggctggcctctcagcgaagcgttcttgcctctgcgtggcccgctccagctccaccttgagctgcgccagccgcagcgtggtctcggtcagggcctcgcgaagccgctcgttctccctgcgcagctctgcatacagcgtcctaaagcctccgtctggctcttccgattctggctcaggttctgggttgaggtcccgctgccaccgctgcctgcgggccgaggggccgccctccagggtgctggactcctggctgcggtcagccggctccgcctcctccccctccgcaggccccctccactcctttccgaccttgcggtgctccctggccgcctgcggtcccggaccctgcccgtcgggcgcctctgctctctgggcagggctgtcagagttctccactccagggacgcggggccttcgggaagggtccaggctctgcgccggcttctctgactctggggccttccctgcagccttctctgcctccttcaggtctgtaagagtcacaccctgtgtggacctccgagactggcgcatgagacgggagcgagcttttctctgggattccgactccctcatcccgcacaggcatctggtaggacctccgtcggtcccgggagtccgctgggggcgccgtggagtctgtggggacgtttggcttcgctggggattcaggctccggaatcctggagggaggcgaggagttctccaagcaaggaggaggcttggtgacctcaggcctgcatcaattcattcattgcacaaacattagccaggtgcattgtgtgccggcactggagatgcagccgtgagtgagagaaacaaatgtatctgggccacaacagagtcagagctgagcagaaatacacaaaacccacaaaagccatgaaaagaccagcacactacgcaaccggtcagaaggataaaggactctggacagaagcagcagtgcgagaactgagagcgggagggtgtgcgctgtgcggacggcgccgtggtggcagcagggtggtcagtgtgcacctcggggtggggggaagataggggagaaggtgacgtttcaacacagacc

SEQ ID NO: 140646 - DNA, 826 bp, Homo Sapiens
ggtgacgcggggccttcgggaagggtccaggctctgctccggtttctctgactctgggccttccctgcagccttctctgcctccttcaggtcttgtaagagtcacatcctgtgtggacctccgagactggcgcatgagacgggagcgagcttttctctgggattccgactcctcatcccgcacaggcatctggtaggacctccgtcggtcccgggagtccgctggttgcgccgtggaggctgtggggacgtttggcttcgctggggattcaggctccggaatcctggagggaggcgaggagttctccaagcaaggaggaggcttggtgacctcagacaggacagagggctccggcagcttcggggagggggtcggggtaattctggcaagacggagctccttggcactgagtggaggtcccttccagccaggaggaggaagcacgagcgctgcagcccagccaccaggggctccctccgctgtccgcctttcagggggacccagggcaccagaactgcccatgtcttcaggaggccaaagcgcctggagaagggggcctcttcaagctgcacgggactcttagggctggggtgcggcggggaggagacgccattgagggttctgggttctgcagggggtggttcggtgggaccttcttccccctcatcctcgtcctggatggggggccccccagccccaccagccggcgctccttggacaagtcctggagggaaatcttctcgcgactgctcagacgacacacagagctccttctgtgtttgctgctagaggcgccctcggccgagtaaccccagccgcaaccgta

SEQ ID NO: 140647 - DNA, 502 bp, Homo Sapiens
ccgcccacggggtgcgggtcccaggaggaccagcagagaggagcataggagagcaaaggagatcagtgacccatggcttccccggtggcgcggaacagcccggagccgcctgtgatttgcatacccatggtgcaccacgaaaagataccctcaagatgcttgcactccctctgtgcgcgcatttctgcactgttttagagcatgatgcctcttacacgcatctgtgtgcataaactacatatagggagtgcgtaccacgcaggcatccaacaaccataagtgtgttaagtgttagttctccctgcgaggttcgaagcggaagtcacgaatatactcgggtttctcttcaaagcccataaatctttcgccttttactaaagatttccgtggagagaaagttgtgagtttttattcaattttttgaggcctcttatttcctgaggctacatttttaagtattaaaagttaggcaactacaaccaaggaacttggtcatttgtta

SEQ ID NO: 140648 - DNA, 614 bp, Homo Sapiens
ttttaccaaacttgtctttattaactgtgaggctggccattcaaacaccaggtgccagagagggtccctcactcatcggaatccgggtgggatgaatcctcggaggcaaggtccctccaccttcaccctagagtcacacagagacttgccctggcggctggtgacaggtgggcgggagaagaaaaggcccctggggagcaggagaaagccaggtgccatggggacccagcgccgctggagggcagcaccagcacacagctgaggccgcctctcccggagcccggagggagctgggttccggtcgccagcggtgcccgggtgagcagttcaccctcacgtccctgctctgacgaagtttccattcttccagggtcatagagccggtgagctggggacagcgcctgtcaacgccccagagccttccacggcactggtttctccgaccttcctctctaaacaggaccgtgacagtgacagtttctgccccactccccatttctgaccgcagtccccataaggaaacagggcagggatcactggctgtgagcccagcaagtcccctcccgtggctttctcagttattaaatggaagggtgggtccccccataactccg

SEQ ID NO: 140649 - DNA, 576 bp, Homo Sapiens
gccctgcccctatccaaccatgcctggctagctgtcccatgggctctggctgaccaccctctagtcacaggagccatccttccagccgtcgcgccagcgctcatccacttttgagcagtcgaagtcaggcttgcccagcttgcggttcacttcattgtgcaggtggcacagccactgtgtgaagcatgcccgggtgcgggtgtctgggtggttcctgcacagcctttttcttaggtcttcagcacactcctcacaggggtaaaacttagaaaataaatgtatgaactgggccatgtcttgctgctgttctggggtgggcaggtcggggtagtaggcggccagggtgtggaggacagcccagctgtggcggcccagttcctcgcgatccggcgggcagtcctccctaaacttggtgtcccgcttctgctgcgtccgcatccacgtcttgaagtcgacgcaggcccggcacggccgcctccgggaggcgtcctcggcgacaggagaatcggaggtcggcgcctgggctggcgtcgaggccgaggcggccgcgtctctccgccccgcgccccggccccg

SEQ ID NO: 140650 - DNA, 519 bp, Homo Sapiens
ttttttaaaaattcataatctagtttattttccaacataagcaaaaactgcattagacaaatttcattcaagtatactatcaccctgataaaaatccttttacacttagggaagatataaattatgccctatggttcttgtaaggatgtttctcatagaaatcacggatagcatcaccagtctacagccactatctatcacagaatttacatggaaacctacagcctcattagaaaaacttagcatgcaaatttcataaagaaattaatgaatgatccattctacctcacagtggtaatgtgatataatggtaattcctaagaggattatgtgtcttgtttcctaacagcaaatgctgttttgttttaaatttgcaatgatcaaacaaatgcagttagtatgtttttgatgaaccatggatgaaaagggatcattgatattctagagaatcaatctatactgtagcttttctcctaaatcccttctgcccttaaaaaacaataaatgatttccttataa

SEQ ID NO: 140651 - DNA, 1406 bp, Homo Sapiens
  misc_feature (59)..(59): n is a, c, g, or t
  misc_feature (80)..(80): n is a, c, g, or t
  misc_feature (99)..(100): n is a, c, g, or t
  misc_feature (151)..(151): n is a, c, g, or t
  misc_feature (160)..(160): n is a, c, g, or t
  misc_feature (192)..(192): n is a, c, g, or t
  misc_feature (201)..(202): n is a, c, g, or t
  misc_feature (219)..(220): n is a, c, g, or t
  misc_feature (276)..(278): n is a, c, g, or t
  misc_feature (297)..(298): n is a, c, g, or t
  misc_feature (418)..(419): n is a, c, g, or t
  misc_feature (524)..(524): n is a, c, g, or t
  misc_feature (565)..(615): n is a, c, g, or t
  misc_feature (659)..(659): n is a, c, g, or t
  misc_feature (672)..(672): n is a, c, g, or t
  misc_feature (711)..(711): n is a, c, g, or t
  misc_feature (714)..(714): n is a, c, g, or t
  misc_feature (757)..(757): n is a, c, g, or t
  misc_feature (792)..(792): n is a, c, g, or t
  misc_feature (799)..(799): n is a, c, g, or t
  misc_feature (831)..(831): n is a, c, g, or t
  misc_feature (950)..(950): n is a, c, g, or t
  misc_feature (967)..(967): n is a, c, g, or t
tatgaaactgcctgtatgtagtatatgttaagaagattatgatacgagcggcgctcccncccgaaacacgcgacacgcanccacatcgcatctctatannaaaagatatataaatatgtacgcgcgtgggcaggtccctgtcacgttgcgnattttaggngtgtctttccacacgtcctatatatgcgggtngctgcgcgnngccggccccttctcaanngatccatgcgcgacgggaaacggtctctaagagcacgacgcgcggcacgtccgcgnnncgccaccaccaccgcatcnncgggcggagcgtgtggcttgataattggaagatccaaaacagatcggcgcgtaccgaatatggcgtgctcccgaaaggcgggaatatccggtatcttacgagctcgcgggggaaaacaannttatttctgcctcatcaaacccggcccgccgcgacctacgggcttggtggtgatgtcaacgccataaagctacggtgcgcgtctctgaggcgccgcggcgcgaancagcgggccgcatcgccaccacaccgcccgacccgacccannnnnnnnnnnnnnnnnnnnnnnnnnnnnnnnnnnnnnnnnnnnnnnnnnntctccctccagcaatcgccacccaatgaagtgccggagtagagncgcatgctcgctntagcgatacaggggacgctaaccgtgggtatctcccctnttnctcacccggctcactcgaggtaatcttgcgggcggccccccanggggggcgaggcgtcgacgtgaattcgcaaacagngcacgtncgacgccattcactgccagcaacgaagccaancacgtaatagccaccgtctcatcagcgccagaagggaggttccgtcccctcccccgtcgctcctcaggccctcgagactccctccccactcccgtacggctcctattcgctcccggcgncctctctcataacaagncttcaagaaatctagtaacggcttgttcctcatcagttattccagtctccctgaatgccctgtttgattcggcccaactccaggcaattgctctctgaagatcatctttatcatctccagtgagatcaatcacatttgtatctgcttggcttcccacactgatgtatctatcattgccaggaagtgctgtttggtagtaagttgtctcctcctgctgaggggtcttagcattcttcgcagtaaggaaagccactgctaattccaagtttccattactatccttcaaggcttgctgtagtatctgggtgtcattaatccccgtaatttctctcagttgattcaaaaacgtctgctggtgcttctgcgccgcgctctgctgcagcacgttctgctccacggtcatggcggccggcgtgcgcgggcaccgcgggcaagcggc

SEQ ID NO: 140652 - DNA, 562 bp, Homo Sapiens
caagtgaagaagctttctgtctttattatgagaaactggggaggtggggccaggccagactcatgtcagaaggcccctcagtgagaagcgaagaagcaatctgtctttattatgaggaactaggaggtggggccaggccagactcatgtcagaaggcccctcagtgagtgcagcccaggagactggtcacattctggggttgcggaagggccttggctgcattcagtttctccacatcactgtagcagtacaaattgggaccatggatgaggtacaagccgggaccattggcggaacatgagttagggccaagggacttttccatacacaaggctccgtctaccttctcatggggccaaggaagctctgtccacgtggcttgggcttctgactttaggtccagccaccacagccgccgtcctgccatgatatggagccgagaagacccagggcagataaaggccgcatccacagagtccaggataatcccatgagggtcccgacttccttctccagccgcttcggataaccgcttactgggtatagcctccctttgtcagga

SEQ ID NO: 140653 - DNA, 491 bp, Homo Sapiens
ttttacgttcattcgttatttatttgtgtgcgaccccggctccccgcagcctccacccctcccgcgtcccgctttcagaaggaacgcggccctcagctccctccgaagaggccccgggtcaggggctgcagccgggtccccgtgcgtcggcccagctcgtccagcaccgccttctccttctggaacatctgctgccactctgcctccgtgccgtgtgtgaatcccagcaagtgacagagtccgtgggtggccgtcacagtcaggacgtcattgtaatcttcattttctttacactgatggaagatatactccactcctaggaaaatgtctcccaaattgtagtcatctggaaaatcaggctggggaaattcacctgctttcagatgctcatgaaatggaaaagaaagcacatcggttgggacatttctatctctgtagattctattaatgtggctgatattcttggtggtcacacagatgatccccaggtc

SEQ ID NO: 140654 - DNA, 208 bp, Homo Sapiens
tttgtttacttatttatttattttcaccaccaacattattagccatgcctttctgctaatcgattttagcaagtcgaggtaaaacacatgcaacattttctggcaaaagcttaatgtcaaacaatatgtgatccatactgtgtgtcgtccttgggggtttatttgactttgtcacaatgacagccaacagtgagactgataagcctgt

SEQ ID NO: 140655 - DNA, 502 bp, Homo Sapiens
tttttttactgatgaaaacattttattaacatacaaaaataacagaaattttcaacactggaccagaggtcttcatgtgggatatgtctaaccctagggccaccttgaaaccttctaaggggtgcctcagcaagggtaattttacaggatgacctaattaatttggaatttaaggtaattctgagctttcatacagccctctaacaaaagcaaaaccgtggcatccacactatttcttccgttctacaaaacaaagacaccactcaccttcccagctcacttggcactgctgccccaaggcgttagcgtaacacagagaacaaagcagaagcctcctaccacccggaaagtctcaagtcagcttaaggccttagggctttgtgactttccccgttctaaacttccgtaaaaggggatttagaaatggggatgtttggggacttgttaggatattcaaaatgtgaatatgtggtaaagtgaaagtaatgatttttattgaaca

SEQ ID NO: 140656 - DNA, 498 bp, Homo Sapiens
cctttttcaaacgagaatcccggagcgaccgagacccaggcggccgagcctctccgagacattgttccagcgactgcaaagcatggacaccagtgggcttccagaagagcatcttaaggccatccaagattatttaagcactcagctcgcccaggactctgaatttgtgaagacagggtccagcagtcttcctcacctgaagaaactgaccacactgctctgcaaggagctctatggagaagtcatccggaccctcccatccctggagtctctgcagaggttatttgaccagcatcgtgctcaccaaagcccaggaggctgatcgcggcgaggggcccggcaagcaggtgcccgcgccccggctgcgctccttcacgtgctcatcctctgccgagggcagggcggccggcggggacaagagccaagggaagcccaagaccccggtcagctcccaggccccggtggcggccaagaggcccatcaagccttccagatcgg

SEQ ID NO: 140657 - DNA, 1018 bp, Homo Sapiens
tgggcggtgtctgctggttgatttccgatctggaaggcttgatgggcctcttggccggcaccggggcctgggagctgaccggggtcttgggcttcccttggctcttgtccccgccggccgccctgccctcggcagaggatgagcatgtgaaggagcgcagccggggcgcgggcacctgcttgccgggcccctcgccgcgatcagcctcctgggctttggtgagcacgatgctgggcgacaagatgccgggttccgggcagggcgggggttccttccgcggcattttgggggattcctggtccttcctgggagcaggcttagggaaggaactcagggacccatacagggggttctcaaacatctcgggcttcgtcagcggcaggtcctcctgaggcagcgtgtcccctgcgttcttccccaggtcactgggccttgactcctgtgtcctgggagggagaccccggtttgctgttgagggtaaaaacttcttgggtgatatgggcggctggccgggaggtgtcggaggactttctcccctgcagggccccagcggggagtccttgggcggctggtcgtagctccaggctgtgggctgctggtcaggggacaaggtctgcttcacgtgcatgggcattggtggcccaaagggccccactcccatgtagtttgggttgatgatttcagtggatgctggagccactgcacggaggggccctgctagtgacttcccactgcttcatggggtcgtggctggtgaggctcttcagggtctttggcccactggattcatcacgctccgtcttcacaaagtcatagagcttctccctcgtcttgccctgagaggtctgcagcttgatctcccactggaagtggcctgtcaactccccatggtgggtgagaggcgtgtagatgggcagctgcgtttctgtggcctctaaccgaagggcaatgcagccctcgccataggattcgtcgctgtcagaggacttgatgctgatgaggatgtgctggtctagca

SEQ ID NO: 140658 - DNA, 1079 bp, Homo Sapiens
  misc_feature (26)..(26): n is a, c, g, or t
  misc_feature (992)..(1047): n is a, c, g, or t
tcattgatatggttgccaatgtcaanagcttggtagttgtagccagcatattcatagtcaatgaaccgcacgtgacctttgatgctgtcatagatgatattcttgcagagcaggtcattgtgacaaaacaccacaggggactccagctgggacagatgctccttcagccaggccagctcccgttccaacacctctaccttagggacatctgcagaaaggctggggttgatctcgttcttcacaagcgtgaaataattgtgcatcttgtgccagaggatgggcttgggcaggctgccgttggcgtggatagtatgaatctttgccatttctaaggcgattaacctgaaaagccggggctcacggatgtgctcaggctccagggccacaccctgcatgtactcatagcacagcccattctggaaggtgcagtagagtttgggggcacagctgtgtgctcgcagcagctggaagtttctgacctcattctcccggtccaccagcagctccgtccgctccccatacacccggaccagcacgcagtcctgcatgtcctcctccacatagcaggccaccagcttgttggtgatgccatccgtgaagcgcttggtccgaacttgctcgggtttccaatgcggccgcagctcctggatgaggcgcagggccccgggaaggatgtcgtccgggtccacggaaatgccgaagtacgcgacggcggcggccctcggggggcccggcggctcccggcagctggcgctggccgccgccttctcctccatgccccatgagcactgcgggcaaggcgtgtgcctcctcaggtgaaaggacgcgcgctgctgaggggccgaagggggcacagccattcccagcagccccaccccctcggagccgcggcagacgctagccccggcgggggggtccggcgagggagtgggagtggtagaggaggggccaggggaagtccatgactcaggcgcgagctgcccgcttcgatnnnnnnnnnnnnnnnnnnnnnnnnnnnnnnnnnnnnnnnnnnnnnnnnnnnnnnnnattgtgacatcacgggcggtggcccgcgggaa

SEQ ID NO: 140659 - DNA, 692 bp, Homo Sapiens
gtacaccttggagattttggaattgctagagttcttaatagtactgtagagctggctcgaacttgcatagggaccccatactacttgtcacctgaaatctgtgaaaacaaaccttacaataataaaagtgacatttgggctctggggtgtgtcctttatgagctgtgtacacttaaacatgcttttgaagctggcagtatgaaaaacctggtactgaagataatatctggatcttttccacctgtgtctttgcattattcctatgatctccgcagtttggtgtctcagttatttaaaagaaatcctagggatagaccatcagtcaactccatattggagaaaggttttatagccaaacgcattgaaaagtttctctctcctcagcttattgcagaagaattttgtctaaaaacattttcgaagtttggatcacagcctataccagctaaaagaccagcttcaggacaaaactcgatttctgttatgcctgctcagaaaattacaaagcctgccgctaaatatggaatacctttagcatataagaaatatggagataaaaaattacacgaaaagaaaccactgcaaaaacataaacaggcccatcaaactccagagaagagagtgaatactggagaagaaaggaggaaaatatctgaggaagcagcaagaaagagaaggctggaatttattga

SEQ ID NO: 140660 - DNA, 930 bp, Homo Sapiens
ttttttgatctttcaccattttatttcacaacacacagtcatggagatctcagttgcgacctcgcattgtcagcccctggttacggcgtgctgaaagcgggcttcagccagacattgtcctcagcagctctgagtgcactgtgtttttcgtccttaggatgcaaagaagatgccactctccatgctttgcagatgaggaccccccaggctcagaatttgacttgaactcaggttgtaaaaattgcctagactctggactgcttctcatgctggtgactgcatctgagcttttccatcactgctctgtgttttctctaaaatccagtccatgtactcagcgactttggtgtagacaccaggttgctccctgcgggcacagccttcaccccagctggtgatgcccaccaaacgccacattccattgtgtttgcaaactaagggaccacctgaatctcccttacaagcatcttttcccccttctttatagccagcacagaccatccgttgggttattttataatcttgatatcttttctggcattcttcatttgttaccaaaggaatatttaccttttgtagaatattttggatttcacctttctccttcgagaagccccatccggttacccaacagttggtataaattgtgcttgtgtcacctttggaaggtaggcatattggtttttggaattcagtgtaattcaaaggagcctggagttttatcaaggcgatatcatgattcccttctgagactttatagttttggtgaataataatctcttttatttgtgagaaaggtgtatcttttgtaatgtctgacagatttaaaatgccactatagatgcgccaaacatcctgcaggggaagcccatcaaagcagtgggcagcagtgaggacccactggtgtcctatgagtgaccctccacacag

SEQ ID NO: 140661 - DNA, 569 bp, Homo Sapiens
ccaaggagggcgcagtgcttgatggcccagcagtaggcgaagaagcactcctccagcgcacgggggaagggggcctcaggggccagggagtagtcgatggagatgatgggggcgcccagctcctgggcccagctcttgaggtagggctcgtgggatctggaggtctgggccacaaagccaccgccgtggaagtgcactatcagggaccgcgagcggggtgcctgctgggggcgcggccacagctccaggctccgttggccgttggactttatcaggctgctgagctcctcactgtcctgtccttcacgcaggtcataggagatgagcctgacgaggacgggcccagggcctgtgtgggccagtgggggtgagatggtgaccgtgagcgtggggtcggcagtcagtggcatctcaaaggcttcgggtggcaggctgagcaggcggcttaccctcacggtggccgatgccatgttggccagagacgatagcacttccatctcggtgatgttccagaaggctttccagaagtgcacgtccaggttctgtgtgatccgctcaaactcagcccc

SEQ ID NO: 140662 - DNA, 1577 bp, Homo Sapiens
ttttaattacctacctagatttaatttcttttgcattctcaaagaagcaaaaacatacacatatttttaattttacataatagactgaggtataaggcaagaattaactatcttttgagttccttgtatcatgtattttactgctaattcgttcacaatataggcaaatacatattccactgctgttattatgtgacaactcacaaaatggaatggatttcccaatctgaataaaaaacaggactcttacccctaaactatataaacagcactatgtgtgactactgtcattcataaacttggatgctgaagttcatccaaccatttgttaaaaggaacatttgaacaattccaacaggaaacaaagataaatctcaaagtcatccaacagaacagaaactcactgctaagaatgctgactgctctcttcaaagaggcaggaatgggcctcatgtcactcgaggcagtggaagttgctggatgggtccctggaaggtgcactggcccagtccccctcccactggccttggctgcaacttgtgctgagactcactcttctccctctctcaaagcccgttcatgcaggggtgggtaggaaatgtgaggttcttcaccgatctttagtgtatggtgcaggactttcacatagctggtttcaatgagggcccttggaccccacaggaactcgtagcatgcaggatcactgcccggcacctgccggtactccaggtagttttcctgcaccagatcttgcatgagcagcttcctgggatgtgcgaagacactgtcctccttcccctcatacacctccaacatactcagctcctcccagatttcctcctcaggggcacagccgccctctattgcgatcatgaccaggacaattatcaggaagcctgtcttgggcatgatctgattatcacccagcaggccatcataggagagacctaggcaggtgacaaggacataggagtggccggtggggtctgcttccttcacgtcaatgccaaagaccagctgcaaggactcagaggctttgccgaagatctcaggaaaacagtgcttgtaatttttgatgacactctccagcatttctgcctttgtgactggctccctggctcgatatttgaggagcagaaaaccaaccaaatcagccaccttcttagtgattactgctcggaacaaggactccaggatacaagaggtgcttggcccctcctcttcacggctgctggaaccctcactgggttgcctctgttgagtgaagttgatggtagtgggaaaggcggaggctccctgaggactctggggaggatctgttgacccagcagtgggcacctcctccagggtgcccaggaccagaggagaggaggaggaggcggcagcctgcacacacaccaggcccagggcctcttgttgggcctcaagggcttcctcaggcttgcagtgcagactcctctgctcaagagacatgatgactctcgtcagggcaacaggcaggagtgtgggcaggagctgggcaatgaagacccacaggcagatcttctaccggacgcgtggtcgacgattccggagaa

SEQ ID NO: 140663 - DNA, 760 bp, Homo Sapiens
gaagaggaagaattatttattcagatttaatttcgcttgcattctcaaagaagtcaaggaaatcctggtttgcatatttgtttaattttacagaatagattgaggtacaaggcaagaatcaactatcttttgatttcttgagttatctcatgtatgttattgctaattcgctcacaattttaagcaaatacttttaccactgctattattatgtcacaattcacaaaatggaatggatttcccaatttgagtaaaaaacaagactcttactcctaaactatataaacagcactatgtgtgactactgtcattcataaacctggatgctgacgctcattcaaccatccgttaaaaggaacatttgaacaactccaacaggaaacaaagaataatctcaaagtcatccaacagaacagaaacccactactaagaatgctgactgctcgcttcaaagagtgaagaatgggcctcacgtcacaggaggcagtggaaactaagggatgcggccccggaaggtgcactggcccagaccccctcccactggccctggctgcaactcgtgctcagactcactcttaccccctctctacaaaacccactcatgcaggggtgggtaggaaatgtgaggtcctccactgatctttaccatatggtgcaggactttcacatagctggtttcaacgagggcccttggaccccacaggaattcataacatgcaggatcactgcggggaactgccggtactccagtagtttaccg

SEQ ID NO: 140664 - DNA, 942 bp, Homo Sapiens
tttctggggtgggagccagctttctcttgggcttccccccttagggccatgggtgctcccttcccctttaatacccctcccatccacaattaaggttcttcccaggattttcttctccaggagccatggccgccctcccttggcaatccatggccaggacaattatcagggagcctgtcttgggcatgatctgattatcccccagcaaggccatcataggagaggcctaggcaggtgacaaggacataggagtggccggtggggtctgcttctttcacgtcaatgccaaagaccagctgcaaggactcagaggctttgccgaagatctcaggaaaacagtgcttgtaatttttgatgacactctccagcatttctgcctttgtgactggctccctggctcgatatttgaggagcagaaaaccaaccaaatcagccaccttcttagtgattactgctcggaacaaggactccaggatacaagaggtgcttggcccctcctcttcacggctgctggaaccctcactgggttgcctctgttgagtgaagttgatggtagtgggaaaggcggaggctccctgaggactctggggaggatctgttgacccagcagtgggcacctcctccagggtgcccaggaccagaggagaggaggaggaggcggcagcctgcacacacaccaggcccagggcctcttgttgggcctcaagggcttcctcaggcttgcagtgcagactcctctgctcaagagacatgatgactctcgtcagggcaacaggcaggagtgtgggcaggagctgggcaatgaagacccacaggcagatcttctccttggtgctcctctgtggcctccagggaatcctgtcctctgggttggcctgtcccctgaaaaccttgcctcctcacagagcctgggtcaggttccttcggccgaactctacgccg

SEQ ID NO: 140665 - DNA, 1231 bp, Homo Sapiens
  misc_feature (245)..(245): n is a, c, g, or t
  misc_feature (259)..(259): n is a, c, g, or t
  misc_feature (287)..(287): n is a, c, g, or t
  misc_feature (329)..(329): n is a, c, g, or t
  misc_feature (332)..(332): n is a, c, g, or t
attgggcccaagaacccctttcccccatgggggccgtggtggaaatttggggtttagaatccatttttccccctttttttaaaaacccccctttattccaggggtggtaggaaatggagggttctcccagggattttttcccatagggtgcaggccttcacataagcgtgtttcaaacgagggcccttggacccccccgggaatttcatacatgcaggatcactgccggggacctgccggtactncaggtagtttcctngcacgaaatgttgggtgagcagcttctngggatccccccaggatactgtctcccctcccctcaaaacacnttntaacacactcagctcttccccgattttctcctcaggggcacagtcgccctcttttgcgattatggccaggacgattatcaggaggcctgtcttgggcatgatctgattgtcacccagcaggccatcgtaggagaggcccaggcaggtggcaaagatgtacaagtggccgatggggtccacttccatcagctcgatgccaaagaccagctgcaaggaatcggaagctttgctgaagatcacaggaaagaagtactgccaatttccgacgacactccccagcatttctgcctttgtgaccggctccctggctcgatacttgaggagcagaaaatgaaccaactcggccaccttcctactgagtgctgcttggaactcggactccaggtcagggaaggtgcttggcccctcctcttcttggttgctggagtcctcataggattggctccagagagggtagttcatggtagtggggaggctggaggctccctgaggactctggggaggatctggtgactcggcagcaggcacctcccccagggtgacttcaactagagtagaagaggaggaggcagcctcctgctcctcagtagcaggagcctgcgcacccaccaggcccagggcctctcctcgggcctcaaggccttcttcaggcttgcagtgctgactcctctgctcaagaggcatgatgactctggtcagggcaacaggcgggagtgtgggcaggagctgggcaatggagacccactggcagatcttctccttcagtgctcctccgggggcctctggtcctccaggtcagcctgtcccctcagaaccttgcctcctcaccgagcctgggccggcttccctccgccgacgcctcgtgccgattcaccacccggcctcgctacctagccgta

SEQ ID NO: 140666 - DNA, 1255 bp, Homo Sapiens
  misc_feature (107)..(107): n is a, c, g, or t
  misc_feature (597)..(597): n is a, c, g, or t
  misc_feature (765)..(765): n is a, c, g, or t
  misc_feature (808)..(867): n is a, c, g, or t
ggtagcatgcagggattccctgccggggcaccctgcgggtattccaggtagttttccttgcaccaaaatcttgggggagcagcttccctgggatgtgcgaaggacantgtcctccctcccttcaaaacacttccaaacatactcagctcctcccagattttctcctcaggggcacagtcgccctctattgcgatggccaggacgattatcaggaggcctgtcttgggcatgacctgattgtcgcccagcaggccatcgtaggagaggcccaggcaggtgacaaggatgtacaagtggctgatggggaccacttccacccacctcaatgccaaagaccagctgcaagtactcggaggctttgctgaagatcacgggaaagaagtcctggcaatttctgaggacactctccagcatttctgcttttgtgaccgggctcccttggctcgatacttgaggagccagaaaaatgaacccaactcaacccatctttcctaactgattgctgcttggaactcggactccaggtcggggaaacattcttggccccctcctcttctttggttgctggagccctcatcggattgtctccaaagagtngtagttgatggtagtcgagaagctggaggctccctgaggactgtggggaggactcggtgagtcggcagcaggcacctccccccaagggtaacttccactagagtagaagaggaagaagcggtctgctgctcctcagtagcaggagcctgcgcaccccaccaggcccangggcctctcctcgggcctcaaggccttcttcaggcttgcagtnnnnnnnnnnnnnnnnnnnnnnnnnnnnnnnnnnnnnnnnnnnnnnnnnnnnnnnnnnnngcaggagctgggcaatgaagacccacaggcagatcttctccttcaatgctcctccagtgcctcgggtcctacttgtcagcctgtccccctcagaaccttcagtgttggcactgtctgcgtcccctctgctctgtgacctgaggacactgactcagaccaaggcctcactgcctggttcctggagctcctgattcctcaggctctccacctggatgcttggcagatcctagaaccactgcatctgtcgaccagatgggggcccctgtattgacctgagtcaccttctgaaaacaaggtcatcaactccctgagatcttgcctcctcacggagcctgcgcctgcttccctccgccgacgtcaggccgttgctcagggcgagaatctcgct

SEQ ID NO: 140667 - DNA, 521 bp, Homo Sapiens
tttggttgttcttagtttcttgtccacagcatttatgacatttgagaacaaatactgggctgaatgggacttctggtttgtatattgcaccttatttggtggctcaagatgtctttttgtgacaccactcatacaaaagtatccaagtgatctgtctttgataaagactgttgaatagcaagtgggctacaggtaatcagtcaatagagctggagtgaagacagagtgaactttcaagagcagttaagagttcaggttattttcctcctttccactttaaatacttcacctccttcacatggtcctctcttatctcaatttctctcccattttgtttctttctctcccacatctcctttgttacctaatctttggggtggaaaatgaatctacaagaggtatcagaattcttctttgttgtaatctgtccaaaaggttttctgggtttttatttttactttcatgttaactggagctgtccttagaattccaatgagtaagcttttcagtcccaaactcga

SEQ ID NO: 140668 - DNA, 338 bp, Homo Sapiens
  misc_feature (338)..(338): n is a, c, g, or t
ggaagatggggaaggtagttgacctcctcagtctcactttttccagtgtagaaaccatgagttgggggagggccattgcagatgtggaaatcagatgctcttaccatctgctcagagttttttcatctctctgtggccccaggaactgtctcattgtcatatttgagttctgggttgttgctgatgaaaatctcagcactgtatatttgttttgggttttctgtggaggggagtgaagccagcttgcttctataccactggttttgaaactgaaagtattccttctttcccttttttcctgtggtggtacccttattttgaggagtatgaacatagan

SEQ ID NO: 140669 - DNA, 465 bp, Homo Sapiens
tatatgctttcataaaaacaatttattttcactgaactcttcacgataagcatcaaagccaggaagaatgtacaatgaagtttacaatttcactccagaaacaaatactgggtagttattattttgcttaagtgaaaaacattttttttccccaaggagacaaaggtagtaatgggggagggggtttatacaggagtgaaaatcaggaagtccagacagtcttcagcaggaggggcccctggtgttgtccacaaagaccaccggctgaacaatgaaagctgaagacccagtactttcttcgcaaatgggtgggggtcagtccacagttttattcttcgctaagggacagcttcccttttttttctgatcccctgagggtagctcattatatgcccctccctaccccttcttgggaatgctgcagccataaatctggagaggtcattagaattacgaactctggtt

SEQ ID NO: 140670 - DNA, 536 bp, Homo Sapiens
  misc_feature (235)..(281): n is a, c, g, or t
gcggccgcagcgggggacccgcgacctggagcagcgggaggccgaggccaagggccgcccgggctcgcccctcgccgcggaggagacccccgggcgcgagcacctgcccccgtggcggcgccgcaggttcctgcgggtgcccgagcgggactcgcccggccacagctcgccggagagagacagcgacggcagccggcacagctccgaccgcgaggacgacttctccgcaggtggnnnnnnnnnnnnnnnnnnnnnnnnnnnnnnnnnnnnnnnnnnnnnnngggctgccgggaccccttcccggccgactccgcggccctgtttaacctcgagctcggggccggggagcgggcgggaaggagggtgagctgcgcccgtgtaccccaaagccacctgtggagcttagaaaacacgtgcaaggcgacgttaagctcgggcgactctatgaaaatgaactggcggcggcggcagggccggcgcccgggcctttgcgctttgcgctccgtggccctgacatcccccagcccctccctccg

SEQ ID NO: 140671 - DNA, 706 bp, Homo Sapiens
  misc_feature (102)..(102): n is a, c, g, or t
aacgttttgaacacccaggtgtcggcccatttttgaaagagtggccattgggtacctgcctgtccattgtgcaccatggggccagggtgtacatagactccntggtggatctcatagatgtctggaatctgtaagaagatggtctcgatctgctgaatggtgagcacggactggtaaggtggtgcaggtggccttcaggggtttcatgggcagcaacagggcttccagctggttaatgtagatctcttcgctggccaagaaccccgagagaaccagcttcctcatctccaggcctttccctgcttccaccacaggagccagtccctcaggtggagtcggggagacgccatcccccccgccctggctgcgggcgctgagctgcggggacatggtgggcgactcatcgatgtacggcatggtctctgagccctccgggggccccttctgctcctcattcccctctccgtcgtactcgtccgtcccgtagctgaagtctgcggagaagtcgtcctcgcggtcggagctgtgccggctgccgtcgctgtctctctccggcgagctgtggccgggcgagtcccgctcgggcacccgcaggaacctgcggcgccgccacgggggcaggtgctcgcgcccgggggtctcctccgcggcgatgggcgagcccgggcggcccttggcctcggcctcccgctgctccaggtcgcgg

SEQ ID NO: 140672 - DNA, 365 bp, Homo Sapiens
aaattgctgcctcattctactgagaaaaagtttggtttaccatggttcagcctggagatccaggagtgaacaagatgatgaatgattgacaggagagacaacaagttcctggcctgcgtttcaccccagtggccgatgcatctgaaatgcctgcagttctcagctcttgaacagaactgaggagtcttgaaagaggccatggcatgccctgtggggtctccaggcagctttgataggcccagttggcatttgctataaaaacttattaaatccaggcctttcttctgcaactgagactccagaacagctgcccctgacaaacaataaagaagagctatcgaagtcacatcatgggctggaaccag

SEQ ID NO: 140673 - DNA, 431 bp, Homo Sapiens
tttctattttttatttttgtgaatcttctctgtatcgttccaattttagtatgtgtcctgccaaagcaagcatgtgacgtctttgttagtgaatctgagtggattttctgcccctctgccaagttctagcacttctcgcagagtcctgactgatacagtacttgtcagggtgcttgctcgctattccttgaatcgagctgagtgacagcagagccatgaggtcttgtgtgtagggagattactttgggaagcgatcctgtggggtgtggctgtgcatgcatgaatgcttagttctgaggcagaaatgaagagatacgtggtatcgctggggtgggtgctgtcatgttacatctgtgtaaagatagttgccatagcgatggctgcactaaaaggtgggcagaaagcttgtgaggcaaggctgaggtatagct

SEQ ID NO: 140674 - DNA, 768 bp, Homo Sapiens
tttcctggcagaaagcatggcaatttcttttattaatggatgcctgaagggaaagtgtaacatttctgcaggctgatagaagaagcatcttcaggctgggtactctcgcctcacctctgttttcactggtgagattaagttgggctggtgagggaggtcaccagaggatgctcgggcactgaggtggcaagtctttgggctggtggggatgggcggaggtcgggccttgaccttgtgaagttgcagctgcctcagttctctcactcagggctcagagttatgcaccatgcccatccctgacctcatcttttatcttggagatgaagaccaactggcatagttctgttggtggactgagggcttttgactcctggaaatcatgagtccttctctgaaacactactcccgaagttgctttatctgggggagtattctggatgatggtgccatgtgaagaacccagagaagtgccactggtacggcaactggagtgtgtcctggggcagcaccaatccaaccccagaaatcatggtcctgtagcactgtaagctaactgggagggaacagaggcagggctgttggccccattgctgctactaggaactaatggaagaccagtatatctagatgagcaaacaaaacttcagttgattctgtgaacactggagacactgtcggaagagacacattgtttcctgcaagttaagaggtaggaagggaaaagtggcagagatccagtctgattctagctcctctcacatccgtact

SEQ ID NO: 140675 - DNA, 2109 bp, Homo Sapiens
  misc_feature (366)..(374): n is a, c, g, or t
  misc_feature (488)..(590): n is a, c, g, or t
gctcaaatatgggggaccactaggggttgagcagatttcccgggttggggggatgttcaaaggtgtttctccacacacgccggctttgcgggaggtggggctttccacactgttctggggcgcgagaatgggttttaaaagaggagttgcgccgcgccaggtccattgttatagaaagggtgtgccacatgggccgcggggccgggtaaatattggaatctcgcgaagatttagcgctctcgggggaaaccctcgtttttattgagaatctcccttttaaggggcccctcccgggaaatcccccttggggggatttgtttcttgagaccggttaggtctccccccccagggggctttttttaattnnnnnnnnnagacccaaagcccttaattcacgaactccggggttctcctagggggggcagcttgggggccaagttcacgcttcctaaaggggcccccggggccaaaggaaaggtttagaaagnnnnnnnnnnnnnnnnnnnnnnnnnnnnnnnnnnnnnnnnnnnnnnnnnnnnnnnnnnnnnnnnnnnnnnnnnnnnnnnnnnnnnnnnnnnnnnnnnnnnnnngaatgcaagaaaagttttaattgtatctagctagaagtacaagtatatgttacatgtaaattttcttacataactatcattggtacatggaactacatcagaccaattacattgttttaagtttctgaacaaaccaaaattacttaatgatttaataaataacaataccatcctaaacatacaggacacaactcacaaccccttaccctcacctttggcacgaattcaatacacgagacaagactgtcaagttaacatcagatgttctccctgttcttcaattgacattgattgcataaaattatttagtaaatcttcttcctttttttcttcactcatgtgtgattcagaatcatctgaagaaactgtttgcatgaacagtttccttggtcttctaaaaatcttcagtgacttacatcttgttttagatgcatatccagtttttatcccttctttgtttctcactggccgccaaagggaatgctgtatgagcatttcaggtgcagatgcagctgcgatatcagaagaccccgagtcctctctctccagttgatgtcgccatgtagtgcaagggtaatgctgtttctgtgagtaacgggagctaaggcggcttctgtgatgagtgaggacaccttggcttttgtgagctgtgctgaagtacgtgcatgtactgcctcttcattaacatcttcagatagtttgcattatagattttagcaatgctgcacaggtaacgcttctggcctgtggtgaggtctggatgcttgaaaaaggacgcctccatcattgatttagagaggtggattgtttgattttggggagttttccataactcttgcagcttagctatgtgtgagttcactttgtatccatctttgattctatcagaacctttggaattctggtaacaagagtatccagctgatccgccgccgccaccctcggtcccggccacagcgggcggctctgcagaagagctacgctccgtccagtcggaccccggaccttggccgggcatctccgcggcgccgagaccgcgagccgtgtgcgggagcagctgtcccagcatccctcccccgacagcacgcgtgcgtcaggctgctggtattccggagaggcggctcggatgctggcttctcgcccctccgaagccgttcggacactgcccgaacagcttcgggagagcggggcgggcagatccgcgaccccggagttacggtgggggaggggcaggagcgctgcggtcgctgagcgtttgcacgtttgcacctctctgtggaagcagtgcgtcacaggagggaaatatacatgctccccataacaagaggtgccttccacttcagtattccagatcctcagcacatttgcaaatcgcgagggtcaccatacaggtcaaacgtctgcacgcaaaccacggaccgaagcacgtggcgcaaggatgcggagctttaatctgttgtccgttattactcaggtatccaagcttagacagcatcccaacggccgatttccatcaact

SEQ ID NO: 140676 - DNA, 701 bp, Homo Sapiens
tttatcacaaattgttttttaatatttatttatggaattctttgatttatgtctgtcatcccaataagagacatgagggcaaaaactatatatatattttggtgggcattcataaatgaataaaatttgtcatctctgtctattacacagcttcacttgaatgtaatagtatgccacctaacacagctaagacaatataaattgtttttctctgaaaaccgattcctccttcagtctccccgatttgatgatgcttcttcattctccagggcacacaggcttcgtttcttggagacatttgactcctttcctctgtcctatctcccacattcagtgctcttcaaattcttcagtcctttggatgtttgtactccagtctttcacgtagtgtccttagtgctcagttaacatctagtgtaacttttggaagtatctgcagagagggaaatggattatggtgagacgaacatgaatcagaagctgtctctttgctgaaggaagtcagggtatggctggagagttgggataggctctgggctgggagctcaactagaactgtcttccacgtggctgtttgggtttccttacaacatggtgggtgagtaccaagaaggagaaagttgaagctaccagtgcttgtaaagaccagacgcaaaactggtacaacatcacttcagctgtattctactgaccaaagcagg

SEQ ID NO: 140677 - DNA, 539 bp, Homo Sapiens
ttttcaattccttctgatcaagtgactttattccataaaacagtacatcagctgggcaggttcggtctcctctggatgtatgacagtcattatttatttgttctgtaaacataactaggatacagtgacactgtcataactaaatttgaagtaaattagtactgtgacctccaagggcaggtgtgaagcatgttatcagcgcctgaaacaccttgtagtggtttcactaacataagttaaaacataagcacttaggaagaaagtcttccctcattaatttctggcatagtgcagctacatgttcatcctggaacttaaagtaccttcctcttagaaaatcaaagtgttttcacagcaagtttaataaattaaaaatgtagagaaaaaaaggaactagtgaacaaaagaattctccaaggttccctttttaaattaatgtttaaatgttacatgtgaatcatagcatttcacaagcacgtggcacatactcaaggccctagaaccaaatgtcaacgtttaacaaatacagcagaatcgtc

SEQ ID NO: 140678 - DNA, 930 bp, Homo Sapiens
  misc_feature (859)..(889): n is a, c, g, or t
ccctaatcgatttctggatgaccaaggacagcgaattaaaaaagaaacctttattccttttgggatagggaagcgggtgtgtctgggagaacaactggcaaagatggaattattcctaatgtttgtgagcctaatgcagagtttggcatttgctttacctgaggattctaagaagcccctcctgactggaagatttggtctaactttagccccacatccatttaatataactatttcaaggagatgaagagcatctccaagaagagatggtaaaaagatatataaatacatatccttctaagcagattcttcctactgcaaaggacagtgaatccagcaactcagtggatccaagctgggctcataggtcggaaggagggtagagcacactgggaggttttcatcttggaggattcctcagcaggatacttcagccattttagtaatgcaggtctgtgatttgggggatagaaaacaaagtacctatgaaacgggatatctggattttacttgcagtggcttccaccgatgggccaatcttctcatttcttagtgcctcagacatcccatatgtaaaatgagagtaataaaacttggcttctctctacctctcagcactaatgatggtcaaatgccttacatcttttctgatatctctaaaatgctgttaagttctggagaagaacttcaggagaagaagatctatcagctggcttttaaagacctatgacaacatgaaagtggtgttcagcctggaatgctttgtcagagatgggtgtggatttaggttatactgggggagaacttttctcagcacagattctatgccagcttctttgggcttgttctgtcactatcnnnnnnnnnnnnnnnnnnnnnnnnnnnnnnngtagatgtgggatgaagtggactctgtcgtgtatattgagg

SEQ ID NO: 140679 - DNA, 499 bp, Homo Sapiens
ttttaactgttcagtggtggtgttctttattttatttttttctaacaattgaaaatatcctgtggggaacagtcttctcaaatccaatcaacattaagtttcaaataaaactaagtatacaggaaataagtgagcaacaaaatataaggccattagatgtggctacattggtgttcttgtttttccctcagttggtgaattccttagggagagattagctataataattagtacttttgtaaataaaagaaattgtgtgaagctggaaaatttacaatagatgaagtatagttgtcaaagcaccaaattctcagtgtggccaactaggaaacctgcattctttccgtttgctgagtcacttgctggttgtacaggcttggacaagtccctgtcttttgagcttctgcttcttcatctataaaatggtgacatgcttccaggttctgttcttcacaggtttgttctgggaatcaaacaaggcctgagggtgacagcacct

SEQ ID NO: 140680 - DNA, 620 bp, Homo Sapiens
  misc_feature (584)..(584): n is a, c, g, or t
ttttgaagacatttaaatggaaatatttattttcttaaaagtatagcttaattttccctctccaagtttgagaaggaatattgggaggaaacgggacaagatgacacaggcatttggacattcactgcaaaccctagggcgttgctgcaaagcatcctgggtccagttccagtttaggaaacctcacagtcttttttccagtcggacaggtctctcccctcacagtgtttcttccagccttgccaatagttcattccttgtgtctctttaacaattttcttggcacagataatcgcatctgtgaggtcatcagtgaccaaggctgagcaggcgacgtggcagtggttgttctccttcagctttccgcgtctgcaccacgcgaagctgttgatctggaagatgccgtagtcgatgctgccgtcatccaggaccgtctgggctgtggtgttgtagccgctctcataatacgccatgcagatccagtttccaaggctgaagccccagtaattgtccaggccagccctcgagaatatttttgccagtttgcaacgagtgtagattttggactcggcgcctgtgaccangcagccaatgagggtcagaatgcccgcagccttcat

SEQ ID NO: 140681 - DNA, 1009 bp, Homo Sapiens
  misc_feature (976)..(976): n is a, c, g, or t
tcagttttgcctgcttcattagagtgagcactccattgctttgtttcctggccacactgctacaatccagcactaactatccatgtccagggtaaggatcgagatcgagaagcccacactgccagtgaaaaagctacgtctttactgcataaattagaggaagcaatttcggaacaacggaaccttcaaactataaatactgaattatcgaacacttgccaggcacttcagcagaagacaaggaaactgaagaagctttttagatgaggaatttcctcactatgattccctgtcctgcgcagatgcaattcaacaacctcttcaagaaaaattgaagcagtgttgccacaaactatatggtggtcaagaagcaagaatacatcagacacccctgaccttgaaacatacgtgctggtacacacctctgctggatgccttatctctggatagttttacagcagttccaaccctggaatcaacacctttctcaggtgtagccaaccaaatccacactctgtgtgaaaggcccacatatggagaagtaaaggatggtgctttggatgtaaaaagacaacacaagtgcccaggccccacaagtggccccagcccaggaacgaatctctcaggctgcatcaggatgaatgatgacccaagtatggaagagaatggtgttgcacgcgtgtgtcctgagagcctgctgcagtccatggtatattgctcactaccattacccagacacacttcatcgacagacggtactataacttcaagtgatcctggattagaaattctgaatatggcttcttgtgaccttgacagaaactcgctctgtaagaaagaggaggatacaagatcagcttctcccacgatagaggcccaaggcacaagtccagctcatgataatattgcattccaagactctacgagtaaggataaaaccatattaaatctggaagccaaagaggaaccagatgcnatggtggcagctgcaaatgtacatggaccatgt

SEQ ID NO: 140682 - DNA, 986 bp, Homo Sapiens
gggataccaagcccatgcaaacacagaattgcagaagttcaggagaggcttatcacttccctgagaagaaaaacacattttcagttttgcctgcatcataagagtgagcactccattgctttctttcctggccacactgctacaatccagcactaactatccatgtccagggtaaggatcgagatcgagaagcccacactgccagtgaaaaagctacgtctttactgcataaattagaggaagcaatttcggaacaacggaaccttcaaactataaatactgaattatcgaacacttgccaggcacttcagcagaagacaaggaaactgaagacaacaattgagtcacttcaaaaggagttcattgaaggggaacaccatggcttgctgtttcagagctttttagatgaggaatttcctcactatgattccctgtcctgcgcagatgcaattcaacaacctcttcaagaaaaattgaagcagtgttgccacaaactatatggtggtcaagaagcaagaatacatcagacacccctgaccttgaaacatacgtgctggtacacacctctgctggatgccttatctctggatagttttacagcagttccaaccctggaatcaacacctttctcaggtgtagccaaccaaatccacactctgtgtgaaaggcccacatatggagaagtaaaggatggtgctttggatgtaaaaagacaacacaagtgcccaggccccacaagtggccccagcccaggaacgaatctctcaggctgcatcaggatgaattgatgacccagtatggaagacaaggtgttgacgcgtgtgcctgaaaagcctgctgcaggcccaggaatattctcaatacattaccagaccacttctcgacgacgtactatacttcaagtggagcgggttggaatacttcactacaccgtcatatacagtatagcgagagtccgggacgtggggttcccttcgaagactgga

SEQ ID NO: 140683 - DNA, 444 bp, Homo Sapiens
tgccctccctgtccaccttctaccttctggaccacaacacgcgccaggccgagctgggcctcgcctacggcgcgccgtgcatgcgcctcagcaaccaggccttcgtgttccgcggcgggcggtggaccactgagagccagctggcgaggacgcggtcgccgctgctctcgcggaccgcctggggctggaaggcgcaggtgcagcggtccaaaagccaagtgttgctggaggagaacaactacctgaagctgcagcaggaactgctcatagacatgctgactgagaccatggcgcgcatgcacttgctggagaagcagcgcaaccccgaggtgatcccgacggctgcggcgcgcgccgggcagaggaagatgcgcaagcgcgcaggcgccagcgcgggcgtgctcatgatccagccgtgcgctctggactcgcagtgacgcaata

SEQ ID NO: 140684 - DNA, 425 bp, Homo Sapiens
gttttttatctgttgagactgcttttactgatgacagttcattagataggaaatgattctgtggtacacaattttgaactttgcacatagggaattatttccaaattgacaaaagttgcccattattacaaatttctgaagcatcctgtttcaaattgatcccgtagtggtacctttgagttagaggggtgatgttaatgttgaccagggtgttaccttgagaatgataatttgggatccagtagaaccctgttaaactttaaaatggtagaaggagcaaaaaggcagttgactgaactgaaggggttgaaggatgtgagttcatccttgttacctgcaaatagcacatgcgtgcacttaccatccgggaactctgggcactaggctgtggcacatctcccaaggttaccccatgcctttctaga

SEQ ID NO: 140685 - DNA, 797 bp, Homo Sapiens
  misc_feature (17)..(17): n is a, c, g, or t
  misc_feature (188)..(188): n is a, c, g, or t
tacctctccggtcattnttcggaaaatgttttccctgtcttccctcctcgttctggggaaagacttttctttgacactttcccctttttcagaacagattaactttctttctttatcaggctgcttgggtcgcttttctgtctttaagggtttatcttctttgtctttcttcactttcactgttgctnttctctgttctttaaacttctctcgtttatcaggagatgatgaaagacttttgtgatctgtttctttaggcctgatctttggaaaaagctttgacatgaatatgtttgacagtctgaactactccatcataaaatttcacagtgtaagtaccatccttgttaacagcagtgactttggccgggtaaaaacgacaatcagaccagcaagcaaggacctgctcatttatttgaaattcagaagatccatcctcttcatgcaagccctctttcctcagctgtattttctctaaagggcgtaaataaggactgtcccagcagaaccactcatcataacgatggttccaacgcttgaaatggatgagtacttttccttcctcgtagtcaatgtcttctatgtgagctggataccagttttttaaacggtcccgggcttccaactgggctcccacttcaaagctgattcctcgtctgttaggtggatgctttgtcattttcagtcatcaacggggctgcctttattctcctcacggccccactccggctgcgccgctccaggacccccggccgtaatggccgaattcccgggcatatgtccggtaccgtcgactg

SEQ ID NO: 140686 - DNA, 906 bp, Homo Sapiens
  misc_feature (272)..(280): n is a, c, g, or t
  misc_feature (551)..(593): n is a, c, g, or t
ggaaagcatacttcttttgaaagttttttggaaaatgtcacccgcatgttaaccattatcccgggtgttatttttctggtgaaaaaggcaagggaaaggttttggagaaggaataatatgcttggtttgcttccccaatgttccacagcttcagtggtttttccccccatgaacccactttcatgtcaatgcaaaagtattataaaataatccctccattgacatatacccgaaaagatccaaagctcttggatctttaaggttcagatagnnnnnnnnntagtgaaaaatgttcattatcaattaatagctgggctttaagtttccatgtctagtatttgtacaaactaaatgaggtgaaattttcagagtgtaaaatctaacagaaataaagtaaatcaatatgagttatgtgttagactttcattcgttttcctgtcttcatattactaacgtgcttttttgttcaatctctttgctgaacagataaattttatcaacttgtgtggtgtaaaaggatggccattaaagttaactggtccaactctgtnnnnnnnnnnnnnnnnnnnnnnnnnnnnnnnnnnnnnnnnnnnaaaagctgggagccaggcagtttagcattcaggtacctttgacctttctgctggtttgaaaaacccatacccacaggcttttgcatgaactatacaactccacacaacagatgttaaaattaatgtaattaaatagtgatgtatttcacataaggtaaatataacaaatgtctgtaatttaaactattcttagaaaatattagccctttttggtcactgctaatagtgtaactacagtgtttggtcttgcttttctaagggtaactgatttgcagttgctactttgaggatgtttatttgtccactgcagaaa

SEQ ID NO: 140687 - DNA, 518 bp, Homo Sapiens
  misc_feature (307)..(331): n is a, c, g, or t
ttttttaatcaggaaaattgctctctttattctggtaaatgcgtttggtctaaaattccactttgtttcatgttaatataacccaaatgaccccagacttcattagcctgtgggtactaaagatgctccattaatattaatatcctaatttgctagctcattaacccctacctgtataacagtgggaccttgacctctacttaggaagtccctaggcagtatctgacatgtactatggaatcagtaatttactcttcatctctactgactgctctttgaagacagactccggctcctgttaactttnnnnnnnnnnnnnnnnnnnnnnnnnacgtataactgcctccaagccacagagacagtcaatcctcctggtgcataacagtgcgaagtgtcttcttagccacaagtcttccatactgctacttgctacttcttcaatcttttattttattcatctttctggtggcagattcctagctatttctaggcagattggttcatatattttagggatg

SEQ ID NO: 140688 - DNA, 433 bp, Homo Sapiens
accacattcatgacaatgagattatgtaattgttttttattcacaaatattttctggcacacacattaattcacagaaagaaagaacagtagtcacgtgggcacaatatttaaccctttcagatactgaggtttatcaccgcttgatttcttagttggaaatgttgcagtttggtttcaggcaggatttccaggctatcacagcctgctccgatggcatgattattaggagctcatctgcatcactggtgaatttctttggtcacttctggacagtttttaaacataagtccatgcccttctttgttctgctgatgaggcacgtcataaaataaatgtccagcaatgtcttcccgtcttgttctcaggcctcaggctctcggactccttcccccacccctgcccccatgttaactttctattgctgctgtaaa

SEQ ID NO: 140689 - DNA, 462 bp, Homo Sapiens
cagggactgggctggaggcatctgaaggcatcaacacagagcactgtgtccgagtccttctgctccccattggcgcccgcggtgaagggcagcttccgcttgctggctcgctccctcacctccttcccgccatcgccacgctccagttttggggtcttggttagagaaactttatctttatcctttttcccagtctgcttctccaccatgtcgctgctgaggggaagctcttcctgctgtggtgctttagggcacccacccttgggcatcgtcctgctcctcacccgatcttcatttacacggccggcgcttcatcatcaaccgtctgcgattccatagctgaaagtcagtgctgacgaggactgtcttttaaatccaatggaggtgtgtcccagagcagggctgtatatattcgtgctccgagggctgcgcggctccgcgacggctcagcggcggggcgcg

SEQ ID NO: 140690 - DNA, 495 bp, Homo Sapiens
gcggccgcgggctgcatgggcagcgcccgcgccccgccgctgagccgtcgcggagccgcgcagccctcggagcacgaatatatacagccctgctctgggacacacctccattggatttaaaagacagtcctcgtcagcactgactttcagctatggaatcgacggttgatgatgaagcgccggccgtgtaaatgaagatcgggtgaggagcaggacgatgcccaagggtgggtgccctaaagcaccacagcaggaagagcttcccctcagcagcgacatggtggagaagcagactgggaaaaaggataaagataaagtttctctaaccaagaccccaaaactggagcgtggcgatggcgggaaggaggtgagggagcgagccagcaagcggaagctgcccttcaccgcgggcgccaatggggagcagaaggactcggacacagagaagcagggccctgagcggaagaggattaagaaggagcctgtcacccggaa

SEQ ID NO: 140691 - DNA, 467 bp, Homo Sapiens
cgatgaaagaactgaggctgaaattattattgacatgagctaatctcactctcttgtttcagaatatatacagccctgctctgggacacacctccattggatttaaaagacagtcctcgtcagcactgactttcagctatggaatcggtaaatactcactgcattctctatcaatttatgtttttgtcattgatttgtaaaaataagtatcaaaataatgcgtgagtgtccaggttggttttcttggacttgatagagttttgtcgaaatgttgtgaattttgttctggatttcacttagagtgtattcagagtggtaacaggtaagcatttttggattaatgaatgggatccttggtgtcacagtgagaagaaatctgctgaaaaattaaataggttgttaatagcctataaaagaagtttatttcctctgtcctccttttattttcttcacgctccatgggtacc

SEQ ID NO: 140692 - DNA, 1023 bp, Homo Sapiens
  misc_feature (930)..(961): n is a, c, g, or t
ttttcagatacaaagcagtatttatacatttatttatatatgtatatttacttcagaagaaacgaacatttcggggacaggaagcaagcaggcccggggctgcttccctcactgcccacctcagagtcagagttggcacatgacaaataccaagctcagggagaagaactgggagttaactgggaagtagggggcgctctatgcacacgcaggcttctaagggtgcacggtatgggcaggaggatttgcactgggaggccctatgtacagcttgaagctagggggagattagcccagtgactacaggaacaaacgccaaaggagagagaagaagggagggatgacctgctggaccccagggcagggacagggccaagacactcacaccattgccagccgggcagctggcagcttccagcaggtggcccacttaccttccctgaagcccttttaccacaggcttaaggcaactttggtccaaggttgaccccctcaagcagcttggatccccagcctgtccccaactcctgcactgaggaacccctccccaggcttggaaacagagccagctgctaacggttttggggctgtgctgtgtccagatgggctccatggggcagtggacggtcactttccagttaaggactgagggcccgcagtccaagaacatgaacccccattgaggaagcccaggaatcctattacatggagtggggctcggcagttttaaggcatagggaggattcccccagtgggagggagaacaaagtcatcataaggaaggctcagcccctgcatggtttgggaatcgtaaaattcctatgtcaacggaaccaaattggggagggggctgggagcaagctatccctgctattcctgcatccccctgctcttccctatcctgaggacaagtgctttgagatcaatggnnnnnnnnnnnnnnnnnnnnnnnnnnnnnnnngaccgcgtatgcggccgcaagcttattccctcttagtgagggttaattttccgcttagcact

SEQ ID NO: 140693 - DNA, 1066 bp, Homo Sapiens
agatacaaagcagtatttatacatttatttatatatgtatatttacttcagaagaaacgaacatttcggggacaggaagcaagcaggcccggggctgcttccctcactgcccacctcagagtcagagttggcacatgacaaataccaagctcagggagaagaactgggagttaactgggaagtagggggcgctctatgcacacgcaggcttctaagggtgcacggtatgggcaggaggatttgcactgggaggccctatgtacagcttgaagctaggggggagattagcccagtgactacaggaacaaacgccaaaggagagagaagaagggagggggctgggagcaagctatccctgctattcctgcatccccctgctcttccctatcctgaggacaagtgctttgagatcaatggcaaaagggggcctgcagttcataggcttcaaggaaaggcctccactatagaaaggccctcccattcaaagctgagaatgagtggtgggacaggggcaagcctgcttcccaaagaggttggcagcataccacagggcaaggacagccaagttccctttgcccattttctggacccatggcagacatggctaaatgaattactacactccttccatgagcctggatgtagcctcggaaatgcaccaggcaccactaaggaaacttgaaggtggcacttaagatacaacttcttccctaacccagggtcttgtgtgttgggagtgggatgggtgtcggaggctccctgggagggatcagagtcagagccctgtctttgcaagtgtcacaccccgtgctctggcccactctgagctttctagctccatccttccattccttcctgacctggtttaagtgcatttagtaattacttcattaataacagcaaaagctatttgcatctgcccaccagccaagaccaggctgctgcttgagggattcctgctcctctgctcagagagaatgatgtggtcactgatcactgtgagctccagacgctcccccggccgtaatggccgaattcccgggcatatgtccggtaccgtcgactg

SEQ ID NO: 140694 - DNA, 467 bp, Homo Sapiens
cagatacaaagcagtatttatacatttatttatatatgtatatttacttcagaagaaacgaacatttcggggacaggaagcaagcaggcccggggctgcttccctcactgcccacctcagagtcagagttggcacatgacaaataccaagctcagggagaagaactgggagttaactgggaagtagggggcgctctatgcacacgcaggcttaaggcaactttggtccaaggttgaccccctcaagcagcttggatccccagcctgtccccaactcctgcactgaggaacccctccccaggcttggaaacagagccagctgctaacggttttggggctgtgctgtgtccagatgggctccatggggcagtggacggtcactttccagttaaggactgagggcccgcagtccaagaacatgaacccccattgaggaagcccaggaatcctattacaatgagtggggct

SEQ ID NO: 140695 - DNA, 438 bp, Homo Sapiens
ttttaaagaaaaaaatttgcaatcttgcagtttaatgcaaccatagtcttagcatttttgtctgtgttctcttttcaatctttgtttataaacatatatgtttctacatagagctgattgtaagaggtatagaattccacactttataaatgccttgttaatttattgttttccatgttgtcacatagacttcaggggtctcctctcaactgactgcaaattactcactgagttggtgccccattatgtcctcggtcatttcccctatcgttgagcatttacaacttttctaatgattgacttttaaatttcttgaaattattgagttaaagggagcagaattttaacaacttttgttatgtgtcactaaatcccttttcaaaagattgtactgatttccaatgccaattaaatgttttccaagtattattttccaaa

SEQ ID NO: 140696 - DNA, 424 bp, Homo Sapiens
tttcacattgagacccacattttaatggaaacactggacctttggggttgtgctggagattttgagatctgggataagaaacccagagtgagcaggtggaacagttcccactggctttggtgacatggccccaggactgctgtctacctggagggcctgtttggagctgatttcggagaggtggtggctacactcctcgccactgtgtgcacggtgcctgaccttgcctggaagcctgcgtgttcacttaaattcaggtcctctgttcagcaccccatagctcctcacggatcctcaccctccatccctgcctgggatccccactcttccacctggaaaggggtgcagggaggtggtccaggatccaagcctcagctccaccctcagcgactaagtgccttgtgggctcttcatttattcagcg

SEQ ID NO: 140697 - DNA, 673 bp, Homo Sapiens
atctccaggattaatgatcatttcaaacaccctacaaagaccttgttggctgccagatgtgacacatagatccatctgtccttgactgggtgggtaatggatggtaggaggattatgcaattttatttgtaactgttttagccaggacaaaagctctggaattccagcactcggagaatactgaagtgctctcttcatcatctcttctccaaattggatggtctttccattttctacagtgattacggcagtcttaaaaggaaacatgtttggatttggtaagccaccagccaaggagatcatcgattttggtcctctgctcaatatgtcagtcatggtccggatgggagaagggtttctggctgcgctcgctgccgtgatgaaccgtgcgtaattcatgtcttctgacagccaagcatcaagcttcttcttcagtggttgaggactagaaaaaccaaagagcctcgtcaagtcctgcctgctaactcctcactctggcaacgccaccgcgagatgtgtccccccgctgcgtctggcttcccgcgcgcggtgcccggagaacgccgccgaaactccccggctggacgctgcgttcggtctcccggtcctaaacgggtctggggctgtgtggcgagcccggcaaagtccacgccgcacgcgctcctgcggccgc

SEQ ID NO: 140698 - DNA, 298 bp, Homo Sapiens
tttctgcttaacaaatttttattttttatggttattgttgacatcaggcaggtaatgtgccaatgacaaggctcaagggaggcacatctcacatgtggacgcgaaaactcaatcatcaagcttatgaaccacaaaaggatctagaaaagttttaaacatatgacacaattctgtgtccatgcttgtgtgcaaataggtcacactgttgtataactttttgacttaaaatcatctaacagtggaaatgctttccaacattctttttcaaaacactctctcaacttcatgaacataatga

SEQ ID NO: 140699 - DNA, 551 bp, Homo Sapiens
gcggccgcgggctcctcgggccggtggcagttggcgccgtccccggctgaggtcctctcggtgcgcctggtgggcttcttgcccgcggacctccgggcaggcgcgggcgcgttctccgcgggcgcacagggcactgcgggtggcggggcggctgcgctcaccgccacggccacggccgcgggcggggacttctgcttcacgcctttactcccaggggccttgttggctgtccttggcctttgctcctccttgcaagtgctcttgatctccttctctctcaggctgggctggcaaacgtcggggactttcccacagtcctggacgtcctctttcaccgggttgtagtactgattgctctctgacccgtggctttcattttggatcagaataggaggcttgtggggattaactttgtttagccatttatccagctgccacttgttagaggatgccggttcagcctcggggctggagaagtgggggggcttgctgccctcactctcgctggagctgctctcgggtctcgagtcatatgcggagctgctctctga

SEQ ID NO: 140700 - DNA, 654 bp, Homo Sapiens
  misc_feature (88)..(129): n is a, c, g, or t
tttagccattctttattttaataagatttgaaaaattgaatttaatgaaaaatataactatataaaatagattatattttttattatnnnnnnnnnnnnnnnnnnnnnnnnnnnnnnnnnnnnnnnnnntagaaagtgatgcatatttgatttgatgatttgggttaatataatgaggatttgcatattaggctagcattcctattttaatttaaatgaaagtcttcattatttccccagacaccaactcagtacaaccaaccaaggtgctcaagccaaacacttaggcatcattgctggtaacatctttctccatcccccaaatagttaagccatcagcaaattccattaattttaccacaaaaatatatcctgactgtttgctttcatagctaacatcacctccctgatccaagcttttgtcatcctctgtcatcacacaccatctgaaatagtcctctgccggctttctctgcttctatttttccttctttataatttattcccaggatgttattttaaaatttacatgagatgataaaatttagccctctctaagcaatcacatttagaatgaaatctgtattttctgtttggtaaattagaccaatttgaactaaatcatgcctacatctctagctttgttttccaatt

SEQ ID NO: 140701 - DNA, 1057 bp, Homo Sapiens
  misc_feature (163)..(163): n is a, c, g, or t
ggtcccggcaaggggttttttctcccttgtgaatggccaggggctttccggccaccggcgccctgggccctggccgggtgtagtcgggccctcttttggtaccttgaagcttcgatgacgtttcaggggttgcgcctgcttttttccaccaagccccggcttntgcaaagaagagctcgtgtacgtcgcggatgcggctctccaggcgcagcagttcgcgtgggcgggctctcgatctcgttgagggcggccccgcgcgcctttcacgtcggccagcaagttctcggaaaacacgtcccacttaccctgctcgaacatgtcctcgatctggtcgcccgagacttccttgcccatgatctccagctggcgctggatgcggatcttgcagttgtcgcgctgcttcatctcggcctggttgtagtcgtgcatggcgcgctggaaggtgagggtgagcgcgttgtactgcgcccgcgaaatgcgcgccactgccgagtgcgggccgtgctgggcctcagccgcctcgctcagctccttcatggcgcgcagcttgcagtggatgacctcgccccgggccttgatggccttggcgatggagttggtgtcgcgcttgatgctgctgaggcgccgcatggacgtgaggaagcgggcgttctgctttcccagccgcttcacgtcggccaccagcagctggttttcatcctgaatgtcccggatgtctcggtacagggactccaggatgtggtccgtctcgaacacgatgtcctcgtggggcgagtcaaactcatcgtccccgtctgggaactgctggtcatattgcttggacaagtccagaagttctgctagccggtctttcattttgcctggactgggagcgagagtgcgaaccgagaagcccctctcccggcagggcgcgcgtcccctgtgggcgcagcgatggagaaggaaacctgttgcgcgactcccggcggctccgctcccggcgcctcctgcggccgaggctgagttcctccacggccgcccgagctccgcgccgccgcgatcccgggaattccggacc

SEQ ID NO: 140702 - DNA, 859 bp, Homo Sapiens
  misc_feature (240)..(303): n is a, c, g, or t
  misc_feature (596)..(596): n is a, c, g, or t
actttacacagtagtgaacaggaatcacagcatacaggttactgtgtttccatgaaaagcaaggataatattgaacgaaattcattatcaattagaatttattttccttctagaaaaacgattaggcttcatttgtcttttcttcagacacttgctcactactctcgcctactttttgtcctaagctgcttgcttgactttcagccctgtcatccttcatcagaccttcagtttttgctnnnnnnnnnnnnnnnnnnnnnnnnnnnnnnnnnnnnnnnnnnnnnnnnnnnnnnnnnnnnnnnncttcctcatccccttgtggtttttcacattctttcttcctgcaattcttccatctctttatcctcctcctcttcctctttttcactgtcttcatcctcttcccttgtcaaactctctctctcgtccgagtcgccctgtgagggagacgccctggcacccacgtgctcattcgagaggatttcaggccctgcctcttcctgctctgtgctgtcacgttcttccgcttctctcttacagtaggagtagcgatgattcatgtgttgagaataagacccagagtgtgagaagcgctntccacatttgtcacattgatagggcttttctccagaatgtaatcgcatgtgttcaatcaaatgatgtttgtgtttaaatgcctttttacagattccacactcatgagggtctttaccctggtgttcatatttatgtctcaataatgaactactcttttggaatatcttgtcacacaaatcacaagcatacatttcaatttctgtcttccgcattttctttttgggcgggtagaaatagagtcattctgatcctctacattgat

SEQ ID NO: 140703 - DNA, 468 bp, Homo Sapiens
ctgtatgatgctggattggaggttttactgtgaacacatgatttttcaatatatattgttagacaaagaaatataactgtaaatgtgtgtgtaaggatacatataaagatgtgctgtatatgtgtatgaatgtataaatattccctaactgcatccactcagacagcctgggctatggatatctcaatagcagtgagcatacctagtgcttaataccatttttccgctataaggaatcagggctcctgaataaatgattacatccaaggctggagcaggatgagtatgaaacatctaattgccctagtaactaggggagtgctgaaagaatgatggggatgtgtcaaaaggcctcagaatggtaacctgttaatgttgaatctggattatgtgtatatggtatttaaagctcttttaattattctgtattaaaaaatattttacaataaaatgataacagaatctaaa

SEQ ID NO: 140704 - DNA, 536 bp, Homo Sapiens
ttttttttggaatacctgctcgactttattattttcctttttgtgttaattgtgtatcctgcactttctcaccgtgtgcccccccgccagtggacactcttggtaagtctaccatcccaaatctctggtggctgctcacggtgtggtccttgctgtgggctttccgtggttgtccagacctctgctagctgcccaggtttttctaccagctcaaaacaatcaactgtgcctaccttattttccaccaactttaggaaaattgtgtgtgccgttgtgttttaattgttttcttttttggatgtttagccatttacgatgttagcacaacactctgagagcctttgaatcatcgtaattcaatattagactcatggaaaaaagaaatacagagtgacttaaactgtcatttccacagtcaataagcatttttgcatacatatatacctgcgtatgtatgtatgtatatatttatgccacaaacaaaacagagctgcaagcctcaaaataattctcaaatcagatttggttgtgttaag

SEQ ID NO: 140705 - DNA, 306 bp, Homo Sapiens
tttgggtgtttttgacatgttagcaactgtgccaagcgcactggacatcttagcttttccattttcacagggatgctatgaggattgtctgcagtttacagaagaggaaactgagcctcacagagttcatcatttatggttggaatggactaccttcctgtcatcttcaaagacccctttctcttctttgttgtttgcccctgttgggtagcatggcctcttccgtgagctcctgaaaaagcaggggaagaacgcagacagctcccttttcagccctgggcgcagtacctgtctaagacattacgt

SEQ ID NO: 140706 - DNA, 527 bp, Homo Sapiens
aaaaggaatgtaaaaataattttaatgcattttatttaatccaatacattaaaaatgttacctaacatgcaaacaatatacaaattattttatacgacgtctttggaatcctgtattttacacgtaaagcgcatctcactccggactagccaggtttcaagcacgtgatagccgcacaaggctggaacccaggcctggggaattaattcttgtcctcggtgctcaaaccattcttcccttcaagcctggcctaatccccagtctctctcatctcttcgaatacgctccgcggttatgcccctcacctcactgcactgcaaatatttcgtccactgagtatttgctgatcgtcactcagtgccgggtgacccagcttgaccagcacccgcagccgccctgccactgttgggccgggtatggtgtgtctggcttccctctgttctgggccggctccgaaacgcgctcaagagaaatcggaatcagacacggggcagttcagctttggaaatgaggagctcgaggctcct

SEQ ID NO: 140707 - DNA, 574 bp, Homo Sapiens
tttttttagcaacttaaaaacaacaagcatttattatttcgtggttgctgcaggccaggtgtctaggagaagcttaaccgagtggttctggctcaggatcttctcaggcagttgcaggcaagaggtcagccagggttgccatcatctgaaggctctactggggctggaggattcacttcctggtcaaatggctcactcaaatggctattggcaggaggcctcagtttcttgccatgtggccctctccacaggattgcttgggtgtccttacaacatggcagccggcttcactcagaatgagtgtccaagagagagcaagatggaagccaccatgtcttctacgacttaacctcagaagtaatacacatcacttctgctatgttccattcattagaagcaagtcactctgtgtagcccacacttaagaggagaggaactgggttcctcttgaaggaaagagtataaaaggagtatcaaagaatttgtgggcctagtttaaaaccaccacagcacagaactgaatagtgcagtgttcccaagtgtttggaggcttggtagtcaagggacagggtct

SEQ ID NO: 140708 - DNA, 381 bp, Homo Sapiens
ttttttggaggctgacttttgtatttcattataaagtcagggagaagcctaaagggcctggaggctctcaccatccaattccatcagtccttccctctggtcattcagatcacacccctgctccagcacctgttatagctcctggctcagtaaaccaacttccaacctcacttttctcattatcttttgtttaccaggtaggaaaagtgtcttcatggtcacattctctaaggattagatcagagaccacatcctttggtttgcatttccctggaaataacataatagttcaaaggtcagcagtccagagtggatacagttatctctgcccttctcaacatgtggctttgagctctgggtcctcaggtggctgctccagct

SEQ ID NO: 140709 - DNA, 457 bp, Homo Sapiens
tttgctttccagccaatcagcaaatatttattgggcatttgtctatttggggcaagtcagagtacagagggcatggcttagaaaggaatagctcagacggagtttgtgattaattacgggaatgggtgccaagtgagagatacaaagggtggaagagcaggagcgcctccatccaggggcgtggaggaggctctgtggatctcagggccatctcagctggctccaaacagacaaaaagactccttcagtgttcttctggtaatcacagaagctctgcgctgggaaccagtaccctaacagaggagactggaagagcaggagataagaacttgggatttctggtgaccaggaggatcacaggccttgggaaagccagtggctgcttcattatttccatcccgggtcaagttcggcctccaaaaggtgagatggcccagccagatctggctctgtcctt

SEQ ID NO: 140710 - DNA, 631 bp, Homo Sapiens
  misc_feature (15)..(15): n is a, c, g, or t
  misc_feature (37)..(37): n is a, c, g, or t
tcgctgagttaaganagccatggagtagtcatttccntgagcagccacttctcggatcagatctttagttccatttttcaacaatttctcttcaatggaattgccactcacaagcctgtatatgtggatgtctttgcatctcccgatcctatcgcaccactcctgagctttggcatccatcactggattcaggtcattgtcataaaacacgacggtgtccgcctctacaaggtttatacctgtggtacggctgtgagtggagagaatggcacaaaaaatccgcctgtctctgttgaaactcctcatcagttcctgccgttgctcactgctggcattttcatcgattcttacataggtgaggtaatggaagttcaagaacatctctaaaatgtccaacataagaatcatctgtgataaaatcagcacccgacgtccttcagatttcaatttctgaagcaagatagctaaagcttccaacttccctgagtcgaactgcaccagcctcagctcagggaactgcagcaggcgtggagccgtggtctgccgcagctgctggaagtacggcgcagcgtgctctctcaggccctgcatcaagatcctcattctgtggctgtacaggggtggcggccgc

SEQ ID NO: 140711 - DNA, 587 bp, Homo Sapiens
ttttgcagggttgtatacggcaactactttattattttcaaatgcaaactctttgcatttagtttgctattttacaattttacaaactaggtataaaagaccataaataaatgacataagttatgtgtacctaaagttcatgaagggaagaaaaataccttgacaaattaaaacaaaatagaaaatctatgtctaactccagaaatcactcaaagtttggaacgtgtgaaccgaacaatgttctgttaatttcttattcagtatgaactaaattataatatgccttatacattctaatttgaaccacagtccttgcatattccaacatacttagagtgatacaaaaaataaacgcactcttcagtgtgtatcaatgcttgatgttgtttggagaatgttaaataagtgaaaatattgcttctagaactttcctttatgggtcagaatttaagtgtcttcagacaaatattgaggctatacgggtgtacggattaatacacatatccttcacagattgaatacaagaggtctcagaatgcacacaccagcagtgtagcgagcacaacctttctttaaaataagaacgt

SEQ ID NO: 140712 - DNA, 907 bp, Homo Sapiens
ggggaaaaaggcccaaaaaaggcatttattttaatattccaaggggttcaacccgggggctttatttaaaaggccaaaaccaaaaccaaaaattcccacagctcaagataaagagtcctatacagaaatcacaaaaaggacagaccatctaaggaaaaattaaaaagacgacacaaggacaggctgggcagcctgggtcagggctcctggctggtgacctgctttgagtaggtttcttgcaggtacttcttaaaagctgtggggtttttccagagctcggcagcatgtgtgttcaagggactatcaatgttgggttctcctagaaggctctggatggagagcagaatggtcctgacatcatacagggcagaccacttttccttcaggatgtccaggcatatgttaccctgggtgtccacgttggggtgatagcagggcgtgaggaacttcactgtgggcgcattgtaagggtagccactggggaactctagcgagagcttatacctcaggtcttcatatactgttccagctgctccatggatggtccctacccatttgaaaaggttgtctgattcagggaaggcagaaatccctttatcgccagacatcatgagggtcatcagctcctgctgtagccttttgcccaccggaccccgggcggcgcccccgctcggctcagctcctttacgggcggcggcgacgctagtggcggctgggtcgcggttttgggaagccatccgggcggcgttggcagagagacaggaactcggagaacacgactgcaactgcaggtcatgcgggtccttgagcgtcttcatctaggcccaccagggaaggagtctggcagcgcccctaccctcccattctccttcgggagagtctcaaagagcggtctgagctcctggcc

SEQ ID NO: 140713 - DNA, 845 bp, Homo Sapiens
gattaatttaaatataccaagggggtccaacccggaggcctttattttaaaaggggcaaagccccaaacccaaaaattccccccaggttcaaggataaaagagtccctatcccagaaatccccaaaaaaggcccagtccctttaagggaaaaaattaaaaagacggcccaagggccaggctgggcagcctgggtcaggggttcctggctggttgaccctgctttgagttaaggtttctttgccaggtatttcttaaaagctgtgggggtttttccaggaagctcggcagcatgtgtgttcaaggggactatccaatgtggggttctcctagaaggctctggatggagagcagaatggtcctgacatccatacaggggcagaccacttttccttcaggatgtccaggcatatgttaccctgggtgtccacgttggggtgatagcagggcgtgaggaacttcactgtgggcgcattgtaagggtagccactggggaactctagcgagagcttatacctcaggtcttcatatactgttccagctgctccatggatggtccctacccatttgaaaaggttgtctgattcagggaaggcagaaatccctttatcgccagacatcatgagggtcatcagctcctgctgtagccttttgcccaccggaccccgggcggcgcccccgctcggctcagctcctttacgggcggcggcgacgctagtggcggctgggtcgcggttttgggaagccatccgggcggcgttggcagagagacaggaactcggagaacacgactgcaactgcaggactgcgggcccgcccgcccgcgtttgaattgtaaccctctccc

SEQ ID NO: 140714 - DNA, 916 bp, Homo Sapiens
  misc_feature (61)..(61): n is a, c, g, or t
gcgtgacttgtccaccagccgggctcagttgcgcttctcacctcctcgcatctcgaccctnttgtaaaaaacagggcgccaaaaaaaggcccacttttatttataaatttcccagagggggttcccacccggagcgcctataactttaatatggcccaaaaccccaaaccccaagaattcccccccaggctccagggttaaaaggattccctatccccggaaatccacaaacaagggcccggcccattttaagggaaaaatttaaaaaacggcggcccccaaggacccagggctggggcaggcctggggtccagggcttccttgggttgggggcccctgctttgaatagggttttcttccagggtagttcttaaaaagctggggggtttttcccagagctcgccagcatgtgtgttcaagggcctatcaatgttgggttctcctagaaggctctggagggagagcagaatggtcctgacatcatacagggccagaccccttttcccttcaggatgtccagggcatatgttaccctgggtgtccacgttggggtgatagcagggcgtgaggaacttcactgtgggcgcattgtaagggtagccactggggaactctagcgagagcttatacctcaggtcttcatatactgttccagctgctccatggatggtccctacccatttgaaaaggttgtctgattcagggaaggcagaaatccctttatcgccagacatcatgagggtcatcagctcctgctgtagccttttgcccaccggaccccgggcggcgcccccgctcggctcagctcctttacgggcggcggcgacgctagtggcggctgggtcgcggttttgggaagccatccgggcggcgttggcagagagacaggaactcggagaacacgactgcaactccc

SEQ ID NO: 140715 - DNA, 533 bp, Homo Sapiens
gcggccgccgcgtagccctcccggtggcgctcggagctccgcctcccgaggggccccgagctcattggcaggccgccccctgcacgcgctaattggccggctcaacgcccgcgctgattggctccggccgccagggggcgggtaccgcttcgctccgcccctcggggccctagcgtctgagttgctttcctggttcgggtctgccctcagatctcaaatcgaattcgctctgcgtatcgaatagggggaggtaaaagagactgaacacagttcaaacctagacataatgctaaggccgcaaaagccgaaggaaacccgggctaccgctgcaccttgctgcatgcctctttgggactccgtttctcctttaaaaggaggcggggtcggggaggggcgacggacggttgccctggaaattttggacattcccaaagcgccaattttcatggtggagatccaccagtgtccccttcgcttctccaaactctggttgctggaaggtccgcccactacggaacctgcatcctagagtt

SEQ ID NO: 140716 - DNA, 582 bp, Homo Sapiens
  misc_feature (427)..(488): n is a, c, g, or t
aagccaattcatttttctaacagttgaaattcttttagtactaaagaaatagatactgctcttttatggctttagtgtttatatacctgtttatatgcatacattaacaaaattagtaacagcagtgcttagaatttcaatgctgtgtcatactgatgattaactccatactcctagtggtgatgtggtccagatactggaatggaagtggcaggatgtggagtccagacatagtctaccactcatgctacttactagtaatattaaggtgttaaacttaggaatttgtcacatgtaggttcctgaggagatctaaaagttaatacaaaaccaagctgtttactgattttcatgagaacatttaagttagtttaggtctacctgatttattttaaaagaaggcagagggctggacgcagtggcttannnnnnnnnnnnnnnnnnnnnnnnnnnnnnnnnnnnnnnnnnnnnnnnnnnnnnnnnnnnnnactatcctggctaacactgtgaaaacccatctctactgaaaatacaaaaaattagctgggcgtggtggcagacgcctgtagtcctagctgctac

SEQ ID NO: 140717 - DNA, 529 bp, Homo Sapiens
ctttctttctttctcctttctcattgctgtctggcttcttttcacctttgtctgttgatttatttttttgctcactgctttcctgttgaacatccttatttagcagaattaaattattatgctcttttgtgtaatttttaatttcttcgactggacaggggaggtcgctgaactcttcagactttggggctgtttccagtccttcacctccagagtcagctgtagatttttctttatcagccatgtcctctgaagttctttctttgtcagtactagtatcagtggttggctgagatggaagtttttttgacgctctctcactggtcttggcatttgatgtttctgttgaagccctagcagcactggcttcttggttaagagaagttatggtttccaatatcgacatggcatcattggctacattagcactgggcccaggagtaggaacaccttgtgtaataagggaagtgtctggtttctcatcatcgggagctgtgttgccacttccttcctctttgtgatttagcgt

SEQ ID NO: 140718 - DNA, 500 bp, Homo Sapiens
  misc_feature (159)..(377): n is a, c, g, or t
tttgttcttttttcatgtattcactttgcaaatagttattaagctcagctgcatgctagactctgtgctgtctccagggacacagaggtggtcctggtcctggccctcaaggagtgccgaggccatgggtggggcagcaggtgtaggtggtagttgaannnnnnnnnnnnnnnnnnnnnnnnnnnnnnnnnnnnnnnnnnnnnnnnnnnnnnnnnnnnnnnnnnnnnnnnnnnnnnnnnnnnnnnnnnnnnnnnnnnnnnnnnnnnnnnnnnnnnnnnnnnnnnnnnnnnnnnnnnnnnnnnnnnnnnnnnnnnnnnnnnnnnnnnnnnnnnnnnnnnnnnnnnnnnnnnnnnnnnnnnnnnnnnnnnnnnnnnnnngagtggcccatccaggggagtatgatagagggccgcagagggggttatagggggcaatcactgaatcattgaatttaggctctgagaacccgacaaacatggtggcccaggcagggcagggcg

SEQ ID NO: 140719 - DNA, 1131 bp, Homo Sapiens
taccatcgtgggtcctccttccagcattattgtcgccggcaatcctctgttgtagcccactgcaggcggttctggactactgctccggtccgtgcatgccgagattcttagaattgtgaccctcctctcctttatgcgagggccctcgttcaggcccacgaaaacaacccttgggaacgccgagtatctacgtggcacgctccaaggggtggcgaacatccatgcggcgcacctccccgccattattgtgtctatccaagtggttaatctttgtaatgtttatctactttcacgagtctacattattctgggaaaggtctttattgtcagtttagaatgcaacatcttaaggttacatgctttgagtcaacaaacaccgaagttttctctatgattctattcattggttcaaaaaatgcattgacaagggttcaaactattcatgaaatgcagctacagtcgcatgcaaaggaggatcctggttgtattcaaggttccttagtgaaatggtgctaagtattggaaaataatagtaaaaatgcatggtgcaaaaagctctctggctctctttcatggttacatgggagtggactgcttcttcagtcactgcagcattgaaaaaactcttttaagttagcccttaaactgcctggccaggtgttgcttatgactctcctccacctgtttgaacttggactccagtcctttcatttggttctccatcttctccacgtactgcaagtctctctgggtccgcctgtccaagacctctatggattgagacatgttctgcaccttttccagtagctgcctcagcttttttgtgcgggcatcccgtgaacacatggtctggtgtggggcgaccactgtgcagatacacctggccttgctgtcctgggcagagctgtacacctgccagctctcctcagggttggtgggcagcacgccggtgctgcggtccagcgtcccgccgccggccgccgagagcttggtggtgttgaggcccaccagcgagggcagcgtctgggacatccagttagtgatcatggccatggtgctcagcacgaccccgatcttgagcagcggcaccgacatcgcgcctcgagctgcctccagcgcccgctccgagct

SEQ ID NO: 140720 - DNA, 462 bp, Homo Sapiens
ttttttcagctctgtaatttattaaaagaaaggatcttcctacaaggcagaggcctgaggataacaggattcttttaaagtttggaaacaccctgtcccctcacttggggagggagacaaagcaggaatccatgggggagctggttgtgggctgagaaaccaggcaagtgtgaattctaatcctggtgctgacattgacttcctcttaatcctcagagtcactttgtttctgagtttccatctatgcaacaaggttaataggactcatcaatctcccaggagggtgttcacgtctgctcagcatttgtaaggagctaaagtctcacttctgagagcttgtggcagttttacatggggggtacccttattatcatcagagactaatcgcttctacactccccttgaaaagtaatgagacttgcttttattttgtgtaggtcttccatacgactttttctttca

SEQ ID NO: 140721 - DNA, 500 bp, Homo Sapiens
  misc_feature (146)..(146): n is a, c, g, or t
tttgggagctgtcctcatttattcaaagtgctgtcctgagagagaggacctggatgcctgtgactaagggcagtattgggacacgtggttggaagctccagtaaaacagatgtcaccttgatctaatgaaaagcctctgccatggnaacatgttgggtgagttctctgtcaccagagtgttcagcagacccttctgtgagaagcagagaggggaggtggactaggcgacttctctaaccttgagactcttggaatccacactcagcttcctgatgatccaggcctgtcctcatggacccttaaccccttggtccttggctctccaaggtatcgatcccaccattgctttcctctgccaatccagggtcaagcccctcttgcattttctgaagttctgagccttttctttatcacctcattcaagtcgctagtgaaagtatggttcactcccctgccgtatgcttgcactacagtttacaaaatgctttcacacccatcac

SEQ ID NO: 140722 - DNA, 475 bp, Homo Sapiens
ttttcttttttacaaactatctcccgccctccccagccccacccacacacccattatccagtatactgaatgggagttgtaactctttaggaagacagctaattgatttacagtactctaaaaccaaccctgaaaactgataatctcattcacttactataacttcagtgctgtagttgacagaaaagaaaaagttaccttaaggctcaagggaaagtaacttattaaattgtgaatgcagcattatttactctcccatccattggaaactagcaaaatgcattctggatcaataatacaaaccttctaacattagcaaagatttctactcttcttacacagagttagaacaatattcataagcaattatctaagggagcctgagaaactatgatccacatcacacaaagatttcatgtgtttcatgatcaaaaagtgctttatctttgagaaatgtcagggttacaatggaaat

SEQ ID NO: 140723 - DNA, 413 bp, Homo Sapiens
ttagctatatgtacactttatttaaccctcataacaactctaagagagaaataccattattgccccattttatagattttgaagaaatggaggatccacagaattcaatcacttgtccaagatcacaggttctggtagatggtagagccactggcctgagtcctaagttagacctcctctctggactcctaagaggtagctgcattttctatacctgagtggctgatggtgaaggcagcagggccagcatggcagagcattgccagcaactctgtgccaggaggcttcataccctcttcctccctcacttagcacctgaaaacctggaaattcccagaagccatataactgtggattctgctgtggttgataaagacttcttttaagtgagtcatttccccgatcggctcagg

SEQ ID NO: 140724 - DNA, 504 bp, Homo Sapiens
tttgttgacatgttgaatattattaacccattttacagaggggaagcaaggctcagagaaagtttaaaagggacccaaggtcaggggcagaaatgggaggcagaggggaggcacccatctcacaccccacccctagggactaaagccgtagccaacagagcagtagtaatccgcgtcgtcttcaggctgcacgggactaatggtgaggacacaggcattgtgggcctcatccttggctgccgagaatcgatcggggatgtcagcaggccggtggtgatcctcctccgagcggtagtagaggagatatcgaggggcactgcctgcccgctgctggtaccaggacacaccgtagtccctgatggtgacgtgctgggggctgagcgtgcaggagagttgagccacttggcctgggaagaccagcagtgcatccagctgggccaggactgtctgggaaactgacaggaaggtccccatcataaggaagctgaggcaccggcaggccat

SEQ ID NO: 140725 - DNA, 1343 bp, Homo Sapiens
  misc_feature (774)..(787): n is a, c, g, or t
  misc_feature (1249)..(1249): n is a, c, g, or t
catccatcttttccccgaaaggttcttaccatcctgccaataatcctgggagtccctactaaccatgtgtgatgagtctcataataaagacatgtaggaatggaagatagttgccatggataaccccatcggtatatggctttcacacatggttttaccaagctgagtatgccacagagactgaagctctgggaatgctgcacacagcttacacaatgttggaaccgtcattgaccacccctagccccggaggaattgcctcttctgctccccctgctaaatggccctctcctccgactccatgctatgaaacacagcacccttcccttgaactgctacacatcacccccctagatcgaaagtttgggctcatctccccttggtggccaagacctccatatgagctgcaggcaccaaggagggccaagaactcgattcagatgaagtctaagatcccggttgaccagatttgtgaagaatgacggaagaggtgactgcactagcttgaaatctggctgtacttctagctaaccggtgcaaggggccacacttgttttcactgtcacagcataaaatattatcaacccgggcacgaggtaagaatgtctctggcaaggaactagccgtctggatactgtatttctaatacatttactctgacattcttttgaggaatacatggagaactgacaattggttatgttagtttacatgttcccttgttcttattacattaaacgtatctgtaagaagggtttgcttagcatccccagnnnnnnnnnnnnnngtgttcacattctttaggtctgacccgtggtaaggagagggaggattagagaacatctactactgaccatatggaagttttggatgatataaattcagagattcagaccagctgaatcaaattaaaatgtacatgtaaaaaatgtgttagataatgggaggcaggacagagagagagccaggtgagtggggagtcacgctgaggcaggacacagaggcaatcagactagcatgtggcgtttcctatggagggcaagatggtcagaacgggagaagctgcggtcacagtccgggcactggaaaggtttgattccagtatgttttcggaaatgtctttttagttcatcagaccgagcaaactttcatgtgcacccttcccatgttcatttgtagggctattctcctgtgtgtgctcttctgtgtgctttcaagtgggagcttttagtgtacactttgttgcatncatcataatcacatctgtgtatcctacgctttctttgagtatctcgagattccacaggtaaaggtctcttaccaggctgcacgatgaccgaagg

SEQ ID NO: 140726 - DNA, 463 bp, Homo Sapiens
attattattttgtttttatttcaatagtttttggggtacatgattattgcttacatggataagttctttagcggtgatttatgagatttgagtgtaccattacctgaacagtgtacattgcatccaatgtagacactaagttttctggttgtttatgatgcagcaacacagataattgatgcatttattatggcctaccagcactttcatgatctggcccccacctactgtccgtcctctcctccctcctgctccctctcacctctgcccactgtcttcaaacaatccaagctccgcctggaacatcttccaccaaatagccacaagactcactcattacagcccaaatatggcactgactatacctttatcctgcctccctcttctccgcagcacataccaccaccaaacatatgcactggtttgctttgtgtatctagtaatttttattgaatgctggaca

SEQ ID NO: 140727 - DNA, 513 bp, Homo Sapiens
tattatctattatggaaagcttgtagtagttaataggtttggctatagtcctttgtggcttctccaatatacgcatttgaaagagttttcttctccactcaccaatgctattattatggtcacatttagggtcctttaagggcactattactctcccaattggataaggctcttccccttccctggcactgtatgagacacaaagttcatctccaaatttctttgctgcctacagggccaactgtttctcagcagcagttagggtttgatttaagagtaacctaacatccttccagcagagtttaaatactctatatgtgagtgaagttgggactttcctaaagcaaacttcagggtctgacgattaaaagagatccaggctgcactcgaggaaagtgcaggcttgaagatgggttgttaagtatctggaaagagaggggagaaaaggcataccttagtccacttcctccttttggagtgacccagggtacagagaaaggtagaaagggcgtc

SEQ ID NO: 140728 - DNA, 439 bp, Homo Sapiens
  misc_feature (149)..(373): n is a, c, g, or t
  misc_feature (416)..(416): n is a, c, g, or t
ttgcaattctgtccattttatttttgcacaggaaaaactagtgagacaagattcaaacagtctctctctgtgaatcatctgtcagtggtgatgatcacgttaagtttcagaagtgtagtacatgatactcttaacaatttgtctaaagnnnnnnnnnnnnnnnnnnnnnnnnnnnnnnnnnnnnnnnnnnnnnnnnnnnnnnnnnnnnnnnnnnnnnnnnnnnnnnnnnnnnnnnnnnnnnnnnnnnnnnnnnnnnnnnnnnnnnnnnnnnnnnnnnnnnnnnnnnnnnnnnnnnnnnnnnnnnnnnnnnnnnnnnnnnnnnnnnnnnnnnnnnnnnnnnnnnnnnnnnnnnnnnnnnnnnnnnnnnnnnnnnttctaaaggttcatgctgtggtccaaatgtgtcctcccccaanttcatatgttgaaacctattccc

SEQ ID NO: 140729 - DNA, 400 bp, Homo Sapiens
aacttaacagtcattattttatttaatcatcgcaagaatcctgatattactatcctaagtccatagaaagagagactgagatacatggaggctaagaaccttgtctgggatcactaagctgagtgagacacctagcactcgaactcaggcaggctgcttgcaggagctgtgcccttatcctacgtttcctgcgaaggaaaggagcttacctgctctgccaggcaactttgaaacatgtcctctagcatcgttctacccaccttagcgctttaaatagatggccaccactaaggccctcctttagagaaattctagaatgctcttgaaaatgagccaaacaaataaaagaagtatgggaagttgggagaagggaggaatcctcaggctcttcagaggaaga

SEQ ID NO: 140730 - DNA, 752 bp, Homo Sapiens
tgccgtgggcggctggcccagctggaggaagcggcggtggcggccacgatgagtgcgggcgacgcagtgtgcaccggctggctcgttaagtcgccccccgagaggaagctacagcgctacgcctggcgcaagcgctggtttgtcctccggcgaggccgcatgagcggcaaccccgatgtcttggagtactacaggaacaagcactccagcaagcccatccgggtgatagacctcagcgagtgtgcagtgtggaagcatgtgggccccagctttgttcggaaggaatttcagaataatttcgtgttcattgtcaagactacttcccgtacattctacctggtggccaaaactgagcaagacatgcaggtgtgggtgcacagcatcagtcaggtctgcaaccttggccacctggaggatggtgcagcagattccatggagagcctctcttacacgcgctcctccctgcagccatcctctgccagctcccttcttaccgcccatgctgccagctcctctttgccaagagatgacccaaacactaatgccgtagccactgaggaaaccagaagtgagtcagagcttctcttccttccagattatctggttttgtccaactgcgagactggaagactgcaccataccagtctacccaccagatgtgatagctggtcaaactcagaccgttcattggaacaggcttcatttgatgatgtttttgttgactgcctgcagccgctcccacttcagattgg

SEQ ID NO: 140731 - DNA, 3911 bp, Homo Sapiens
  misc_feature (289)..(289): n is a, c, g, or t
tccgagagggttggacacacgggccaatgggacacgaagttccttcccagtttccaattgcccttggagggttccaggaacccccaaaagcccattccaaggaaccagagtgacttggcaggggcccggggccctgagcgggagccatggccagggctggacgtttcaccttcctcatcaggggacagcttcagttccgggggctcttccaagaattttctggatgggggtagaaatgcaacctaaccctctgggtaaatccagccaaggaaaaagaccttccagaaancccaggcaagggctcactggcttcttgtgacctgcgagaagatctggccacgtccaggtcactccggtagcagcgtctgccctcagatgcaaggaaatcgtccagcccacgccctgatttgctgagcctgttaaggctgaacaggagagccctaggtgacgggcctagaaacttccgtaggaagccccatgggcagcttgggtggcatcactgggggacaggtgtgtctgccgtctgtttccctgggccaagcccaggcccaggctgcccacgccgtcctccgtgcctgtcccagagtgccgtggatgctgttgggcattaggagtagatggtgatcacctcccggccgccacccctgaccaggaggactctgttcagcccctcggtcaggacttcaagaaactccatgtagttctcgtctccctgccggtttttgggaggacctggcatgttgagcaggaccagctgcgcatcctgggacttgttgaggacgacgccattgagcttcacagccgtgtgcatccgcctgacgttggactggtccggcttcatgctgaagaggtctttgaaaccggataggctggtgtctctgctcctgtacttctcagcgatcagcttctccctggtccaggtcatctgcaccttgtctggcgtaggcggcgcttgggtcctggctgccgccgcggtgtgggacgcggtgttcctgtcgtggatcagctgggcctctcgctcctgctcgttcttggacagctgcatctgcttcagcatctgcgacctctgctccatcattagtgtcctctcgtaggtgaaagcagatatgtcgttttcaaccatctccaccacctccacctcggcgctgatgcgcaagtgatacaagaacatctgcaggtccttcttcatctggatgctgttgtcgtccacctgggccacggtgaagatgcgcatccggcacttcctccacaccttgtgctggcgcagcaggaagggcagcagcatgagcatgccaccgtcgtgcacgatccaccacacgtctatgtggccctgcaggtagcgctcgtggttgctggggtagaaggcgatgttcttgggcacgagcagggccaggtgggcagccgtagtgcagcgcacggtgtcaatgaaggtcttccaggcacgggggtcctcgctctgtcgccagccgtagggccagcccagcaccacggagttatgccgcatgcctcccaggccacaggactggatgaggtgggccagcccctcccgcaccttgctggccaccaccacctggcagaagcccttcaccttctcaatttccatcatgttcttgatggtctgctcggcggcctgagcctcgccatagctctccaagaagctcccctggatgacagaaccaacaatggtcaggcccttgccagccttgagctgggaggcgaaggtgaggagccgcgggtacttcacgtgcaggtcctcgtccagcttcagcagcaccagcagctgcggccgccagttcttggtgtgaggaggcccctcctccagccgcaacagcgcgtagcgggcagcgctcagggacaggcctcggatcccgtcaccccactccttctcagccccttggtactcgatgtatttgtagatcatgccggcgatgagcatggccaccagggcatagtaccaggaggagacaaacataagggccaggcagagactcatgcccaggaaggacagcgcccagtgatagtacttgaaccggggccgccagttgggggtcctcaggagtgtctgcaccgcacaggcgaggttcacgaacaggtagcacatcagaaagaacatggataagatgggggccaccatgtcgagggaggcgatgaggatgcccagctcggcgatgagtgccgtcaggaggagtgcccatgtgggttcaccattcaccttcccgtggccaaacacccggaggaaggggatgatgttgtccttggcaatggcctgcaataggcgtggtgcccctgtgaggctctggaggccagcgccacacgttgaaaagaaggagccgatgacgatgacccagggtgaaggccaggccagtgtgcccaccaccaagttcctgctgacaccatcgccatacttgtcccggagaaccacaccctcaatgcaggcaccaaagagaaccacactgctgaagtacacgagggaagttgtaatgatggccagaatggtccccacagggatagacttctgggcgtcacgaaggtccccagagcggtttgagccagccatgatgcctgttacagaagggaagaagatgccgaccagcacggtgaaggatgtggcgatgtcagcgaccacgtacagaggcaggctctccttcaggctcggggcatctgcggagggcagcccatgcttctccacgatgtcacccttctccaggtaggcgctccacaggttttcctggagcacaccagcagctgccccggggatgccagggatctcggtcacattgttgagcatgaagtaggggtcacaggagtcggtcgtaaggttggggctgtggcagaagaaactccatagctgggtggccactgtctcattgtccactacagctgtcttggcacagatgtcaaactggtcccgggacagggtcctgttgcccagcatgcataccggaaacacgggagggtcaaatatagactttatgcccccagcatagatggagaggatggagatgatcacacaggccaggaagagcgaggcaaatttgttcacatacttgacccccacaaacaccaccagggtcatgaaggtcaggaaaatggtcccatacacacgcatattgttcaaagtggcattcgacgtgtcatgagcacccgatgggtaaaaaatggcagctggtggggcaatgtaggtcagcaagatctcgatggcccccaggatgtacatggctgctgcgaatgttgttcccaggtagaagcacaggcccacagcacctccaaattctggccccagtgaacgagagatcatgaaataggagcccccagctggaaccacaccgttggtggcgatggcactcatggagatggccgtcagcagggtacaacagcagcagataagcacgatgaggagggcctgtagcacacctgctgtgcccaccatccaggtcagccgcaggaagaggataaccccaaagatattctgcaggcagggcaggtacacccccatgagggtgcccatgctgggtgcctcggctgccctccggcgggtgccctccccactctcggcctcctcatgctctttggcgccctgggtgaggttggtgtagctgacgagctttcccagaagagacgatacctttgggcggatgtccagctcttcctcaaacagtgccaggttcctgtcatagtagtcaattcctctggaagcctccaagggggaaagaaaagggctgctctctctgtggttgccatgtccgtccgagtcatccagctcggcgcgctccccgtagtccacccaactgagcccctcgaggttgtcatagtcgccgcgcctcggcccgtccactggcaccacggtgaagtgaggcatcgtgcgggctcggccccgccgcacccgccgtcatcccgggaattccggaccg

SEQ ID NO: 140732 - DNA, 543 bp, Homo Sapiens
ttgcatttcatagatttaattttattagccaatgcaaatgatctgttccacaaatgtaaaacaaaaggacaagaaaatgatccctgtgtcaacatcaggatgtctgacttaaaatcccattcgaataactccctaaaaatgatcagacactgaatacattatttttctgactttgacaaaactagtctgcacaaagaagcagccccatgaggttacggataaaccaaccaccttaaaacttcagcattttcatgtcagtcacagattttcttaagggccaactcactgtttaaggactaatgtgtttggagagggaaaaaaaccacactgtgttattaagcagaatcccctttacatacagggatcggatcagtttgcccggattgtgttgcctgctttattgccctacttcaaacacggggccctgggcatcatctcgaggaagggctgattgaactgtcggcctgacacttgtcagctgtggataatacgggcttcagtccgtcatgctcacacatatatgaaccatgacagagatagact

SEQ ID NO: 140733 - DNA, 509 bp, Homo Sapiens
tttgaaaataaatcccagcttttattggtctcttacattgccaggtacttgtgctaaatgactgccatgcaccaaccatctcatttaatccaaacaacagctcattaggtaaatgtcgtcaagcctccaccttactacatgtgaaaacagaagctttataagcatgcatgtaagcttaaataacttgcccacttctaatccaagcagttctacagggtgggaggctcctcattcataaatcgcgaaggctggcctgcctgatcatctctcagtttccttcttattctcatccactttcagtcagcgaggaaaccacagagcaacccaaacagcgaattcgagtcgaggaacctgttggggccagtgcgtcccaggcgcggacagggaggggctccatgaaacgcagcaaggtttggccagagcctgccggggtcatggagcctctcccggcttcttcaggccactctaattacagagtctgtggtaggttgcgtggaggagctgtctcg

SEQ ID NO: 140734 - DNA, 469 bp, Homo Sapiens
ggttgtataattccagttatgtgaaatatacagaatagtaaatctgtaaaaacagaaagtctattgctagttgccaggaactgtggggaggagggaatgggaagttaactgcttaatggacatgaggttttattctggagtgacaaaaatgttttgaaagtaataaaggtggcagttttataacattgtaaatgtactaaatgctaccaatttgttcactttaaaatggttcattttatgtcatatgaattttacctcaatctttaaaaatatgcatttgcacccatttatagttataagaactttgataagttgctcccctcaggtctcagtgtcttcattcaaaagtgagcccttttgcttggacagtgaaaatggagaagtaagaatctttaaaatttcctccacgaaagcaacaagaacactggcaaaaatggtcagaatcaagttttccagaattctgggaatt

SEQ ID NO: 140735 - DNA, 480 bp, Homo Sapiens
tctgaagtggggggaaaagaaaaattagagttgaataccactgtaataaaattttgtgtacatatataaatctgtagaaaaaaattaacgatttcaaagttttcaggatagaaggtacttctgagaaggaataggatcaagggagaagaacatggtggggttgggggacttaaactgtcctcaaactgttcagtgtcttacatttggtgccagatttccaagttcataatgcttcattacattactttctgtacataatatatttcctgataacattttttaacgttcggccaaaaccccattaatacaaagttattagtacaaagaaaacaggtggtttctttgaaactttactttgaaggcaaattggataaaaagtcaagacccctcagtgtgttgtattcaggaaacccccctcacatgcagagacacccataggctcaaaataaaaggatggaggaagatctcctaagcaaatgg

SEQ ID NO: 140736 - DNA, 469 bp, Homo Sapiens
ctgattgatttaaaatatattcaccctccaactgttatctgttacattttttaactttttattttcttattacttcatagtggcagtatgttgttgactcagtcaccatatcagtaatagtgactctatctctccaatgtccttggacttagcaaaatttactcgttctccatttatgcgtggtcccatggccatgaatggccttgactgggttcctgttaagtctccttatgctagtctcttttcagtcttgaaagtcttagccctgcctctgaagaattaatgtggatcctttcacagctttcacctaggtcatgaggtttaaattgttggagaggcccactgtgatatgattgtaagagtcaccatgccatttttacaaccttgagttataagtttcttgtaggtgcttcactagcctcatgatatgccttgccagaagtagcgcctgagatggagatttgggtgc

SEQ ID NO: 140737 - DNA, 1026 bp, Homo Sapiens
cggcagttggaacccgtctgttcttcgctattgtctccgtaattagtagcttcaatgaagtgtaggtttacagatgatctgaagtgtcacgttggtataagaaaggaatgtcggttgatgcagtctctacataagaagcgataccttgttctatgagcagctgccatactttcagacatgtttctgacttttagataattaacgaatcctctgaagaaaaaggagcaaggccaagtacaagcaatatccaccaagccaatactgtccattgaaatatccagtacaataatcagcaaacctgacaataaggatccatttgatcaaggaaaggccaatccgcagatagcaccataccttccagctatggtattggtgatacagaaggataaaccaatccaagcccagttgaaaataaatgccatgaaaaatgccagcatgaaaatgccatcattccccactctgagctggtctgcatcactgaagtcatctcttggtggacactcttcctcctgaattctttgagatgtttctgctgctgcagctgccattgcagcagctttagccttctcagcttcatcgtatgtaggaagagaggtagcaacgctatagggaggtggcacgggataaaactcaccgtaaacttctgtatctgaagttgtaggtacttccacagtaatactactatatggtggaggggaagagtcagtttcaagtgctggtgctgaagacgcagcctgcacaatctgcggtgctgggtttgaagtaggtggctgctctatagccgatgattctgagttatcctcttcattaagaagcacctggtagcgcccagtccccggctggtggtgatccatcctgcccggctcgggatccggcttccgagagagggagtcttctccgtgctcagctcccacggccacccccgtcgacgacgtcgtcgccgcagggccccttccgcctccgttcctgcagccgcggtctcccggcggaagctcttcacttcctgtggctcccgcagcggccgca

SEQ ID NO: 140738 - DNA, 562 bp, Homo Sapiens
  misc_feature (142)..(166): n is a, c, g, or t
aagtttttcttttttgagaggctcatgaaattcaaaagggaccactagctaatttcaaccatgcttcacaaaacaataatggctattttatattgcagttaccaatgtaatgcaattagtgctttaaaataatctacactcnnnnnnnnnnnnnnnnnnnnnnnnncctttggaggaaatatgcttattcaaaagcttcttggaaaagaaaatttacctgaatatcaagtcatgactgatctcaagtgtaatgtttaaaagcttcacagacatgaatattacaatcttcaggtctcaggacttttaatctgagaaagtttagagtttggtttgttttttaaattcactttctaaccaaaacaaataatagaagtactcaaattttcactatttacaactctcagcctacaatctgaaatgacacaatacaagttctcttaaactgcagcattaaagggtaggcacaccattcttctgctgctcgattgtcatccactgaaacacacatagaaaatatttatgttagtaaaatgatcactccatgtacactacaatgacaaaa

SEQ ID NO: 140739 - DNA, 839 bp, Homo Sapiens
tttttctgagatgtgtggacactggggctgggaaatgctcaggcctccccctgcagacaaggactgggctgttaagagaggcctcttgtctttcatgacacaagccttagctcacaagacgagaagtacctagtcccagaccacctcttccatgatgacagaaacccttctaaaaactgaaatctatgtgatagaattaatgaaggtaggctaacccaaattactgctcacattttttcaaataaaagtcacacaaataccataatgttgttggttagaacattatgtttctcatatctataaataagggctagtactttttatcacccaaaagtagacaaaaaataggaaatgcattcattccaaatttagattttgataactttccaaaaggttgaagtaagtttaattgcagggacatgagtccagttgagtgtctttctgttaatctgcaataacccatctggaactgtatttacttttcttagaacagtaacttataatgttgataaactgaggtggagcctgttttagtaacatatacctgggtaaatgttctggaactgccagtgcttagtcactgctgcctacagtgtggccatcaaaggcttcttgggaaagctccctttgggtccagaagtctccccaacaaagctccagctgccctggactctacacaaagcacctgaagcctctgctgggaatggggccctgacagagctgcagtgcactctgaggcttctttaaaacacgaaggtgagtgtaaaatccaaacaggaagcgttcagctgtgcactcccaaaccaccccagcacgcccctgcagaactgctggtcctg

SEQ ID NO: 140740 - DNA, 462 bp, Homo Sapiens
tttacctcaaaacagtcatttcctacttttttctggttttctaattgtttacaaaaggaactttattttgtttttgaatcctctaatcatttttgatttccaagaactcttgtttctctgaatattgcctttttcaaaaataagctcttattcctgttttacagttaaaatatcttacatttaaagataatgattttcaaagacattttcttctcccatcattgggtccgttttctctagttttctgtttgatgattttggtatttctttcttgtgagaagctttcctcagttacagctagtaatccctcattgcctatccaggcagtgggaagactaacgtcctttttggacgttctgggtaagtggggcttcagtcttcaacacagttctccggccccaacacagttctcccgccccaggcatcttccgtccagagcaactttgttttgctctcctgaaa

SEQ ID NO: 140741 - DNA, 1360 bp, Homo Sapiens
  misc_feature (29)..(29): n is a, c, g, or t
  misc_feature (123)..(123): n is a, c, g, or t
  misc_feature (258)..(258): n is a, c, g, or t
  misc_feature (261)..(261): n is a, c, g, or t
  misc_feature (310)..(310): n is a, c, g, or t
  misc_feature (459)..(459): n is a, c, g, or t
  misc_feature (552)..(560): n is a, c, g, or t
  misc_feature (563)..(572): n is a, c, g, or t
  misc_feature (611)..(625): n is a, c, g, or t
  misc_feature (640)..(642): n is a, c, g, or t
  misc_feature (689)..(689): n is a, c, g, or t
  misc_feature (705)..(705): n is a, c, g, or t
  misc_feature (707)..(814): n is a, c, g, or t
  misc_feature (821)..(821): n is a, c, g, or t
  misc_feature (823)..(824): n is a, c, g, or t
  misc_feature (827)..(829): n is a, c, g, or t
tagaggggtggagcagcggtagcaacganttatcatgtctcccgccgcctctgcgtggatgagtgtatgtttccacacgcttggctcggaggcgtgtgagagtgtcttatttatatatataancactcctacacgcgtcgttgttctcctccactaattatgagacccagtgccagcggcggcgcgaggagacgatcatatgtattatgtggggagcgagacgcggtcgcgtcgagtgcggacgcgcttcctcctctngtngagtgttgaggcgccctccgtccggtgtgcggcttcccctccgcaacgnacgccgcgccccttctctatcgtggtgtgtgttgtactatagaggagacctccatgcgtggttgtgattcgcgccgccgcgggcgggtgtgtgttttttgttctatctgggtgtggtgggaggtatcgcacacccgcgccccacggtgntttgtgtctcccgcgcgggggtggttgtttcttctgtgagggagggagaggacagagcgaggcaaccgtcgtggttgttctatcgtgccaacnnnnnnnnncgnnnnnnnnnngcacccagggaggggtggttttataaaaaatttttgtcnnnnnnnnnnnnnnncggccccccccaagnnnctccttcttcttgttcctgcgtgggtgggcggcctggccgtagaggnggctgttccggggttngnnnnnnnnnnnnnnnnnnnnnnnnnnnnnnnnnnnnnnnnnnnnnnnnnnnnnnnnnnnnnnnnnnnnnnnnnnnnnnnnnnnnnnnnnnnnnnnnnnnnnnnnnnnngtgtttntnnttnnnggttaaatgacttactgtgtaattttatttcatattacacaaatgttaatcaaatgctgagtagacatgcagatgacaagcagtatatgacaaactctgaagaaatagttacatgtagagtttctcagatttttagtgtatctaagaattaactgaagagtttgttaagaatgcaggcttaaaggccaatccacagattataatttcatacaaacaggatggagcctaagaacctgtaaattattaaacaactgattaaaaatagagaggtttctatgaagttaggcttgtccttatttcttatttgaactggacaagtagaaggataataggtaggaccaagtgagcattatcagaatcaaagtagaggcaataacaagccaaggtgttttagcctagctaaagaagctcagactagaaaagacctccaggatcaagctgaagaatctggggtttagactcttgaaactaaggtttcagaacaggaggataataatatgatactgacttttaagttgatgagatgcattc

SEQ ID NO: 140742 - DNA, 511 bp, Homo Sapiens
tttataggttttaattttattcaaggtgacaattaggggttattaacctccctgataatctataaaaatataaacagtgttaggttttatttttaagtggagaagttctttggctaggttggattgttgagaatcacaatgaaagtaaatattagtttacctgaaatataagtttgtaatctttgaaaagatctatatttataagatcatttttaagatgagatggaaaaattaagacatcatagcaatgttgatccacagcaaatactttatcatcaatatgcaatacagatttgactttattatagcctcttctcttcaaattattataaacttcttcagggctgattttacaagtatttatccaagcataaagtggtaaagtggaggcccttagttcctgtttcctaactgtttctggaaggatgtggtaaattgaaagggcatcatgcttgattcgacatcttgccaaggctgcagccaattttatcttaaaactgttaaaaaggtt

SEQ ID NO: 140743 - DNA, 622 bp, Homo Sapiens
caatcctattatctacatactttatttgaattgtagctgttttcccagtaatgttgtttttctcgttcggtattcaatccaggatccatatgtacttgggtctttctgggttttctgttccactggtctacttgtgcatggtaccacactgttttaattatagagactttatagtatgttttaacaactggcaaggctagtcccccttataatttttcctattgtgcttctggctattcatacatgtttgtttttccatgtgaactttagtatcaacttgtctaaattcattttttaaggtacattggtattttattgatattatatgatattaactgatttagagagaactaacatctttaaaatgtggtgtcatcctatccaagaataggagatgtatttccatttattcaagtctattttgtgccttttagcagtgttttaaaattatccttgtgtaggttttgtgcatttcttgctaagcttatccctaagtatttaatttatttgctagtaaatgagatttcctctgccattatgtcttctaactggttattgctctctatataaaagctactgattttgtatgctaatatatcttgctaccttacctaattttttt

SEQ ID NO: 140744 - DNA, 538 bp, Homo Sapiens
ctgtcacatgctgtgaatttcctttacctcccgatccccaagagctcacaggatggggctccccactctgggacccaggggtgggtgggggtggaggggacaaaggcaagcaggctccatgcctggaagtgagtcgtcctcaccagcactggggtcgggcggcccgaactccaggctgtagcgcaccacgaaatagttgttccagacgtacagctggttgtcgcgagggttgtagtcaacggaggagatgaactggtaggggttggggaaggtgaggctgacaggctcctcgcggttggcattggtgttgaaggcatagtcgacgcggttgccagccgcctcgctgtcatcatccacgtacacggaacgcaggacgtacaggaccctacacaccattgaaggcgttggatgccgaacgctttgcgtaaccccgcttccacgtgcccttaaagcgcaatgtggtaagggttaactgggtcaccaaccagccgcccgtgttgccctaagtggggtaaatgaccaaagccccgtttggttc

SEQ ID NO: 140745 - DNA, 721 bp, Homo Sapiens
attttggagggaactcagagtatttgtgtgacctccaatcagcaaatggctgcttaagtctattttgagtttatatccagttagccactcgggatccatcttgaatttctagaggtgcaacttacggacttgagatcttcctcttttctcacagcttcaacccctgaagccaccaaattcaaaggtctatgagtcttctccttactgtaggtgggtgaatttgctgtttctggatatactcacgtttattccaacttctattcagtctgcagtgaggaaaataactctgactttgccttgttttctgctgcagcacaacagggcatgccaagagaactctgtagggaaggctcaaaattaaatgaattttactcaagtactgaattttcagcaagccaaagaacttcttttcagtggttttatttggtattttcaccagagctttctcacataatcgtctcctttcttttgttccctgtcgtcaaatgcatggcctctgatgctgaacattccccgggggagagacatggatgatcacaatggcccagcatgggtcttggcactcgatgtgtgaggcaagttagcaccaagctgcagggctgcaagtggggcagagcttctccaggccttcctatggggcttcatcacactctgtagcttttcctcgagttcaaatcctgtccacagacaaacttctaacaaagcttttgttgttctgatg

SEQ ID NO: 140746 - DNA, 549 bp, Homo Sapiens
ttttcgatttctgcaagccacgattagctttattatactacttgatcacaatcgtaccagaatctgatttttggtaagatttagcttctttgaaaatgtcatcatcctattcaagcagagggtcacattcccacatgaatccaaataggtcaaagggcaagatatggagcacaaatgccgggtttaaaatggatgtgcatcaatttagtgtgtcaagtgccggtgactagaagacaatcttgcacttcccagtacagagatattatttgttcctgcacatatattccaccctctgttgatattaggagcaagaaggaaagattgaatctcctttcaagatgaggttcaaagcatgatcccttctatagagtagaccacaatagtctcttctctggtggttgctcttttctggttagttgatcagatccctagggaagaagtctcaagacaattgcatttcttttggaaagaagctttcttggtcagataagtagattccagaaagtccttccttgtgctcaaagcatcactatggatcggtcagccaca

SEQ ID NO: 140747 - DNA, 606 bp, Homo Sapiens
tttttgattttttaaatctcatttatttcccattatcttgcctcatacctcttgcatttatttggttaaatttctttttgatccaaaaggaagcaatgtttacctgacaatttctactttatgccagaacaacaaatgtaccagcaattacaatatttccaagaaaagtattgtttgttttctcttcatgtctttggtgagtctctcggaattaggatcaaaaaagaacgcatgagctggtgagatgtttgttattgtcctctgtcagattttcctgtgcagcagtgtggaaagtaggtaagtagggcagtgcatacttgtccttttgccttctggacactgtacgactacctggttttcttttttcaaaggaagaatatgcattctctggaagcatggggaagatgtgaatttgcaggttttattttagaagactcatggggaggtagcagccagtcacaatgacacccacagtctcttctctggtggttgctcttttctggttagttgatcagatccctagggaagaagtctcaagacaattgcatttcttttggaaagaagctttcttggtcagataagtagattccagaaagtccttccttg

SEQ ID NO: 140748 - DNA, 739 bp, Homo Sapiens
ggtgggagagaggtatgaagtcgacggcgcgccgaattcggcacgagggtgggcaagagccacgtgggccgcctgctggcgcgccacttccgctcggtgctggaggacagcgcgctcgtgctgcaataccatgcgcggcaccactgccccgaggcgcgcgccgcacaggactgccgcgaggagctggcgcggcgcgtggccgacgtggtggcgcgggccgaagcggaggagaagaccccactcttggtgctggacgacgtggagctcatgccgcggccgctgctggacgagctgttcggcttcctgcagccgcagcgctcccaccacttccacaacgccatctacgtgctcctcagtggcgcgggtggcgccgaggtcacgcgcttcgtgctgcagaacgcgtcccgcgcgctgcccctgcgccccgacggcttccgcagtgccgaggccgcagcggcgcaggcggaagaagacctgcgcgccagcctgctggctgtgctgtcccgggagcatccgctgtggcaggccgcggccatcgtgccgtttctgctgctggacaagcgggatgtggtcagctgcttccgggacgagatggcgggtgagggcttctttcctgaccaggcccgcgcggagaacctggccgcgcagctcagcttctaccgcgtggctggccgcgagtttgccgtcaccggctgcaagcaggtggtggccacggtgaacctcctgtagtggaggcgca

SEQ ID NO: 140749 - DNA, 654 bp, Homo Sapiens
tttattgttattttcaactgttgttccaacagttgtattataaagggctagtttatttcatgcctttctaatttgacataaagtgctacatggcattggggctggtacagcctcgctcaattatgggttgaagagtacacagagactgccaggctgagggaaggtgcaagagaatagaagagatgctcacagagaaccacagaccgcacggccccagagtcaggggcagcatcagccactgtcggctgctcatttgtccagacagagcccacaagcctcagccatgctttgcttctgcaaggtgcttcttcaccttttcaataaacctgcctgaattaaagctgatgggagtttatttctccttcatcataaaagaaattcttcaccacaacaatctccaatgaattgtgggcacagaaggcagacccatccctgcttctcttccactatctcccctgtaggttgaaaaggaggaggtactgagttacctccaaatgttcctttggctctgatattctgtgactctggtttctttttggctactttgtttttggaagcatgtatcctaaggcgtccagttgaaaaaactttgtctactgtgtccagacattcctggtggtatttcagataagacactcttgggttctctgcatc

SEQ ID NO: 140750 - DNA, 481 bp, Homo Sapiens
ctatgaagaatggagagacacttgtagtttgttttgtttggacctttactaagagttgttctccatttcagaaaaccacatcatcagtgacagcgatgcttgtgatttttgagtcactcactcaagattggtttagatctgtagctgttgttttcacagaaagtctatgtaacatgtaaacacatggtaatttcagagaatgatgaagtacagcaaaaagaaaagaacagggtaatgggattgagagtaacgtgtgcatgtgtgtgcatgcacatctgtgtatgtgtagggagagatggctttatatagaatgataaacgatgcttctggagaaacgatgtttataatgagaactgcatgacaagaaggaaccagccaggctgaggggacagcaagaacaaagaccctgagataaaaacaaaagtttggcttgttggaagaatggaaggattcttccatggctggaacagtgtgtacaagg

SEQ ID NO: 140751 - DNA, 557 bp, Homo Sapiens
cacctggagtacgcggacgaggcggaggcggcggccgagagcgggacgagcgcggcggacgagcggggcccggggacccggggcgcgcggagggtgcacttcgccctcctgcccgagcgctacgagccactggaggagccggcgccgagcgagcagcccaggaagaggtaccggaggaagctgaagaagtacggcaagaatgtcgggaaggtcatcatcaaaggatgccgctacgtggtcatcggcctgcaaggcttcgctgcagcctactccgccccgtttgcggtagccagcgtggtatccttcgtgcgctaatgggagctgctgtggcaggtgcccccagagtgaacgggagcccctgctgtgggaactttgtgaatcctggagcatctcagacttgaacacacagcatatttggaagagaaaacatgcctttctttgttgaatcacattagtatgatgagtgagtcatccctgcccatctgctgagcttctcacatctctcagtcacacgtggacccagtggtcaatcctgcagagaattcggcggaggttag

SEQ ID NO: 140752 - DNA, 484 bp, Homo Sapiens
  misc_feature (150)..(169): n is a, c, g, or t
tttttttcggagttgcgtgggttttaatttaaagatgtaagtacaaatctatgtgcattgtagaaaattcggaaaaggtccaactgcctagcaagtaaaaagctgtcattccagcacgtggggggtgaccgcttctcccttcttgggtgnnnnnnnnnnnnnnnnnnnnggtgaccccgactggcctagactccattcaagggcacatcttgtgcagtaaaacacgcatgtttcagggctcctcactgcaacacgtgcacctccaggctggcgctcagcgctcccagtaaaagctgcaggcggcggtgtagatagtcgccggcctttcctcctccccacctcgtgacgctttgtgctgcggaagcaaaggcccgttccattccccgtgtcttcccagcagccgccaccaatgctcctttctaggaaacagccttccattctctcttagggccgatcttagcgagagccgcgatgcgggcgactg

SEQ ID NO: 140753 - DNA, 919 bp, Homo Sapiens
acttttatgcattttccaagttttgctacaaagaactcgcattacttttatgacagaaaaaaacatgtcttttccctagttaacagtaatttccacggaggagtttcttatctgtttcaaaatatctacaaggaaatcagtaggaatatcatgcttagaaaatgtgaactgaaatgagaaacagaaaatatgcaaagatctgaaacacttctggtcccaagcatttcgataaggaatattcaagctgtatatagagtcttcatttttaatgaatttttatgatcaccattccaccataaatgacttagccagttccccatggtggacatggaggttctttccaaatttttacttttaaaatcaatagcataatgaaaaccatgtagcctgcacacatataaatatatatgtaggattcattcccagcaggtttggtgagacaaagggtttatgtatttgtaatttagtgactgataaactgcccttcatagaagatgtataagaaccttcccacaccccctttgagaactcaaggcttgttgagttccagttgattgcttcatcccagcttaccaccctgtggggctgctataacctcagccaaccccatgccccctcagagaagtatcaactgtgaccccttcaggactggccattttgggggccaaggtggagggaatgaggcaatcacaggcctgacttccagagctgtctagaaccatgctgtcatttttggtcccactgcttcagaggggaggagctttcctgtctggattcccaagcctgtgccccaaactgctggtggagcagaaaggaggaatgatccagaatagggttttggtaccagactgtttggttcacactctggctgggccacttggtagcacattacttctcctcttaaggccatcctgcactg

SEQ ID NO: 140754 - DNA, 673 bp, Homo Sapiens
tttaatcatcttatgacatattagtttattacatgcataaaactataaatgataaaaatgaagaatgtaatgaacagtttatgtttttttaaaacaaagtcagattttaaaagttgtacacagagagcaaaaatcactttacgtactcatgattggctttaatatttctttacactatacatactgaaaatgtttacatttactaataaggaatgccaagcgtatccatcaccatttgaatagcttgcaggggatttgtgatttcttccatgttatctcttctcaaaacccaatctggcttaagtcttgaaactattctggtccttacaggtgtttctgggataaaaggaatgcttatagaagaattcttcttttgcttgtaaagtattctttcagtattcattttatgtttatgagctgtaagtttgtagagactgtaaatacggtcaacaactttggacctacttcgtacatcagaggctctatttgttgtcttcagtaaaatagccaacaaacaacaagtttttgtaaaaatgcttccgcctttgtctgcaactttattaccaggcttttctcggtatatctgcaaaagctgcaatagtatatctatacaattttttacatcatagactgctgaagtagttgtctcatacttagatacattgagcgagac

SEQ ID NO: 140755 - DNA, 1248 bp, Homo Sapiens
  misc_feature (1138)..(1172): n is a, c, g, or t
  misc_feature (1179)..(1179): n is a, c, g, or t
tagtacagaatcttttatttctgcaactcacaggattagttttcaaggaagatatctggaaacaatctgacccaatactgtatttctgaaagtcctgttatggggtgttttgggtgagacgacaaaattgttctccttaacatcaattgctcaccttaacattaattacaaaaggatagaggtcataatttaaaatacacatgatgaatgatgttcacatgcctaaatataactgttttattatttatagtggcattaataaaaagatatttcactcttaagcaaaggatctgtgtaatactggtgagagacaaaatgctaatccacattatcactaaacgtttaaaatgaggtgttgtccccagaacatactatttagcctggaagtgggtctggcagtggcggactgaagtgaagctggcaggatctccgatttgatggttacactggtgaccgcaccatccatcctgtctgtctcacataagcctggcaactgtgctgccttctccagcgtgggcagtaactgatcaaactggtcaaggtcagctgtaaactggctctgggcctccagttttatttcctcaggagtgggtttggttcattggggttgggtttgtattacatggatccatctgttctttcttttccactttcacctttacatcatccaggctcaggtttggagttgatcttaaatctttctcatctttatctaaaagatagcgtaggagctgatggtcttttgattcttttttctttgaagcatccagttctagttttatactggagtttccttgtacctgtccagtcactgacacagaagtagatgcactgtcctttttatcaggctcgacagacaaagtggtgatatctgaggggctaccctcctgtaagagccggtgtagaattttatgccgttctgtcaatgagctatgagaagagggacaagaacctcctgaagagttagcagaggcagagttggaagtgcctgtgcaagacaggacatctttgcagcttgtgtctatatcagcatgccgtaactgctgttcggcagttgttgtcaaaagctgcactagtttgtgactggcccggccgtaatggccgaattcccgggcatatgtccggtaccgtcgactgnnnnnnnnnnnnnnnnnnnnnnnnnnnnnnnnnnncgccgcnttcctcgctcaatactcgctgcgctcgtcgttcgcaataagcggagcgccctatagtgagtcgatacat

SEQ ID NO: 140756 - DNA, 721 bp, Homo Sapiens
gttcagacatagacatggctagattttattcaagggaaattggtacctacttgagggaaaagtttacaactactaggctctttttaggatgtcacatatcaacactttcaaatttttaaaattcagagcttccaaagtgttctaacatccaaacagggttttatctttaaaaagtaattatagtgaaatatgatttcccagaataaaaaacattcatttagagttatctttttgaatattgatatgtgaggaaaacacactcgcactagcaattttagaacatcaactttttaatgtagaaagagtaattaaggaattactggggagaaaagacacacacatcactgagtccctcaatagcacaggctgtctatgtgggttctggtgccctgagcagatggaaatgaacttacttgatgtcacacaaaagggccactcctctcaggatccagtgatccggggacaacactgttcgtaaatataccacagtgatgaaggtcaaatcagttcgcctgggtttcttgtaaataggacacacatacagcttggggtccttgggtgccgtggagttaatggcaaagatgtggagcacgggtaactgcgtgaagagtaccttgggggtggattccatgagcttcccattccgtctgtcccaggctgctccatccatgtagagcccataaatatacacaccttccccaaggggtgacgtgatctcttc

SEQ ID NO: 140757 - DNA, 467 bp, Homo Sapiens
tttggttttacaggaaatatatttatttatattaagagtttaacaataaaacccacgaaggggaaaaggagggaagattcattgcattccctgtactggataacaggtatttttacacacatcttttagttaaacctgacaaacctttctttagttaaatcccagaaaggaggtagtatatgcccattttatagatggaaattgaatctcagaaggactaagtgatttggccaagatcacatagctgttaactggtagaagtgaatcagcttcacttcttttgactccaaatttcatactaaacttcaaacttacagtcactttggaggctattgaaattggaccacccactctcatctagtctagatctaaatccaaagcttgtgggtggcataggctttcacagccctcaggttttcttgtttggttggttggttggtttttggagatggagtcttgctctgttg

SEQ ID NO: 140758 - DNA, 609 bp, Homo Sapiens
  misc_feature (94)..(94): n is a, c, g, or t
  misc_feature (356)..(401): n is a, c, g, or t
gccaaatctgagatgcaactgaatttattcttacctcatcatctcctaaacttcatcaacctggtgtttaaggccatcattcaaattaagctgncctcctcaagcttaccatttgcctaattcaaagtttttctctcagcttttcaaaactttttgacttttccatcacactactgacccatgctaaccaaatccaccatatttcccgtggtttctgcaactacactgtctcaatccttttcataactatccttcactgttccttatgacttggtttaaagatttgtattccctcctcctgttccatatcctttaacattacctaaagctttgagttaaatgaaggttgccagggnnnnnnnnnnnnnnnnnnnnnnnnnnnnnnnnnnnnnnnnnnnnnnacctgaagtactatatccttttcctcaggtttctcttttccctgtctctatcaactctaacaaattcaattttaccctttaagtcaatgcctcaaaagttcgattctaaaatttatctatgattaaaagcaacacacctcagtctgtatgttttgtggtgtgtccacctcaaatttagcatgtcctgtaatcaaattaattcatctta

SEQ ID NO: 140759 - DNA, 568 bp, Homo Sapiens
  misc_feature (476)..(476): n is a, c, g, or t
  misc_feature (509)..(509): n is a, c, g, or t
tttaatggcttaaaacaatttactgtttctcatgattttgtggattgagctggtggttcctttgctgttctcacgtgggtcactaagtgattgcatccagcaggcacggtgactgaggccgggttcagcagggatgtctggcatggctgggactctctcttgacatgttattttcattccaagcttcttcacagtatggcaatctcagggtcgcgtccacctcgcagcgctcgccagcaaaggcaacatcacagaggcactggaatttgttgagtaagtcctggcacagacctccattgacacacggatcagaggcacactcatcaatgtccttttcacaccattctccagtaaaacctggccggcacatacattttaattcagtctggaactctgtgcagttgcctccattgtagcaagtgagatttgtcttctcattcccacagactgttgagggtaatctgctctgtctgcanaattttcctggtaaatttccaaaacagaggcangaatagccattagtatgactaatgcaggtggctccatttgcacactggtgaactctgca

SEQ ID NO: 140760 - DNA, 397 bp, Homo Sapiens
atggtggacctttagggggcttcatgggccttctcacagtgagaatccagccctgtccagaagcagcctcaagctccgcactttcagtccagtgctgtctcccaaagccccctccgccaaatgaatcccacagccagcttcagcctcagatgctgcccactgccccctccgtagaagtcctttcacctgtgtctctactaggtctgaccaatgtttcttggattttattggctaagctggataaagacaggccatttaaagtaggaaagtgggatcctgggtgatgtagcaagaccccatctctatgaaaaaaataagaaaattagccaggtatggtggtatatgcctgtagtcccacctacttgggagactgaggttgaaggatcccatgagccca

SEQ ID NO: 140761 - DNA, 476 bp, Homo Sapiens
aggaagattttcttctttattcctatttgatttaaaagaaaaagatttgccaagggatgggtagggttaaattaaaaacattttaagaaacatttctttatatggagcatacttactgtttttgctttgagtgcattctgatgaaatatagattccaaattccccttggatctcacccttctgtctagtgctttgccctctatttggggcagtaattctatacatatcctgtaaatgtctgtcctgatgatcaggatgcccaagctctgaatccaactgctgccaccaagagaacggctcctttttggagccattacacacagatcatcactcaaatcagtagtttctctttagaaaactagcaattttctggtagtctatcttgtgacctcagtgaatgagatgctgctttatccaatctactgactttggaaaatccatctgaaatgaggaaagataatcgtgcatgtctggca

SEQ ID NO: 140762 - DNA, 504 bp, Homo Sapiens
gtgttgttatatttttaccaatatgtttaatctttccaattaaatacttccattccataaacttcagaaccaaagttagataccaacaagagactgaagataaatacagggtcaatagtatcaagggactagcccatataatatacttgaaaatcgtattaatcaccaataaagtaccccaccataaacaaaatacacaataaaaagtcaagatacaaataaagacaggccaacatatgagtagaccattgacagaagaggaaaaacaaaaggcaatgaaaggatatgaactaatgttcaaatgtatttcaatatgagaaataccagatatattctatatcactttaaacttctaaagtaaaaactggaaagctgggtaattctaaatattgtctgggacacagtgatacagaaacacttttgtccatcttatgggagaggaagggcaatgtataacataattccagttacatactagatcaccatatgacctagccattcagc

SEQ ID NO: 140763 - DNA, 640 bp, Homo Sapiens
tttttttgcatggttattaaatttaatagtcggtgcagatgattcatcttttgaaggcgctcagaatgatggctgaggataaatgtagaattagccttctaagtatccagtggtctggcaacgttccaagtatgccaggaaacaggtaggcgtgcttcagatccacctccctttcaatagttttaacagtccatgtaccagaggtgatatcacaaccaacctgtaattcagaataagcctcgtgtggcaacatggttggggggggtgcggggagcaggcgaaatgcaaggcacttgggtgtggcagccacgtgaacttcttgttcatgcctaagaaggcatgttcatgccaaagcgtgtgtctgcagggaaacccggtgcacttgggaggcacagccaaggcttcaggggtcagcatggctggcggacgctgcacagccaaggagaggtggactcaaacaagggcggcctcgggggcggtgtgcaggcgacacccaggggatcttgtgcacttaaaaacgtagggatccatttgcaaagcgaagagcacgcaaggggagcacacatccagacccggagtcgccatcctccctcgtgcctcgtgccgaattcttggcctcgagggccaaattccctatagt

SEQ ID NO: 140764 - DNA, 939 bp, Homo Sapiens
gaggtttcctcaagaccgccttatgggggaggaggtcggccccaatagccctttccggaggccctgttcacggcactttccctgagtccgggcctgaacccctttcagtactttcagggcaacagaaacaatgcatgctaaaaaatatatgccaagctccttccgacgaagatttaacttgctccaggaacaaaataaattgctttagtttaagaggtagtaattagagactattcttctccctgttagaccccccactaatcccgaaaataaaaatacacaccatggaacactgacaattgagtaccaaagtattaaaatttaaaataaatatcccaaaggtagcacctgctcatagttaagggatagggcacctctgtccaaccatgtattttaagaccaagcactttattagaaatctgtcccgtaaagagaacaaatttagcagttagaactaaaaataccaactcatggaatgtcatcatagttgtatctactgctggtgtcttatactgtcatgctactgtgaagtaattccgtattacacatcaggaaagtaaggccaggaaggtgaacttacctgctctgggcctcctcataaccaatgagtggcagaaccaagaccgaaagtctgagttttcaagctttttactcagcccattaagtgacaaccaggaaaaaataatacgtcacttgatctttcttcccacagtgaaaaaatgcacttgcgttctgccagccttctttcagtgatatgttggtttcttaagaattaacatactaaggatcacagtatagcaaagggaattaatgtggtctctgcttggtgctttaatccaaaggcagactgggaagaacgacgcgtgggtcgacgatatcccgggattccgaccgtaccagcctgctttttttaaccaacttgttctatattcaccatgg

SEQ ID NO: 140765 - DNA, 909 bp, Homo Sapiens
cttcatgaaactacattaaatagtactttttagtatttcacttaattttaaaagtcaacaaattaaaggaaattctgaatcattatttcttaccaatatcattattctactcaacaaattcttttgagattaaatattttaaataaaacattaaaaacaaattgtattcactgataccagcttttgatgaaataatacttctgtatttgtaatcatgtgaaatatatctttctcctcacaatggatcttttataacaccagtgttattattttctctgataaaaaccctgtgatacctcagggctttactgtgtccatacattacatgcctccagagagtaggcttcaaacagatggaaaaattatatttgtgacaaaattctaggaaagggaatgataaaatgggagaataatttctaaatttctaactgttcatcaatggatttggatatatttagatatagacaaatatatgcacactgcaagtttgcacatgtgtatataaatttatatgagatacccataacgtgtgggttgtataatcttttaattaattctcaattttacatgtggaaaacttgattaagtgtttaccctcatcaaatactcagtttgaagtactatactcaatttgatgtaaagccagcaaaatctctgccaacattcatttcaattaatccaataatgttaactgttgataacttcattctccttgtcccctgttaacagctgaaagttgattctcaccctaattcagcaatcagggtgtcatcctcaagagactatcaccttgctttggattgtgacctctgactccaccactttcatcctatagcagtcctacctttgtgtatttaatcaactttgtacatggttaaaaaaataaaagtgcagtgaaatgtcaaaaaa

SEQ ID NO: 140766 - DNA, 544 bp, Homo Sapiens
  misc_feature (42)..(71): n is a, c, g, or t
tagagacacgtgaaaaaaataatttattacagactcttttannnnnnnnnnnnnnnnnnnnnnnnnnnnnncgatgtgctgatatgaaatactaaatttaaaggcaaacatttttacacaaaagtagttgcactctattttataaagatagatattaataagttatcagagacatttaagagctagaggccaattattccaacagtaatgcattctatgctgaaagtaaactaagttttctgaacatgatgtcctggatataatcacattcttctaagctaaggaaagggagctcatttctgggaatacaaggccaagaagggctctaacagcagtatcccagcagtgtgtttccagatttattcttggatgtggttggagcgcccaacatttagcctgaactaatgtaacagctcaatgtgaaacaatgcagctttctgtaacagctgcctgtggttaatgagatttaatacaggggatacagttacaaatgatagcattttagaagaattataattgccatatgatttgaattagtaatcaa

SEQ ID NO: 140767 - DNA, 298 bp, Homo Sapiens
gcccgtgggggcaggacagcagcctccccgaggcacatggctgagtgctgagctgggaaggcaccatcgtaatgccctggagggccagacttgaaatgagaactcttagaaaaccacaccagagcacagcccacctcccttctcttccctgactgtgccccccagcagaggaccctggcccacagccaagccacatccatgccactcctgcgaacagccacttccagtgttcacagcccctaggatccctttacagtttctgagcacaagactccaacttgcccgcgtgatttcactc

SEQ ID NO: 140768 - DNA, 728 bp, Homo Sapiens
  misc_feature (660)..(660): n is a, c, g, or t
tttttgtctgtttaccatagatttattgacagctactactcgccaggtgtgctggagtcaggtggggctggggctcacagctctctacctgtttaagaggggctggcagtgaggatttctgcctacctcatgggtggggcaggcaaggctaatagacagctcatttcctgcatctgccactccgacgcaccttcttccctcggttccacccctcattcagccaaagcgctctgactgagtcccagaggcctcccgtttgcatttctggctcaaagtctgcagctggccctttccatgcagctggagttctgcagtccatggaactgagcttgtgatgcagagtgaaattcctatcacggtgagcaccatgccagcaactgctcgttttccaccaatatcttctccaagggccttcccaacaatcagtgtgaagatgatagccagagagttacagatgggcacagccagggtcagatctgtcgatgccaaggtgaggtaatagagaagggatccacactggttgaggagaaagggcatcaggtactcagtattcaagaagagggtcttcatctcctgtagcaactgctgggcccaggtcggctcatgaacccgctgcaggccggcggaggcccgcttcagcagcggctgcgtgccaccccnacagagcggccaccagcaccagagccaacacctgccccagagacgccgccatggcaacgccgctgtct

SEQ ID NO: 140769 - DNA, 940 bp, Homo Sapiens
aaggctccaattttccctggcatgctggccaactccggaacgccaacttttctccccttcgggttcccaacccctcatttcagccaaaaggcgctctgaactgagtccccagagggccttcccgtttgcatttctggctcaaagtctgcagctggccctttccatgcagctggagttctgcagtccatggaacctgccaccatgatagtccagatcaggccacagtaatggtggctgggctgggagcctgagatgttagcaggaagagagctgctggggcagaaaggttgctgagggtgagcgtagagtctcctgtgctaaatccccgcagctgaacagcacttgaaggttacaaaactctttcactcttgttctcttattgtgatccatgaggtagctgttatccccataagagaggaggaagctaaggccagagaggggaagtgctaggtccatccgctcactgccagcacttcatggcccaggggcttcctggaggcagcagagctggaagtgggttcggcccactcaaagggtagactgttgcccctgggtcttactcactgagcttgtgatgcagagtgaaattcctatcacggtgagcaccatgccagcaactgctcgttttccaccaatatcttctccaagggccttcccaacaatcagtgtgaagatgatagccagagagttacagatgggcacagccagggtcagatctgtcgatgccaaggtgaggtaatagagaagggatccacactggttgaggagaaagggcatcaggtactcagtattcaagaagagggtcttcatctcctgtagcaactgctgggcccaggtcggctcatgaacccgctgcaggccggcggaggcccgcttcagcagcggctgcgtgccaccccacagagcggccaccagcaccagagccaacacctgccccaga

SEQ ID NO: 140770 - DNA, 842 bp, Homo Sapiens
  misc_feature (309)..(327): n is a, c, g, or t
ggacgacgaggaggtagctggctaccaggatagcattgggcagctggagaatgatctgaggaacaccaagagtgagatggcacgccaccttcgggaataccaggacttggtcaatgtcaaaatggctcttgacattgagatagcagcttacaggaaactgctggaaggcgaggagacacgttttagcaccagtgggttaagcatttcggggctgaatccactttcccaatccaagttacctgctcccacctagaatcctcagtgctacaacctccaaagtctcatccactgggctatcacttaagaaannnnnnnnnnnnnnnnnnncatctaaggtagcctctaagaaaacctcccagattaggggaaaggttttgaagaaatattagaggagccagtaatatctactaagaaaaccgagaaatcaaatatagaagaacccaccatttcaagccaaaaaatataattccattgctttgaaaaagttaatgcttaagagggaatgatatgcatttgacttgttaaacagcctattcctgaactataacacctgccaccactataaaatgtcttcaaggcttcagtctcatatttagtattgaatacttacattctctaataagaaaaccacccccttagattgaagtaaactgcagtcctgggagcaatcacagatgaggttatctaagaatacagcttttctggaccttcagctcacgcttcacagtgatcgatgattcaggtgcagaggaagtacaaactaaggtgctaaatctgcgatcatcgtcatttgctgtgaactgaaattaaaactattcatgctacccagccattacccagct

SEQ ID NO: 140771 - DNA, 512 bp, Homo Sapiens
  misc_feature (205)..(241): n is a, c, g, or t
atataacacttaaaggtttctttgaaaaccctcctttccttaaagcacatttttctgacataaactcatgactaatctttgtgcaatcatgaacttttgaccaataattgttgttttgtgtcagctccagccatttttgtacatgttgtatagacaattgtgccttttaggagctttatgtttagaaactgtacagattgttgannnnnnnnnnnnnnnnnnnnnnnnnnnnnnnnnnnnngaaaaccaggtagttatttgtgtttagtaaggaaaacctgtcaaataaatcaaatgattaaattatatgttccactgttgaatataaattttatggctatggggcagagtttctgtgtataaattagtatgtaaactccatatttattgtattcatattagtctttgaaaatgggtctgtcctccttgtgtaagacagtaactttacacttcagacagattttctgtgttatgaaatgtttcagtaaaatattgtttactgactttaaaaa

SEQ ID NO: 140772 - DNA, 444 bp, Homo Sapiens
tttgtaaggtggaggcttagatgattgattttagaaccttctcgttttctaatacatgcatccaatgctataaaaattctctctaatcactgctttaactgtatcccacaaattctgataagttgtgtttgcacttttatttagttcaaaatattaaaaaatttatcttgagatttcttctttgacccagagttatttagaagtgtgctgtttaatctccaagtatcggggattttccagctttcgttagtgacttctagttgaattccaaagcacacaccatatgatttctagtcttttaaattggttaaggtgtgttctattcgccagaatataatttatcttggtgagtgttccatgtgagcttgagaagaatgtgtattctgctgctgttacatgtagcagtctactgatgttcatcatatccagttgattcattgtttt

SEQ ID NO: 140773 - DNA, 638 bp, Homo Sapiens
acttttactaccgtcttccatgattatgtctctctgggctctcatcattagatttttgtctcctatgatctgctatcttaatctcattagcatttgcatcctataaagcacagtaacagacattagctcagtaaggagtcatactatgaagtaacattttcacatgactgcacgagatgaaaaatttgagattcagagggattatataacaatccttcaggaacccttgtccaggtagatattgacagctacctccctaagcatccttacacttaaaggtagggatagcatgtttatttgatgattcctttcagggctcagtagaacgcagtatccatggcagcacaaaataaattattgggggttgtgatggggggaatataatctttaggtcttaagaaaaacagacaactttacagtggtttataaaataaccaatggctatagcaagatcaataatacaaggtggccatgtttttggcagcagcatcattgatggaaacctggtctgacatgtgaactcacctctgctcgctcctggttaattttcataacagttccatgaagggacttcagctggtctttggcatggtgagctcagctgtggctagcttatcagaggtgcccacggcttcttt

SEQ ID NO: 140774 - DNA, 588 bp, Homo Sapiens
  misc_feature (48)..(65): n is a, c, g, or t
tttagaatttttcagattattaaaagctgaaggatgcccacgtaagcnnnnnnnnnnnnnnnnnnccaacaaaaataaacccaaacccctcaaacaatttcgaacacgaaacattcttctgatgccggcatccctgcttgcaggtgtgaggggggcaggaatcagcgaggtgtcctgggctgagtccccggagtgggaagaggtggcaggaaggggatctgaggaggagaacaggggtcctggtggtctgtgcttcttcccagacacgggagctgtagaggagacctctgcagcagatgctaggggggccactaggcccaggcagtcttgggacttgggtctgtcctgctgtgcatccatagtgggtgctttagaaatgggaggcccacccgaagcccctgttgcaagtgaggacaaagtgtgggaaggccgtgagggtctgcagtccgagatggccttgtcctcaacgtgcagtgcactgttgatgtggggcctagaggcctgggatctgggggggcctcccctgggggcgagttctgcctggtgctgtaactgccagctgctcagccggtaccgagctcgattgta

SEQ ID NO: 140775 - DNA, 543 bp, Homo Sapiens
  misc_feature (123)..(150): n is a, c, g, or t
tactactttcaggaatcatttttattgatgtctttaatttcacaaaccaaattatataaaattaagtagtacacatttcaaacataataattgtgctctgtacaattcaaggcacacttggannnnnnnnnnnnnnnnnnnnnnnnnnnnaacaacggaaaacttatactccattcaagatttttccatcagaactttaatcattttatttgggttcacaggtgaaaatattgtgaaagttcatttacaccacaatgaaggataacatcttcagccccatttatttactaacaactttattgagatataattcacataccatataattcacccacttaaaatatacaactcaatggtttttaatatattgttatgtgaccattaccacaataagtttagaccattttcatgaaccataaagaaatcctgtacccattagatgaatcctgtacttcccattcattacccccaatttttagcctaaggcaaccactaatgtacggaaagtattttttgtagagacagggttttgctatgttgccc

SEQ ID NO: 140776 - DNA, 482 bp, Homo Sapiens
ccaatccctgtatttgggttgtcagcttcctccctgttgccattaaaagatgccagggcctcagagacactcttctcgatgaactcatcagtgattcttcgggaaggatgttcattaaacacagaattcattagcgcaatctttgcagcactcctccgggcctcagcttttgtggggcaaaactggaaactcccaaagcagcttcccccaggcagggtgacatagcagacataaggagggctgttggagggaaccatctcataaaccactagagccccattctttaagtcagcaccacgggactgcttcatctgccagaattcctgaagtgcctccaccacattcactcggccatagccctgcgtgtgcttggcgaagctcctcaccacggcctccacggcctctcgcagcactgccgggctgccggcggcgccggggggcaggggtagtcctggggccccagacaggagcaccgcgcggcc

SEQ ID NO: 140777 - DNA, 494 bp, Homo Sapiens
tttactacatcaagtactttactggaaaaaattgagagtgacacaggtataaactgggagttctagaagttggagataaaggggacataaagatgaaatcaaaacggatggatattgtgcatcaaaagagccaaagatggaggaagaggaggtagatgcaagcgttctgttctgggaagggctaagatcttggaatgctgagagtgaaactggaagccagtctggagcatcagtcaggtacaggaacagtactcagagcatgagccacattctggcagttcttccagtgcatccttatccaatcagggaaagcgtttattcttgcaggtgttcaggcagttggctttggattggaagttgttattgtttccctggcagccaccatagacaaacatggagcaggtattatctttcttgtcataccaccaatgaagaaaataagccaggcaggggccagtttcttttggcatttcgcatacatcttgtttgagatc

SEQ ID NO: 140778 - DNA, 458 bp, Homo Sapiens
tttgctaaaaaggaagaaatgtttaataactcctggagagataaaatgccaacgtttaggtatatttatgaattagaagcttccaaattgatatggagtaaagcagtgtcagatttttaaagtaagggttgaaacttggtttgccaaagctttcagggtgaaatcaagacaatcaagtactttaagtcaccacatccatacctaaaacatgctggcctgacccaagcttgaggtcctcagactgaacaggtgcaccgctgggatgctttcaagctcctggacggaaccgcctagctgagtgctccagggaggaatgccgctgcccacatagactagtggtactaatcaaagaaataaagcatttacagtcagcgctttaaaatgcaccttttggcacctggcgattttccaaaaaagtgcagaagaaaaagtccgagtcctctgggagtgtctgaagg

SEQ ID NO: 140779 - DNA, 653 bp, Homo Sapiens
ggcacgagggtcctcgtggtggttgctttttagaagccttgtcagaagcttggacttttcttcatcagcatcacagatggagctcttgggccagggagatggtgggggtaagattttatccactggtagtttagggtcttgttttataattccttgtttcttcagcatctgataagcgtctcgaatcttgatgtcttccggaaaccagactgtccaactgaagagtatttcaatgactcttcctttaacttttcctgtggcccaggaccccaggtactttggggacaacactttgatcagttcgttcaggaaacgaaatttggccacctcgctgtggaacttctccccacagtggttcatgcacatctccagcaccgttaaggcataaagagcttccttctcttgcggagactggatcttgtgggccagtagccagggcgcatgtgtggggccattggggtcagtgttcacctgctcacagaaattctggatagctgaccaatcctgttccgacatgcttgggtctgtggctttgttcagccacagctccagcgacgctgccgggcccgggggaccctgggccgactcggttcccgccacagccgccgccaccgcggtcgccgccatcgctccagccccgacgccgcggccgc

SEQ ID NO: 140780 - DNA, 602 bp, Homo Sapiens
atccggacactgtgctagaactgccctctctagaaaaggcacatgaacttgccagccctggtctaagcagggcaagtgaaataaaaccttcctttccttctcccacagtagactcaatgctgccctgaagaaacagacgagaaacaggaggaagaagggtggggaccctggcccagatctccctcctccaacctgctgtgaaggtaaacctctcaggggacctcccttctccagtgaaaaggatctgtgtggaagcaaagcgcctctcggctctctatagcacaaggacaggaaaggttaggctacaaggcaagccaaactcaccgttaaggcataaagagcttccttctcttgcggagactggatcttgtgggccagtagccagggcgcatgtgtggggccattggggtcagtgttcacctgctcacagaaattctggatagctgaccaatcctgttccgacatgcttgggtctgtggctttgttcagccacagctccagcgacgctgccgggcccgggggaccctgggccgactcggttcccgccacagccgccgccaccgcggtcgccgccatcgctccagccccgacgccgcggccgc

SEQ ID NO: 140781 - DNA, 746 bp, Homo Sapiens
  misc_feature (279)..(306): n is a, c, g, or t
gacttaacaagaggattttattacttgcaacaaggaggacactggggataattcctcaaagcagcacctcctggaacgaaggtgaaaacaagggccttggtggggctggttagccgagtcattgtatgtagaggtggagtaaaggcagcacaggtgcagtcgtgaacatgcttccgcatagaaggtggcaaataagctcctccctgagcagggttttaagtatgccaatgaggagagttgccaaagtcatctctaactcaggcatctctggatccaacnnnnnnnnnnnnnnnnnnnnnnnnnnnngctggggctgatcttcttcatggaactttttgaaataagaacccaaggtgcaacagttaaaaatggatactttttcacagtactgactccatgttagagaaaagtttatttgtttgaatataattattactttgcttgagtttgtagattattcaggaaaaacagcctcaggatacatgacctcattacagtatcagctccaagcctaaaattttatcaccatattaggtcccggtgcagatgaggctcctgggtgtcatccattacatacagcttctgaggcacaattcctctctttctgtatgtggaccaagttcagagaatagttggagagatcattggccatctgtaaccccatacgtagagaccttgactggctgctaaggggtgtatttccctctcatgatcatactgcagttattagacaggccagacggcct

SEQ ID NO: 140782 - DNA, 894 bp, Homo Sapiens
tttttagaataatagcactttaaagatgtttaagagtaaagcacaaaccatgtatataccaagacttagctaattctctgagagttataacttaagacaataaaataattaaaaatagtgttaacattaagtagaatgcaaatctctatagatggtttcctgggaaagtagttttgataagctttcctagcattgatcatcttcaaaaaagcatcaataaacagtccatgtcacttgctttagtttgtttgggcctactaattgctccaacacttctcgggaatgatctgttatcaaggggcatccatggaagagtaatatacgtatttgaggacagtaagtaaggacagcttcgacagccccatcagtcagatttacacaatgtcccatatgaatctcctctaatttcttcgcacaaggtccactaacaagtgcaatcacaccactgtcagatacctgagtagctgaaaagtcgacacactgcaaaaatgggcagttttttcctaatgcatgtaaggacacatcagtaatacttaagcagccacctaaatcgatgatctttagcagctggcaattgagtgcaagagcaacgactccttcgtcagtgagattgcagcatcttttcaaagaagcttcgtgtaggtatgaacaagatgaagccacagcttttattccttctgaagttacagaaactcggttcccttttgaagcatttaaatttaatttcttcagttttctacagttagacaggtgcaggagagcagcatctgatatatcgcagctccgtagatctagagtttggacttcaggatgtaaaatagatccaggagctgactgacccgccgtgggcgaggcatcgctgcagcgtctgaagcctcttccgcggtcccaggc

SEQ ID NO: 140783 - DNA, 408 bp, Homo Sapiens
  misc_feature (113)..(175): n is a, c, g, or t
gctgttcttatttgctgaaagagaaaagaccacagaattgaataccagtgatttcccgttttcttaactctactgaaaagtcataaaactgcattagcaataattacaactannnnnnnnnnnnnnnnnnnnnnnnnnnnnnnnnnnnnnnnnnnnnnnnnnnnnnnnnnnnnnncacttctgccaccctgaggcagcaagtcagctcctctgctccctccttctcctcagcctactctccacaaagatgataaagaagacctttatatgatccacttccacttaattaatatgtatccaaatcatgagcagcatcttgtgaccctagaagaaataaatgataccaccttgaacacgaatataatcatcttgaacttttatataaatttctacagcaattctgtaatt

SEQ ID NO: 140784 - DNA, 1118 bp, Homo Sapiens
  misc_feature (50)..(50): n is a, c, g, or t
  misc_feature (100)..(100): n is a, c, g, or t
gttttcccctgccccccattggggaaatggttatccattttccattcttncgggaaattgtatcccatttcccatatcccttttcctttatccatccatncctacccactaataaatatatattcatataatataaatccttaaaaagtcctaggtgagaagatctgggccaggctgggccaggcctgcagggtcacgactggagggtgtgggcccggccaggctggcagatggggcactcgctgccctcagcgcagagctcacacagcgcagcgtgttggcacggcagcactgcccgcttctgttcctgacacttaaggcatttcaccgactgcatgtggaacacggccttgtccacttgttccaggtgggcccgcagttgtttctggagggagtagagggtggagagtgagagcgcctccaggtcggagaaggcgggcagggcctggggctcaggccccgcgtgtagccgctccagctcctcctggagcttcttcacctgcacctccagtgcatcccgctgctcccgggccagctcgcactcggcgcccgccgcactggcccgctcaccagcactcctccgcctctttcttccaggcatcacaagcctgcattggcctgcttccaggactcctcccactgcttgatggtgctgttggcttcatccagctcttgccgaagtcgggccagctcggcagcccctggccctgataggaaagcgggggaagtgcccggggagaagcttccagaggcaaaatgctcccagatgctgctgttcatcccgttcagacccaaagatccatgtgatgctgaggttcccaaaaatgtgttttccgactgactcaggtggccctggggctgctgcaggaaatgcgaggagaggctgacgggaggggacggggatgctgagtggaaggaggcagagctgcccaaggagccggggatgttcacgggtgcagagctctgcagcaagctgccgccgatggtgatgcttcctgggtggggcactgtgctgttatcgaaagtcttctccagggcggccacgccaaactcattcaggtccaggtcatccaaagcagactctatgactgactctaccgtgtcgctatcccgggaat

SEQ ID NO: 140785 - DNA, 258 bp, Homo Sapiens
ttttatgcataaggttgttcattgtaatatatgtaattagaaaaacagtacacaaaatgttgaatatgggaatggcttagttaaggtatactcacatgatagggtattatacaaatattaaaaatggcatttttgaacaatatctaataagtgaaatgcttaagatatcaagaaattaaaatgtaggctataaaattctatacaatattacctcaactttgaaaaacatttacatatttaatacatctacatgcatag

SEQ ID NO: 140786 - DNA, 798 bp, Homo Sapiens
tttttgctttacgtataattctttttattttcatgcaaaataaaggcacacttaataacaccctttcaattttgacttacaggatttaaattcaaccccttataacaatgacttaatatctaatgttacattcatgttcagaatgcacaaagtgcagcaacaaatgcagcaaacctcaaaacaaggtgctacaaagctgcttctacattgcaagacagacaagtgtctgatggagtaatttaattgaacatacttttacagacatacagctaacctaaagaaagacagacagatttaggaaagcagctacatctgcagaggaaggaaacagcatgttacagacagttaattatacatagaacatttgacaaacaccacagaaaacaaactttggcatcatttaccagggtacaaaaccttgcacaaatcttttggtaactgaagggcataagtaatgttctggggcctaagcaggtagttaactctaaattaagtagttttaaatataagcatagtccaatacaatgacataaatttaaaaaattaaaaaagaaacttggaattacatttccattttagtaacaggaatatccctgattcacattctgaaactggggcttttaaaagaaaagggtgaattagacagatgaataaaataaatattcagacattatgatatgagctgctcccatatcatttcatgaaaagctgaggaactgaccattattttcatttgaaaagaattaccattctatcagttttctggcctgatcagggattaatgagaaactagctaat

SEQ ID NO: 140787 - DNA, 602 bp, Homo Sapiens
ttttttgctacattcccaaattttcatttggagattttattttgaatagagggaaaattatctgcttgtatagtccatggcagagccagtggaatgcagagggagaagtagggtctcacttgtccttagcagtgttctcaatccaggatacatatttgtaaacattggtgtagatgccgacgtcccctcccatgaagtgccccacctcgattccctggagcttgtctttgcagatgacagtagcaacggccacctccccaaaaattcggctgaatactttcacaaatttcacacataaggaattcctgtggcttttccttgttctgttttttggcattctcgatcagacatcacgggggcctccaggttctgccgcaagtcagggtgtcggccactgttttcttggctccagtccaaacctgagagtagacagacagtgcctggcctgacattggtggtggcgagggtaaggggctggactttgggattgagcatggcaggcttagccagcttgatgagcatgaggtcatcctgtggggcgctatgactgtagttccagtagcggacgatctgaatggggttaattgtctgttcagtaccgt

SEQ ID NO: 140788 - DNA, 1251 bp, Homo Sapiens
ttctttttaggtgtgtccttttcatattccacaaagtcaaaaactaacttagatacaatatcatcaacaacttgatactggttactctgtgcaaagtttctgtgttgctcacttagaaggtgagtttctagatcttcatatttctgcaagcaacattcacaatatccttttttcttcttctctttcaactggagttgaattgaggttccaccatacttatcgccatctgtttggattcttagtttaacctgagtttgcttttgcatactagatggcttgtctacatcaaatggactgcagggcttctgaatagaataatttataaaaggcatattggtcagctgaagataaaatggcctataaagttggctcatatcttccacctttacaaaaggctttttgagtcttcctgttcttgttttttgtgcaccactaccaactcttttgcccccatctcttactgaagtacttgatttcttgagtaaatacaactcttttttcttttgttcaatgtagtatctaatgtcatcaatatgaagaatttttactccccatgacaaggcatttgataatatactatttgaaggaataaaatcatggtccttgatagctttttcaactaataattttcctctgcttaaacacactgtgtctggtgacttaaatgaacttccatcatggctgggatgaggtgaagtggtttctgcagtatatgcagattctggacttggtacaggagaaattcgacccaaggtttgtgcaaatttagcttccttcttatttgaaataagataactgatatctttgctgagaaattcttcaactcgccctcccagatccttaatgtccttttgaagtttttcagatatggtgacagaaggtaagtcaaggtaaaatacttttccccaaagtggcttacatttggatttttctggcctgttatcagttttcagagatttcagagatggtctgtttttttcatttttgacttggattccaccctggaaatgtcctttactgtggatcctcatggctccggagttcatggcagtcgcccggcacctacatgctgggtccggagaaagtgtcgcaccgggcagccgcgaaagcacggcttcccccggcctgttgacaggacggccgcctctctccttccgccagctacggcctctacgcagtagaggtaccgcgtctgcaggtcgggtttccggggccggatccggctccaaggatcccgggaattccggaccc

SEQ ID NO: 140789 - DNA, 629 bp, Homo Sapiens
ttttgcttttagttataatttagtattttcaatactttcactaattgacatcataaatgttcaagatttttctttgcagggagagagaaggcatggagtctatccaaacgctaagtaagtggttggttattttacagactggctcttcaggacgtcactatggaccagacaggtggacttccaggccaacagcatggcaaggagcttcctggaatgccatgaaatccaaaagtcagaataaggtgagttttgcagcaacctgcataacacatccacgcttcattgtgcctgagcctctgctccgctgcctccaccagcaccagcaatggcacagaaactgcatcaggagcaaggtggggtgcctcacagtctactgtaacttctgccggtgtggaccaggtggaattcctgggcttcccaggcaagatgaaaacactcaagctgcttccaagaatcccacagctttatccagatttggaaagttgggcaataccatggtgaataattgtataggccacattctttttcttcattttatgaaatattatggacctatgcacttcttgtggaaggagcaggtctttcagagacagtcctatattcttgaattacaacatcttgaagattta

SEQ ID NO: 140790 - DNA, 457 bp, Homo Sapiens
ctttctggggcttgtttgggggcctgcacttttttgcctcctccgccgcctcaccaggaggcctccctgtgttcttctcggagccagacttcttctttttctcgtcctgcatccgcttcacctgataccagtctgtgtccttcttcaagttgccctggccacagcggcaagagcagaagcggaaggcccaggtcgtagccccttctttgtccacatgttctggcggcattgcttctcgttcccagctgcgcgcgcggccgatgcagttgaactggacgaggatgctgctctcccactcgtagaagcactgcaggtgcatccaggtgctgcaggggcagtgctcgttgttgcacaccaccttctggtagtcgtccttctccaggtccaccggcctaccgaagctgcagatcaggggagtggcacatggggcttcgtttttggcatcgcccgcggccgc

SEQ ID NO: 140791 - DNA, 315 bp, Homo Sapiens
aaaacttgaaacagcttttattactcacttacatccctggaaaccaacagatgggatctctcattgccaagttctaatgtatttcatgttcatgctcggctgcaggataccaggtttgccaaataccaataagcttagtgcctgggcttctttcttggattgttcaaagctggaaatccacatctctcgcaaagagctcaaaggtggagtccggagtggtgagaaagcaaacactgtgggctctgggcaactcaggtgggtatcttctgcctcccatcttttgggtggtaagcccctatttccttgccttcccac

SEQ ID NO: 140792 - DNA, 700 bp, Homo Sapiens
  misc_feature (633)..(633): n is a, c, g, or t
tcatttgatttctgtttttatttcatcttgagcatgtgaaaaatcagtggctttttaaactttcaaagttgactgcctagactgataagtttaagaacacacaagtaaatgtcaacagtctcttgtgttgctgacacactcaaaccagtgctaaaacaatttttgtcttaactctgaattatacatgttcagacctgctattgaaacaaatgcattttgatatttggatttttctaaactaaacacacagctgtgctaggctctttgctctgttagccttctgaccattttatagctctaagcatgtgatattttctcctagaagactccgaagtgctagaatattttcagagggcaaagccttataataattcttactggaagcaaactaaacaaaaaccaagttccagaaaacattgcttctgagaaattctcaaatatcatcaagaagaataagtgggttacctaaaaaccaaactatggcaatatgttaaagtacaatactgcagtaagggtagaaaacacatctaaggtttcacccttagtgttaagctttttaaaagcaaaaaggtcatgtgtatcaatttgcagtgtactaaaaatgtgttcaaagtttatttcaagtcacagaanatatacaaactaagacaataaaatgaagtgatttgttctgagagaaggtgattggagtcctcacctg

SEQ ID NO: 140793 - DNA, 458 bp, Homo Sapiens
tttttttgagatttcagacagttttattaggagattgttgaaaaggaaaagaaaattaaatacaataacagtaaacgtggttctcacattgaaaccaggctcaaataactaggctaccatagaaaaatttccaattcttgcattatgatgtaaaaacagatttttgtacagattttgtacaacaaaattcgtaataaccttttatcatttttagaaaactttaaatatatagataaaaatagacaattttcataggtcctacatgaagatgagtatgttctgttccaagggcttgcatagagcgcaaatgtggttataatatagaacaactagacattaatatttttaggattacaaaagcatggaaaccataaaatgggcacattttacttgtttatgccaaaacacaaatttccaaaccaacctgtataactaaaacagggaaaaaattaagttac

SEQ ID NO: 140794 - DNA, 545 bp, Homo Sapiens
ttttttgacttttcaccagcttctccattttatttgaaaataatacttttaaaatgattttgacattttcatatataaatttatttttttcccaactataattttggttttatgtacaagtacacaagtaccaccttatttttaatgtttaccttgaagggtagaaaacaaaatcatgttttataaatgtggtataaaattacacatcttctcatgatgtcatgtcaataatccactacactaaaccaactgtaacaaggtagtacatgctttaaacatccaattaagaataaatctgagccaacaccttgatgatgacaagggaatgtgctgatatcgtgttaaactgatgtggcagtaaaccaagggactaagcacatgattattcaaattaaaacataaaaaggacaaaaggtgtggattttctgggctacatcacataatatttgtctggcgaaaccataatacagatttgggtaaaggagatttttaatagataacaagtaattctttatagggatttgagaaagtacgagaacatatgg

SEQ ID NO: 140795 - DNA, 170 bp, Homo Sapiens
ttttattgttttgccaaaattttatttttctacatattgagagtgtgttctccattttattcagaattcatagtaaagacgaaagaaaggcagagatctgcttggttgaatagactccttttccaaatccttattatgaacactctggtaattttcaagcctaaagaatt

SEQ ID NO: 140796 - DNA, 759 bp, Homo Sapiens
ttaacattaatgagccacgtctgaatatttattttctacatatgatgcactctccacttctaaaatgtcatgatatggcatccttataattctactgatgactatataatattagttgatgtttggaatcaacagtttcaaatgatcctttatactgaaataagacacattattttacttcaattgtaattttagttccagagaaggcagtgctgtcttaaaggcttggacaagattttctttttctcttactccaggaagatcacttaacaacaaatatttgaggtttcttaaatgacgcaaagcaatgatgcctttgtctgtgatattcccacaggatattatttccatttccaatatggttttttgtaaattttcaagttgactaagtctcagcaaacagtcatcctcgatataatgacacttgcacagccttattttttcaacatgctctaggccctccatgtgatcaaatccaatgctcatgatacaagagtcggtggcgtcgatcgcctgaatcttgtatttgtccagagggcctgttggaaggtggttgtagtccttctgccacctctcctggccatggtagcgcaccatggccccacagcgcagcaaccactcggatgccgccctgtcagggccaacatccctgatgcgatcataatccaccttattaaacactgcattcaaccagccccagaagtatctggagtcacatgaccatgggagtttctttacgccccacaactgctgggaaat

SEQ ID NO: 140797 - DNA, 472 bp, Homo Sapiens
cataattacatctttctttaattatcaaagaatcactttagaacattagagttcttccagatcactgaataggaatttcaaccattacattccagtacttagagaaaatgtaaatataattgcctttagtcaaacaaaacaaaaataatatatttggatgatgaacaagtcacccagaaagggctgaaaattagcatgacagggagagaaaacatttctgggttggcgacgttgaaacactggctgtgcattagtccaggtgtgggaattccagcctcgtcctatgttgctgggattctgtttagtctcaggcaaggacttgccttccaggccttagttccttcttctgtaaaatggacacacttgcctgtttcagaggactgaggtgatgattaagacccgtgcacctgctatggtatgcaccgcattagacagtgggctcacacttgattaggatcggaatcacctggag

SEQ ID NO: 140798 - DNA, 639 bp, Homo Sapiens
tttttaagagggagcgacattttcctttattctctatgctagcagaggaagagcagtaaacaattccaccttcaatctgtggtgggaacacaggggtttttaaagcagggtctggaatgcagaagaggcaaggggggctcagaggtgccaggtggtatgacttgctgtgtgatccttttgaattatggtcacatttggtgaaggggctggcaccatcatggatcctgccaggttataagtgagttattcttcacccaggtttgggttccgaccttgaagtaatcttttgttggagtgagaattccagcagtgtctggtctctatcaggatctgactcctaaagcttctttcaatttgtcggcatgtctaatttttcctggttatgagacaagaacctagatttatcttagtggtgtgctcccctttatgctctgtattccacagctcaagtacatccagatctaaaggccatgtgcttcaccagcttttaatttccatgccgtcaccccaaatcttgtgttataactcctctagttgccgtgagccgcgattgcaccattgaactccatcaatgctgtgcagccagccatcatccctatctagttgcaaaacattgcatcaacaccccaccaaaaatcc

SEQ ID NO: 140799 - DNA, 454 bp, Homo Sapiens
ttttgggaccctgaagtgctttattatcaggacttattggaagggtttcccagttgcttccaggcaggtgagttgatttgggggtccagttcttcaaatctgtgaggctttttctttctaatgtctgagtcccctgaggagaaaaaaatcaaatgggagcccacaagttcaggtctttcttgtaaatcaggcagtttttagtagacttcccaataggcttccctggagtcatgacttgaaggtccttagaaagatatacagtgattttattgctttgaaacgtatggcaggttcttctagggagcacctctccaacagacgaacaatcaagaaactgaccaatgaggaatgtggcttcttaaaaacagcagggagagcttctacctagagcagcatttcacttattgcaatgaggtcttcctgctgaaggcatcagaacagctgagagcagctc

SEQ ID NO: 140800 - DNA, 496 bp, Homo Sapiens
catgtgacccctctttttcctgaggacaggaaagcccagctgtgtggcttccttgcctcacctgagcagaacgtggaaggtggatcccccactgtctctactggggaacatcagccagaaaaagtacccatgctggagagaattggagttaagtcaatctggaagttattttctacttatctatctaagagattcaaaaactagtgtttcctcgagaatggtgtcatcaagcacaagataatgaggaagattgcctaattcaggaaaaaatatggagaaataaaaccccacattgcaatcacatgtaattgggtgaaagcaaaggctcctattctctgctgatccactgacagatctctcgtttagatgctctgcttacattacctcatttaaaacctgctacagtaaaataaggtaccatgtatgtagtaagcatttactaaatgccaggtacattgctaaatgctttctgtgaataaacttacttttaattttc

SEQ ID NO: 140801 - DNA, 413 bp, Homo Sapiens
tagtattcaggaatacaagtatctaagaatatttagggtggccataaagtctggaaacacaggcaaatgtacctaatggtttattgatattacactatagtacatgatgtgctgaatgccatcatgtccgttcagcatcttcccttattagcaatgcatagttgagtgtacagtgccaaactgcaaccaacaggtgtattactgtagcatttccatcatttcctgcacatggacctgtgttcctgatttgtctctgatttccactgactaaacctgcacctttagcatatcccagaagtggtcatcaaagtttgcactattagaaatatatacatgacttatgtttccagactattgccaccctataaattaagcaaactgctttatgtatctagttgacagcattataacac

SEQ ID NO: 140802 - DNA, 508 bp, Homo Sapiens
gagtgctcattaattaaatttgtttggctttatatgtaaaatgaacattgatgaaattttaggtctagtatttttctgcaacagaaagaatatgatttctgtcatttgggctagattaggtctggtaggaatgacttttggcatatatgcaaattttatagatagcttctcctgtgtggccctatgtatgctttaaatgccatgaaattgtcgatgattgtaatcagatacgatcccagagctgcctttttcctttagtaagggactgttctctaaggttaattttgtcaggctttgaactttggtaggggagtcatatagtagaaggctaaagaaccacagaagattagcctagtgattttcaaactctaacccaaggcaccctacaagttgttcagaaattcttcagtgccactgcaggagagttggaaagatgaaaaggcagaattctcatctccatatctcactttaggaggagcatcttttatctcttttatattgagttttc

SEQ ID NO: 140803 - DNA, 474 bp, Homo Sapiens
tgcggccgctggttctggggacgtttttcagaagagcaaacgcaccggacggcaggttttggaaatgtttcccctaaagcagaccccaaaacccagcagcgctgagcactcaggaccgtttgtatctgtgttattgcccatgagagaatagatggcatgcaaagacattattattaaagttggtagtgcaagaacacacagcaaatttatgtcttgtagtctagataaaatattacagtctctgctacaatttcagcaggctcactggggcctgtgaccccagcatcctgggagctccacgtagcccaccttagcgctggggtccaaagccctcatccaactcacacctcgcactcctgccactcacaggtgagactgagctgctgggaacatggggccgtgctgactttccttgtgcctgccctggcgtgaacacaggacatcctgcacggagcatggggagggtgtgtgggg

SEQ ID NO: 140804 - DNA, 582 bp, Homo Sapiens
atcattcaaattcagagcatttttattaaaagaacaaaatattaaggcacaaaaaacatcaatttttcaaatgaaaacccttcaaacggttatgtcctacattcaacgaaacttcttccaaattacggaataatttaactttttaaaatagaaaaatacaagttcttaaatgcctaaaatttctccccaaataaatgttttcttagttttaatgaagtctcttcatgcagtactgagctccaatattataatgtacacttccttaaaaatctagttttgccacttatatacattcaatatgtttaaccagtatattaaccagtatattaaccaatatgttaaacttcttttaagtataaggcttggtattttgtattgcttattgcatgctttgatcatacaaagacacaagtaccagaactagtgattataaatctagcatagcatctgtcaactttagtcatgtacagcctagtgcaacagactcgaacttttttttaaaaaaaggatacataactcaaaatgtatatgtacattttttatactttcagcttgacagtatagtaatgtaaacattgtact

SEQ ID NO: 140805 - DNA, 1357 bp, Homo Sapiens
ccaaaactcaaaataattttatttcaaacacttaacaaagttaaattgtcctcacttctgatacacaaaaatgtatattcatataactctcttgatatatacatatacatacaaacataattcacatacatggtaatattctgacctttacctctgaaattaatttcaatttgtgtcatatatttcattttttacaataaactaaatacgttcataaaaataattaattcttctaaagtagggaatataaccctggataggaccagggtatgagggtgggatggtccgagctggtgccagctcatacaagatgcattggtgcacattttaaaaaggacccacatcctctgggtagacacagacacacaacaacataagctctgcttggtgaatggagcctgggcaggacttcagctcccactttatgtgctcttgcacagggcatgacctatgcataggtggcagtcctggagagggttgctcagtggtggtgtgagcagaagatgtgatctagtccacccttgggcctgttccactccttgccttggaaagggctcgatttgaatttgtctggattattttggtcaacaaggggtccccttgttcttgttcaccactctgtcggtttagctgaagatggaagacctctccaatgaaagaggaccatttttcacgttcaagtgtattgcatggctatcctctgcttcgttcagcctccaagggggcttttaaggtttaatctaaagaaataaccctgtattgattcttgatttcctaagaaattatgctgtcagtctggtttgtaggcaagggttgcaattttccctctggaaaaaacaaatcagaagttagtccatttgtataacactgcttagtaactgtttagaaattatatcagtaacactaagaataagctcaagctatctcctaagtgacccaatttattgactttcaggacaaacagtatatgaaatcaattctaatttccatatatcaagaaataacaagcatgtcttatttcagtaatcttttataaactttctatatcttagggtcgtaggttataacagatgcatagtattttaaaaccaaaataaatttacctttaagtggccttagtataagccataagaaaggcctgtttcaaaactactaacaggaatttatcagagtaggagctcaaactactgaaatacgattttagaaggacttttattttggaaaaagaatataaaactggaatttgggaagaaagggttagatagtggaaagcaccccagattggatccgagtccttattctcaactacctaatgagatgaaattgtgcaagtgatttaaatttgatgagattcatc

SEQ ID NO: 140806 - DNA, 596 bp, Homo Sapiens
  misc_feature (298)..(472): n is a, c, g, or t
tttcattgacatataacatgtacctagctgacatatagttagtatttaacaggtgtttgttgaattgaaaatgaattaatcaaatatattctaaacattaccaaagggtttgcaaaatttggatgtgatcccctaattacactgtattttagtttctttaatcacaatgatactgcaattccagatcaacaaaagacagaaactgatcaaagcgttttccatacctttattccactaaaacagaagataaatattattttatttatcaagaaaccaaaagtagggggttttgacgatnnnnnnnnnnnnnnnnnnnnnnnnnnnnnnnnnnnnnnnnnnnnnnnnnnnnnnnnnnnnnnnnnnnnnnnnnnnnnnnnnnnnnnnnnnnnnnnnnnnnnnnnnnnnnnnnnnnnnnnnnnnnnnnnnnnnnnnnnnnnnnnnnnnnnnnnnnnnnnnnnnnnnnnnnnnnnnncagtctcataaataagagggaattcctcctgcctaaatgccttcaagttgggacattgggttttttttccccgcctttgaactttaatcagcttttcctggttcttgggcctgctagccgttag

SEQ ID NO: 140807 - DNA, 675 bp, Homo Sapiens
ccgcgaacctcccccccttcccgtcgttactctgcatgacttcacaccaccgctaacgtctcaccccttccatcactcacgtccactcccaccaagttgatggtagaggccagcacccgggctttgccaagattagccaccttgccccaagagttacctgtccccgggctcagtcaggcagccaccatgccggcccgtttgccttccccattgtcctgcgacctcacacagcagctcctgcctcagaccgttctgcagagcacgcccgctcccatggcacagttttcggcacagttcagcatgttccagaccatcaaagaccagctagagcagcggacgcggatcctgcaggccaatatccggtggcaacaggaagagctccacaagatccaggagcagctctgcctggtccaggactccaacgtccagatgttcctgcagcagccagctgtatccctgagcttcagcagcacccagcgacctgaggctcagcagcagctacagcaaaggtcagctgcagtgactcagccccagctcggggcgggcccccaacttccagggcagatctcctctgcccaggtcacaagccagcacctgctcagagaatcaagtgtgatatcaacccagggtccaaagccaatgagaagctcacagctaatgcagagcagcggccgc

SEQ ID NO: 140808 - DNA, 626 bp, Homo Sapiens
  misc_feature (559)..(559): n is a, c, g, or t
ttttcagcttttcagaagttttattataaagagatttgagagaagcactgggcaccaagacagacactcgccagggccaggaaacagctgcaaacgacgtcaagaacccaaacccaaacgaaaccccaaaaccacacacacggtaggataagctgtaacttcgttctcaaggtttcttcataaatagacaaaagtcgtcgccggcaatttaaaatagatgaatacatgattaaaaggagagcagtgctccggggtggctagcaagcgtccggtccttgctgtgaggatgacgaaacggtttggcagccgcttttgtgcgcgtctcccttaagataaaacttaaaaatgtgctaaggatcatataaaatgctttttaccttaaaggaaactacttttttcccccacaaaatagtcttacagatgtcttcagcacagttctaaaacacgtagtcaactacttacacggaaccaacagtttctaggtttcgtaatcttttgttcacactggaaaaccgatgtgcacatctatgccgggggccggccctctggcccatgcatnctggggttggtgtccgttggtaagcgaccccgccaggggcggcccacctgggctggggctggagctg

SEQ ID NO: 140809 - DNA, 383 bp, Homo Sapiens
  misc_feature (322)..(322): n is a, c, g, or t
tttttcagatattaagcctagtatttattagttatttttcctgatcctctccctcctcctcccacccagcaccttcctttcaacagaagaaaattccagatggaatgcacaaggtacagtgggtttggaggcatggagaagccggtagaacttcctccttggaggctttcagtctggactgggctgctcctcctcctggcaggctgaaggcaatctagctgagagtatggctcctgagcactggtcccaggcctgggttctagaatgtctctgtctgcagggctcacttgctgctgtgtgtgtcacccgagaggcagcatanagtaggaaggggggcactggatggggggtcaggacattcaggttccagctgggctctgaat

SEQ ID NO: 140810 - DNA, 360 bp, Homo Sapiens
taaaggaaattattttgattaaatatattttatttgatctgggtatttttggaccacattattaaattaattgttaagctgcagttgagttgttcaagtgagagttttgataagccacttatgggccgcgttgtgaatcacttgccagttgtactttatggagcttattttatgatttaaaatactgtactgtacataggaggtatgttaccttctccttatttgtatgtttaccatatactttgatatttgaaatgttatgtactggaaaggccacttatatttctagaacagattggattttatgcaaccttttttccttgaattaacagcaataaaaaaatgaaaaacagcttaaaa

SEQ ID NO: 140811 - DNA, 548 bp, Homo Sapiens
  misc_feature (237)..(237): n is a, c, g, or t
  misc_feature (508)..(508): n is a, c, g, or t
ttgttaggcaagcaattgagctttattttcttgtaatatgatttaatttctcttttgagacctcattctatctgatggcagaaaaacaatcaaataagttccagatagactcagtcatttcagggttttctcaggcattttagatctcacttaactcaggatactctcacatacttccttctctccaggaggcatctcggggcttgctgggcatcctggcccaggagaggcatttanttccaggctgatcccctggagagaggcgtcacccagatgtgatgcatcctgtctcatgctgggtcatcatgtcctgcaggccactctgcacccgcctgattctgagtgacagccctcctgggccaccatcagacatttgtgtgtcccgcaaaaacccctcgaactacccagccatggtgttgccgcaacgttttaccatatgcattatttagggctgtctggatatccttctccccatttttcacttctgtcaaaaatcccttcaaaaatntgagacctctcttcagccacaagagggcttcagtcgctga

SEQ ID NO: 140812 - DNA, 990 bp, Homo Sapiens
  misc_feature (109)..(109): n is a, c, g, or t
  misc_feature (111)..(111): n is a, c, g, or t
  misc_feature (140)..(140): n is a, c, g, or t
  misc_feature (192)..(192): n is a, c, g, or t
tttctctttgaagacctccattctatttgatggcagaaaaaccaatccaataagttccagatagactcagtcatttcaggtttttctcaggcattttagatctcacttnanctcaggatactctcacatacttccttctnctccaggaggcatctcggggcttgctgggcatcctggcccaggagaggcatntagtccaggctgatcccctggagagaggcgtcacccagatgtgatgcatcctgtctcatgctgggtcatcatgtcctgcaggccactctgcacccgcctgattctgagtgacagccctcctgggccaccatcagacatttgtgtgtccttagggctgtctggatatccttttccccatttttcacttctgtcaaaaatcccttcaaaaatttgagacctctcttcagccacaagagggcttcagtcgctgagttcctaacctgggctacatccgcctccacttcgtgcagcactatcttctggagagtggtaaactcttctttgttggttatatacttctgatttactttcttaatattttcaacaagatccatcttaacaggagcaaacactgtagggccaagtttgtctaatactggaaccacagcacaacatgatgccaagaatgcttctgtgggaatgccactgtcttccagaagttcaatgtcactaaagcttgtgttcatggtactaaagaaagttgggataacttctttgccttcctcccagaggcattctggagagcaacttgagtctgatccagactgagacaagttattgtcatgatttttcaggttttccattctatcttccttcattatttcaccttggacggttatattatcatctgtattttcctcacttgatatgctgcagtctatctctgcagatttcaaatataaggaattcttatttttcattaggatttcttcctcaccatttatttccatatttaaagatccattttcacaagtgccc

SEQ ID NO: 140813 - DNA, 495 bp, Homo Sapiens
ttgtggctactttgtgttattataagatatgagctcaaaccgagatatgaatgaccttggggagccatctgaggccaagatattgacgggggggattcctgggtcccattttcagcgcccagggtcacagatccacagtgggaagttctgtgggacacattggcactgagccacaaagaaggtgtggccagaacaacttgggctcctgctgaccaatgtcctctagggcctaggggacagaggaacacagagtcacagcttcaggggccgaatgagcatggcggccttcctgagagaatatgccccaccacgaaactcagcccagtagacaccatcctggtagcggcttcggtagtggccgccgtggtgccacacaccgttgaggttggagtgggcacaggcatggtaccaccagcctccccgctggtacagggcacagttaccagaataggagtctctgtccctatccacggtgctgaagggcttgtcattgtg

SEQ ID NO: 140814 - DNA, 574 bp, Homo Sapiens
tttatgacttaaacttttttactggtcagaatccaaaagatgtcaaaatttccagcttctaagaatgtacttagacaaaagcaagaaacaataattttgataactatgaaaaagtagtttttgatgagctgtttagaaaatgtagaaatttcattgttgaaatccctttaaacctttccgttttctttttcttcctgagtctgtgtaacattcactggtatctgatgaggaagaggatctggagttatgggaggaatttctattcacataggcatcatataaccttaagtccttaggagaaagtaattcttggcaaacattccaggaccatgtataagttgaaaaggtgtcataaaaggactcatttctagagtccatcccaatcaaatcccctcggatcttctgccagaggtttagcatctcttttcggtgttcaagggcaattcctaaattataggtatcagtagctctcttcacatgttgtttaatagcagttgcatcggccactgtacaagtctgctttttcttgagcatttgatcaatggtgaagatgttatttgaataacctgaggca

SEQ ID NO: 140815 - DNA, 595 bp, Homo Sapiens
tttaatagttttattttaaaaatgttcttcaactgtgtgggactttaaattttagaaacaagaacttatgctacttttggaagatgaagtgaaaccactgcattccagtttctacttcatagctggactccaagggtactaagttcctctctggtccccgtgggccctggggtggggtggggtgggcaggccccataggacagggaggagggaggactggaattaatgagcctgagaattgttcttgtccttgagtgtcactcacacatccctgcgtcagtgcagcctgcagaaaagccatctaacccaaggggacttaggtggagagagacccctattttattaaagacacgggtccttccttacaccaccctgtatgctgttcagcccagggtacgcagcacgtgctcaataaatactgactgatgacaaagggtatgttgtttcatttccaaggatccaaggaagttaaaaataaatatgaatttcccaaaagcctaggctgaaaattccaaatagcagatctgtagatctgatggtttccctgcgggtttaagatcctttcccaagtcctgcaccatcattaactggcaag

SEQ ID NO: 140816 - DNA, 356 bp, Homo Sapiens
cccctcaaacccaacaaaacccaaaaacaaacaaacatattcttgacttccatccccaattttaaaacaacagtttttctacaactcaatgctcgccggcagcacgggaagtggtatgtcggacgcacatacgcacacgcatgctcacacgcacacatattggatatacatacgcaggtgtatgtccatcgaatatatagaacgcatgtaatggcaatgagatgcagtcactctgaggaaggttggtttttctaaatatcctactaaacttgagaaaaaaagtcttgaacccagtttgtgcatagttcatgatcctctataaaaccagcttttgtggatctgcagtcttgcaggac

SEQ ID NO: 140817 - DNA, 525 bp, Homo Sapiens
  misc_feature (351)..(361): n is a, c, g, or t
  misc_feature (498)..(498): n is a, c, g, or t
ttttttttagtttagatcattgctttatttcactaattgttcaacaacaaagttcattcctctcaaggtggatcttgaatcattccttgtgttctcttcctcgttctgaataaaaaaggtaatgaagaaaaagcctgtacttttggagacctagaatcttgattgatgctaataagcttttgacagcaatttcgtgttacggtatatcctgctggcatcttggtggtcacacggagctccccaccctccagtgaagatggctgtccacaactaccaccattgaaaccaaaagtaagtgttgaaaaatgcaccttttacaataaaaaagtagaaaccaattcaatttcctcnnnnnnnnnnnacgaatataaagtttcttgtaaatatgtacagtcttttgagctagttctatatagcagaaagcagttcacagatgagacacacaatatacattttcagggctcaagaagcccatttctcatggagatcctaaatganatgccaagactgaaagacccattttca

SEQ ID NO: 140818 - DNA, 349 bp, Homo Sapiens
agccagccagaagttttgctggcaatggtttggtttctagaacagcatcaaaacttgtctcccatgttttgtaagtggtttaacccacaagatatcacgcatttgaaacttttaagaagaaacttaatttcatctgtgaatgcagaagcaaatatgagggcatgggcatttaaatatgaagtatttcttgaaagccacctactggagagtaagtttggtgcaataatttaagaaaagataaaaaagaaacaggaaaattgggacaacggacagcatgatggagccaccgtgcaagccctcaatagtctgcctccaggttgtgtcaaataaagtaaaaagaacaaaaaaa

SEQ ID NO: 140819 - DNA, 513 bp, Homo Sapiens
ttttcgttctcatattttataccattttctgtgtgtacagggtgtgcaaattaagcaatttcaataaatattagaaatttattttgcaaatataaaatgagtaaaatcagctaataacgcaatacaataaaatcatgtgctaaacagagctttttccccatgaacactttttaccctttcctttgaacatcctgacacttcctaaatacaatttatttcactgacttgtagaaataagcaaaagatgaaatattaactagctgcaagatactaaatactttagtaataagagcttggagctgtcaagttgtaataaattgaaaataacagaaaaagtgaaatacgctgcaaattaatgctcaaaaatgcagccatctgacttgcaaaatacacaatcctcccagccttctcaagttgtcattagttcataggaaatggacagagcaggagaaactccatttagcttttacccttccagcagccccgatgctaaagttgtacaaccaggtatgt

SEQ ID NO: 140820 - DNA, 525 bp, Homo Sapiens
ttttatagtgttgttttgtttactctttccttattaaggggaggaaattccatgaatagaattattcattgaatccgtgtcattatgacaacaatcacttaggcaagcttttccactggttagtgcatgtttatatttcaagacaaagcttgcaacattaatttggcactggttcaagtagaagataatcagtagaagagattaaggggtccatcaacagaattgataacacttcttcctattcattaaatggaaatggatcatcataaaggtcttcatccttgccattttcatgttgcataagctggaatccttgtacacattgtaaggttattctcaactggcttggcacttgctctttttgacaaatgttatattcatagggttgcttttaaattcctgcaaagaaaaagccatactgaatatattcagggtaccttaatgatgtaaagagtccagagctaaatgaagaatcacatgaagcaggatcagatgccatccatttcaatgcttgtattgcattgg

SEQ ID NO: 140821 - DNA, 732 bp, Homo Sapiens
  misc_feature (681)..(681): n is a, c, g, or t
  misc_feature (692)..(692): n is a, c, g, or t
  misc_feature (708)..(708): n is a, c, g, or t
aatgttatttaattatataatgattctactgggatatttctctgttgactgggctgggctgatctcaaacctgtcacttgtatatctgcataaagttgacagtttgacaggtggcttatcctggatgctctctttcacatgtcaggcagtggcaggccttctactgaagtgatgggggtgacccagtgatatcacagactcagactatttgaggctggtttatatagcagcagaactggaatccttgtacacattgtaaggttattctcaactggcttggcacttgctctttttgacaaatgttatattcatagggttgcttttaaattcctgcaaagaaaaagccttaatgatgtaaagagtccagagctaaatgaagaatcgcatgaagcaggatcagatgccatccatttcaatgcttgtattgcattggtagaatataattaatattcttatgatcttataattttagtgtatggctgtcttgagaaatacatgaatcatggatctctgttggatgggtattcagatgatcctccaaatcttcccagtttttacaggaccacatcaaagccttcacccataggacagttcaagatatgctgcttcttcaagaatactgatggcttcaaaaacaaccatccgaaacccccagcctttcctcttctacgcctcgtgccntctttcttggncctcgagggcccctantccctataggtagtccctattaaa

SEQ ID NO: 140822 - DNA, 486 bp, Homo Sapiens
ttttttctggtgcaatcaagaactttaattggaggcaggtcttcccatggtggctttttaggagctggagtgactcttgcttggtggcacaaggatggctcagatgtcttctcctccttcaggggagtttccgaattagtcttcatgactcctgtccaccgccctcttcctcatggagatgccccagcagctgtgcagccgccggctagaatgctcagggcctcccagtgaggcatggctggaatggccagtgctcctggcagtagcggtttaagtttctcttgtaaaaatttctttgggaagcatatgcattcagatcctcaaactcactgctgctggaggaagtgctcttttttgtctggatcaggggtgttctcgaaggcaaatgggagactgcgttaatgcgcttgggattttgtctgtcaagctcatccttctgaagcagcaaattttgggtcgatggcttgtgctcctgggtttgactgc

SEQ ID NO: 140823 - DNA, 575 bp, Homo Sapiens
acaaaattagtcataggcatgtgaagacatctgtgatcatctgagtccatctgatcaaaatatttataaaaagtcattaatttattcctacaatcaggatttgtgggcacagtcaagcaggttttgcacatttaatcttctcatcaaccctgagtagtagggtctatcgacacgcatgttacagatgagggtacgaagacacagagaggttgaggaacttgcccaaggttgcacagccaccgagcagcagagccctgacccagtagatgccagcatgtcctgtgaacagaggatgcctcagtcccgagtctctgctgctgtggggagtctggagtccccagcgctctgcacaactttgggcttggcagccttccagggtgcgccctacgctcactcaccatgcagctactggactaagagctggagagacagcagtgaacactgagacacctgccttatgcagggctgtgaaaggcactcaaaatggccttttacatatgggaaactgaggcacggtgctactaaacgagctgcccaagtccccacagctgggcataactggcagagctgggact

SEQ ID NO: 140824 - DNA, 465 bp, Homo Sapiens
taggacataaatgagtgagcccgacgttcgtataagaacgaagcgcgcgcaggagctccggctcgccgaccccgagaagcgagtgctggaccggagcgcagccgtggagtgcagcggagcccgcaccaccgcgacaggcaggagcaacagctgcagatggcgcaaacaaaccccctccggaggcggagcccagcgccgttgctatggcagccgtcgagggcgggagagggaggcgcgcgcagcccggggaactcgtgggcggcgacagcgcgcgtctcgtgcgcggggaacgtgggcgagggggcggttttttggcggcagcgctttcccccgcccgccaaccccgagcgccgccttcccgccctttcgggtttgaattgcccgcccgcagggaggggagggaaggggccctcgcgatgggggagggtgcacggggcgggggcggcgagcccgaggagagcggga

SEQ ID NO: 140825 - DNA, 628 bp, Homo Sapiens
ctttctaaccaagttagtacaaatgccatctttccagcatctggaattccggctaaccatggctatatcccttctcgggaacatcttaatgtgcatatccaccttgcaaacgatggcacctacacactcctcccctaccatggccaagaagcacagctgtggccagttgtggataaaatatctataggtataaatggagtagggttcggacagatctttggtgatcagtctcatgatatcgggcatttgtagctcggattcatatcggacatatcgtatcgtccgatcctccccaggctcaacctccctgcccgaagggcttcttaagctgcagtcggcggtcagggacgaagacagcagccgcacctgctcgtcttcctcctcctcctcctgctcggtgccctcggccagtccattgcgggccgccgcgggatcgctcgccgccgctgcctccaccgggctggggaccgcagttcttgcattactagagagggagtgagggggcctctcgcccgagtgtaccccggctccttttgttgcagtcgctctggggcctccgtcaggggtggctgtggtcgcggccacctctgctacgctcaggaccttgctcttgagggaggcggccgca

SEQ ID NO: 140826 - DNA, 420 bp, Homo Sapiens
tttacttcaaaatcagtttattcaaaagagattaacatgttcactcccacccctgccctacatactcacaccatcagtgtgacagggaaggcccagggaagaagtgctctgtgatcacagatagtccatcgcggtgagagacccacctcgcagtgaggaaaacagtgcgttttataggagcacaagtcccctggtaatgttcatgaaggttgctcttcagtggatctttcagcaagtgcatacacaaggatgacgggctttctacagttacaacatgttcaatcttctgactaatggaggcagtggtggaaattcccattcacgacgatgccatggaaggagggaggccaggacccagtcagtagcacgcagaaggcttgtgctccaaaatcaaagatcctgactgacactcctaaggaa

SEQ ID NO: 140827 - DNA, 863 bp, Homo Sapiens
tcttacccgtgttcaaaaagcaggctggtaacggtcggaattcccgggatatcgtcgacccacgcgtcggttttttagatagtttcataaaaacaattctggtttctttttgcttgtgctgactttcttggattttaatctacctcatcttgtctttttagagttacttcaacttgtcactttaacattgtgcttgactttggttgttttctaagatggaatttttcctgttcattgacagcttgttctcttgccttttcattctgatcctcatttcatctaacatcatctcatattgctcctctgtcaagagaaatgttttaaaatagtttaaagtcttgttttatgggaagaaagtgatcctccaatgctatttgtttctgaggtcagtaagagaaggagttaaaacaaggcagtggggaagggaatgaatcctgcactggaggcaaaagctgacaaggaaagagccattaattaagacaatttcaaagtcaactgattgtgatcattaatgtcacaatagatcaaaacctaattatcacagcctaggtaagagccatcagtattaatcggaaaatctaataggaaactattatcaagaaattaggccaaattgaatgcagtgaactttttatcttggcattctctatttttttgtgatgtcccctggcattggcaggtgtgaccctaacagtcgattcaaggccaagtggtcagtttgtcagccttttttaagggatttctttttatttttaggaattccaaacagagttaacctaaactgtcattgccaaaagatcagtcttaaactttcttagcacctgtacctgtttaatgtgatcagctatcagtgaggaaaaaaa

SEQ ID NO: 140828 - DNA, 523 bp, Homo Sapiens
cattttcgatatgtggtaaattttgtctccaagaaagggtttggtgactgaatttttctcttttcctaaaggaaattcatagatagaatgctgaatatcatccacatttaaagatttgacaacataaaagttagataactcttaatgatgtgaatctttaacttatgattttgagtaaaggattatctagaatcaaatatacacttattaatcttcatttcccaaaattggtccatatttagacaactacctggcacaatttcactagataaacctaaaatctgaacaatggaagttaaacttctacccaaagtaaaaacaaagccataagattccacaattgaattggccacaaacattcacactatgttataaaggactttctcatttcaaatacatcactgaatgttcaacagaatttgcaaacataagatccagaatgactagcataacatgctaagagcatgtcaaaaagtaaaacaccacctctccccccccaatctggaaacacactcaggcattc

SEQ ID NO: 140829 - DNA, 516 bp, Homo Sapiens
tttgaggttgaggatttgcttgtatttcaccaggagagagtcagcttcctgtttgggtacccacaagacatcttaagctgtgccatgagacagagtccaagaagaggaaaagacctcagaatgtctctgcgcccccagttcgtcagacggctcagatgaacatctctgttgagcagatggaaaccagtaaaactccccaagcaactccaccgacctgggggcagatgaagagactggctcacattgcagaagagaacctgaggtctcagaacaagccgctgaccaccagtaatctaatggtagctatgatggcggtaatctccttggtggtgagtcttctttaatagctgtggtcctgggccttgctggtgttgctttgcactcttctattcaaactgcggactttgtggtagttggcagaaaattattctaagctttgaattccaaagccaaaagatcaaaattggcaatcaattatgatctcgtcaacagtatttggattgagatcgatatgag

SEQ ID NO: 140830 - DNA, 489 bp, Homo Sapiens
  misc_feature (185)..(193): n is a, c, g, or t
gtagtaggaattattaaccaggagcagcgctcaatcccgagggggaggatttggtactaaggagtaagaagtggaacagaatggagggggagtaattgcacacaggtaaaactacagaaaatgaaatagtggttggaatgatgatggtggctctgtaattccaccaagtgtccccagagtgtgannnnnnnnnaactgcaataaaggtggtatgaaattgagacaggcacctttttcaattggatacaagcacctttggtgtcaccaggccttgtccatacccctgtgtcttaggatggctctgcattttatttagaattctaaggactcttgagggagtcacagctgcctatcctgttccaacaccttgaatatatttggaagcatcccaagcctaattcatgatcatggggacaacacactggcctgttacacatacttatcgctgggaggtacaatgagtgtccagttattttagtactggtggtc

SEQ ID NO: 140831 - DNA, 550 bp, Homo Sapiens
agtgaaaacagtacttgaatttaatcagacacaggaagaatgtgtggtcaagcttgtgagaacacactatgagtgtaaacagaaaactagtaccttgagcagggaagtacatggcttttagtaacagcatgggaacttttctggttacatggaataattcagacacattaagaaaagccaagtgtacagaatcaagttatactggaggaaaacattgcttttgtaggccatcaagacaaacattttagagttagactttaacagcagagttataatcagaggaaaaaagtgacaggagctgatgaaaaagttaaaagagagagttatcacctcaatcaagattaaaggtgtactttctcaaggggagaaagagttgaaagcagtgatgtatgacatgcagtaagatgcagcaaacattaaacttctgagatataagtctgagaagctttaagaggaaaactctacctcaagaaatgaaattaccatcctaagtgaagaagacagctctcctaacgtgaaactagaaaattaaataaaaactgtgaaacag

SEQ ID NO: 140832 - DNA, 399 bp, Homo Sapiens
gggatcaggaccccaattcattattcagaaaatggatcaataacagaaaataatgacaaatggatcttgctttttcttttcaaactatatttcaagatatcaaatacataatgatgaaaaattgatccctactaaagaattccaactactaaatgcagaaagaatgatggaattaaaaaatttccagtttgtgacttctagagaagtccattgcaaaaaccattacttaaggtaatgtatggctgatgaggaaccttataaatggtggaccaggtatacagctaaatcttctgaccaatcttaactcactgaagttgggacagacagatactatgtctctcccaatgagatatactggaacgtccatagcaccaactatacagcaatcttgcctagaaa

SEQ ID NO: 140833 - DNA, 723 bp, Homo Sapiens
  misc_feature (236)..(306): n is a, c, g, or t
ttatgctctgaggaaaatatttttatatgcactatttttttcttgcaggcactttaatatgaggttttaaaaaaccttacttaagacaaataaaaaagaaaaccttcatgtaattactttacctgcaggctaatttttaaatacttcaacaccgtaacaattaaatgggctatgttagcttcagttgacaacatttatttatttatttatttgcaatgagacctcataatatccannnnnnnnnnnnnnnnnnnnnnnnnnnnnnnnnnnnnnnnnnnnnnnnnnnnnnnnnnnnnnnnnnnnnnngtgccagccattctgcctagctagttgatcacttttagggaaggcaacacccacaagatttgttggacctgaacttcttatggtgtgtctgattttaaatgaaatgaattttgctaaagtctcacaaatggttaactcttctgcctttattacatgttttaaatagttgatttatctcttagtttcttgcagcataattggtatattgcttctcttgctaacatgtcattttactgtaggtggttaactgaatgcaacaatgtggctacaagttgatatgggatccactgacttaagcaacttagttcatctgatctgacatatacttacgatctcttagtctttcattttcaaacagaccgtgagataattcaaacctaaaagcaataaagtgcatatgaagtgtttgttcataaa

SEQ ID NO: 140834 - DNA, 490 bp, Homo Sapiens
attttttaaatattccatgatattctttttatttccaggtgtggcatataaaactgacagcttacagtaagaaatatttcttatgatcaaacacttcatatgcactttattgcttttagttttgaattatttcaaggtatgttagaaaatgaaaaaataaaagatcgtaagtatatgtaagattagatgaactaagttgcttaagtcagtggtttccatatcaacaatgtgactacaagttaaaagttctgaagtcctaaatgtctcttcctgagaaatttcccatttggtgctcaacagcacaaaacttttattagcgcttctctggggaatcacttggcattcctcggtctctgcaaactggacagcaggttcctttcaccaattcaggactgggacagggagccgggggacaaatctccaccacacaggtgacctggccactctcacaaatgcagtggagtgattcttctttcatccagcggctctc

SEQ ID NO: 140835 - DNA, 417 bp, Homo Sapiens
tttttgaagagtaaagggcagatgtaattggtccatacggcgcggtttgaagactgaggctggcagagtggattacaaacacccaccactccgtgctgtccacagacaactcccttcagacagggcacaggcgggctaaaagtcaaaggatgaaaaacggcacgttacaccgacaggagtgaaaaagaaagagctggaatgcctttgttactgtcaaaacttcagagcaaagacaattacttgggtccagggtcctaacgacagatcagtccaacgagaagacacggtgatcctaaatgtgcatgcgcggagtatgtcccgttaggacaggggtgaggaacaggctgcggctgcccacacttgtaagcgccccacatttctgcacgcgtagctaacgttagagagagtctttctata

SEQ ID NO: 140836 - DNA, 538 bp, Homo Sapiens
ttttttttctaaaaatgtctttatttcccttcaatactcaattgataattgagcagaatatgaaattataggtgggaatcatttccctcaggattttgacgcctcattctattttcttctagcttctgatgtttttattgagcagtctgaggcaattctgattgctgatcctttgtaaaaatcttcttttttatctctcgggaagcttttaggatcttttctttatccctctagttctgaaatttcacaatgatacataggcctgagtgggaccttttttccttcattgttcttggcgctcaatggacccttttatactggaaattcagattctgcacttctggggaaagttttcttattacttattttaatagttttctcccctccatttctctgtcttctcttcctctcttcactctgccttcagtgatgtcccgaagttcctgggcctttctgggattccacagggcaagcttgttggctttcggtgagcagttccttctgcggaccctgcagtttctgtccctaccatcccatc

SEQ ID NO: 140837 - DNA, 1066 bp, Homo Sapiens
aaaagtcatatacctatataataaagctactgatttcctttggagcttttttctttaagataatagtttacatgtagtagtacttgaaatctaggattattaactaatatgggcattgtagttaatgatggttgatgggttctaattttggatggagtccagggaagagaaagtgatttctagaaagcctgttcccctcactggatgaaataactccttcttgtagtagtctcattacttttgaagtaatcccgccacctatctcgtgggagagccatccaaataagaaacctaaaataattggttcttggtagagattcattatttttccactttgttctttaggagattttaggtgttgattttctgttgtattttaactcatacctttaaaggaattccccaaagaatgtttatagcaaacttggaatttgtaacctcagctctgggagaggatttttttctgagcgattattatctaaagtgtgttgttgctttaggctcacggcacgcttgcgtatgtctgttaccatgtcactgtggtcctatgccgaatgccctcaggggacttgaatctttccaataaaccaggtttagacagtatgagtcaatgtgcagtgtagcccacacttgagaggatgaatgtatgtgcactgtcactttgctctgggtggaagtacgttattgttgacttattttctctgtgtttgttcctacagcccctttttcatatgttgctcagtctccctttcccttcttggtgcttacacatctcagaccctttagccaaacccttgtcagtgacagtattttggttcttagttctcactgttccctctgctcctggagcctttgaataaaaatgcacgtagctatggagtggggtttagctggaaaggtggccttccaacttcacgtcaacttctggctcctcagtttggcagtaaggcagggaagttgttttcctatttctcactgagaagattgtgaatatttccatatggattttccattattgtttgtttgattctttgttttaaaataaaaattctgaatgtacatgaaa

SEQ ID NO: 140838 - DNA, 492 bp, Homo Sapiens
ccaatgctcggggtttcacgggaacaagcgcggtcgggcggggttgcgggtagtcccgcgaggagcaacctttggagccatcgcgattgattcctcccatcccaagatggcttctgggttccactccttccccaaacaccacggataacacccctcccccttttttggaggctgactgatacctggacttctgggtcctcttccctccccgcccccgcattgcttcctcccttctccccacccctgaggcttccttatgtctgctccgaggtgtgggtccccgtcgcggttgggcgggaggaggcggcagggagctcccctccgtccggatagtggtaggtgcttcctgcggtggcatttctggcgaccccgagcatcgtagagggtctcgggatcgaaagtgcgcggggctgctttccgggcggggagaagctggcgtgggactagctggggcctgtgtctccttggctctctatttcagtgagcggccgc

SEQ ID NO: 140839 - DNA, 520 bp, Homo Sapiens
gcagcaactcacagtagcttgtggtgagaattccaatgggattactaggtacgaaccgtccttcttttactaaacgttcacacgtccgcattagagtccctgagaattgagatggatcaactccatagtctctccagcctcctacaccatctgcaaccccgagcacgtccgcggaacggtgccgggccacgaagcacgcgtcgtccccgtagcacgcgcccttcttgaggaggcccttacggaagtccttcccgaagccgcagccggccgtcaccagtccgtagtcgccgccgcccccccgaggaggcggggggccgggggagcaggaggacgcggaggcccggagccggctctctcctcagccgcagtcgcgccgccgctggggcgctcctcagggcggcgcgcagtggccgccgccgcccctgcccgacgcgcggggcctcgcacgcgctcagccgcgcgcaccggagccagagcgaggtcagaagcggcggctcctccgcctcagcccaactgaagt

SEQ ID NO: 140840 - DNA, 369 bp, Homo Sapiens
aatgcctgttgagactgtgacaattttgctgacttcactagcagttaaatccatgtcagcatcatacacagttttctgcaattgaaagtcatcattatcctcaatttgattcatgcactctgcattaggttctctggcagactcagaagataagccaggaagatcctgtttatttctttgcatttcagtatttgtttcattagtatgaccatttatctcattattgcaatttaattctggacttgaaatgtgttgtttatctaaaactgttgcacagggagtgtctgcagaaagattatttgattcccaagatgacccacgcttcttcctttcagtcacattactaggagatggtttctcccatctgcg

SEQ ID NO: 140841 - DNA, 466 bp, Homo Sapiens
tttttgggtgttttaagttttattaggaaaatctgtctcatgtctcgcaacagaagcagagaagatggcccataggacaaaaatgccataagtacagtgatgtgaaacatctgtgggcagacagctgcaaaggttggaaaggaacttttgtgggaaaagaatcgtgttgatttatgttggcttcctcaataataaagttgaaggaatactggtagttttccagagccaaaacttctccatgtgaatgcaccttctgcttcaggacctcttggaaagctagacatatcagaaattaaggaagaagtgctccagagtacaactggcgtctctcattatgagttggatctgatgagagcaccttgatctttgaccaaattcctgaagtcattacggtgtcaaagacttcagaagacaccatccacactcatttagaagacttggagtcagtctcagcatccacaactgt

SEQ ID NO: 140842 - DNA, 1165 bp, Homo Sapiens
cgaagccttttccagaggtgaaggttattcaccccctcaggggccgccaacaacattcaaacaccggccccaagccccaatccccgacttccctaggcctgaaaccaattatctcgggccgatgtattctggagtccacagatgtcttggtgtcaccccatccccgagttttcctacaccagcccaaaatcgcaatcttgatgtgtccctcagaatcgagcatcacgttgtcaagttttaggtcacggtcaaatgatgcccttactctgtaagaagaacagaccgatggccatttctgcagcgtaaaatacagcatggggctccttgaaccggccgacttgctggatgtgatacatgaggtcgcccccattcacgtactccatcacaaagtacaggcggtccatggtctggaagcaggagtggagctgggtcaggaagggcggcttcccaggcagggccaacacccgcttctccaccatagtgcactccacgtcatcatcttggatcacaacgtccttcttcaggatcttcacagcatagagctcatctgtgccttttcgttctgaaagcatgaccttgccaaagctgcctttccccagcaccattaggaagttaaaatcggtcagtttcatccggtctctgttgccattgttgtcaaatttggagacagtgttggtcgtcttttcttccgggaccttggttccctgactgatcttggccctctcaaatttctgccgcagttcttcattggcctcacttccttctggtggcacaggcacattgaagtactcgccttcctcctggctcagtaacttaaaccagccatcaacactggctttctgaagttcagaaatcccaaaggacaaagatcccatgaagtcattcctgctggtcaaatcccaatcccaaatctctactgacagtcttctgtctttgtccgattctttcagctgaaatctaaatgtctcattccactcagggttgagggagcatttgatggttttggtcttctgtttgctctcacttttgggatcgggaatcagtttcagttttacgtagggatctgacaggccattggggtccataggtacaaggtttttagcatctcttacgaggacaatgaggacgtccctgtcgatgtgggcctggatgtagatgcggccgc

SEQ ID NO: 140843 - DNA, 465 bp, Homo Sapiens
aaaatttagaaaatttctatcatgtttgaaaaactttaaacgagctttgtaaatagcctttaaagtcatgttaaagattcaatttatgttgaatagtcagtaaaagtaggtgtgtaattcattttgctacctgtgagtctggcttgatgctacatttgtgggttaataaatagacttctttgctactgttttaaagtgtcataatgttgtcttgctttatgaagatggcactactgatctccaatcaacagggcatgtgcatttactgatttttctggaactaagagagaatttgtgctaaattggtcacattttcacatgcagtgaaagattggcaatactaacttcttatgtggtcagtagaacacttctgatgtatttagcctaactcaaagctatgcatgtaaacagagataggcctctatcatcatctcagtttcaaacacatattatacactaaattcc

SEQ ID NO: 140844 - DNA, 788 bp, Homo Sapiens
  misc_feature (710)..(736): n is a, c, g, or t
  misc_feature (770)..(770): n is a, c, g, or t
tttggctattattgttgttagagacaagagtctcactatgttgctcaagctggattcaaactcttaggctcaagctgggactacaggaatacaccactgtgcccagcttcaagaaaacatttttaaacacgttcaggccttattaggtctattacatcaaaatcttcaggggaaagcctacaattgtagatttttaacaaaatgtcctcaggtcactgtaatgcacaattctgagaatcagtgcagcagacaatcacttcagtctcacctctcacccacatggctaattcctttatcagttggagatgtggccaaaaagagaaaagagtaagagatagtgtcatttattaaaactccagttaagtttcctggctatgggtagaacagggacaagtaaactcaaaatcccacttgattttgctatttacaagctccttatctcccaccttcccactaagacattctagatttgagaggaggctttaggttcttatctaagtggctgtttctgccaggatgagcaataagtcagttaataatttgttccaccttctgctgaagtgtttctcacttcgtcaccacatattcactgccaatctggtttcctcagagtcctcctaaaattcatctctaggcaagttgcaactcattctttttcaaaccaaaaattattagacccaaagctaaacagcaccttgtctcaacacatnnnnnnnnnnnnnnnnnnnnnnnnnnnctcttcctggcattttccctcattatctaatatnccaagtgacctgcatatt

SEQ ID NO: 140845 - DNA, 449 bp, Homo Sapiens
gtagtgctgcctctgtgctgatgcacctccatgtggactgtccgcaacttggccacgcagggcagtgcctgctttgagttgctcatggccttccccatggtgccactggaaggagtggggtcctggcctgcgcctggccactgccgcctcatgctcctgcctccaatatccttactcacatttctgaggaagccctacattttcaatgattatttagtagttagctcttttccttttaaaactagaatcaaaagtgatgaatatattcctatcactatattattgatgggaattaagaaaatttttaaaaaatgagggcctcttgccaactacaaatgacacattattttgctttagctgtcattttaacctcatttatggttttccagtagacctgaaaacagactgaaatctactctgaattacctagtaatcaagtgattggctac

SEQ ID NO: 140846 - DNA, 976 bp, Homo Sapiens
  misc_feature (154)..(203): n is a, c, g, or t
  misc_feature (474)..(678): n is a, c, g, or t
  misc_feature (696)..(724): n is a, c, g, or t
  misc_feature (751)..(780): n is a, c, g, or t
  misc_feature (805)..(912): n is a, c, g, or t
ctgttgaagtccatttattgacatggaaagatggtcacaatatgatcccattcttatatatatttgtgtatagaaaaggctttggaagggtactataaacaagttatttctggtttgaaaaccaactctgccatttattagcttaagactctannnnnnnnnnnnnnnnnnnnnnnnnnnnnnnnnnnnnnnnnnnnnnnnnncccaaaccctaccttctttcaggctactgtctgtcttcaatgagttagtataaagtccctaacccacaagagccccgaaaatgttagttacaatttttcctcatcagtatttacatttttatctggtgagtatgtattatatttattgtaaggggaaaaatgttcacagaccattgcagtcaggaaatcatggttctgagtgaaaaaggaaaacataatgacacggacaggaaatcaggggataaaaaaagctctatggccaaccatggtnnnnnnnnnnnnnnnnnnnnnnnnnnnnnnnnnnnnnnnnnnnnnnnnnnnnnnnnnnnnnnnnnnnnnnnnnnnnnnnnnnnnnnnnnnnnnnnnnnnnnnnnnnnnnnnnnnnnnnnnnnnnnnnnnnnnnnnnnnnnnnnnnnnnnnnnnnnnnnnnnnnnnnnnnnnnnnnnnnnnnnnnnnnnnnnnnnnnnnnnnnnnngagcttgatgctgcagtnnnnnnnnnnnnnnnnnnnnnnnnnnnnntgacacagcaagactgcctcagggggnnnnnnnnnnnnnnnnnnnnnnnnnnnnnnggtatatggaccctagttttggccnnnnnnnnnnnnnnnnnnnnnnnnnnnnnnnnnnnnnnnnnnnnnnnnnnnnnnnnnnnnnnnnnnnnnnnnnnnnnnnnnnnnnnnnnnnnnnnnnnnnnnnnnnnnataataataaataagtatattggaggatgtgagtagattacatgcaaatatgacaagattttat

SEQ ID NO: 140847 - DNA, 512 bp, Homo Sapiens
tcttgggatgtcaatcttccacgcagctgtactagggcttccagtgccaaagtcagatttttcttcctttcgtatctgttgatggagagcagcaggaattttttccccttggggactaggtcatccagcttttcaggaacaactgagtcaaagctggtgacatttagagatggatagaggacatcagggtctatgtgagacagggacttgaatgtttccttaaaaacagcagctgtgaactggctgttgactaagatgcagtctgccatgcctgtggtgtattcctctatccagtcaattggggccctgtatagtcgtttaagaaaagaatctctcttggtgagaagcagatctgggaagtgacagtaaaataggatcttcttccgccgtctagccagcctgaacactgggatacaggcagacacctggtcgcacactaccacgtcgaactcctcgtcggcgaggaacagcacgtagagcaacaggaaaaccatgcgcacgtaggcgcagac

SEQ ID NO: 140848 - DNA, 762 bp, Homo Sapiens
aaaaacagcagctgtgaactggctgttgactaagatgcagtctgccatgcctgtggtgtattcctctatccagtcaattggggccctgtatagtcgtttaagaaaagaatctctcttggtgagaagcagatctgggaagtgacagtaaaataggatcttcttccgccgtctagccagcctgaacactgggatacaggcagacaccaaggtaaaaagcttgaacttttctccaaaaaccaatggggagccatgtacaagttttaataggggcatgatatattcagcttggcgtttttaacacatgacactgctgaggacggtgtggcctggctccgaacacaaggacagtgggatgcaaatggcctggtcgcacactaccacgtcgaactcctcgtcggcgaggaacagcacgtagagcgccaggaaaaccatgcgcacgtaggcgcagacggcggcgccgcggccgccccagcccaggcctcgcggcagccagtccccggcacagcgcaccggtagctcgcggctctcggcgaaacagtggcccgggtcgtagtgcgctgtccagatcttcacgctacacccgcgcgcctgcagcgccagcgccgcgtccaacaccagccgctcagcgccgcccacgcccaggtctgggtggaggaacagcaccgacggcttgggaaccgagtcccgttcccggccctgctcctccgccatggccctggagccgcaactgcaccccgcaccctgatgggggtcttctgcccc

SEQ ID NO: 140849 - DNA, 429 bp, Homo Sapiens
ttttttttcaatttaaaagtttattttgccaaggttaaggggatgcctatgacacagcctcaggaggtcctgatgacacatgtgcccaaggtggtcaggctgcatcttgcatttatatgttttttatatgttttagagagacataagacatcaatcaatacatgtaagatgtacattggcttggtcaggaaaggtgggacaactggaagtcaggggcttccaggtcatagatgcattcgaagattttctgattggcgattggttattatctacagacccggaatcaatagaaaagaatgtttaggttaaggtaagggattatgaagaccaaggttttaccatgcagatgaagcttcagggtagcaggcttcagagaggatagcttgtaaatatttaccagacttagagtctgttctatcagtctcaagg

SEQ ID NO: 140850 - DNA, 321 bp, Homo Sapiens
tttttttctagttggaacactcactttattgttgactgattgaaatttatcagtgcttaaggtgctgaaatactgaggtactagtcaggaaccttgttagttgactagttgtgtcagaccctactggctaattcacaggaagactttattatacctcttgccattttgcccaagtcattaatgacagctttagttgatagatacaaggcgtgtaaggatagcaggagatccagctccttggtctgctgtattcatatataaaaatgtttggaaagctgattaaggcatttcattaattaagccttaaaacaactgaaacca

SEQ ID NO: 140851 - DNA, 524 bp, Homo Sapiens
tttaaaaaattcttgttactaaatttctttattgctcactgggcgtgattccaacatgagaatggcaggttttggaagccccacttaaagttcacctccttgggagactctgcgcttctagccttctgcatactttgcggaggacagtggctctagatacatcttcccactgcatggtatacttggcctctgagcacagccacatgtcagcggagttttggggtcctctctcaggggccttccaagggcagggcagcttccatctggaatagaaaaatcgggatattttggcagcagctcttcatgctgcaaaacttttggagacggagcagaagtttttgtggagctaactccatatatttcttcatatggtttcagatgtgccttcttggccctctccgtgatctccaggaagtccttgtagcagtttttggccatgacagtgtatctcgtgccacagccaaattcagtgaccttggctctcggcaggtagcctgcccagccagggatcgggggctcctgga

SEQ ID NO: 140852 - DNA, 156 bp, Homo Sapiens
aaaaaaagtaatactggttttgtgggaatgaaagcagtgatttccaggggctgcagtgaagacattccagaagactggaggcccacaactgaaattcttactggctgggatgagaggatggtggtgtgggcattcaacatgaaaacaaacaaacag

SEQ ID NO: 140853 - DNA, 809 bp, Homo Sapiens
ttttggtttaagtatacattcctgtatttattgtgtaattaataaatggaaagatccatagatgaataactgccttgtaacgtcagacattctttaatggaatgaacatgtggcacatggatctttgggagtttgggttggattttggggatgttaaggtctcctatcaatcttagttaacatgtcacagcttctggtccctgacttagatcacctctgtgtaccctcagcctactgaggaaaaaggcaggaatcacctctgtgtcattgaagcggtgaggctccaggcatgggttccacctgaccacctggggagacggcatgaagtccaaaaatggataaatggatgttcttgtaaagttgaatccatgaatgccatcttctggaaacactataatctgtacatccttttgggctgcagtcatcacttgctgttcatagatgtcaaggttctggttcatgagctccaaggcctcttggcggctgatgagagccagagggttcagactcaggatggatggatgctcatacacggcagccacataatattcagcctcgtgatggtcagccacgctctcctccccggtgtgggctcccagggcaaccacgtaacagccgcagaggaaaagagcaagcttacttctggctccagacataatgcagaccacaatctgctcttagcgcgccttccgccctgaatatgcgcatgcgccattctccctttacagccccgaaaacgctccagctggccgactcggagacaatggcgagaggcctcagagttcggcttcttacctgctttgcatagg

SEQ ID NO: 140854 - DNA, 449 bp, Homo Sapiens
ttttttgagttataagtgttgtaatagggggtagtaacaagacgttgtaggactacacaaaataaaacaaagaggccaaatcgcaagcgtttgtgggtttcacaggggacatctgacagcaaacattccagggcaccgagagatggtgaggagagatgatggcattggagagatgagctgagatggactgcgcagaggacgagggaaagccggtgcactggagactgggggagacgagaggatccaccgggttgggaggggaagggtggtggtagaagcacgagcaaggcagagaccggaggccagggcggaagggaggctcacggacacctggagcccggaaggaacgcgaggagcgcctcatcaccaggcgggtgtatctaggggcgaaggctgcagatctggggcgcaggctggaaaggtgggggtgcaagcccggttgacgtgag

SEQ ID NO: 140855 - DNA, 844 bp, Homo Sapiens
tttttctgagttataagtgttgtaatagggggtagtaacaagacgttgtaggactacacaaaataaaacaaggaggccaaatcgcaagcgtttgtgggtttcacaggggacatctgacagcaaacattccagggcaccgagagatggtgaggagagatgatggcattgaattggagagatgagctgagatggactgcgcagaggacgagggaaagccggtgcactggagactgggggagacgagaggatccaccgggttgggaggggaagggtggtggtagaagcacgagcaaggcagagaccggaggccagggcggaagggaggctcacggacacctggagccctgttgagttgtaagtgttgtaatagggggtagtaacaagacgttgtaggactacacaaaataaaacaaggaggccaaatcgcaagcgtttgtgggtttcacaggggacatctgacagcaaacattccagggcaccgagagatggtgaggagagatgatggcattggagagatgagctgagatggactgcgcagaggacgagggaaagccggtgcactggagacggaaggaacgcgaggagcgcctcatcaccaggcgggtgtatctaggggcgaaggctgcagatctggggcgcaggctggaaagtggggtgcagccggttgacgtgaggtctgggagttggatggaccgaatgaggatggagacacctagggatgtgtccgaaggatctggcgctgcacaaatgagggcggtttgggggacggaggcccgggcgggggcggagtgttgtccaagagtaaggagggggttcctggagacgtggcactcggagcggggct

SEQ ID NO: 140856 - DNA, 1007 bp, Homo Sapiens
ttttcattggaaacatttttagtgaaggcgtttgttttaaatgtattctaacctagcaatgtagaaagcaggcaaacatttaaaaaaaatttaaccagtttctaaaacatagtttggagctcagattctggggaaatgattaacacaccctacatccaaggtctcctttcctttctagaaagaaagcatctttaaacatacatattcatcagaaatacaaatatttgtcatcagtgatactaatttccaggcaaacattttaattgcagtcaatgtattagattctaccaggttttaatttggatcggtaatacgggtttgattagggttctaggcctaattataggtcactagtcttcctttaggattatgcaccatctgttattttaaattgaccattgagggggttcccaagggttctccttcgttttgttatcaaacgttaggtttaggattcttgcgggtggtgggatccaaagccagagacggtttcaacaaaaatgcaagcgcgaatttgtcttgcgtctgaacgcactgttcaaattaaacaatttagacatgccccaactatgacactaagaagtgaatggtatagtacacttttgtcacaaattcaagggtaatttaagtgcccgatggtagaggtctggcttcccctgggtttctggaacaaaagaagcgttcgcgaggagaggggtaactccccgccctccccctcccaaagtaaatcaaatcaaggaatatgagtgcctgcagacaagcctcgcttcttttcttccccttcagggctagcgtttggggaaggcaaggctgcggctactcttggagcttcagtgtcccgggaggaagaaaggcccagccaagggtcctcacactggcgtggaattcggcgcgttcgtaggcgatcgaccccagagacgaaagctgcttctcaagctgggggagggagaggaaacggcgcacaaaagcagtacgacctgtcccttatcggcgtctaaggggaaggg

SEQ ID NO: 140857 - DNA, 465 bp, Homo Sapiens
tttacttaagtatttgaaaccctttattacaaagtcgatccagcttgcttgttatcacaatgagactcaccgatctgcaaatactggggtcccctctggattggaatgtccttcgaaatctgaaatgttcacttgtatttgcctggaggttactatctggctattctgagaaggtatggttttcaagtcctgagtaatagtgttactgtctggaagagaaggctgtacgacttggaaatccagtgaagatttaggtcctagaaaacctaaagattcttgatcctgtgctacaggtttactggtcaataattttggaggttggttccagtgatctcgaagatacagtatgtaagtcaaagttaaactcactattcatcctcgctttagaagcagcatccaatgaatggaatctttcatctaaagttccactatccaacttggaagaagtcttgggacaaagagtta

SEQ ID NO: 140858 - DNA, 532 bp, Homo Sapiens
ctccctagttagggctaccacttaaactctttcctgtctgcattatttccaaagttggaatatagtcatgtccttttatgctgtagagacttttctttcaccattactttctgatatctagtacacagtatttctttttctcacatctttgccgtttcaccacaataataaatcgggtgaagtgtgcacaatatctgtattttgaatggctatggcgttaggttgaaatggccaggcacaaatttagtctggtcattttgtttacacattgggaaaaaaattagtttattaaacattacctgtaactgtgtctgttttaccaagctggaaccttgggactttttatttctgatttttattacctgaatgtcagaccattttttcatgtgatgtacctagtgagtggagtttgctttgttttatggtatctgtactcctggtatattcaagcactgttttgaaaacagatgacttatttctccattaaaaatgcaataaaaataaatggcaaacaagcaaagtgaaactaaaa

SEQ ID NO: 140859 - DNA, 850 bp, Homo Sapiens
ggatgtggtggaatggacgggaaccaattcacagggaccaattagcctgtgttcggatttatcgactcattataggaattgggcctcgagccaagattcggcacgagagcttgaccagtcaggctgagatagtaatgatgcatcagggcgccaggcagcagcactccacgcaccagcagcacgaacaggaccacgtaggggcatgtagcagtgaagtacacgatctttcccgtggatttgacccccttccagacacagaagtagaccagcacccagcaggccagcagacaaagggtcacctcccagttgagggcccctggcacctccagtcccccagacagcctcaagactttgttctcccagaactcgatgacaggggaccggcggtcagcaagctggtcacaggtgaggttggccaggctggcattggcacagtcttcatggcggaagatctccacgcagtcgggagtgttccaggtgtggccacatgtggcccagggcagcgtggtggtaaaggacttgaccaggtaatagaagccccaggccagcaccatgatgtagtaggtgttgcagtagaagacgatcaccatggaggcgtagcccaggcctttgaacaggggacagatgttccagacattgatgctgccggccttcatgaactggcccagcgagatctctaagaagaaaatggggattcctccaaccagggcgatcaggacgtagggaataaggaacacacctccgccgttcttgtagcacaggtaggggaagcgccacacgttgcccaagcccacggcgaagcccacgcacgacatgatgaagtccatctggcgcgtccaggtctcgcgcg

SEQ ID NO: 140860 - DNA, 405 bp, Homo Sapiens
tttttagaataaaagcaaatgttttattcacaaaaagtaggcattaataatatcagtctttaatccggcccagggctccttaaattgccttcttcattgttgactttgatcttccccgcaaagccgcctgctaagggtcccttcccagatcagcctgaagtcatgggggcaggaatactgttgctaaacagatatgcaagggggtagcatgtgtgactggagtacagtatgacaacataatcctgctaatgtgacggcaatggagacagagtcgtatcccaaggcattggtggcattgcaagtgtagaaacccacatctgcttccactggtgccaagatctgtaaggaatcatctggctgtagaagaatcctcctgtcagaggaaaggcaggaagtagaagtaag

SEQ ID NO: 140861 - DNA, 684 bp, Homo Sapiens
ttttaaggtaaagaaattttttttaaaaaggactggtcacgtggccgatgggtagggtgcgcggttctcaacgcggcggacactcgcttgctggagggtggtttcagtcctctgctcttccgcctggatagctgcggtcacacttactgccaggcaagcctactgtgccctttgtcgccctgtcctcccatcttccccggaaggttgggaactgcaggctcagcacacacaataaggcttcatttgcttagttgaggtcccaggacaagttgcctgtgtgtttatttagttttcttttgatctcccaccattttctcttagtttcaaaaagaggcggcgatgcagagtcgtttaggcaatcaaccctcccacgtcccctggctcagctaatgctggtggtcattcgttgccatttctgcgaaaggggacggacggaaccgcccgcagtacccgcttgccaccggctggacgagggggagggacgacagcttttactgtcccaaatcctgagattaagacctcagggctaaatcttgcgtggcggtaaaaattatttggaagttctgtgcaaccgttccaatattccgcttttacgtgcacggaaatagcctaagtccagatgccagccagggaagccactccgggccccgctgactaagccctggactgatggtctggagtctt

SEQ ID NO: 140862 - DNA, 445 bp, Homo Sapiens
ggtgagcattgtttcccagtatgaaagatgaagagtctgtaccgaatcagcatgagtgtccttccagtttaaaaaagctttgcttcgctctcctaatggctcataggctgaatcatgtctgcccctcaaatcaggtgtataccaatgtgttttttactagcacttgggaaagttattaagtattttctttttccctgggcatcatgttctattattattttagaaaaaagtcataattggtactgaatatatggtatatataatattaaaatggtaattttgcaacagctcaaaattaaaaggttaatgttatacactttactatatgagctgtgattactaccattagccacagataccagtgcctcaactttttatgtacctattgtgatttaatgtaaataaagcgtttgtatagtacttttgtagttcttaagtatgaaaa

SEQ ID NO: 140863 - DNA, 535 bp, Homo Sapiens
ttttaagaatttctggacttctttatacttttgcatttatatggcattggttattggttacagagagggacggggacctaaaatattttctgttccaaaatctagactttgcccattcctggtgacgtgaaagtcacttgaggtgattgtgtatctaggggcagtagtaggactgaaggaggggtgagagagtgcactttaactccccgaaaacctactccctacagctacccaaataacatgcaaacattaataaaaacaaagaacttgcaaaacaaatgtaacttcaaagccgttccccaaaccctcttccagctttatggctttagctaaatccttcctgcacagcccctgcctttgcccacacactccccaagcagaagagtgcctcagagccccaaccaaatgttcctgctccatctcccccagccctcgccctcctcgcatgctctcccatacacaactgccttatccctgctgaccaagaagggccttgccccttcttcacctggcttacaggagtcccttttgcata

SEQ ID NO: 140864 - DNA, 322 bp, Homo Sapiens
tttccactgaattcatgacttttaatgggggaaacttacgtggcacactctcatcgagaccacggcagacatagtgaatgagaaaaaggtgagtaaatatccaagtgtactgtcctatcctctgaatctacttccaagtcgtaagacgctgtaagctccaggtccacgctgagccggcagaacgctccagccgctgctctgctctgcgaagatctgagctcgaggccccccaacagggcgggtttaaatagccttgggcgcagcgcatccttgtcaactgcaccagctgggtcctggggtggggtgggccctcaactgggat

SEQ ID NO: 140865 - DNA, 561 bp, Homo Sapiens
gaattcactggggtttattggctgtgattccatccggagagaacacacgcaggggccccgacatgcaggaggaggcgcaggcgcaggacagacggacagaggacaccacggtctaagctaagctcgcggcccggggcgccatgcgctgggaacggggtgcgcaggttctacgagaggacgccctgtctgctcagagctggctttgtaaggtgtgaaaacaggagtttttaaaagacacgacccgggagaagtcagtgagagggcacagggcgagcaggacggacagcgacgtccccgcgggccgcgtcgctggggcgcagaggggcgcggtggtctctgcccggaggggcgtcggtcgttagtattgcagtctaacgttatggcttctctaaagctatgtaaggtcatgaaggtcaatgccaagccacgccctggcccgaaacacgtggagacttgatgcatttttgatgtggacgaaagggcccgggggcgaggcggcgcctgtcaagataaaactcattaaatgcaaagacctcatttacctgagattcaacaaattgt

SEQ ID NO: 140866 - DNA, 601 bp, Homo Sapiens
  misc_feature (471)..(505): n is a, c, g, or t
caagtggtgctaagaaactttggaagtagtgattgagaatttgaaaaaggcacacatctgtggctagtgaattaaaagttcttatcagcaaacccggagactgaagagccaggaaaccattctctttgtactaaaaattcattgcctctagtagaatcagtctcaagtgcctgtcctgtcttctgggaagatgtgattgccagatttctgggtgcgtgtcagtagacctcaccttgctaagtcctggcatggtgagggagacagcatgtgccagaggtgatgtggagtgagtgtcagatgcagccagcggaataggtggtgtggctgaactgttgtacttacccttccccaaaaatcactggatgtggactttgggcctttcctctatctgttttaggtttggggtgtcttcaacaatttgtagggtttccttcttttgcttttggtcacacagtgttggtatatctcagnnnnnnnnnnnnnnnnnnnnnnnnnnnnnnnnnnngatagtctacattgtattaatattaatccttttggttaatttacagagtttctcctaaagatttgttgaccaaaataaagctgaatcagtgctaaa

SEQ ID NO: 140867 - DNA, 538 bp, Homo Sapiens
ttttttctaggggagaagattttatttcacaaggggaggaacccaggctggtggccgacgcccacacaccaggctccgggacgcatggggtctgcacgtggagagggtgctggccgccccagcaggaagcccgacgtaggtcccagcgtgtctgtcagtcatgctgctgccctgtggggctggagaggcaggacgtgcacccagcctgtggctggcggggcaggggacctgcaggtcaggccaagcagagtggctccggctatgcccccgagcctgcaggctacgccacggtctggcggctgaagagctcgagggtgagcgagctgaggaaggcagggatgctgtcctggcgccgcaggtgcacctcgatgagctcgcccacggtgtgtgagaactctgtctccagtagctgcatcttggaacccgaggggctggtggcccagaatatgcccagaactcccacaactccaccatgaagaggaaagagccaattaaacaaggggcccttgaacatttctccagagaagagccacacacg

SEQ ID NO: 140868 - DNA, 395 bp, Homo Sapiens
agagtgcatgcatgtagtatgccgaacttttaatgaaacatttttctgagtggtttgtactgggtcgtggtgtaaaatgagattttagagagaagtgaactcaacagacaggcactggcgtgtggaggcagagcccctagaaccccagaatcctggcccagccttagtccttagtccccggaaagctagccagtggggagggccagggcatcagctcttcacaccccctgccctgttctcagaggcagtctgggttgagaaaacgcaagccctgcacctccaagagcctctcccctctttgcaggaaggcccagctgtttcccaccatggtgcctctgtacatcccagtccagttcctgaaatgcgctctgtagcctggagagctcctgcgcatc

SEQ ID NO: 140869 - DNA, 458 bp, Homo Sapiens
tttactaatgtcattgtggctgatcatcactttattcagaaatggtccgttacaatcctcttccgtagagtttgactctctttaaagtctatgctggacagggcatcttcctgggtccctagctttgggggagggtaattcctgccaggaagctggttccaccagtcctgctgtagctgctgtctgccctccaggaccaagaaaggacaggtattctcagtacattatccagctcttcttaagaggacaaccagtaaaggcttcccaaggtgttcctacagttctccctcaactcctaggaaaacaaaggttcaggcccagctctgtcacttcgtattcccttcttgataatataggtactccataagccccagcccacagtcatctggcagaggatggagtggaggacataatacccaagatacccaaggggctgcaaggtaaagggtgggtagcag

SEQ ID NO: 140870 - DNA, 549 bp, Homo Sapiens
cagtcccaccatgtattttgctttgtttctaaaaagctttttaaaaactgttatttaataccaaagggaggaatcgtatgggttcttctgcccaccgttgtgactaagaatgcacagggacttggttctcgttgcacctttttttagtaacatgtttcatggggacccactgtacagcccttcattctgctgtgtcagtttggcctggcctgacactggctgccccagcggggaccacggaagcagagtgagagccttcgctgagtcaatgctaccttcagccccagacgcatcccatttccatgtcttccatgctcactgctcatgcactttttacacggtttcttccaaacagcccggtcttgatgcaggagagtctggaaaaggaagaaaatggtttcagtttcaaaattcaaaggaaaaagttgaggacttattttgtcctgtcaagattgcaagaacatgtaaaatgtacggagcttcataatacgttatattgttccgaagcagctcgttgagaaacatttgttttcaataacattttagctt

SEQ ID NO: 140871 - DNA, 1265 bp, Homo Sapiens
tttaaacatctctaaaatatttaatagttttaaaaatatactacagtgagatgcatttgtaaaatacaattatccagagttagacaaaagtaaacatgaaacttaaagaggggaagcctggaccattattaatcctttcccacatgaaaagtgcagatattagcagaatattcactaagtaaaaggaaaatattacctggtttctaaggcacacagttagctgtaagatctaaagtgggatttatttgcattaagctttcagaatacttgctgcaactcgggtagaaataggtaagtattcacatgatatgtaagtctgtagtccagaaaggtatttcaactaaaatatgtcaattttcacatctgaaatcattcagacattactgatatagtatttggaagagtttctgtatagaagatttttttcaggctgacagtacttagcgctttagagggtcaggtaaacccagttctcttttgttcagcaatgtctcatttccactacctcaaacttggtccccagttccactatccgaagcctgctttacattatgtcgtacttcattggtaccacatacagtgattacattataaaaggcctctagatcactttgttcaaatttaacagatggtttcggtaatgttccaggagcaagggaactctctcccataattttcaggttgataaatttgatttttcaagtattcttcacataaagggcagcggatgagtccacaaaatttgttctcaaaatgctcaaacaagtagtttcctcgatggacatgtcgcagcaacgtcataccataacccagcccatgaggagaagatgcacatttcagtccatgtgaatctaggtgaggcttgagataacgagaattccttcgatgtccactagtgacaaggtcaaccgaatggctcacgaattctctgctccattgtagctcaatacaaatttgttctgagcatgtagtaataaaacactaacttcgagctcatggttccgaaaagtaaccttggttgcccccaattgacaatttgaggggataggacctcagaaaggggcttcttgtgaaacaaactatatgtttgcactaacacccggtgcgcagatctgtgcgctaagacgaggaagaatgacagctgtgtcaacacttaaatcatcttgttacacgatcttaaaaaatggagaaatccgacggtgaaaatagagacgcgcactcaaattaagcaggttgatacacaaattatgtgccacaaaaaaagt

SEQ ID NO: 140872 - DNA, 649 bp, Homo Sapiens
ttttacatagatttggtgggaaaaatatgaatttgacttttgtttacaaaccaaagtccacgttaccgtacccgaaaaagcagctacaacaaaatccatccctgtcctttcctgtggccttcagagctccccatctgtgctgagcagacaggcgccctcctctctcaccttctcgtccccgtgccctgtgacacacggtacctgtctgctgggtttgggctatgagaagtagctgagaaacctccaccctctctccagtttactctggctctagtaatttctatctaccctattcatgtcacccacctgaacctttatattacctcaaagtcttcaatctaagtaaagggttcatatgaagtagagactccatatgaaaagaggccgaaggggcctaagtgaccttttgcttgtgctgcagtaataggaagctacagaaaacatgggcactacgccctgtgagcctcccaccatgcacaggagccgccttctgaagaacgtgccagaagctgggaggtctttgtgacagcagatgggacggagctcggctcccaggaaaggggctcagcattcgccctggcagttcgctgatactcagagactcaatagatgatgttctccaaacttcataaaatataagcacatttca

SEQ ID NO: 140873 - DNA, 553 bp, Homo Sapiens
cagaagtaaactatttattgaggggaaaatttttacacaaatttttgaaaccagggttgagataaaagcatttcttttcttcatgacaccagtaatgccatttttttaaaagtagttttttcaagtggcatatctcaatggtatattctaccttttagtagccttatgtcaaagtgtaaatttagtcattttaaatatcgtgtctgtcagagtttcttaagaaaactaaactatggtataaatatcctaatcaacaagttccattttaacacttgattgtctcactcatcatatagatcaatgacattacaggacatatttatacatcatagtaaaaagacaatataaataaaaacaaacaaattcaaatgctgttcacaaatcttcagaaacaccttccagagccagatggaatcaaagtggagcaggactgcattcatcatcaactctgaggctgcagagacagaagccaaaaagaaatgtaatgtagggttttcttcttaccaaggaaaattctgtggtaggcagcagaagcacatttgttgctgtttga

SEQ ID NO: 140874 - DNA, 367 bp, Homo Sapiens
ttctgtctttcattgaagttccaaaggcttcttattttgatgactttgcctaaagaagggattctacagccaaatgctttctttttaacataccgaatgagtaaaagtgcaaaataagtacagaactatcaaacagcaacaaatgtgcttctgctgcctaccacagaattttccttgcctcagagttgatgatgaatgcagtcctgctccactttgattccatctggctctggaaggtgtttctgaagatttgtgaacagcatttgaatttgtttgtttttatttatattgtctttttactatgatgtataaatatgtcctgtaatgtcattgatctatatgatgagtgagacaatcaagtgttaaa

SEQ ID NO: 140875 - DNA, 907 bp, Homo Sapiens
aatagtcactaattcatctttatctgcattgaggggggtttaaatataattagaacagtaacagatggttatattcataaacttaaataagatttcctccaagttctggaatatatgtatacaatctcaaaacactgtacatatcactcactctccctttaggaagaaatggaaattaaagttaaaagacttccttggatacttctaagtaaaagtaaatgataatggaagggaactgaatgaaagataaattctgaaaaaagctaacaaaatcaagtccacagtttgactctttgtttccttggaaagcaacggaagcacttagcttgggtttgaatatacagaaagggtcatgcagtgagttgcaggtggcatgctatcctttcagagttcaaatgcagggaacctggcttttgtggggactagcaggtcagccaggaaatatattgttccagccattccttcaaagagagagaaaggggtgtctggtgttctgcatccatgttctccatactctaagcaccattcagcaaacttacaggccctatacaggtacttcatgtcctgtgtgaggttgtagagtgtcaggaaggcataggcattccctgcagaaccgtggcacagcccatatcccttcttcagcaacccatattgccagatcacatcagcacactgataggcatcacagagatacttttcctctctgaataccttataggcctggatgagcatgtagattaccccaggggcgccatggcaccaatggacaagcagatctcgattatcacctatacatggagggtaattgccagaagggaatttcggacgcgtggtcgacgaatatcccgggattccggaccggaccagcctgcttttttaaccacgtgttctatattcacattgctct

SEQ ID NO: 140876 - DNA, 792 bp, Homo Sapiens
ttttctgctttatttctttctataggaatttattctgtgtttccagggaagggattggaggtattctggtgaggtgaggggtaacatcttaggttggatactcagattttgttacctataccacaactgtgtatcaggacaaggcacattgttcttagtgtgtccaccctcctgggctggctttgccttctcagagctccttaattcacttgtaggagttgaatgagtcttcatctcttctttagccaaagatcttttagttcatagtgccaagtatgttcatccatttttggtccctttaaatggtcttactctgttaagctaggttgcagttagtccacaaggactcaaatatagaaatccttctcaggccatatttatttgctttaacagtgggaaaattctgtcgttacggctcagcctcagtcttagtgcccctgagtttgtggggtgaagctttctcagtaatcttgtacttgtcccggggttagagttttgctgttcttcatttctccaaccacagttgatcttcactagtgttcacatttggcctccaataatttgataaatgtttcagctgcattcttttcatccactttcaaggcgattatatcttggtctgtgctatgtgtgccctaggtaatcaagtactcatgtttgttacttctgggaggcacctatcttttctcaggtgttaagcttgttggttgctctgttgtatgttgttatatattattattatgacactaatatcacaatgaaagttttgtacacatgtgtcatggacttatg

SEQ ID NO: 140877 - DNA, 429 bp, Homo Sapiens
tttcaatatattcatttatttgacaattatttattcatttgacaattattcaatgtttactgcataagcaaaaaactgaataagacggttttctgcttttataaaacttacagttaagtagaagggacactgcataagaagtaacatgggagaaggctcaagtgttgacaactgtgatgaagagagatggaggtccagaaggaaattcaactgtggcgagaggcaactaaaaggttcctgcagtccaggagtcagcaacctatggctcattaagctattcaggatagagacagctgtggctcatatggctagtgagacaacttccaacagagtttagtcaacaatgataagatgaacagtttcactacaggaagagctactgcgcaactgcctggcagtcagccagggctttggctgaccaggaggtat

SEQ ID NO: 140878 - DNA, 653 bp, Homo Sapiens
  misc_feature (419)..(419): n is a, c, g, or t
ttggtttaaaacagtacttttccctaactctttatagctacaaccataattaaaacactacaatcactacagctgtaacagcctacttaacaaattggttacaatatttttttaaaagtacaactacaagtctgcaccttcaagtctcattctgaaaattcctgaatatttatttaatttcaagataaaaatcagcatggtgtttctaggttgactcctaggccttctcaaaccagttcaaaccagagtttaatgcgagaggctcagcagatttctgctttgttgtgagtcactaaaacgtgatgacctcagcagccataaaccaaaggtaatgagtatcccacagagagaaggcagatgaagggaatgtacaatatgatcctcataagactttctcattctaaaatgcagttctattnctcattttcttttctcctatgagattctaagaagcaatcccggaagaaggcaagaatcaagatactaagctctatcttccctactcatttagggtaaaataatttcctacacagttctacagtttatgtgtgtgtttctaactgacctatgcaaccatctgccagttgctgattttacacctttttcttcgcataaaatataataaactaactgaaaaaaaacccctttgaaaa

SEQ ID NO: 140879 - DNA, 351 bp, Homo Sapiens
tttaacagacacttgtttaattactaaaatatcaatcagggttaacactgaaataatctttccacaaagtttccataggggaaaggggaaaatacattatatgaacacatctgtggagcgaaaattcctccctacgacagagcatctccaactcaagtttaactgtttaacaaagccatgtagcaactgaagatggatttgatttcactattagagtaataagctctaactgaagaacagtgagttctgcataaaagctcctatgcacatcattctgcttggtaaaactggacgttattgcacaaacattaaaataaacatttaaacttggctgggcgtgggtggctcatg

SEQ ID NO: 140880 - DNA, 664 bp, Homo Sapiens
tttatttttcatgaaatgatttattacttttagaaaacagtataaacttacaaactataaattaagatataagtatatttctgccaaagtaagtcaagaaaaatgcacttcagaatcagcttttattacaggcaatgtattgtaaactcgaacatccagaatctgagttacacttattatttttaacattttactcaataaaaatctgatatactgggtccaagtgatgacacattccaaattaatgtaactttcttgcagcttaaataaacaaatttagatcaccaagtgaaatcaaagccaagtgtatttgcacaactcaagaatgatgtgaatggattagaatctctcatagtgcatacttcgccatttatacacaaactttgagagtcttctgagtgacatggtatttaactttgtttccaagggccaaatactaaaatgtatagaatatcctactctatactcactattaaatgtcatggactaggaaatctgagacacagaataagaagcaactgattacacaccctagtcatttaagttggaagagttctcttaggtgactctgggtcaggccatcttgatgagccttagacaagttttccttcccataaatcctgctttctcaggcagaatcatataccgtaactgaaaggaaatg

SEQ ID NO: 140881 - DNA, 880 bp, Homo Sapiens
tgtttgcatacctgcaaattgtgggcattcacgccgggactgccaactcaccaggttatttatagtgacaagagagtgagacagtgggcttgaaagtgttttccagaccaaggctctgtcccacatataggtggattaactgtctggcaaaggcaggtctcttcttcggcctttctgacatggtgccagccctactggagtcagcaggagtccagcacaacagatggtggtcagtggtgacttcggcacaggcagttcgtgaggagtggttggtggccatggagtcctgactggagtaggttaaaaagaaggaggaaaatcacaagaaagagagactggaggaaacgggattatgaaggttatttatgctccctgctgctccctgcagaatcccgaagctctgtttttgcactgagggcctttaatgtggaactggctcaggctggattactcttgctgctgtcttgctgtactgtatgccactgggatctgaacactaaacattgctaagaaacccacccaccaccaggatatttggaagtaacttcacatatggaaaagttaaagactcagtctctgagaaaacaattggactgatgcgaatgcagttttggaaaaaaactgtggaagatatatactgtgacaatccaccacatcagcctgtggccattgaactatggaaggctgttaaaagacataaatctgactaaaagatggttatgaaaatcgtcgatgaaagagaaaaaaatctggatgacaaagcatatcgtaatatcaggaacttggaaaatttgctgaaaaaacaagagctctcttctttactttaacactagaaatattgggtataaaggatcttcatgccagatcatgctggagtcat

SEQ ID NO: 140882 - DNA, 462 bp, Homo Sapiens
tttaaacatttgtgatttgattttatctcagcttggaatgtggttggagtgtcccacttctaacaactgtttgctaagttaaggctttggtgtttacacagtgttgaatgaagcagcctggtcaccagatgtgatcgcttccccagactgtcgttttttttcaatcagatcactgtcctcatggtcccggttccaaccttcttcctcagtacatccaccagcctttccaacttttgaactttttcattggccacttgggaggcctctctggcatgttgaagttgtaattccatatttgctcgctctgtcagagcttgttgcagttgagtagccagttcctcattttgttgttgagtgatggaaacaatgttctctctgttttttaaagcttcttcatatgtactaagggtatagttaaactgatccttcagattttcttcttgagataaagatttgtgtaaa

SEQ ID NO: 140883 - DNA, 828 bp, Homo Sapiens
tttcacattcatttaacttttatttcagtatattgctggagttgttgttaatctcttactctatctaatttgtaaattaagctttatcataggtatgtatgtataggaaaaaaacataatatatgtagggttcggtaccatccgcagtttcaggcatcccctgggggtcttggaacctatccccgagaatgaggaggactgagtaccactgagtggaccagcaggaccactagactctgtcaggaatgcctgtgatgcaccgggttcctctaagtccagctggagcagcgtgttctcatgagcatgcctgaatacagatagtagatgaggttcctctgttgcttaattgcttctcaagtccaatctggaagttacagcttttaatgaatagagtaactattttttcacgttgtttgtgctgtgtattttctcctccactctgctaacagacagcagaggtgacgcagaagtggaaaatatttggggcttgaacagctctcaggtttcccctttagtaagctccagcttctcagcagacttgggctgtagatcgataagcccagatttccaaggtgaccataaatgagtctctgttgctgagagctaatagcggaaacatttgcttgccaggtccactgcgtctagtgccaccacggggcagcgacctttctgactcagctgtagtggaagcagaaacagccataaagaatcctggcagcctgatttgctgcagccagtactcatccagccagtcctgcaactcttcaaactgttaccaagctgggacctcaatcagcttctgtcttttctggcaccagttacagcttg

SEQ ID NO: 140884 - DNA, 591 bp, Homo Sapiens
  misc_feature (433)..(443): n is a, c, g, or t
tttttttagcattaaatcttttattttgaaacatttttaggtttacaggagagttgcagaaatagtagagagatttcccacatatctttcatccagcttacataaccatggtacatttatcaaaacacagaaattaacattggtgtaatactattaaccaaactacagacattatttgaattttaccagtttttccactaatatcttttttcttttccagggctaagtccaggatagtacattgcatttagagctgtatcattgctttaaaattcttcacagattcacaatccctcattgcctgccctgggggctgaccactcccagctcccctactccacctgccttggtatacccctgattccactaaacttttgtggtattgggggtaagaagatctaatggcttcaagttagcaatggtgtgttaaaannnnnnnnnnnaataaaaacaaaataaaagaagatctaatggttgtgaagtctcatcctttggtgaaaggtgctgttgagcctgatacaatatattcaactgccagagcacagacacttctactttgtctagctggagattctttagccaggtactcct

SEQ ID NO: 140885 - DNA, 732 bp, Homo Sapiens
  misc_feature (642)..(642): n is a, c, g, or t
  misc_feature (704)..(704): n is a, c, g, or t
tttagtattaaaaacgtttgtttttattttgtatttttgagactggaaactgataaaaatttctgattaggaaactttgagaatagagtctttcttctttccaaaataacaaatgtcttttagtttgagagctccagctgtggcaacaagaatgataaatgcttttgagaaaattagcaaggttttgccccacttaaatggttaacagtaacagcagcacagacccaaacttgataaaactttggtacttgttatttggactaaaattttgtctcactcgattcagacacttaaatgggagttttcagtttatcctgcccactgattcataactgggagacagattcatgggaaggcagcattggacacatactccttctcttgctgagaaccaccaatataatctaattctctttttttaggtgagagaagcagaggcccaaaggaatattgcaaatacccaaggtcaccctgtcaggagtggcagaatagggctggaacaaggactcttttctctggacagcttgcacctacaatcctttccatcttgcacctacaatccactcgaacactgcagcatggaggcagactccttgccaacgggtattgtcgagagcttcttcctaccatcatttgtgagtntcatcagctcccaaccctttgtgtctcagcttctaaactttcttctttgaccagaactcagnccatagtagaactggatttatggatgga

SEQ ID NO: 140886 - DNA, 464 bp, Homo Sapiens
ttttacatttttcatgaatatttattaaaaacaattaaataaaaattattccattaactcatttgtttaacatttccatgtaaccacaacaatgcaaagccctttgagagctgcatgggaggtctaagacatggtttctaatatcggagttcaaatagaaatcacatcggaagctgaagccacattgtgtggtgctcacttccacagcagacttgtacagcttgaagtatttaagcagattaactatcatggtcactgggtaggtggcggctgcgggccaggaacaggcccatgcgcgcagcggcgccagccgcgcctcccaccagcggctctcctgggttaaatcctccaggcctctccgcccccgcgcccggccctaggaatgcgcacgcgcggagggcgcggcccagggcctgctgggagtcgtagttctaacgcgtagtttctcctcacgcctcctgccc

SEQ ID NO: 140887 - DNA, 581 bp, Homo Sapiens
  misc_feature (257)..(280): n is a, c, g, or t
taaaagctctcctgatcctagcttttagaatagaaattgacgtcatttttagcagattatatgaccattcacatcctttaaactttgaggctgatttaaaatatcccacttcctgtttaggagggggaggggctcatattgcaaaaaattaaaaaattctgctttttaaagagtgatctacagtaaagcctgattaactggaatctagctaactggaaacctcagctgcatgctcttgctcccttccatttttagcnnnnnnnnnnnnnnnnnnnnnnnntcacatcagaaatgtaaaatggtttttcttccagggtagtttgcattgtctcacttagtctccatcctcctgcaacttccacatctatgaggaccaaacaataagagttgatcttcacagaaaaggccatcaagcaatcagtataaatgataaccaaggaaagattcaatcaggtcttctaccttaagactttcaggcaggaaagtggctcaggagtctagcaaagatattcactcatcatccatgaaacaaaactttcctccatggccccactgttcattaagaaagtcatataattcat

SEQ ID NO: 140888 - DNA, 525 bp, Homo Sapiens
tgccttctttctaatgtcataaacaagacaaggatattcactcttgctactcaattcaacactgcactggatgttcttgtcaagcaatcaagcaagaaaaaaatgaaaaataaagtatatcaatatttaaaagaagagtaaaagtattttaattacagaaaatataatcctgtatgtatattaaatgataaggaatacatgtcccccaccactacacatacaatctactagtaataaacaactttggcaaagtcacacaataagatatgcaatatgcagaaataaattttatctccatgtacagttacattttgttatgtttcaacagatatctgtaaagtcacaaacgctgaattaacaaatattgaaccattggtcctagtggtagtactggtttatgttcctatgagcctatggtcacattttcattaactgatcaataggtaactttttgtatgagtatcttaaacagattatatatatctcataaagtcttaaatataggcatatacatataggcatacc

SEQ ID NO: 140889 - DNA, 611 bp, Homo Sapiens
ttttttttaacaacaatgaaaattctttatttaaaataccaagttattaaaatgggtaaaatgacatagtaaaataaaattttttcaaaacaactttaaagaaaacatacaatgacatcgattataatatatacaaaataggaaattaatcatcacctgtcattaatgggaagatttgcatgtattcaaaatattcataattttaagtcagataaatagaacactgcatgggggagttctatatttagtctcttcagaggcgttttaaattccgcttactctgggcacttcctgggagagcatcttttctatttcttggctttgctgctcctctactacattcttcagacccatgataagcacacagacataacacacaaaagtcaaaaccacaggctgttcggctacacagtccccttttcttatatggctggtacttagcaggggactggcaccttgggcaaggttttaatgcttcatcagtaaaaagtgttttggcaaccttaacatattcttcctgtttactacttaagtgagtaacagaagagcttgctagagtgtcaaaacttctccccagggagataatgttgacccttgctctctctgagaac

SEQ ID NO: 140890 - DNA, 918 bp, Homo Sapiens
  misc_feature (116)..(129): n is a, c, g, or t
  misc_feature (307)..(317): n is a, c, g, or t
  misc_feature (635)..(635): n is a, c, g, or t
gaaatggacccttgcctttcaaaatttaacacacccccaaggggttgaaagaattgtgatttacctcccacgggggataaccggggaaggattccaaacttttcgcgctagccgtnnnnnnnnnnnnnntcccaaaccttcatcttcccaaaatataagtcacataagtcctgatacacttacacccctagattttgctgcagctgctcctcagatgccgaagagaggcttatcacaaggaccagagcagcaggattttctttattttgtttagaataaaaaaatcttaaagggacatttcaaaagnnnnnnnnnnnctgaaattcaaattctgaaaatatcttgccttttttattaatcatgtcatctaacaccaattaaaaaaacaaatatgtgaatatgatataaaaatacgatcccaggattaacacttggtagcaggcacagttatctcacagaatatatgtttggagggccagggaaaggagtttacttttgtttttgcttctcttaaaaaaatccacagcagtgcaagtagggtcaggaagggggagaggggaaaaaagattctttagcagcaaaatgtccaaggttctctaatcacaatcaaatcaacggatattggattaaaaaanaattcatgaagggatgctgcccagacccattagccatcactaaaagacttccgttgccccaaactgtgacatacgaaggacatgctttattacacaagcaaccataaaacctgtcccttaagcttttgaccgtgtttgtcacttaaatatatgtacaggaagcgggctcctcttctcatccatgtcctttcaggtctcagcgtttgctcgctctgggtgggcctggggttggtttgccacatttggcctccaacacatgaacggcagcttcgctgcggccgca

SEQ ID NO: 140891 - DNA, 461 bp, Homo Sapiens
  misc_feature (261)..(275): n is a, c, g, or t
ttttacagtgaatagcatgtctttattctatttacagtatatttgttataaatataatacatttttgaaaagcttatttttaattaacttgagatttatattttaaacagatcaactcaatagttaacgttatataataaagaatatggtaattttaatgacaaaaatcgtattgtgaaatagcgcactctatactgagatgaatgaggggaaaaaagtcaaaactcctttcaaaactatattcaaagcatcagaaaaaannnnnnnnnnnnnnnacaaagttatgtataagtcatagggaccaccaaatattgaaatatgaagactctatgaccaaagttcaaaactgattttaaggaacctgtgtgaagcaagacagggaaaaatttgtatttaacacttctatagaacttccacagtaaagctggaatttagagactaatggcttaacaggagtactg

SEQ ID NO: 140892 - DNA, 403 bp, Homo Sapiens
tttttaaatgttaaagcaaatattttatttcgaagggaattctttactctgacttccagaggtgctctcttggcttagactttgaatgtggttcagggtgtgagaagttggtcattcttgtcctttcctgactcataccactagcctctttggcaaaaagcagtgtgtagtttctttgtttagggtagagcattagtttccagggtggtgacttttctttgctggtctgaagtcatgctgtctccagtttcctgtttcattctctgctcctcctcagtttcaccagggtgtgtgatccactgccctcatttccttgttggcagtgggtcctttggcacctgcggctgcttcatgggcagtcagggtttgcctgtaggccccgagaggcttgggacttgcaaca

SEQ ID NO: 140893 - DNA, 451 bp, Homo Sapiens
tttgtcttaattatcatttatttgttcacacatcaaggtggtagaaaggggggcatggtgtctgccttcagagaccctccactctaaatgaagaaaagttcagtgaagcaaacacgtgacgtaaagtaaaataagaattgctactgtgaataagagtcacgtattgccacaaagcatacctatgaaaatttgaaatagggaagtttcctcatgaaaagttttgattttggaggaagaaacagaattaaagaaactaaagtcaggagatatttgggcctttgaagtagaagagaggcatggggttggcttctgtccacttgctgagcaacttgttttccttttcacagtggatatgaccttggatgccgacacagccaacaacttcctcctcatttctgacgacctcaggagcgtccgaagtgggctcatcacacagaatcggcaagacctt

SEQ ID NO: 140894 - DNA, 773 bp, Homo Sapiens
ttctgtgttttctgtttagttcttatcaccatcgatacttggttatgacaatggttgtgtacattggttagcccagcaagtattacttctccagcttaacagatgtggaaacttaagcccagagacatgagttgacaccccacccccaaagctagagtctaaaaccctttctttcgctcctcatctcccacaggataaaatgcaaattaatcagactagtggtgaggccctccgtggtgtgactaacctgcatcccgacgttttcaccctactttgatccagaaagcacctttccgccccatctcttctcctttccttaaataccccttacaacttcctgtaccattcttccctgttcagcttctacttggtttcttcgtacattctggatccacccctttcatgcatattccagaccacatttccactggagcagttgaaatgagagagatgggaatgggactcacccgaaccagaggaatttttattacagacccattaacagaggtgtcaaagtcacaggaacaaggatgtgcacctcagaaacacagagctcagtggaaaatcagtttgcttctatttgtttaaaaaatgggggacttatgcataaatctaagaccttcttgaatctaacattctaagacctgtatgccacagaaaggagggtctcagaacgccggaggatagtatttaaatcttaaatatctatattgttctccacagttactgggtcaccacatagcaggcattcaataaaaacgtgtttgtttact

SEQ ID NO: 140895 - DNA, 508 bp, Homo Sapiens
cctgggcggctcagtgaggccgagtggatggcgcttacagccctcgaggagggcgagcgacgtcgtaggggacatcttggccgacttgctggctcgagtcatggactctgctttcaaagtctacctgactcagcaggtgggccgggatccgggtccttcagactcgtctccctctcccgctcctccctgccgacctgagatcctctctcgcctccgcagtgcattccattcaccatcagccaggcccgggaggccctgctgcagatcaccgagtggcgcttcctggcccgggacgagggagaatctgcagtagctgaggaccccacatggggtgaggacgaggagccttcggcatgcacgacggactcctgggctcagggttgagtgcccgtgctgcacgcgtccacctctgagggcctggagaacttccaaggcgaagtacactcctcaggagcctctccggactcctctgccattgctcctgctctcccctttccgacatctcact

SEQ ID NO: 140896 - DNA, 566 bp, Homo Sapiens
gatcacacagccgaggcttgttttctgattgcttactttctaaagggatgcactaagttggaaggaccacttgtagtgtgccagaggatggcatctggaggtgaagggtcccatgacagaaggagcctgaaggtggtggcgagaggagctatttagagggccatgctgggtattccggtgaacacctttttagcatctatgtcctcttcgaccatgtgggggtggatatccacattcattcctgcatccttgcacaacttgagcaaggtccgaatgttctccttggataacctcaggtatcggcagctcagcacctcctctggcttcaacatcctcatggtttccatcttaggttcggtgcttttctccatgaggctctttagcttgcgttcgtaagccatgtcaggcatcttgttggaccagtctcttatgaaggttgccctctggctgttaaaggtaccctcctgtaacatgggatctaagacaatgctttgtcgacggaatgggtttggccgctgagtggactctgggtcgactgcatccttgatgtctgtatcagatttctt

SEQ ID NO: 140897 - DNA, 528 bp, Homo Sapiens
attaaaaatcacaaaaagatgatggtgccttgagctgggtttatagttttataattttcatgctaaatgttgacacctaatgaaatatggcacagaggtgatattgtgactgttgcacacccagatgacagtaaatattgtcattctttaacagtaacacagcccaccactgaggctctgaatctcacattaggaagctgacaaaagttggaaaattgcctctcataggtgaatcctgtccacaggtgggttggtgactctcagaccaagattcagcacagctgtgaggctgtgacttcactaagggtacacagtctgcaggagggactgaggctgtcatgcgtggatccagtccactgttgaaattgtgagtcatatactgagacccaacatataggaagtgttgcctcatacctataactgggaaatgtacaggattgttcattttatccctggacttccctgcaggtgtgactgagaaataaacctctgcccagcctttgacttatttgacttttctgcctcaga

SEQ ID NO: 140898 - DNA, 460 bp, Homo Sapiens
catatttattacaattaacttatataatttctccatctatgcatatattttatttgggcaaagtggctggccctgacttttacctggtgatttcagatgggtaacatccaaatggtgaaattataaatgtaattatcacaataaatagtttcagatttccctgcacttaacatttatacattagattttgttaaagaaatcagttacttttactttatagtagtgacatctcattggtctctaactaccctccctcatacctgactagtgtcatttgtcatcgtgtcctgctcgccagtctcatcctccccactagagtgggagcttctgagtgcacagggtccaagtgctcgtcctacagccgccacagtgctcagtgaattagggaaaagttttgctcccgaaagctcataacttggtcccagttttaataaatggctatattatgaattgtgataaa

SEQ ID NO: 140899 - DNA, 495 bp, Homo Sapiens
gaaaaaaattcaaatttattctttattctggtaatggccaactaatctgaataaggcacatcatcagcatctataagaaacaaatacaaaagcaatccctgttatacagaaagggagtgcagagaagtgggacgttagtattggcaaagcacacatattttttgttaagcacaaataagcaaaatgcaattgagtttgaaagtcagtgtgctgtttcttttatgacaggaaaggcaaatagatttaaatttcctgtgctctctgatgaaccaggagcaactgcctggagctttgtgttgatgcgtcctcaggcctagaaggaacacagagagtagggctgtgactgccgggggcttggccaactctgccccatacaatgtgactcagcctgttgcttcccaagtctaaaatgttctttttggttcatgtaactgcgcttagccaaaggcaaatttagtttataagcctcagtgaggaaaagcaggagaccatttg

SEQ ID NO: 140900 - DNA, 467 bp, Homo Sapiens
ttttctactgatataaagttttattcaaatattttgaatacaataattcaatgggggaaagagcagtcttttcaacaaatggttcaggagaaggccagagaaaaacaaaaccactgcaaacccatagccagaaaggaaaggagccagaggaataaatgatttaactttactctcctcccatcctcttataccactagtaccttgtgatcttcaacaacctgcctgagttcgaggaacacagttgatgcatctcatgaagagttgtcacctttgaacatagagtataagaagtcaatacagggtagggctagagaaacaaattaagaaaattgagaaattaaattaggttacattagtcccattctgataatccaggataatcttcccacttcaaagtccatagctttagtcacatttgcaaagtcccttttgccatgtaaggtaacatattaaccttatatgttaag

SEQ ID NO: 140901 - DNA, 465 bp, Homo Sapiens
agggcttttaccagcagcaagagtgcagaagtgtctgctagttttgagaaatgtgtctggttctccttttcctttccttataggcttccctccaccaatcctggagctaaaagaatcatacccattggcagggactgacattaatgtgacctgctcagggcatgtattaacatcacccagccctactcttcggcttcagggagccccagacctccctgctggggagcctgcctggcttctacttactgccagggaggaagatgatggctgaaatttctcctgctaggcctctttggtggtgcagggtcagcggttgatgaaaaccactgtgatccagctccatatcctatgtgagtggaggcctgatctttcttgtcaaaataaggattattattttcccatttctagagagcttcttggccagccgtgcttcattattacagttgccacatttttctcattaaa

SEQ ID NO: 140902 - DNA, 500 bp, Homo Sapiens
tacaatagtattcattttcccatttttatctgacttgatttgaccattatatctgataactaaatctccaattctccccccaaatgtaagagaatatcataaaagtagatgatagatgccaaactttaatttatgaaactcatctttgaaattgatgactagaattgtttcatttgggtcaggggtgttgaggggagagcaatggaaaaacgagacatgccaggtggaaagctaaactataaaaataatctaacccccttactccgagaacccgtaaagcccagaactccagttgttttgtcaattaaactaaataagaaaacagtgtcctacactcttggcaagcattgtgggctgcataatttttttatgatgatcaactaaaatgcaaattgttttttcacataagaatgactcacctgaatgaatattaagaaagtaactggactgtaagtgttaactgcatccaccaacaaccaacatctattacgcaattccag

SEQ ID NO: 140903 - DNA, 462 bp, Homo Sapiens
tttgagcctttttgaagtaagtttatttgttataccagggcaggattctcaactctcattgtccacccctccccacccctgcccccttacatcaacatagtaaatcccactatgaccacaaggcgtcactcttgttgttactgttgtttcatagattgtttcccaaatagcggcaaaggattaacgagagagtggagaagtgagagtggaagtgctgtcttaagtccctgacagatagcaagatccatgtatgttttgggaaggaggttcaaggtggtagaggttctagaaggctaggttagcaggcatgttgagaatggaagagcagtgttttggatgccatcagaatctttctacataaaaagctttgcccatctgatttagttcctgctggtactgctgatgctccttttcaaacagctggtgcagggcagcttgacggaccattagtagttgcttttt

SEQ ID NO: 140904 - DNA, 509 bp, Homo Sapiens
  misc_feature (456)..(469): n is a, c, g, or t
ttttcattgtacaatatctttattaaagaaatgcattccagcaacactgtcagcatctttattaccaaagaaatacataactttaacagataatctctctgtatcttagtttttgcctttgcaaaacaaatggagatatatcaactctcatacaattctaaaagcattgtgctgtgctgcctcacaggggtacgttcccagaggtttctctctctagagcaatccctaataggacaattgttcactctgaggcttctggcttcttatctctcctctcttggggagctgctgcttctctgtaggttgcttccctgtgacgcagggaccatagtttctgctctaataacaccttttccactctgacgtagctgagccatacactacattgccttagtcctgttcaccctttggtgattctgttccatttgccacctggcctcttcctcctcagtcacnnnnnnnnnnnnnngagacagtctcgctgtcactgaggctggagtgcagtggtg

SEQ ID NO: 140905 - DNA, 401 bp, Homo Sapiens
tttggtttaagtgatatgtcacagtctttctttttgacagggttcagggaggaaaggagtcatatcactgagatgaacaaaaataaatgtcctaataaccccatgctcaaggtccatgtgagagagttgaatcacccatgtgttgaacccagtgacatgtcaaaatatacaatttatgcagggcccaggcaggagaagacagtaccttcacctaggtgtcaggcccagtgatacatcacaataccttctgtgacagagtccaagcagtggagaagagtcacattacctaggtgctgagtcaaaaaatatgtcacaaaaatcactgaagggagggcccaggcaggagtcaaactacgtaaattaggggctcagagatatgttgcaatgacctctgtgggttg

SEQ ID NO: 140906 - DNA, 320 bp, Homo Sapiens
caaaggagaggtaatcattattataattccctaagacattcaagaaaggaaaagtaatacaacaaaagccactctgcagggaaaaacaaataattcaattatttaaagttacagaaccatatttgcaaatttacaggactgtatgaagatgcccacatgttaaagaaggggggttttttttgtttcctgttaactgatctaaatctgcttaaaacctccactcaaaagcaatttaattggataacctttattccaattattgaaagttctttcaggaattcagtctccacgtggaagttgctgaccagtaggcttggcaa

SEQ ID NO: 140907 - DNA, 479 bp, Homo Sapiens
actagccgtccctctggtctgtccctctcgccctccaggagatctggggccccaaccacatcttgtcgcgccagggctggaagagagtttggcacagggcatggactgtgtgaaggagcgctgtgttggcctggaaccttcctgcgtctggtaccagaccttcagctgggggaaaggtggaaggtgccctccctcccgcagggcctaaggtcaacaggaggcctcacgggagttccagtgacttctacaggtgccttggagaaggtgcgtccaccctcctcttcttccacagacgcttttcctggaccagctccctatccattgccacacaaaagctaccaagagagcacaagcactccagaccagcagccctgcccgacccccgcctcccgcagaaagcccacccgttcctagacacgtcccacggaagcacagggcatagcgcaaggccacagtcccactacccgcaaagcggccgc

SEQ ID NO: 140908 - DNA, 649 bp, Homo Sapiens
tttgtgtttcactgtatggatttatttaatatttgatcatggcacagggaaaaaaacttaatagatgcttgtagttgcctgaagtaaataaaactttaacttgtgcttaagatctgtagaaaaataactttggaaggacacaaggatctcaacctttgtacttcagatgaattttaccattcagaaccagtaattttcaacctttcttaaacagttaacatcatagtgatacttagttgtttcttgtgtccacttgcaactgtttctatttccttctatgagattgtccatggtagtcaagaacagcttgacactccctatacaatagtgattgagttaccccttctgtcttgcagggtgaatggccagggttcatgtaattcttccttttgggacttaaatgctttccaaatcagatgtccccaactgttcttttaggagtcatctttccccataatgatcaaatagtgttttcagcaccgattccacagaatacaggatgtctgctctttaccaagtctccttccctgctgagtttctggctgtctctgaggaatagttccattaactaagtctgaatgattacttgtaatttttaaaagcttcctagctcaggccactgccttctggagcacagcagcctacctct

SEQ ID NO: 140909 - DNA, 434 bp, Homo Sapiens
tttttgacttatcagtactgattttatttttttccttgaattaactatgctttaaatttgggaagaacaagcaaaaaggaacaccctcacaaacttaccccactggaacgctcccaaagattgccacttagatctcggatcctttcttgcctaggtgcgtattccggaacttgaggcttgctggcattataaataaatatagagagaaggactgatggggcttccaagaaaaattccagggagggcctgaagtcaaagaccaggacagacactgttgtgataatgacagtggtaacctgggccatcaagacatggaacatgttatccaggaacttcagaatgaaagccactgaaaggccctggaatgcagttacaaaaataagggctactgaaaatgcactgtggccataaaaaaatccacagttcttaatctg

SEQ ID NO: 140910 - DNA, 577 bp, Homo Sapiens
ttttggcgtacaacaactcagatttattaattatagttatataggtcagaagtctgcaaaggtctcactctactaaaattaaggcatcagcaggactgcattgctatctggaggctctagggagaatctgttttcttactcatgcaggctgttggcagaattcagttctttccggctgtagaactgaggcccttgttttcttgttggctgtatgctgaaggccattcccaggttttcaagctgcctcattccttgactcatggctcccttcctccatcttcaaaaccaacaaaagcaagtcaagtcctcaggtggtatctctctgacaaatgcttctgcatcccccttccatttttaagagctcatgtgatttgattgggaccactcaactaatccagaataatctccctactttaagatcagctgattagaacccttaatttcatctccaaacttaatttccctttgccatgtaatataacatattcacatgttctggtagaatatgaacatctttggggaccattattcgccctatcacagttcatccctaaagattcacatctatcccacatgc

SEQ ID NO: 140911 - DNA, 915 bp, Homo Sapiens
ttttgacggcatctagctcagatccaccgcaaatgtcactggcatggtttccaagcctgtcctcttccctcagagggttgcccgtcagacaaaggagaaacattgggctctgcacagccacagcatgaagtggactgggatagcgatatacatcattcccgtttttagacaccagatcacactggtacttgggattcacatctgcagatttggggcaaccatctgagagactcaaggtcgcctccaaggggctgcaaaagcaggtgctggaatgacaactggataaacactcactgaacaccgagttagaggaattggaaagggatcctgaagccccatcactcagctcataaaaccctgagctaggccgactgtctgtctccaggtgctcttcagatgtcttttctacatccagtctcaggtcacttatctgcttgtcaagctcttgcaactgattcaacaaaccagcatctcttcgcctcaaacagttcaattgctttcttagcagcaagatgttctcctccaagaacttctcctccaggcgactgcgctgcgccgcctcccccaatagctccccagcgcggggcgcagcggctcccgcacccccggcgccgcgcagggcgcccctgaccagcagctcttggcgctggcgcaggtactccagctccgccagcccggccagcgtggcctcctgccgctcccgggtgcgctgccgctcggtgtctgcctcgcccttctcccgccagcgcccctcgggctccgccgtgcgctgctcgcctcgggccggcgccggaggctccagctccttcgccgtcccggccggactcggcttcatggcccccagtcgggcagcgagagccgtcaccgcagccggaccgcccaggcggaggagcagggcgctagggctgcggccgc

SEQ ID NO: 140912 - DNA, 527 bp, Homo Sapiens
tttctattacatttttactgaaaatataaaaggtgtgaggaacaattttccaataattttaggagtgtttgtttacctggagaaattggtgaggctggcactcactgtggcacagtgttcttgggcagagcatgaggaacccagagggtgtcctggctttggcttggtggggtgtggctgtctctggactgttaggaaggcactggggcagaagcaaaggcacgtgctctgcactggcagggcttcttactgattctaaggaagccactgaaaacctaggggtaggttggaaataaaaaatgttaggaaaaacaaccaagggccgagggacgagaaatatccatttggctgcaatggaattcagagctggagtcagagtttggtctttgcccagggaggtcctcagcttgtagtgacagggccttctgggagggcttcatcttctcccttgagtcccacaaaacccttgaaggtgttcctggggcagtccgtgttcatccgaggacacaaaagcttcctggagcact

SEQ ID NO: 140913 - DNA, 498 bp, Homo Sapiens
cagggtaccaatatgtgaataactatcattgtcttgttagcagtggggccctgactcacgtgaaggaattatagcattttgaggtggcacatgtttagttgatcacataaatatttaaaaaattgaaattcagatgaagtaataactattttttgatacttattttttgaaaaacaggatcgtgaacttccgagactgattagaggccgagttcatagatgtgttggcaactatgaccagaaaaagaacattttccaatgtgtttctgtcagaccggcgtctgtttctgaacaaaaaactttccaggcatttgtcaaaattgcagatgttgagatgcagtattatattaatgtgatgaatgaaacttaagtagtgataaaaggaagtttagcataaattatagcagttttctgttattgcttaatttaccatctccatagttttatagctactattgtatttcacttgttgaattaaagtatttaaattcttttaaaa

SEQ ID NO: 140914 - DNA, 545 bp, Homo Sapiens
ttttttcatatgtggaaatacatttatgcagatcaggaaggtcaaagaaggctattctcgaggaaggtggtgatgactgtgccccttttctatcgaccttgtgtgtttgatccttatgcctattccattgtaggttgcactatttttcacaattagctccagatgctctctgaactcttcccgagatgggtagaggcgtttacgcacgttttcgcggagtgtttgtaggtccattggccgagtgatgattttgtagtagtcctttacaacctttgcattgactggagtgtggaaagggtatgtctttggaagatctctcatgtcattgatgatagactccaatatggacgacagcgtcaccatagggtctgtgcggcgccggtggatggacttatgaggtctatttaaatagtcacagtgaacagtggttccaactcgccgtttcttctttggaggaagctgctcgttaggaacttgagaaccagagatttttgcggacctatccgactctcaatagctggttcccaagacaatttgtcccttca

SEQ ID NO: 140915 - DNA, 527 bp, Homo Sapiens
gtggggggacttcaggaataatttattcaatgctaaataaggtgaggagtggcaagtctaaaatacataccctctatgtacattctaatcttgttcatcctctacaggtacaacaatatacacattcactcacccaactcaccatttcctggcagctaaaatgacaggatcttctctacaacttatccccacccccatcagtcatacccaccttctggaagtcagatccttcaggtgattgcctactggccacaagggcacccatcatttccgtggcctctgtggtttctatccctgcctttctgggggcagaaatgtctgctgcagtccttccttttggaaatctgaagacttttggaattgcccctgtgtgtgcttcttattgtgcatatgagtgaagaaatcaaacatggtcccacagatggtgttgcagtctttgcaccagtgattgccagcatcataatactcataagcagcagtgggctgatccaactgcttagtggctgactgggggctttcggcaggct

SEQ ID NO: 140916 - DNA, 795 bp, Homo Sapiens
  misc_feature (82)..(95): n is a, c, g, or t
  misc_feature (784)..(784): n is a, c, g, or t
aataacgtaaattttacattgataagaatgatgtttaacaatttttttgaaaatataaaataaaccctatatcattttagtnnnnnnnnnnnnnntataaatgctctttgcaaagaccaccattcataaaaattgtaaatatttgtatgtcaatttctgacatcctttttactgggtaatttctgtttttatgccgttcatatatcgctcatttcctcataacctgttattttgtaccttttgttaataggagtatttaataagtaatggaggaaaagtacaatataaaacctaatggaactctgaagtgagatgtgtatttccctgtggtaaaagagttttactggaaacaattaatgcgatccaaatagacaaaaatatctatgaaagaaagaatacatatggtaagcatcttccttgtctttggcttagccttcttgaccaaaatcttctgtaaacttctttaatttcaacaagtcatgttcattgactgtaggttttgtgttagatagtgaccgcaacatatccgacatggaaacaactggctccaaaagtttatctccagggacatccatccatgtcatttcaatggcaccagggtcacctggagagcaaggtgttagcagatcatctacaagatggttaggatcagctctggaaggtccgcgaacttttttaaaatgagtagctgactgtactttcctaacaggctgcataaggggcatacgtacaatgatacttatatctgccccctgaataaacatctgttttccatcccagttcntcgaagtctgc

SEQ ID NO: 140917 - DNA, 591 bp, Homo Sapiens
  misc_feature (543)..(543): n is a, c, g, or t
ccacgacaaccgcaccatggtggagatcatcgccgaccacccggccgaactcgtccgcaccgacagccccaacttcctgtgctcggtgctgccctcgcactggcgctgcaacaagaccctgcccgtggccttcaaggtggtagccctcggagaggtaccagatgggactgtggttactgtcatggcgggtaacgatgaaaattattctgctgagctccggaatgcctctgctgttatgaaaaaccaagtagcaaggttcaacgatctgagatttgtgggccggagtggacgaggcaagagtttcaccttgaccataaccgtcttcacaaatcctccccaagtagctacctatcacagagcaattaaagttacagtagatggacctcgggaacccagaaggcacagacagaagcttgatgactctaaacctagtttgttctctgaccgcctcagtgatttagggcgcattcctcatcccagtatgagagtaggtgtcccgcctcagaacccacggccctccctgaactctgcaccaagtccttntaatccacaaggacagagtcatattacagaccccaggcaggcacagtc

SEQ ID NO: 140918 - DNA, 521 bp, Homo Sapiens
tttttttaagatcttgtatcatgtatttattccaaaaaaatcggtcatcaacctagaaaaggtgcaggaacaatagttcagaaacacattatttcagttttcctacaaaagccaaaacaggccatcacttcttcccaagggcaaaccctgctctacgagctgtgagtggtaccttctgccagaggggccgaccgtccctctccccagtgctctgcctctgcacggaattggtcaggtcataggtcaagctataataaaaggattctgagtccatgaacatcttcagcaactcttcaagtaatctcctctccaacttctccttctctttactttccttaactttctttttattaggagcagacacattggatttaatatgcgtaaaggtcttcagtagaaactttgagtcatcaggagatggtatgatcttctctggtttgttaataccaaaatgatgcttcttacagagctctagctcaagatcctgaggttccatttcagaaagtgagagcacagcaatt

SEQ ID NO: 140919 - DNA, 1367 bp, Homo Sapiens
ccagattgggtgtagagttatttaattataaagaactattttaggtatagtcaatgattttcaattattatgtcaattacattcgttgtattcacttacggactttatggtaggttacaaaaatatatactttgaaaagaaatatactctttatgcaaaggaagctatgccatcaacaaacttgacctctaattcccaagtttattacagaaaaatttgtagtgtgaaaaaggcaaacatctccagctcatcttctcaggtatctatgaagattccgtacaaactcctttcaaatttttcccaggaatgctgtcggaactggaccttgatgaaggaaatactttctgactcattggaatttgttatagtcaaagtaagtaaggcacaaatattgaagataaacttggtacagtatgtagtgccttttgttattaaatgcaactttgggtgattacttgacattttgacttcattgatttactaaaagaagttttgaaaattttactgaagaccactgtttttgtttttgctattgtttttaaatttactatatatgatgtttgtagtcatttctatgaaaatgttggcattaagccttttaatgaggggcacaatctgctaccataatattcttttaatgggaaatcaagtaggaatggataattgtgacttttctaggaatggagaccactgaaaatgagacagaaactagtgtgtataaatacattacagtatgggtgtggatgttcacactccacaccatgaatgccatgaaaggatctctaatcactgtagatagtgctttgcatgttatgtttccagtctgggtatagctggcatcttattaacacaaaggaattcatcacttctgtttggaatcattctctatcagaaccctcaaccctgcatcctaccatcctgggcttgcactgcaagttacatgatccctgagctgaccactttggcttgaatccctggaaggagaaaggagagagagagcaactagttcagacacaagcatctagttcagctttggtactgcttaattcttgtttttctccctccctctaatccttgtttttgactgtcacatttgtcctaatagcaagttaggacatgtctgttggctctcgagattcatgggacagcaatgcagcaaatctagccatagtatttgctctctctagccctgccctttttcctgtccagtgaatatcaaaacaggtagaaaacatggcctgaaggattgtctctgccaccacctccatatgcattttaccagtagtcctgtcatacaggttgaattagttttatgtacccggccgtaatggccgaattcccgggcatatgtccggtaccgtcgactg

SEQ ID NO: 140920 - DNA, 537 bp, Homo Sapiens
  misc_feature (502)..(502): n is a, c, g, or t
  misc_feature (519)..(519): n is a, c, g, or t
tgctgcaagttttatctttgtttttggactttctacttgtgttccatttctcaatgtgcaaacacgtctccttttttactcaaagcttctcggggcttattctttacttggctctagttcctgattcttgggggtttacctcactcttgtctacctggagaaatctactcatatgttagttttggagcccggaagaaccagggctgacactcagtatttataataagagttaattcccaatttggtatttgtagagagtccactgtgttccaagtactgtgtaaggttccggaggagatatcggaggtggataaatattggtccttgcctttggggaattcagagtaccgaatagctctttaggccattctctcattaagtattttccaagtttcagctctttgcacatcagcttcaaggttttcgtcatatccatgtactacttgtataattatttacatactatttctgcctagataaactaaccttttttatcttaganaaaactgaatggcttanagtaacaagtaagacagc

SEQ ID NO: 140921 - DNA, 1669 bp, Homo Sapiens
cctgcgcgcaggccaccggcgctggctgccgctcttcgtgcgctcgtcgcccgtgtggcttgcgctcccgggtgttctgtggctgttccgtggctggtgttctgctgctttttcgtggtgcgcttctggcttttcctttgcgtgttgcccctctttctctccctcgtttggtctgtggcgtgttgtgcttgtcactcgttctggtgtttgtgctgtgtgcccgtttgttcggcctgcggtgtcgtctgttcgcctgtctgctggcgggtctacacttttctagggtgcggtggctggtttcgtgggctgtgctctcttcgcctgtggatggccctagggggccgtctggcgtgtagctgcgtgtggcgcggccgtgtgcccatggtccttgcatccgtgacctgtggcttgtagtggttcctgttgtggcctgttggtgtattgttcctgtggggcctcatgtttcttgtcgatgtccatgtgggtgttcactttgcgcctctctctggtgggctgtgcggccgttatgtgcctcgtgctgtgcatcttgtgttggcctttgggctcctgcctgtcgtcgatcgcggttctctattgctctccatgggtcttgtgctgtgctattggatgtggtcgtctcgcccccgtgtggtctcctcttgtggttgttcgcacggtggctaggtcgtccgatgtgcactcgctcgtctgttctctcttgtgttggtcctgtcttggggtctatgtccccggtccgtgtttcgtatcgttggtagcgctcccggccgtggtttggggcggccccggaggtgtccgtgtcgtggtttgtgtgctggttgccctattgcccatagcccgtcatggctctccctgtttgtcctcttttatggctcctccattgtcttggtgggtgcatggatgggcccgtcgtctgtggtcacttgtccatgtagtcccgtgtgtggcagtgcagtcgcgccggatcgatgcccctgtgtgctggtaccgtgtcttcctgcgcttcgcttggttccgtgggtgcggtgttcgcgtccgggtgacgcctcatgtagggccgtcgtgtggtgctctggttggcctttggcttctggctctccctgggacatggacaggttaggctgctagtcggctgacctgccccatcgtaggcattgcctggctggcctcaggtaggaggcagcagcactggggatgctgctgggcagcataggaagcagccatatgaggctgatgactgagtgcggtaaggagctgtccagggtggcagaaggttgggccccgtaggctgctgcggcaccataggagccagtggccgcatcagccgactgagccgcataggatgcctgataaggcccattgatgcttgggccccgtaactattcagctgggtctgcacaaccggctgggccccataggagccagccattggggtagtggcttgtgcggcgtaggctgctggctggctggcataggcagcagctgtggctggctgtgccacataggcagcaggttgggaagagtaggaagcagcctgctgtgcagcatatggggcagactgggcattgtaagaggccgagggctgggcattatatgaagctgcctgggctccataagctagtggttaccaatctgaagtgggagcggccgc

SEQ ID NO: 140922 - DNA, 1443 bp, Homo Sapiens
  misc_feature (218)..(226): n is a, c, g, or t
  misc_feature (775)..(775): n is a, c, g, or t
aatgttgtatttggccatgtttttgaatgtttttttgtgaaatattttattactagcccacccatcaatttggaaagatgaaatttgctcttactcccatcactgattttgaagtcccgagccaaagccgagtgacaaaagcaggttaagtgattaaccaattaaccgaactgcgaggagcagctgggggcagagggcgggggccgggtcattattcnnnnnnnnnccacactctctcattctctcctctccacgattattgaccgccccaggggcctgatcacaaaccctgcttggccagggaggcagacacctcgtcagctagcgtggcgagctggggcgagtctaccatgtcgatgctgccggtggaggagacattgctgagatgccgtggagacgtgtccccagacaccactggcgacttgtacacgatctccgccccgtggtctgtcttggctttggcgttctcgcggaaggtcagcttgtgggtttcaatctttttatttcctccgccagggacgtgggtgatattgtccagggacccaatcttcgactggactctgtccttgaagtcaagcttctcagattttacttccacctggccacctcctggtttatgatggatgttgcctaatgagccacacttggaggtcaccttgctcaggtcaactggtttgtagactatttgcaccttcccgcctcctggctggtgcttcaggttctcagtggagccgatcttggacttgacattcttcaggtctggcatgggcacggnggctgtctgcaggcggctcttggcggaagacggcgacttgggtggagtacggaccactcgccaccttcttgggctctcgggtgggtggggttggaagggacggggtgcggggagcggctgccgggagtgcctggggagccggggctgctgtagccgctgcgatcccctgattttggaggttcaccagagctgggtggtgtctttggagcgggcggggtttttgctggaatcctggtggcgttggcctggcccttctggcctggaggggctgctccccgcggtgtggcgatcttcgttttaccatcagcccccttggcttttttgtcatcgcttccagtcccgtctttgcttttactgaccatgcgagcttgggtcacgtgaccagcagcttcgtcttccaggctgggggtgtctccaatgcctgcttcttcagcttccgctgttggagtgctcttagcatcagaggtttcagagcccggttcctcagatccgtcctcagtgggggtctgcaggggagattctttcaggccagcgtccgtgtcaccctcttggtcttggtgcatggtgtagcccccctgatctttcctgtcccccaacccgtacgtcccagcgtgatcttccatcacttcgaactcctggcggggctcagccatcctggttcaaagttc

SEQ ID NO: 140923 - DNA, 461 bp, Homo Sapiens
  misc_feature (267)..(309): n is a, c, g, or t
tcaggacctggaagttaaccactttcgggatgaaattcttgccttgatgtctgtctccctcaacagtaaacagagggtgcagcactaatgaaaggtttccccaggcgtccctcccttgacaagcaatgtgagtgcccaggctgactgctgcctttgtccctgcaggagatgagcgtgggctatgcaaaggggatccgggtgatgagcatgacgcacacaggagagccaggattcatgctctacatccccatagaggtgagagggcannnnnnnnnnnnnnnnnnnnnnnnnnnnnnnnnnnnnnnnnnnacaaccactgtggggtgccagtgctcccagcagcgcgttcaccagcactggcaggtttggagagctgtatctgattgggccttgggagctgaggtaggctgcattgaagagattcccccatttttaactaagttatataagttaatttgaat

SEQ ID NO: 140924 - DNA, 570 bp, Homo Sapiens
tttttatgtttttaaaaggagtttattaaacaaatggcggtttaatttgatcctggaatatattatgtgagcttctggtggctgattcatcctgcttattatgttttattcatgctaaaattaagaagagtttcattttataggacactaaaggttggtagttgggggaaccgtaatgcgtagcaggtggcagggaaagccggtgaagaattaagaaagaggcacttaatgtttaatgaaaaccacaactgttgataattataaaaggactcggtcatatttaaaaatgtatatttcacttaaaaacatttcctcaattaatttattatgacctttaaactttggttccaggttaaatgatcagctctcacctgggtacactcagcataacctctatacttgatgagtaaaatgctcctattaaatgtcattctcactctataaacatctttcgaaataattctttatttatataactctccacccatcaactcttaagaatgtcttattcatctttctatctacagtgtaaatacgcaaagactgtatacgcaaacagtaacttaaaag

SEQ ID NO: 140925 - DNA, 592 bp, Homo Sapiens
ggaccggtccggaattcccgggacccactctcttcccattcaagaacgagtggggaggtgcagagtaagaaagtgggaacgcgtcagtcccttcccactcgttcttgaatgggaagagagtggggaggtgcagagtaagaaagtgggaacgcgtcagtcccttccttgcaggagaggtggcggcaggagggggctcccagcagctacaatcccaacactgcttggccgcagagaaaatgccctggccaggaagccggctggggtgtgtgatgatcaccgttctccggcctccgtcctgaacgtgaagggggcccgaggccgaggaagatccggagcccggctagaagggtcggcctgagagaagccagtcccgcgcctgatagacccccgccccgctgtctgggccttggggacacggtgccgcgggcgacggcggctcggccgaccgaaagcgctcccgcccggagtttgaggtctccggcacgggcaactctcggccactcacacgcgcaggccccactccagccgcgactccggcccctgctccggcttcggccgcggctgctcccgacacgttgttgttggcgttggt

SEQ ID NO: 140926 - DNA, 739 bp, Homo Sapiens
cagaaagctgcatgcatgcttgatgtttttcaactagaaaagaccactgctctcaacaccaccaccactcgcgacctcaccactgaaaggggtaccgcgctggacatgaaaaattcagataaccaccacccgcagctgcggaaggaaagcggcagagaaaagactagggcgccccctggtggctccaatgtggctcttcctgaaattggcaggaataaagcctgagccgctttcttgcaacctccagctcccaaataaccatatattcaaacgaaattaactcaagagtagaaactttgttgttaaaaaggaggtgaagggagacaaggctgttgtaaacaccaacaaatatcaactgaatgaattttgattaagatctagtaaagtagtaccagtgagctggtttccgcagcagtgacggtacttccgcagctacggagtcaggatcacttagtctggtgcattccacagcctggaacactctgaaggagagtcgtgaaagcaaaggaacttctccccaggaaaatccacgtatgtgcacaaacacacaagcacgattttgcacacaattgcaagaggtatctgaaatctctaaaactatctatgagcctccaatgaggttcccagatacaacagacacttcatataactcccaggaatccaccaaggggataatattaccaccatttcaaggactgggaaaacgagttcagagaaattaaagcatttgcccgggaaa

SEQ ID NO: 140927 - DNA, 315 bp, Homo Sapiens
ttttttattgtcaacatttattgagcacctattacaacaatttcatcgcatggaagacagcatcgtttctgacactgttgtttcatgtatctcttagaaaaacgctgctattagacatctaacactatttatcttgaggtgataaaatatcaaaagccgtgtctcaagatcgatgaaatgcggttaaaatgatgaatagaaactctagggggacctcatatcgatagactcgagactggcacatctggagatccgtatttatccggcttccccttccagatcacgcgaggtttgggatattttgctcaccaggcc

SEQ ID NO: 140928 - DNA, 755 bp, Homo Sapiens
  misc_feature (68)..(97): n is a, c, g, or t
  misc_feature (121)..(121): n is a, c, g, or t
  misc_feature (127)..(127): n is a, c, g, or t
  misc_feature (132)..(224): n is a, c, g, or t
ggggcgctcccgcttgccgcagcctgcgtcgtctgccgccaccgcgcgccttcactgacctacaccannnnnnnnnnnnnnnnnnnnnnnnnnnnnnggctcgcaggctggcccggtgaantaaaangactnnnnnnnnnnnnnnnnnnnnnnnnnnnnnnnnnnnnnnnnnnnnnnnnnnnnnnnnnnnnnnnnnnnnnnnnnnnnnnnnnnnnnnnnnnnnncccggtcgggcgatgaagtgtcactatgaggcgctgggggtgcggcgcgacgccagcgaggaggagctcaagaaggcctatcggaagctggccctgaaatggcacccggataaaaatctggataatgccgcagaagcagctgaacaatttaaattaatccaagcagcatatgatgtgttgagtgaccctcaggaaagagcatggtatgataatcatagagaggccctacttaaaggtgggtttgatggcgaatatccagatggacagctttagatttgctacgctatttcacccgttaccctgttattctggttatggagatgatgaaaagggattttacacggtgtatcgtaatgtttttgaaatgattgccaaggaagaactagaatctgtgttagaggaagaggttgatgatttcccaacttttggagactcccagagtgactatgatacgtccatcctttctacgcttattggcagagtttctgcactcaaaagaattttgcatggaaggaagaatatgatacacga

SEQ ID NO: 140929 - DNA, 560 bp, Homo Sapiens
taatggtttggactgcaaactagtacttaggctttcagcaacttggcagtgtttgtctgatgcagatactgcacccagttttaaaaaaggcttattactaaataaactagtgaagttaacaactgaaggagtaatagtatgaatgctggattcagaagtcaaacttggcttttttccaagggaagagcttattcttggaatatctatatgggtagtttttgaatcatttacctctttatcaatccctttacattcaatacttatactatgaccaactgacctatgaccaacgttcaagtgggtactttcagaagtaaactggttctttccaacagattcagaaatttcttcgattagttctgtagtagaacttaaaagtaatggattaggagccaactgtgaagaagtttcagggggacttctggttaaaggattaacagatacagtaggtgatggggaagggagattgctttctcctactgcactgaatggggatttagcggtagatacatcagaagcacctcccattttaaagtccggagaagtgcaatatacaggag

SEQ ID NO: 140930 - DNA, 465 bp, Homo Sapiens
cccaccaaccttgccggggaactttcttattgcaggatcatgggctaatgatgtaagtgctccttaaatacgtgttctagaaatcatctctctttgtatggccaaggttagctttagctccgttgtttcccaagtaaatgaatcagttggacttatttatggccttttttgagaaatcaatttagggggtgtgaacccttctgaatggcagacattattcttacacccgtttttgttaggaaagcacaatcatatgtgttgctcgaaattttctactttagttcagtctcttgaagtttattcccaaatcaaatatcatattcatccagagtgaacattatacccagtggcacacaccaacaaattccctttcttggcatcctgacagtgttcctcaggcatgtatgaaactttttcaacattaaataatagcacagatttgcctagatacttactcatcatgta

SEQ ID NO: 140931 - DNA, 511 bp, Homo Sapiens
  misc_feature (109)..(136): n is a, c, g, or t
  misc_feature (231)..(241): n is a, c, g, or t
cacatgtcactctgttggaatttcctggggagatacaaaatataacttcctatgggtaaggactatgtcttgtttactcccagcccctagcacagtacctggtactccnnnnnnnnnnnnnnnnnnnnnnnnnnnntacctacacattgcaattaaatgcttaaagcatagaagacttaaatttttctatcaccatttaaatgtgattacttttcttccctgttcctgacnnnnnnnnnnnctgttttctggggaggaggggaagtgttgtgtttaatgggaacacaagcttcctgccactttccattgttaaatcaatatttgatgagaatgaatgggggaaagctattaggtcagagtaaggaatagcagtcttaacacttgtgcttcagtcctcagcataggccttaaatacttttggatgactatacttttggaatgacctgaggcagcaatcatatttttatttgaatactgctcccaagtgcgtagtgtagcatgttgtataaac

SEQ ID NO: 140932 - DNA, 567 bp, Homo Sapiens
tttggctgtatatagctttatttttagaaattaattcacacagttgttggggttggcaaacttcaaatccatagggcagactagcaggctggaaactcaggcaggagtcgatggctatagtcttgaggcaaagtttcttcttttccaggaaactgcagtgtttgttcttgaggcctttcaactaatcaggtgcagctcacccaaattatttaagtaatctctttcacttaaagtcaactgattgtagatgttaatcccattttaccaaaataccttcacagccccacctagattactgtttgattaaataactgtgtgctatagcccaaccaaactgacaaataaaaccaaccatcacatccaccaaatcaaaactccaggaacaaatgtttaaattacaagcattaagattcttcactctgaagaagctttcttggtgcatttagcctgtttccctttgcaaaactttcatgtgcagttgtcaatactaagcaaagtctacctaatctaggcacttgcatttaagagaggaatacctctggaacccatcccatccttccaccctca

SEQ ID NO: 140933 - DNA, 984 bp, Homo Sapiens
  misc_feature (867)..(901): n is a, c, g, or t
  misc_feature (905)..(944): n is a, c, g, or t
tttaattacaaataagttttaccttttattgtattccattatacaattttacatagtaccattattttaagcaataattaagcaaattgaactactgtttttgagctctacttttcagcatatagatttacctaaaaaagtacaaaccaagcacagtggtgcaattttccaggcactttcaagttgcttatttacaaatatgtaagcaccctgttggaacacatgaaaattttggtgtcgagaagaaacactccatgtatatcaaatctttaaattttaacatttgcacagctccaaatattcctgagaaaggtcagtctcattgtcacgtacatctgcatttcctcacacttcagcgtatcttggggaaccataacctcggtcacttgatgtaccactaattgcacaaaatacatgtaatgtgttgctcatccagggagaatgcattgtgtcttcttgtaatatctgctcatggataatgtcagataattcttttaccatgtctctgaaatttgactttagcccttcatggtactcaacttgatcttctttaattagccgctcatttagttcaagtgcaatgctgcatgcttgtataaattttctaaacatgtctttcaactcactcacttttttaggtggatacttgctagctttgctgtcatttaagaaagctcttgcatatgctaatggaccagcattgacctgcacagaaacacagccctgcaatttaagttggagctgaatcatgtccacgtcagtagaggagcaaagcttttgcagctctgcagttttatcttttatttcatcagtggccccggccgtaatggccgaattcccgggcatatgtccggtaccgtcgactgnnnnnnnnnnnnnnnnnnnnnnnnnnnnnnnnnnncggnnnnnnnnnnnnnnnnnnnnnnnnnnnnnnnnnnnnnnnnctgcggcggagctagcgccctatagtgatgataagctctt

SEQ ID NO: 140934 - DNA, 330 bp, Homo Sapiens
  misc_feature (312)..(312): n is a, c, g, or t
ttttgaggagatgcagcaagacaagctgtttattaaaggatacaaactgaattctgatttaggaagtaacattagactgtcagctcccaccttgatacctttccttagagaaatgaaagggctgggctgatgaagcctaaagctgactcgccctctgttctacggtagaaagaaatttaccttaagtagccacgtacaggtgtatttcaggtatctagaacacttggtataccaaataggggctgcagagaacagattaaaggaagtttttacttaaagggctctggtattcattctgaaatactgactttnccggctagaagtaggaaa

SEQ ID NO: 140935 - DNA, 677 bp, Homo Sapiens
  misc_feature (106)..(119): n is a, c, g, or t
tgtatttattttttctagaaaaagaaatttttgcaatagaattttattaacacctttctcaaacaaggtttccatgacagaaatcttgacagcaggagcactagannnnnnnnnnnnnnaacatgttctttaaaacactgtgaagattaaaaaacaatcttggcaggctgatggctgcgtcagcacttccgggcctcctgctctagggagcatcaccagtattttgccaccactgagccagtcctcttggtagtagcagtagaaatttaattatttgaaatgaaaccagaaacatccctcgcaactaacctagttttcttatcaatgcattaatgaaacattcttttaataaaaatatttaatacaagacacattttgctgtgcataataaattcctctgctttgaatcattctttccttttgaaccaatcatttggttgaaaggttttctttctctgacataggtgattacatataaaatccacaaatatagaaatggggaaacagaatctcctggcaatcatatcacgggagttgtttttgtccttttgcattaaacgatactcaatgatagaatgattttacagatgctttggaggtgggagggtagtgctgctctgatttcacctttaaaactgctgacagtgaaagcatacttttaggcagtattagagatc

SEQ ID NO: 140936 - DNA, 566 bp, Homo Sapiens
  misc_feature (92)..(106): n is a, c, g, or t
caagtggatgccatttgctctttattattattgttttcttgtaaagaagaagacaaaatgtaacagccaaattcaacaattataaaaagaannnnnnnnnnnnnnnaatcagaagcaagtttgtctgttgcccccaggctccaatgaaatgctgacatatactgaatgtacagatttcccagctgacaagggtcaacacatgaatacaagcacagtttaaagtggtatcaaaattaatccatttcacagtaattatttctataagctcagttgcacatatcagggtttccactgtcacaaattcacaatgtcagagcaaaataacagatgtgttcaggcctgggaaattggtatcgatgaggggagatggattgagaggcaaaagcagctgggggatttgtcccaatcctgaagatctgtgttaatgctcgggctgggggtgggtgaagggcaggcactgttcagcagtcagatatcagtacagtgaaacaactgttgaggcattgagcttgagagggtgtgctatttgggtatgtttgtcagataaattcttgctagagagagac

SEQ ID NO: 140937 - DNA, 506 bp, Homo Sapiens
agaatctggctgtctgagttatctgtgggtggctccctaccgaaacccccaggcgccccacctctccgcctgtgacccctaaccgacaccctagtgcctcagggcttttacttgctagggcttttacttagcatttaaagacgtttctctagagataaggatttctcagcatgtctgagcccctctctctgtttacaaggtcattgcttggtctaaatttgtctcaatcaaaacatttttgcgctcagaatggtgtagagtgacgatgaggtggcggtaaggggttgagcgctcacgcgaacgcctaagtgaccagaacgactggtgtgaagccgtgatctgactctgtggagcctgggactggtttcagcgagagcctctgtactgctctgtagtctctgctaggacatggacgaaaagggacgcagccgggagagcgactgccccaggtgggggctggggggacgtaagggaagaataatgattatctggctgtgtttttgttt

SEQ ID NO: 140938 - DNA, 465 bp, Homo Sapiens
  misc_feature (104)..(118): n is a, c, g, or t
ttttttacagcgttattagtctttttatttgcttattgcatcttgggagcgcgtgggtgggtgaagggagcgaggataggaagtctatggagatttacaccagnnnnnnnnnnnnnnnaaacaaaaacacagccagataattattattcttcccttacgtccccccagcccccacctggggcagtcgctctcccggctgcgtcccttttcgtccatgtcctagcagagactacagagcagtacagaggctctcgctgaaaccagtcccaggctccacagagtcagatcacggcttcacaccagtcgttctggtcacttaggcgttcgcgtgagcgctcaaccccttaccgccacctcatcgtcactctacaccattccagcacacggcaaaatgcagaggactacctttccctggtccgccccctggccgccccttggggaatgcaaacttcgtgttctgctgcg

SEQ ID NO: 140939 - DNA, 407 bp, Homo Sapiens
ttttaggggctttcagagtcttatttaatcctcagcgttcattaaatacattttacaatggatgtggcctgcgtgtgcatgtacacaaacacacacgtcaaactcaaaccctgaaattgaagtttctcagatcatcctcgtactcgccatctgctgtgctctggtctgctctgtcttcctttagtaaaaaagatggccttgaccccttacattgatgtcaagacccactgtggactctgctttggaattagaaaaccctggcttcctgggcagaaatttctaagggggaaggttaagctcccactggtccagggttcggattggttggagtggggtcccctgtgaagccgggactaggcaagcgtttgtttgtggcccagagctcctcaacctgctgctgctagcag

SEQ ID NO: 140940 - DNA, 709 bp, Homo Sapiens
  misc_feature (604)..(604): n is a, c, g, or t
  misc_feature (622)..(622): n is a, c, g, or t
  misc_feature (628)..(628): n is a, c, g, or t
ttctgttaggttttaaggtggaatcctcgaattccctgggacggtcttggaaactaccgtctgtggacctctcatatgacactgtatttgacagtgtgctagttggatcaggggagcttttgttctgctctgaatgaagaggcagcatcactgaaactgttgggaatccatcagcagtaacagctttagcgcttggcacctcaggatgtttttccagggacccatcagaaacaaatgtggtgctgctttcttgtctggttgcctgagtagttgcagaagtgtgaaatgaatcaacaatatccacttctccagatccttctccagaaggttcataatgcaagtcagatggttttggtgctgatgtaacaaattctttggccatttcaaaaccataagctctagccagaaaatcagtagatgaggttgttgtttcgttaatttctgctgttgaagaattcttgttagagtcttgttcagttatggtttgtggtctactagtctggatttcttctgcccacctgacagtctgatttttgaggatgtccgatgtccgtggagaaagggagagtgccaccgtgggtccttctgctccagtgtcacttanaatttctattaatgttgngctggntactgacccactaccttcaaaagatgtctgttgagatacgagtggtccaccttcttttgcacattttccattctggtaaag

SEQ ID NO: 140941 - DNA, 563 bp, Homo Sapiens
ttttggttttcgtatattttaattctatcaaaaggatattcttctgcccatttgacagaggaaggcaccacgtggagaagcttcataacatgagggccagggcccatcctctgtccatccctgggtaacctgcttcccttacagctcgctgtctcacgctctcatcttcataacctgcatcccctggagcagagattcgagctcagaggtgttgagcagcctctgcaaggtcccagagttcagaggaggaaggaccaccatagtgacagggagtgacaggtggagccatctggtcagggagcaccctcccctggctggagggaggtggggacagccgcagacaggcttcagggaaggggtgaaatgagggccctggatgggagcagagggttccctggaatggggcacaggcctagtagaggcttccaggtgataggagtttggggggagggcatttgagggaggcagggccaccctccgaggccctgcatgagtgctagggttgggggtgggacttctcagggacaggggagttcctggcttgtccctggggtgggcttatg

SEQ ID NO: 140942 - DNA, 620 bp, Homo Sapiens
tttggttttcgtatattttaattctatcaaaaggatattcttctgcccatttgacagaggaaggcaccacgtggagaagcttcataacatgagggccagggcactcctctgtccatccctgggtaacctgcttcccttacagctcgctgtctcacgctctcatcttcataacctgcatccctgttgaggttctgaatctcacagctggagacagttgaaagtttgaacattgactcttgtaagtggatccggtccaccagtgggttggcgactctcagaccaagattcaacacaccgtgaggcttttactccactgaggagacactgtctacaggaagaattgaggctctcagtatagattgtccaacattgtgtctcatgtacttagacccaaaatacaggtgttgactttcataccactggatccagcacacaggttatatgattcttctttgtgatctctgcacaaaggggtcattgtgagatatctcagggtttatcacctagatgatgtgatgctccttttcttcctggaacctgtctacagtgggcattgtgacatatcacttggcccagcacctacatgttgtgactctgatctcatgcctgggccctgccca

SEQ ID NO: 140943 - DNA, 807 bp, Homo Sapiens
ttttactaaaacagaaagactttcaggaaaatgtcatttaatgatttcagctatacattacatatacaactctgtagcctagcaacaatcattgctacaccatcattaactttaaatattttgcttggtgagctattctcaaatgtagcacattttaagattttgccatcattatgactgtggaatcattgtttggttttcataggaaacagatctgtcacagtatgaagctttgtttattttaagaaactggtacacaattacatttccacttacaagagaacgccacagatataactaaaggcaggcttcgatggctccacaaaggttgcgtgcgggaccaaccccacacctcctgcttccccgtcgcaccgccctggccaggttcacatggtttcatttccagagatgctttgctcttcgcagttaggtagttttaattccttcaaaggcacacaacttccatcttttttccagcgtggctcccacacccgtgaattcctgtttgaacatgcgtggcagcctcatcaaaagcatttctatttcatttgcagatatcttggagtccagctgctgcatgtatgaccaaagatattctatgttggctccaaaaggatggacgtgaagaaacgttgatatgatacctattagcagagcttctttctctgattttaagccttggcttcttttctcaatattgttctctcggtcttggttgactaatgcaactgtcaacacattgatttcatttgaatcctcatggctgtggccattggtctcgaccaattccttggtaccttttaattg

SEQ ID NO: 140944 - DNA, 585 bp, Homo Sapiens
ttttttttatgctgctcaattccccactttttattctgtttaacggtggtgagaggagccgtggcctgccctgaggagtgtctgcagtgagagcaggcactgaattgattttcaagattaactgtcatctccagctgggaagcagcttgcacaggaactgagcaatcttcctgggttttctcctgcttcagaaatcactttctctgccaggtgtctgataaggctggattggtaggtcctaggaggtcttttcccggtcactgaaggattaagtcttccaatatgtgaacaccaggagacacgaagagaacttctagtaagaagggctcaccttgtggttgtaagtttcatcatctttgctgtgtgaacctaggcaaattgcttaacctctctgaaacttcagctcctcatctgcccatctcacctctaaatggtccccgcgccattctggtgtccagaatagatgcagagatttagcttatcctgtttcttggaccagtgccaaagctcctccttattaatgttcaacctgttctctcctgaaatctcctctgcctcaggagtgcttcttctggcatgagatta

SEQ ID NO: 140945 - DNA, 393 bp, Homo Sapiens
gcccatgatcccttaggagggggccggctgcattaggggtggctgctggtctacgagcaaaacagtctcggagctaaaaatgaatgggaataatccacatgagagttgctccttctgcctgggcctgggaatgagaagacctgtggagctgagctactgcttacccacaacctgcatatacataaatcagaagccagcactggttgttcttgatgaagatgaccttaggcacagtgaccctgaaggccacatgttaaagacagtggagccacaggatggaaggaagctggttccctgaatcatcacgtggcagagagcggaccactaatcaggatcatgtgtttcagatttcacttgaccaataaatcaatttcaattttgttacactgctaa

SEQ ID NO: 140946 - DNA, 518 bp, Homo Sapiens
tgcgaccgctggaggccctcgcgcgctctggcggagttcgggagcgggtcccggtagcggactgcctctgggacagcggtggcgtctctgtgcccgtttagtggagttggagagtccaggaaggagcgcgatggagaagtggggcgcacggcgggtttcgggtccgcccctgcccttccgactcctccgaccacgtctgcctttggctgaaagcaaatatggctccgtgtgcggtttctgcaacaaaggctgggcgggccgggtttccctagggatggggaccgcctccccggggagtcgtgggggtgagccaccggggcctccgagagaatcgctggtgtcgcttcgcacccaagggacacatctcgggttagaaaggagaaacgacgtggatctaaaggcgaagcccatgctgaggacttttcaaaatggcctcttatcggccccactcacaggagcttcaggcttcggtggccctgtaggacaaccctggggtgtcattggagagaagctgacgg

SEQ ID NO: 140947 - DNA, 240 bp, Homo Sapiens
ttggattgagaataactttacttgttttttgggaggaggttaatgggtgggaggggtgagaggggagatctgatttacatacggacttgagactcccaaggcagtaccccgggtcgtcctctgcaaggttgccccggtggggtctgacgcccagctggcgtccgggagccggggtggagtcctggagggaggcgaaacgggatgtggaaggggccttgagttgggggagggggcgggtga

SEQ ID NO: 140948 - DNA, 598 bp, Homo Sapiens
  misc_feature (549)..(549): n is a, c, g, or t
  misc_feature (562)..(562): n is a, c, g, or t
  misc_feature (579)..(579): n is a, c, g, or t
tttttcatgtttaaaacttttaacatttttaattaaaaaacccacacaatcttaggttgggcatggagagggtggcatgtcatatgatggggttgtcccttggggtgtgctgaatgctgcttggggtttcttcctgagccagcgctatgggagctgaagatgtagggctggcccttctcccctttgtgggccccttggggcagaggcttgggggctctgtctcttgcacctgctgcgagggtccatcccagaatcacaagccactcagtgatggtatgggagagaaaaggtctctgggggtattcaaagcttgggacacctcctccatggagccccctcccattgctccctgggcctcttgagcctcaggcaagaaaatggccaggactgggtgatgagcagcccctggctgcccttttggcccaggtctaggtctggtcaagctgttggagctgccttcccacacaggatgagttccccaaggaagtgaggccacagcaggatccagagggcacccctttctagagccctggcccaggtgaggccaancagctttgacagngtgaaatgcatcaaagncctgaggagcaactccctt

SEQ ID NO: 140949 - DNA, 332 bp, Homo Sapiens
caaagagtgaaatttatttatttggaattcagaaattccaggttgtatgacatcagttactcaataagtgtgaattctccaactcttcttttaatcccattttagaatttaatatagagatctctgattggcaggaacactagaaataaatgttccatggccagtagtgcaaatgggggattgtaggttttgaaaaaccaccctaagccatattaagggggttggaagaaccatcgaagcctaaggcatagaagaaaatttggggttaagaaagatgaagaacaaaaaacagctttattgcttatacatgaccaagaaaaggaaaacatggc

SEQ ID NO: 140950 - DNA, 698 bp, Homo Sapiens
  misc_feature (603)..(603): n is a, c, g, or t
  misc_feature (638)..(638): n is a, c, g, or t
gagtatgaagtcgacggcgcgccgaattcggcacgaggcggagcgcagtcgctccgcgatggactcgccggtcccggcctctatgttcgcccccgagcccagctccccgggggcggccagggccgcggcggccgccgcccgactccacggcggctttgactcggactgcagcgaggacggcgaggcgctcaacggcgagccagagctggacctcaccagcaagctggttctagtgagccctacatcagagcagtatgacagcctacttcggcagatgtgggagaggatggacgagggatgcggagagaccatatatgtcattgggcagggatcagatgggactgagtatgggctgagtgaagctgacatggaggcctcctacgccacagtgaagagcatggcggaacagatagaggccgatgtcatccttctgcgggaacggcaagaagctgggggccgcgtgcgtgattacctggtccggaaacgagtaggagacaatgacttcctggaggtcagggtagcagtggtgggcaacgtggatgctggcaaaagcacgcttctgggggtcctgacacatggggagctggacaatggccgaggctnttgcccggcagaaactcttccggctacaacatganattgaatctggtcgccccagcagtgtgggccacgacattctgggctttgacaggaagggc

SEQ ID NO: 140951 - DNA, 698 bp, Homo Sapiens
ggtacattgagtgccagtgcaaagcccaggtgttctttggtcatcccaacgatgcccagcattgctgcccaccatgagcatgcagaagtcaggcagatggcctgtcatgccgaagacagtggttttcaggtacttctcatgaccagccaagtcgatgaaggtaatgactttcgtggacttctcacagatcttggtccactccaggctgccgccgtggctgtcaggcttgttcactacattgccttcactgtcaaagcccagaatgtcgttgcccacactgctggtgcgaccagattcaatttcatgtttgtggcggaagagtttctggcgggcaaagcctcggccattgtccagctccccatgtgtcaggacccccagaagcgtgcttttgccagcatccacgttgcccaccactgctaccctgacctccaggaagtcattgtctcctactcgtttccggaccaggtaatcacgcacgcggcccccagcttcttgccgttcccgcagaaggatgacatcggcctctatctgttccgccatgctcttcactgtggcgtaggaggcctccatgtcagcttcactcagcccatactcagtcccatcttgctggtgaggtccagctctggctcgccgttgagcgcctcgccgtcctcgctgcagtccgagtcaaagccgccgtggagtcgggcggcggccgc

SEQ ID NO: 140952 - DNA, 556 bp, Homo Sapiens
  misc_feature (530)..(530): n is a, c, g, or t
tacgtttttaaaaaatatttatttaaaaataagatttcagaaaatacagtacttaatacattttgagaagtaaaaattccacaatttaaattaaaaacaatctggaaagaaaatagaaatattacgtgaaaaaaactaaatcgctacaataaattaaaaacaacaacattgttcttaaggtagatacatggtttgattttcacattaagaaccagtgtagacttttcatttaaacaaatacatctcagctacatggttcccacttgtcatttcacccattttactcactcttctcaatctattcttacatctctcaactactattttcctaattaccatcaacactagaaatattggtgaagattttcttcaaattctcttaggggaaagacaaggtaaaaataatagacaatgcaaggaaaacagcactcagatctatacatattatgtactgaataataaaatgcctgacaaatttaaaaacaggatcttcttatgccacttgtaacataccactattaaaagcattntagggatataatactagacagaactt

SEQ ID NO: 140953 - DNA, 336 bp, Homo Sapiens
caataatgtttgtttaaaaataaaaagataaataagaaactcgaagtaaggtccgctttgaccatcgtcccgatcgttctcttctctggaggtaaccgttaccagcgttttgagcacacttttccagtctcctttctatatgttttctttcctctactgcatatacagagtttctttttatacaaatgacgcctcttggggtctcattaagaccctaacgggagacgtgatggccaatttatttaaggaaagcagactaaacaatcgtttatgaaaacctactgggtggcaaccccgcgctaagtgctttctttggcatgaagggttctggtattt

SEQ ID NO: 140954 - DNA, 844 bp, Homo Sapiens
  misc_feature (330)..(338): n is a, c, g, or t
tttgagtttcagtaggcacagatttatttagccaatcttcaataaaagtggacgcttccacaaggatggttacacccccctcagttacaggaagacagcagagacttctccagttaacattcttttatgactggtacaccattcacttcactgtacccaatttacaggtctcttggatgtggctaaactatctcttccttcccacctgttctagacaaaaattttttttgtcaagcaaaaatcttatttttttcctggaacataattgaaatcttaatcattcgcaaaagtcttaagagggaaccatcttcaaaagataaaaataacacnnnnnnnnngcttctgctttactctcaagacctcgaaggctgtcatcattacccaatttttttccactccaggattcttgtgtcttcccctcaaggtgcagctttctgtatggcattgctctagggagtcagtaaggtgggtggtttaggagatggacccctcagccaccattcctttatcaagatcattcttaaggagccatcagtcttttcctttggttgtctttacttcattcttctcctctttgcttttgctttgtcattctgtaagcaggggtgaaaattatcttcactactgtcaccagaattctttggctgggaggaagctgtttgatgtggaaaaatagcatccctaagtgcctggattcaaaatgagactctgagggcatgggagtgcctaggacttcggcaaagtcaaggtaatagctgaactcctccacctgggagacagaatatcagcatttcaggcgctttctagatcttctgtatcagaaactcattttactaatatccca

SEQ ID NO: 140955 - DNA, 536 bp, Homo Sapiens
aagtgtgctctttttttaaaaggtagagtcttacaatcaaatctcctgctgatttcactttgggatatggtcttgagccagtaatctttatactgggtttcaagaaaatctttgttgaagtttgaaccacaactttgtcgtggttcttaaatgtttatactgtatttctaagaagttgtttgaggcaaattaactgtatgtgtgtaggttatctttttaaaaactcttcagtgcaaattgtatcttattataaaatggacacaaattttcaagtttacacttcatatagcattgataatcttcaggtgaacacttagtgatcatttaaaaagctcactgctgatcgtagaaaatttgctttaattaattaagtatctgggattattctttgaaaacagatgaccataattttttttaaagaagagtgacttattttgtcttattcttaagtaaagtgtgccaattaaacctgtgtggcctatataaatgaagttaataacttcatagtaagaataaataggtttaactaaaaaaaa

SEQ ID NO: 140956 - DNA, 743 bp, Homo Sapiens
tttatgatggcagtctttatttatagatagggtgctgttcatgcccctaagtagtaatttcttttttgtttaaaccagacaccttctggactatatgttcagacacttcatttgtagtgggtttcctactttctaaaactgtgcatctactttataaaaccatcacttatagttaaagataccctctcactttctgcctccttatgatgacatgtccttgacactcctccatccgactcttcagtttgaatccacgaacacttacttcttctgtgttctaatcaaggtgatgactagttgatatgatcatatgagctcagctaatctgctattcggtaaagggctacagagaaagttagtcagatcttcaggctccttactcttctcccaggcaattttttcttggtggccctctgaaagtaatgctgttgtttaatctgatagcgactgagattaggtgatatcagtcaagagtggactcagctgcaagtagcaaggaactcgagaagattggcataaggaaggaagagggttatttttctcctattaagaaaagcagaggtacttaagtccagggctgatacatctaatcatagtgtcttcaactatgcagagtccttccaccttctgagctaccattctttgtggcttttatcttcatgattgcaaggtgactgctgtaccatgaggctttgcatctcacaacttttccaccatctgtcttgacatccatccatcttctg

SEQ ID NO: 140957 - DNA, 498 bp, Homo Sapiens
  misc_feature (400)..(400): n is a, c, g, or t
ttttttaggctatgaagaggggttttaatgaagagactctttataaaggtgtaggagtaggcaaaccacgagacagcgcagtctcctaggcctcagagctttggggccccaggacccaggatggagggtatggggggatggggtcaccgggacccagagatgagtgaactttgtgacggtggtagctgcggcctctgttcacttctggaagacatgcgggctgccctgttcctgctttactgcctccttcttcctttgccagtaaaagaaacatctccagctatggccaggagtagagcactgctgagactcacagcccacagggaggtccgccggttcctggctgggcagaaagtggggtcattgcaggagaggaagtgagtcctgcagtcagcacagnctggtgaccttcagtgtggactgtatgtccttctccttcagcccatcagatatcttattcagcctctcagtaaagagattcttgtgcgtgtagatctc

SEQ ID NO: 140958 - DNA, 541 bp, Homo Sapiens
tttcatgtaagacttaggttttactatatttgatttatttttacactaacaatagccacatttatttccctgctggctgtgtgcctgccacagtactttacaaatattatctcttccaaccctcacaccatccttgcgaaatgggtgttattacctctacacagaaggggaagggaggctcagacaggttaataatgttcccaaggtcactagaaagctagcccggatcccaagaggtcttaaagcactaaaatatactcttctaagaagagcttcttgaggtcagggatcatgtcttttgtttttgcgtgcccagacctaggtcttagaagacgcctaataaacatcagttgaaaaaaatgactggatgatctttcactttttccacgcagaaaacacgtggcgacatcactgagaaacctcccggccaacagagggcgcgacgtccatttcagcgcagtggggcccagttgcggacgcctagcttccttccgtcctttggctgaagttcagccaatccctgcactccgagagagccggc

SEQ ID NO: 140959 - DNA, 591 bp, Homo Sapiens
agctgaaatgttctaccttagaagtttgttgtaaggtacagaacaagcgcatagtattcaatgaatgttagctatatgtacatgtatgtgtatgtgcaatacattgtattacgtgggtttcattaatgtcaaaacagattagggctgagtagtattatttttgcttctcaagttctgcacatttatttttaaagcaagttgtagaatgtaatgtgacatatttgagcctgaagttggctgaccaaggactgtggataagtgtagcatagttattttttctatcaaaaacaataacaaaaagattgagtacttttaatatacatgttgtcaaaagacaaaattacaacaaatttaatcatagatctaattggcttttattcaagatgcatgaatcggatcagcctccattctacaaaatagaatgagaggtctcactgggcagtggcaaagcagtgggttttgtaaggtgagaactgtaacaggaaaaaatgctgattggttaacatcagattacttttcttttaagggttaaaacagtgagcatttccgtattacactgattcgggtagactggaatctcctattttcaga

SEQ ID NO: 140960 - DNA, 945 bp, Homo Sapiens
  misc_feature (146)..(146): n is a, c, g, or t
cccagcctactgagattaatctggtgattaatccgaaagatttgagaattgacactaagcgagccagtggagctggggggcagcatgtaaataccacggacagtgctgtccggatagttcatcttccaacaggtgttgtttctgantgtcaacaagagagatctcagctgaaaaataaagagctgtttatgacaaagttacgtgcaaacttgtacagcatgcatctagaagaagaaataaataaaagccaggatgctagaaaaattcagattggaagtaaaggaagatcagagaaaataagaacatataattttccacagaaccgggtcacagatcacagaataaacaagacgctgcatgatcttgaaacttttatgcaaggagattatctactggatgaacttgtacagtcattgaaggaatacgccgattatgaatctttagtagaaattatttcccaaaaagtttaagttgatttgttatttatagactttcgtagcttagaaaaattctacagtacatccacatagggtgaaagtacccttactctcttgaaaaacgttgagttaacacagttggaggtaatatgcatattctgaagtcatagataatttacacagatctctctcaatgcattagcaaaaatcatacaatatacagatggtcctcgatttacattgtggttaattcccaataaacccatcataagttaaaaatgcatataacgttagcaacacagcagtctcctaattaatgacagcttgacttaacaattttccaactttaccatggtgtgaaagaggtatgattcctaagccctaaggagctcctcagcttgaaatggggctgcatccctataaacccatcataaagtcaaaaaatcctaaaacataagttggtgaccatctgtaatcatgatgtggtggtaaatcttggacgctacct

SEQ ID NO: 140961 - DNA, 1600 bp, Homo Sapiens
gccgcggagtgagctagcaggaggggaatagggaagtagcagtttggacccgtatgattatcatcatctgtgctcacgccggcctgttgcgatgttgtgttctttctctttttggcggatatatagttgtgtgtatacacccctgggttttttgccgttgggaaattcctcctgtgtctcacggttagcccggcgccgcgctgcccctgcaccgtgtgaaccttccgcccttcttggggcccattgtccccgccgggcagaccctcggcccaggcgtaaacttgtccggacttctccagaagcatacttagaggaagccagaaatggggacagtttcaagaatacttcccatgttacttgaagaactttgaaaggccagttatatttaaacagggctgaattatacgcccatgtacccaaagtaaaaagccaagttttatgtagtttccagtgcagacgagggaacaccaaaccactgagccaagacgagaaccaaacacggaaaggtcccaagagtcagcaatttttctattgaattaatctcatcccagggtcaattttcaggattctattgcaatacttactgcataaaactatgtattaaaaaatagtaagaaaaacacgatgtaaaatacatcaaaatatactacataaaccccaaaggattttctatgtataccaatactacgaattagaacatcttaagtctttcattctccagctctttcagaccatgcagccaaagcctctggacagtgtccctggcggcacttctgtcccatagccttaggccgtatatcttttctctccttcatgtttggccttgtggtacttgagatagtcattatagagctccttaaagatgtctctcattcccggctgcagcgaggcccgcaggaactggacgtcaggctcgatgcagaggttcaggatgaggtaaatgccctcctgcagcagacttttcacagctggatataaggtcaccttctgtacctccaacacgtactgggccaccataaatggggaaaacacagcaaactcctcagctcgtgcggcgatgtggctgtacatcctttcaaccaggcgtgcacactttaggaccgtaggcaggtcatctatgcttcctttgtccttctgccgcccttcccgcataactgaaaacaccaatctattgaaagagttcaagaaagaagggatggctttcagcattacctgtaatgacagataacagaatgtaaaagtacatacgtgattatttaagtttttctactttaaaggagctcatacttatttctttcttagcctagtctatcgggacactcaaaccagttgtgtgtgcccagggatagccacatcctttcgcctggacatgctgctgtcactgctcacccatcttgtattagactctttgacccttgttttaactatctagggtagagaacccacactgcgtaacttcaggaggtctatggggcaatcctggtttggaatttgctgagtctgtaccttttactctaagctggtgctaatccattctggaaatgggtagaaacaaacaataataggaacagtactaattaatatattcaagtatcattgg

SEQ ID NO: 140962 - DNA, 182 bp, Homo Sapiens
ggacactgataagaacctgtatgagattgtttccttttttccccccgcgttgtaggtatcttgtcttgctattttgcacaggctgatctttaagtcctggcctcaagtgatcttcctgtttcagtccccaaggtgttgggattctgggcatgaactgctgcacccagccctttatactcaaa

SEQ ID NO: 140963 - DNA, 621 bp, Homo Sapiens
ttttcaatttttgggggtatatacccagatgaggacacaggtggatcatctggtaactttattaagaatttaacggaaaccatctcacttccaaagcccctgtaccacatcacattcccaacaacagggcggaaggcttcttatttttccatagcctgccaacacttgttatattctgttttatggataatagccatgttaataatgtgtggtggttccttctttctcttaaaatctattttttcgatttttcaacaatgacaattattgaataatgggatatgtgtgtctgctgggcaccgtgcaatttctcgaactttcgaatcagatggggccatgccaccctcactcctcattctcactgattttcactgggggattgcttttcttcacagcaagcactgacacctcagcttcacagagacattgtgtcagcccaggaaatgtagagagaccaaatgcagaatctgtgaaccattggagctggtagtttccgtggcctcggatgcggaatgttgctgttctcccctcaattttaatgtatccagggatcctctgcagacaattgcaggtatgaagatagaagagcaggaaggcagtaggtcttcattgcagggggag

SEQ ID NO: 140964 - DNA, 831 bp, Homo Sapiens
ttttaacttcctgaaaactctttataataatgcaggacaactgtatatagcaaacgccttcaaaatttaaactctttaaacatttaattcttcagcattaatacacacaaatgcggtaacaggggtcaggggggtggtgcgggggcaggtgggttacagcctccactgggatcagggtttcaacagtgttacttataaattatattacatcaattttatttactgatctaggcagccagagggtggaaggatatacaatgtggaggaaacacattcataccggggtgaggagtgctggcgggagacacggctctttaacatgaaaaatgtataaagtatttagcaaaagttacagaaaacagatcaaacaagcaagtttattttgttagaaaattccactttcatagggtttgccgatgtgctcgtgtctgtgaaggggttgcttccggtcatctccttcctaacggaagggaagggatgctaagttggggcccctgtcaccaaggatggctggcgtccctttgaatgtctgtccctgggtccacacagctgcctggaacccacgactcccgagagcccgtctgctgcaggtgatgctggaagggaagcgcccccacttgacagatgagtgcacggaggtcccgacaggggatgtgacttaacttcaggttatgggacaaaggaggccgcagagcagggccagtcctgtgctctccccctgcatagcaggctttccctctaggtctcccagtcaccccaccccgagagagcacccacgtgccctgaccttacattccactgcaatcccactaaagtttccctcaaacacca

SEQ ID NO: 140965 - DNA, 620 bp, Homo Sapiens
ttttacattatgaataacttttatttgtttatacaagttttgaatttcatctattttttatgtaaatagctcgatcttcaaaaatatccttcagctctgacaacctcttcacataactttcctgtaagatcttttaaatatccaaacctgtaaaagtccacattcagttgttctttgttccttagtttgcttcaacaacatcaatgcaaggttaatagaagctatttacttaccatatggtaggtggctcagaaccttctatttctaagtaatcatatttctcttccatttgaaaatcagtaaatatgagtgaaattgtgtccccaggctctgctacaatggtccaagtgcaatcagcattgttatggtactcattaggaaaactagggctggatatgatgccactggatcctctcattgttcctccacaagcatcttcagctctacagataggaacaggaaaatcccacgaagctgtattaactgaattggccatgcaggtgagctgagggtggccatcaaggatgtatccagttacacagctgtagcggatcttgtccccgacgtcgaatcttgtgccatataatacacctttgggtggaacaccaggatttccacaa

SEQ ID NO: 140966 - DNA, 523 bp, Homo Sapiens
ttttttaatgtttcataagtaaattaacttagaaaggggtgttctatcagatgacattttgatgatttatgatgacaacattcacgaaatggatttccacacagtttctccctgatggactcaaaagtgttctctgtggaagacactgagccagaccaagaagcatccaggcccgtcagaaacatggcagacagagcaagagggaggacagtgtagaggtcagagcccaggcgggatacagcacaatgccaccgccatgggcttccgggaaggagtgccaaacgggtgacttggccagaaaggccagcgttggagtgacagagatccttgccacatcccgttctcgacttcttctccaagcctgtgtcgcggtggggctccatttctcaatgggaagagagggcgggaggagttagaaccatcttctttgaggtcggtctgcacctctccgtctgggcaggctgaggctgggatcccgcgctgctctcctgggactccgcctgaagtttcttcatcctggtcg

SEQ ID NO: 140967 - DNA, 547 bp, Homo Sapiens
aaatttttactcatgcctttttgtttaggataaataggtaagcacaaagagctcttcaaaatcagaaaaaacaataggagtccttccttgtcttttctgtgatctctgtccttgtttctgagactttctctaccattaagctctattttagctttcagttattctagtttgtttcccatggaatctgtcctaaactggtgtttttgtcagtgacagtcttgccagtcagcaatttctaacagcattttaaatgagtttgatgtacagtaaatattgatgacaatgacagcttttaactcttcaagtcacctaaagctattatgcaggaggatttagaagtcacattcataaaacccaagtgctatgggtgtattattcatgatagctggcccacaggtcatgaattgaggaggaatttgctttcaaaaagcaagaatgtccaacactgaaagtttatagttttatatttggaccttgaaaggtaagaaaaaaccaggttctccaaagttaggaatagggaactaatttatgaaacagccatcttaaa

SEQ ID NO: 140968 - DNA, 402 bp, Homo Sapiens
ttttccattatgaaaactgttagctgtgccctgaggatgagttccacagaggttttgcagggtggagttaccgagaaattgacttcggggtgagtaaaactaagatccggggaaggctgcagccacttttccagggtaaggggcggtgtcatttgcttcctcatgcggcgacgacgaaagtgattataagccacagaacgtggcgccagggttcactagtataaaccatttcaggagacgaagctccgacctcccaggcaccaagatctttaccaacaacccgggatgctcactgcaggagggagcgggtgaggaggacacagggattcgagggcgggacagacagggagaggacacaggttccagagacttctgttttaaggctctcgaggataccctgag

SEQ ID NO: 140969 - DNA, 494 bp, Homo Sapiens
  misc_feature (464)..(464): n is a, c, g, or t
ttttatgggtgaaggaacagactttattgggggaaacttacaagccaaggttggaaagagaaggcatccgatactcctcctaaccacacagaaaggtgtgggccacagccaggatgttcttggagaccctcggatggacatgccagggaaggaggccctcccctccaactctctgccacctctcttctttataggataagagcaagaacaaccttgtcagcaggagaacagtctacaggtatattagatgtcagcagattgcagaaggtgtctgggaaatccagctgcccagtatttggagaatctgagggctcactggaagctgattttggaaggagacccattgagcctgtgggaccctggtttaagtgtatctcttctccctggagaaagaagaaaggccttctgtcctatccaggaccttgtccaggcaacccagcctcgtgccgcctcgtgccgaattncttggcctcgagggccaaattccctatagt

SEQ ID NO: 140970 - DNA, 495 bp, Homo Sapiens
cctgggttaaacttttaattttaaaaacaaaaaagcagaaaccaaaagcctcctaggttggaagtgggcgtgagaggaaatgctagagggaggcgcttcattccccgggctgcctgtgcccccctttctggcccctgcccggggctttgatgttatctagtgcaccgcctccatcggtttctaccttgggctctgcgccgccgagaagatagacagatcttccgcacttcacttgcaggttctgagagaggcaagcaggtagtcgcgggaaaggacccacactccttagccccgcagtgagagaggaacatttgcacgggcttcctgttgctacctggactgaaatgaacaatccacccctctagtgatcctggagacttgcaccgtatggtctttcctgctagacgcacagcgggaggcctcctacattagattcattttccctccacccgtagcacaaacttgtaagatggtggtggagtatgtttcctgagg

SEQ ID NO: 140971 - DNA, 491 bp, Homo Sapiens
  misc_feature (37)..(37): n is a, c, g, or t
  misc_feature (91)..(128): n is a, c, g, or t
ctgggtgtttttatctttttaaaataaatgaggatcntgtactttgttaatctacttttttcactgaatgcttgcattactatcccatttnnnnnnnnnnnnnnnnnnnnnnnnnnnnnnnnnnnnnngtatcacaatcccttactattcaatattttgatcatttatatattttctcttttaaatactatagtgacaaatatccttgtagttacactttagcgcgtatctgtaatatttccttagaacaaattcctaggaacagtttccgggttagaggcatagattgcatatgacctatcctccagcttacctctttacccacttttgccaagcccccactaaagcatatcaacaaatagctcaattactcttctacctgggtaagccttattttatctattttgctttttctgaatctatttctatgagcctttatgtgcagaaatgtatctagccacacactgactgctagatatttggcctagata

SEQ ID NO: 140972 - DNA, 541 bp, Homo Sapiens
ccaacaaagggaaaagagtttctttttacaaacgagcccaaatccttgtagcagatacgtggagtgtattggaaggaaaaggagatggctgcttcaaggacatctccagtatcaccatgtttgctgattatagattacctcaggttcttgctcatcttggagccctgaaatactctgatgacctactgaagaagcttctcaaaggagaaatgctctcatatggagacaggcaagaggtggaaatcagagggtgctcgctttggtgtgttgagctgatccgggattgtcttctggagcttattgaacaaaagggtgaaaaacctaatggagagatcaattccattcttctggattattacttatgggactatgcccatgaccatagggaagatatgaaaggaattccgtttcatcgcatacgttgcatatattattgacctcaagtgtaaactgatccaaagaaaaccccctgcgttttatatcatatcatctgtacagttttcctttgatatttagagaacatgatcgaggttataggaaa

SEQ ID NO: 140973 - DNA, 770 bp, Homo Sapiens
tgggtttaccctcagaaggttatcggtttactgggcctatggcctcgaaccactgccaacggatgggataacacattccaagtgtctagccaaagcttaagacaactcagttagcaggaaagaatacaacaaggaaagtaatgggagtaaagaataccaggtgttatctcacaatattgctcaatttgcatgttgttaagtcatggtttactttttgaattcggtgtctttaattactactgctgtgtatgttttgtatactatttctgatctgcctccatccatttaggttgtcatattggttcatccagaaataatacatgctggttcaatctaaattctggttttaaattatagattctatcctccaagtataataagccatgcagtataaagttgtctatttgtttttattagatggaagtaaatgactcttaaagagattacttataaaatcatctgcctttagtcccagttccaaaatcaacaataaaatacttgggtattcttgagctatttgtcatgcctagacactgctttggactttgacagctccatctagtggaagggaaactacaccagagaaagcacttcacacagagctaaatgggcatagggatgtcctgaaatgcaggaggggactccaggttggatgcacaaaatgtaaccactggccaggcctggtggtgtacacctatagttcgagctacgtgggaggcccccggccgtaatggccgaattcccgggcatatgtccggtaccgtcgactg

SEQ ID NO: 140974 - DNA, 507 bp, Homo Sapiens
ccaggcagagaataaagcagatttttttgttgttgttctggagagcttctaggaacttgaaaaatacatatgccacactcttaagacccggtggttcttaatcagggatgttcattaaaatgctggaaaactgtaaagacttccaggtcccatccaaggagattttgcttctgattgactggctagtggcctggccattggtattttgaaaaatccctccaagtgattcttttacatcccagatagaaaaccctaaattaaaggtgaaaaaaccagacaccaagtggcatttaaataaatgtcaactttaactccacaaagcatctggttgcatgtggacagaaagagaaggaaagagggccctatatttggataacttagaaatgtgctccccctagcaagatatctaccaaaattaaaaccatatttgaggatgctggcactgcgagtaatatataaatgatgcatgtaacgtcatttaatatgatcttatttttaaaaataaaa

SEQ ID NO: 140975 - DNA, 535 bp, Homo Sapiens
ttttagcagcttcaaacaacacgcatttattatctcacagtttctgtgggtcagtagtccggcgtgacatgactaggtcttctgtgtaaggactcgcatggccaaagtcaaggtatctgaagggacaagggaaaaatccacttccaagttcaatctggttgtgagcagaattcagttccttgtggttgtaccatgaggtctctggtccccttcatcttcaaagctggtaatggacatcgagtgtttctcttgcttggaatctggcactctagctggagaaaattatctgcttttaagagttcatgtgattagattgggtgtacccagatgctccatgctaatctccctattaggtccataatcctaattgcatctgtgaagtgctttttgccaggtaacatggcatacttgtaggttccagggattagtgcttgtcctccccctgctattctttagtgggcagggggtcatctgcctaccacggaggtaaggggtcaggaggtatgcatacagcaatgcccaaaaagagactgtc

SEQ ID NO: 140976 - DNA, 573 bp, Homo Sapiens
  misc_feature (61)..(61): n is a, c, g, or t
  misc_feature (70)..(70): n is a, c, g, or t
  misc_feature (78)..(78): n is a, c, g, or t
  misc_feature (102)..(102): n is a, c, g, or t
  misc_feature (141)..(141): n is a, c, g, or t
  misc_feature (147)..(147): n is a, c, g, or t
  misc_feature (171)..(171): n is a, c, g, or t
  misc_feature (182)..(182): n is a, c, g, or t
  misc_feature (196)..(196): n is a, c, g, or t
aagtcatgaaccaatgaaagtgtacattttattttcgccctttttgataaattctttcatnaaaatatantttgacanattttaacagaaaaatttcaaaangttgcgtttcattttcttaagtgcgtgatgacttatttntttganccattttgtcatgcctggtgaatntactttgtagnctgctacaatagtnttgattgataaccaatttaccaattaaaaacaacaacaacgaagagaaaaaacagaccagcagaaagaactattctgtgtgctatttatctgacacttaacacttacttcatcataatgacaaagtatcccttagcaccaaaaaatctacaggaaccccatctttctaagtgacaactagtgcaaaataacattctaggaactaactgtacaaccccatattttcactggccacagctgcctataagctcatttgaaatatttggtcttttttcaattaagacaaatttcaaaaaacaccataaatcatggcaaaagactctatgaggaacaattgcttattgagtacctattatgggcaaggcactgtgtacgaag

SEQ ID NO: 140977 - DNA, 776 bp, Homo Sapiens
ggtgacaagagtgagattccatctcaacacaaaaaacctgtgagcttacaaaatgcaacagactgctaggcacacttaatgtaacgtggaagtatgttcactgaaatgatgaaaatttgaaacacgaccataaacctttgtgataaaccatagtatgccctttacttggtttgctttttgctatttcatgaacaccacagagaaactggacacagtttgtgatgaaacttagaaaaatttctttttccataacataaacatgtcagtttttccctttagatccttcttccactcccgcttcactgtgctgaagagatattgagttcttccagatttttgcttagctgggtggtttccgaactcaacggactctccaggtaggtagttccagcacagggctttcctgtcactggatctatgacttttccaactttgaaaacgatctcagccagttcatgtttcacatgctttgctcgtggaacaggtaaagctctgagaagcacaatatccccaactgtgcactgctgaagggcatcgtgagcaaagtaggttttccgcttattaaaatactttaataaatagggatccagaacaagcctggtcactctcactttagcagtcttttgcatttttgtcccaatcaccttccccacaatccatctggcatggacggatgagcgaactacggacattacgtggctttggtcacctccgccaagactatgcagccacctgccccggggagcgccggtcgcagcgggatggcgtcacacccc

SEQ ID NO: 140978 - DNA, 562 bp, Homo Sapiens
  misc_feature (187)..(187): n is a, c, g, or t
tttaggaacagtaatgaataaatgtttttggcagagtaggagacgttatgggagattaagccaccagcagaacccttggttcagactccgtgattctgaagacaggcaagtttgccgctctggggagccacttttgcccagtgtgcttctggcattgtacacatggcatgtcacacgatcacaggtngtggagatcacctgggggctcgtcccaatgcaggttctgattctgtaggtctgaggggtcttgaggagagcctgccttcctaacgtgctcccagggcatgtcgcttttgtggggtcagcccacctcactgagtagtgaggagagaggaccactctctgttctttcctaagtgaccacgacctctggccagagcattcgccataaagctagaggtagacgttatctgaaacaactggaaaaccgtttctccattttgtagactttttatgcaaatacctttgtggaaaccaaattttattaattcagcctaagtctcggacaaggatatacactcatgcttcgcttaacaaggaggaatgcattctgaggaatatg

SEQ ID NO: 140979 - DNA, 542 bp, Homo Sapiens
ttttttaataatatgaggatttattaaattttccattttattaaatagtcatcatctttgcattgggtccccaagccctggtaaaaatgaaatggtctgtgtgaccattcaaagggaaaatgttaagctatgttctttagttacaaaagtgagtctctccccgtcccacacccctacaccaccatcttgctgcagtttaaaggcctgaagctgaatttaattttcttattacattgaggtctcacagacgccacagccaggcattaaggccttaaaaataaaaagaaagggacaacaaaaaacagaaacaggtataaagagtacaacagacattttccctatgcagacaccattggcaggtatgctttgaaggaagcctggcaaaaagaaagcccagacacatccccaaacattctccccacttttaaaaattcatccattcagagttctagggaaagatgagtcttcgcaatttttgttcccaaataaggaacagagagagcttcaggaaatcaaggcttaaggaaaacctatctcctcag

SEQ ID NO: 140980 - DNA, 2028 bp, Homo Sapiens
  misc_feature (98)..(98): n is a, c, g, or t
  misc_feature (127)..(141): n is a, c, g, or t
  misc_feature (164)..(173): n is a, c, g, or t
  misc_feature (183)..(201): n is a, c, g, or t
  misc_feature (233)..(242): n is a, c, g, or t
  misc_feature (302)..(365): n is a, c, g, or t
  misc_feature (376)..(386): n is a, c, g, or t
  misc_feature (465)..(507): n is a, c, g, or t
  misc_feature (536)..(551): n is a, c, g, or t
  misc_feature (562)..(672): n is a, c, g, or t
  misc_feature (676)..(678): n is a, c, g, or t
  misc_feature (1908)..(1933): n is a, c, g, or t
gtgtggagaggagaggtgtgtgtctctcccaacatctagtgtcggccgcggcgcgagaaaataatatgcgttttatttataaaggaagagttaattcnctccccacacccccgttgttttttttttnnnnnnnnnnnnnnngtgggcccaccgcggggcgcgcnnnnnnnnnnctttaataannnnnnnnnnnnnnnnnnngtggggagccctccgccctcttgtggggagannnnnnnnnnttgtggtggtggagagagaccccccccgcttataaagagcgcccccctcgccagaagaannnnnnnnnnnnnnnnnnnnnnnnnnnnnnnnnnnnnnnnnnnnnnnnnnnnnnnnnnnnnnnncggcggggcgnnnnnnnnnnnattggtggggggggaatccacacacccctttgtttcttttccccccggggttttttcttggggaaaaccactttatggnnnnnnnnnnnnnnnnnnnnnnnnnnnnnnnnnnnnnnnnnnnaacagaaaggtttttgaaaagcttttttnnnnnnnnnnnnnnnnccgccccaggnnnnnnnnnnnnnnnnnnnnnnnnnnnnnnnnnnnnnnnnnnnnnnnnnnnnnnnnnnnnnnnnnnnnnnnnnnnnnnnnnnnnnnnnnnnnnnnnnnnnnnnnnnnnnnntttnnntttcttgacatgattttaataaaaaatacagctgacataacagattacatgaaactatacacaatgacattctctgcatagtaaccaacactgatgtgtgtacttgaatttttaaatggattatttataatcctttaaagtgcaatttattgaaaggtttaagcaaatcaggataaaggatctttctaataaatgactaacattaaagagatgctatattgatatatttagataaatctttcaaaaatcataattgatttctatagatgccaaatttacttctgttgtaacaatgacctgcccccctcaaaccccaaacttaattgctgaggattaagaagatcctctaattggcaagagctttttctgatgttaatatttttgtctgtttcaatacatctaactaaaaagaactatgggtctagagtagttgctttagcagccctgagttctataaccacaatggtattcctgttagaacttaagagaatgttgtgaacgttccccattctatttgaggagaaaacaaagaactcagttgctttctgatttagcaaagtaactatgctttgggctatagtgttaatgtctaagataaaggtagcaaaaattggagttatctaagaatcagaaaatgctttagagaaatgaactgtaaggaatgtttctaggagctgtctgatggggtagaagggattgcaacacaaaggccatttactgctgtgattgaatattgtcattgtttttctgtctatttcctttagttggtgaaaatatttcaatatgctgctgtcccaaaagcctggccattagaggataaacaagactcctttacagggttaataaaggagcaagatcttaagggagcaatgccagcctaactttattctgcttaaagaattatttctctcgaaaagctgcttacatgagcatctgcaaaatagtactgtttgtggctgtactggctcagcaattactttcccaggaagagggtagtttggggggtaggggtgagtaggaataaaaaagaacttttccctccaagtgtaaacaggaagcttcagccgatcttcggagcactgtgatcacaggttttggctttcctcaaagttcctttttggaaattctggatggagctgagcaaggcccctcggctcatgccattcacagcctgagacgagagctgggcaggtgcctcggtgctcgcaggaggcaagggagctgctggtnnnnnnnnnnnnnnnnnnnnnnnnnntaatgcagatatccctgtggaggaaaagggggacaatcagtattccccggccgtaatggccgaattcccgggcatatgtccggtaccgtcgactg

SEQ ID NO: 140981 - DNA, 1045 bp, Homo Sapiens
  misc_feature (854)..(854): n is a, c, g, or t
  misc_feature (942)..(942): n is a, c, g, or t
  misc_feature (956)..(956): n is a, c, g, or t
  misc_feature (967)..(967): n is a, c, g, or t
  misc_feature (975)..(976): n is a, c, g, or t
  misc_feature (985)..(985): n is a, c, g, or t
  misc_feature (1011)..(1011): n is a, c, g, or t
tttgaaggtgatctaaaaatactgtttatttacagtacatccctcttaggggcaagtctctgactggttctggacctgccacagttcacttggccatgtcgatcaggctctgcagtgaggtgggcacccacgtcttctcgccctggacaaagaccactccccggtcgatgtagatcacaatgcggccaaaggtgtagagctgcttcccttcgtgtcgcttcccaatgacgggcatgaagacaatgttgtgctcctcagccttggtctcaatgaggtccttaaagttcatgggcacagagctagcggccacgccaatgcccctctgagccatgttctcagcctcccgcctctcctgcatggcctcgtactggaagtccttcctccgctccgtgtgggtgagataggcaatgttctcccgtgctcctggctgcatgtaggcaccaacgttggaggacaccgcccggttcatgatatcaagtgcctcattaaatttgtccttgacagatggatgtgccagcacttggtctgagaacatcgacttccaacccaggtaccacttggtgatctcctcataatttgggctgttactgagccaagagcacagcacctgaagccacttggggaagaagtgcttttcaagaagtcccaccaggctagagacagagatcatcccttcgcagtcaatcacccaatagaatgcatccatgtgctgctggtgggggtttatgactagctcaccaagacacatccccagcttgggcactatgtttttgacccatgaatgcttcccaggagccaggagtgaagacatccttccagggctggaggatgagcttggcagaggagtcgctggnggtgccacttctgcagggcgctggacagcttactacggatgggggaatagagtggctccagccgtgcctgcataaggggcagcatggntgggatcactcgtngcgattctggnctcgaggnncaatcctanatgagtcgataattcgtatcatgcanactgttcctgtgtgaatgtatcgccacatccaaa

SEQ ID NO: 140982 - DNA, 790 bp, Homo Sapiens
tttataggggtctccatttattggacatttgccatgtttcagaatttgtccaagcactttatttgctttatctcagctcctctcagcaaccctatggggtaggggatatggtatccctgttgtgtagacatggaagctgaggctcagagagtttacatgcaagggcactttagctaccaggctgactccaaaatccatattcataagtgctagactgtttagctactataaatccctgtaaagtagtgtcactagcctgtaggaccaggatcaaaacaaaacaaatggccacttcagaaatcttgccttcatttgttgccacgatggatgcaagtaatttttctttttggcaggtgctgtgctcttggctcagtaacagcccaaattatgaggagatcaccaagtggtacctgggttggaagtcgatgttctcagaccaagtgctggcacatccatctgtcaaggacaaatttaatgaggcacttgatatcatgaaccgggcggtgtcctccaacgttggtaagtgaggattcccattttggatgtcctggccccaagtttcagattttacacatgtaaatgacacagaatcagagttttctggttcctgtaggcagcgtaaaccttaggtcacacttttgcacatagcaacagactctcaccctcctgactggggtacatggtcagctggcacccactgcccaggtctaccatggaaagaggggcatcttcccctcgttctgagaacgccacccaggcctcgctacttaggaccgtatccgtagtttta

SEQ ID NO: 140983 - DNA, 496 bp, Homo Sapiens
tttttcaagcattattcctttatttcgaggtagaaagcaggcagtaaacaagtgctgccacccacaacaccctgggctacctgcggtcccgcgcctggccctgcagcctcggaagggagctgtgggggtcacccagggcccacttcgtgcccccaccctgcccccaccctgccctgctcactcccagccgctgctccccttcctaaagagcagtccctgcttgagagctttgaggagcaacttgtttctaatccacaggatcctgcactaagagccccccccacagctatcgtggggcaccccaacgtattccacccctctgcccctggcacccaaggggcatgggcacggccagaaggcctgtcaggagggccagcagcacccccgaggcttgtccccaaggttgggcggtttggggctggcgggcacgttctccaggacctcacgcagggagaatgtacaaaaggaaatctcatcataggaggtcctggccccg

SEQ ID NO: 140984 - DNA, 531 bp, Homo Sapiens
gggtgttttattatttatttacttgacaggtaacatcgatttagtctttatttctgaacgttccaattgagcagtgtacacagtaacaaatattaagttatatgccataagaaagcattcattagtgcaaatggattttgtaaaaggtctatcaaaaagatttatttgctttaaaatgcattcatttccagaagcattgttaataaaacattacagtttcatccttcgtaataaagtattgaaaatcaattgtggtacagtagcaaacattgcaggtattaagtgcaatgagctcatgatgccgttataaatatgaaacccatgtatgacaataaattaaaaatgaaaaagacaggaccatttaattctgctgtctggctatctccttgcaatgcttcaaattatgttgtgctcattcaacacaaaattatgtgtctcaaattgcatgatgtgtttttgctgatatatccctagagctaaaaaaatagtaccttaccacaaaaatatttttatggcacaaaatttaagttg

SEQ ID NO: 140985 - DNA, 1215 bp, Homo Sapiens
  misc_feature (51)..(51): n is a, c, g, or t
  misc_feature (167)..(179): n is a, c, g, or t
  misc_feature (254)..(277): n is a, c, g, or t
acccatgccccctagcgggagactcaagctgccccctgtgataagtgcctnctcgtctttctggtgtgattcaggactttaggggtcagtaaagaccgaggagcctttatcgtaataagaaacagacataatgccccttcttcacaagccctgtaacaacagctaannnnnnnnnnnnngatctcccctttctcccttgaaattaatccagtctgggcaatagatgcggtctgaccctttggatgtaacttacnnnnnnnnnnnnnnnnnnnnnnnnctacaattaccccaattttccttgggggaggcgttggaggacctgaaatttttacccgaacccaggttctccggcgcttggcaaccaaatggggctacagagaagcatctaagccagttcacagagcgagcgtgtgtggggacttttcactgccacggacccttgatgcatgctccccgcgctccagtggtcccgtgtcagaaggcggagttttcgaaaggaggccgccaaaaataaaaggcaaagagacgggatcggctgcagcggtttcccaaaggaggagggagtgtgcatcggtctggtaacaaacagagaatgttttttaattatttatatcacaaaaatctgtgttttatctaggatattttctgaatattctttgtaaaatgcagatttttttccacaaaacagtaggattctttgttatattcttaaaattgtttgtttaagtaggtaaaaatatacattcagctgaaagcattacactaacatttacattttaagccttaggaggttattcagcccaattcccagcagtagagagaatactaaacttgtgtctcaaggtttcatggttttcccacgttctttggctattaatttaatttcccaggtcacgtagacaatcattgataattgaaacaagtcctgagttgaaataaccttgagttgagcaaaaatatcctcattttggcagaagctgggcttggtagtacagtaaaattttagtgtaatgtgctcttgtaattgaaaggggatagataatctggatgtttctgcaaaggaaaataggtgtgtacttaacagctttggctctactcagtttcttaaaaagataagagcaaaaaaagttaaatgttaatcaaaacatttaagtttcctttaaattgtagtaataaaatatatgaagctcctttttttactttgctctgtgactg

SEQ ID NO: 140986 - DNA, 516 bp, Homo Sapiens
  misc_feature (26)..(26): n is a, c, g, or t
taacaactacatcatttcatttaatncttcacaatagcttgggggaaaaaaggtaatattagctccattttacagatccaaaaaccgagtctcagaaaagcagagtggataagagcccaaatctagtaactaagaattgaaaaggaggaagatgagcatgagcacatgaacgaagagtgtagtagtagagggaaatgaatgaaatctcaaccctaagcttgaagagaagaaaagtgcacgcgcagatgaaacagaagttcaagacaccaaaattcatttactcatatgaaagagaaagacagaactgggctaattttaagaacctgaaggcaaggccagcttatagaatttaagagtactagtcaaagtttccaggccccccaacagcaagcaattttcagttattccactgttatttataattgactcgatggcatagaggtctacaggtatcttttagagaaagtatataattatcacagtcacaattaaaagttggaagtcaattggcaaaaa

SEQ ID NO: 140987 - DNA, 1389 bp, Homo Sapiens
  misc_feature (1359)..(1359): n is a, c, g, or t
  misc_feature (1367)..(1367): n is a, c, g, or t
tgggaggcctccaggtctcgggaaaaggaagaaaaatccctggaagataattaaggaaagacttgatccccataagagaacacccgaggattcaccggtagcacaacgcggcattcgtcgccaccgggattggagtgcagtatgaatgcttccagcagtgagcatgtgtatagtaattaccacgtggttttttatttgtttagtatgttcagggtaacattttgttttgtgtgtaagcactcagatgtgagatttcagctagtggggataattgcaatgacttacattgtcaatcaatatttaatttttttaagttatagatcttagaatctggctcttttgcttttcctctcaacttatggatctttgtattttatttatgaacttagtagtttttatataaaagcaagatcacatttacttgttcattgattcatagttcaattaactcgtaaatttgatagattaaatgtcccacaaacttttaacatcatttaaacacttaattaagaaaattcctttagatatttcaaactacaattacaaatttaatttagccaattcaaacacttcaaacacctaacaagggagacttacaaatatgatgaacaaattatccctaagcacttaagcagcttctgtaaatctaatcagacataaaatttgttgcttagattttgttttaaatatcataaaaagcaagcagaaattatataaagcaaatcaacaattataaaatttcttaccgcaactgtaaacacaacttatacaaaagtatcgatattatggatttatttcttcatcatcttgttggggtaaaagaaatatatgtgcatggacctattcatttctcactccaatcaagatgaacaaaatagtactatcttgcatttaagctaagtatacatggtaggaagcttgggtccacgacatgggtggggtaaatttatgtggttgaatccagaagattgaaccatgggataccattccaagatcctggacccacagaggtcccacgctgggtgggctttccaggcttctgacgagttggcttccatcttgtggtgagattctatcaggcacgtcactggtactttctaaactcttgccgtttgtcagaaaatgggcctcatcagtcttcagaaatctgacccaacagataggcaacttttcctccctgaggaattctgatgcctgggccagcaggagctcagctttccccttctggcctgagtagggggtctatggggctcagtcggaggggaggggtccctgggccccatcatagtctggaaagaggagtggacgcggctctcccgcccggagcttcctcccctcgtgccgcctcgtgccgaattncttggccncgagggccaaattccctatagt

SEQ ID NO: 140988 - DNA, 625 bp, Homo Sapiens
  misc_feature (12)..(12): n is a, c, g, or t
gatgaaggctanattctaaaaaatgaagcatctgctgtttctaaagctatgaattctatacgatcaaggaggaggattattttaacaggaacaccacttcaaaataacctaattgagtatcattgtatggttaattttatcaaggaaaatttacttggatccattaaggagttcaggaatagatttataaatccaattcaaaatggtcagtgtgcagattctaccatggtagatgtcagagtgatgaaaaaacgtgctcacattctctatgagatgttagctggatgtgttcagaggaaagattatacagcattaacaaaattcttgcctccaaaacacgaatatgtgttagctgtgagaatgacttctattcagtgcaagctctatcagtactacttagatcacttaacaggtgtgggcaataatagtgaaggtggaagaggaaaggcaggtgcaaagcttttccaagattttcagatgttaagtagaatatggactcatccttggtgtttgcagctagactacattagcaaagaaaataagggttattttgatgaagacagtatggatgaatttatagcctcagattctgatgaaacctccatgagtttaagctccgatgatt

SEQ ID NO: 140989 - DNA, 650 bp, Homo Sapiens
aaatttacctttggtttatttcttttaaattctcattatctaagcatttttgttactccaattcaggggacacaattcccagattcagagctttctgatataacatcatagtaagcaggcccatctgtcagaaaaggagtgatctgctgaatccgcagctgatttctatgcacgttaaagcagcacagaactaggagacactgactttctgtctcctgcccccacagtgctcagtcatcgtaacaggcctaagacatccaccaagcatttcaaatgtcgtcactggtctgtctcctccaacagaatgaccagaccccactacatacggcacagagtggatggttaagaatgcctcccaacagtggactttccagctgagtgccatgaactggccctactgggagccctggcagcacaaggtccagtatccatactgagcagagaggcacggcagcacctgccctcttttgtctccagaacttcttttccccagcgtgggatcttgagccttccagagaatactgtgctgaggagttcagcttgggcgtggggccagggttgggggtggtcacagcttttatttccatacatatacaaataatggagtgttggagcacctagaaatggagcttaagcctgaaaaccttttg

SEQ ID NO: 140990 - DNA, 441 bp, Homo Sapiens
ttttttaaagccaacaaatatttattgagtacatactatacagtaacactgctgttggccctggagataaaacagtcacaggtcagcccttgctcccatagggcttacactccagtggggacacccacaaagcatgaaaataaaagcagtaaaaataaaacagggcattatgttacagaggggtgggggaaaaggctctactatgttgaaggcagaaaaaggcctcccaaaagagggagcatttaagctgagatgtaaggacaggaaaatgccaaaatagggttacaaaaattgaggtttatacccccataagtgtataattatgatttgtcaatcaaaaatatttatattttaaaaagattggaggcctctaaaaaattgaggttaataataagttcacatttttaactaagagaaaaatgttacatagtaggttaggat

SEQ ID NO: 140991 - DNA, 521 bp, Homo Sapiens
atggtagcacacaaccaggtggcagccgacaatgcagtctccacagcagcagagccccgacggcggccagaaccttcctcctcttcctcctcctcgcccgcggcccccgcgcgcccgcggccgtgccccgcggtcccggccccggcccccggcgacacgcacttccgcacattccgttcgcacgccgattaccggcgcatcacgcgcgccagcgcgctcctggacgcctgcggattctactgggggcccctgagcgtgcacggggcgcacgagcggctgcgcgccgagcccgtgggcaccttcctggtgcgcgacagccgccagcggaactgctttttcgcccttagcgtgaagatggcctcgggacccacgagcatccgcgtgcactttcaggccggccgctttcacctggatggcagccgcgagagcttcgactgcctcttcgagctgctggagcactacgtggcggcgccgcgccgcatgctgggggcaacagctgcgccagcgccgcgtgcggccgc

SEQ ID NO: 140992 - DNA, 487 bp, Homo Sapiens
ttgttagttaaatagtttaatcagagcggttttacagttctaaaattaacaagcagacttgtaataaaagagctccaatgtttgcaaaatgaccttgtttccattctgaatctgactttttaattgtaaaggttagcattacatttaaaaggactcaaaatggaaaaaatggagtgatgtatattatcatccgtgttttgtgatgcaactgatgaaatccctgaatggatattgcttcagctttgatattaaaaaatggcctgacaagaagtccttaatcaacaaaactgatcacaggtggctgaaagaatgagcaaaacccaaaactactgtcaagttcatattgtatcacattgttggtggatgacactggctccagatatacaattaagcccacgacactttattactatgaataattatcatgaaatttctctcacgttgatcaacttgtttctgaaggttttctttgttcatttaaacttgc

SEQ ID NO: 140993 - DNA, 1421 bp, Homo Sapiens
ttttttttgattagaaaatagccagtattgatatcgcgcagagttccggggctgggcagggcccagtagccgccactgcatgcagcctgccctctgccagccgtgcggaggcagacggaggggcacggggctgggcccaggcaccgaggggtgaggcgtgggtgtcctgggttgttggaggagggcaggagcccccacctggaggctaggcactcacacactgagaggcagcatacccggcgctgacgatggacgcgaggagcccagaccaggaggaggaggagcggggtcaaagccgtttactgcccctttgtcgaagaaagatgtatgccctgatcgagagaactttgtgccattgccattcagcaccccacagttaacattccctgaaatataggattttcgtgatgcttggtccctttgcaaaattcctgcaagctgctaatttggattctaaagcccctactttccgtaagagatcccccacgatgtttagtgctgatatcctagcagagggagttagtggactggtaccaaaaccatttggtatagctttcggtgaaggaaaagtgttctccgttcctttgccaacaggggtagctggcaaagaaagtgatgcttggacggcggagtccatcttttcacagtctagagttggagagctaggagccgactttctagttacttcctgttgtctttcccgaactgctagttcttgccttaaatctcttgcttcatcctttaacctctgtacagagaccaacaaagattccttttcatcaagttcactttctaaaaatgcatttcgttcaatggcctggtttagcctttgttcaaagtcttccagtgaaactattgttgcccttttggctcgctccaggtcgtcgttggcctgctccagctctctcacatacttatgcaactgctccttaatggcccgagtctgacttaaatcatcttctaacactgagacctgcttatagctctgtgcatattgatgctctagcttctcctttaatgcctccacttcatatttcagtctttggttatcagcctgcaagtctctatttctttgttcagcctgtactaattgtgcctccaactctgcttctaattctctgcttccttcctggaattcaactagctcatcccgagcttcctggaagctttgcttatacttcaaggaaagttccttccaataagcagtttcctcctttaaacttgaaaaatctggtatatcttcaccatccatgatcaagaaagcctccaatgtgtcaaaagcgcatgttcgccgccgctcaaccgacgtctcccctccgctggcccggccaggcccgcccagccactcggctcagctcccctacgcagccccgagctccactcagcgtacctccgcgcccggatcccgggaattccggacc

SEQ ID NO: 140994 - DNA, 716 bp, Homo Sapiens
  misc_feature (372)..(396): n is a, c, g, or t
ggtgatggggatatatttttaagattgctcaagaaatacagtggaaaataatttttgcattaacaagagtctttctcctcttaggagctaatgctcatggtcaggcctctgattcttcttccatcttacttgaagccgcaagtggaggaaatccagatgctgtggctctcttgctggagtatggagctgatgccaacatccctaagaattcaggccacctgcccatccatgtggcagctgacaggggccacttactgttaagttcaattacattattataaataataaaaacagtaatagctaccttttattttgtgctgcttctaggaactttataatctttaatcactgatcccacaatctaaacatacnnnnnnnnnnnnnnnnnnnnnnnnngagatgctgtctccctctgtcgccaggtgctgggtctgaaccatagaccctggccaagtgacagatgaaagtacttagacataggtatccagtgaaagagtgggctaggggaccaggctgctcaaagaaagagttgtagcagccatggccctgacaagctggtgcttcaggcatttatttagtacaggtttaatgacaaaggctttgagtcagcacatcgtgtgagtaattaacacggttcccccccaacccccgctgccagaacagtcctacatgtggatgattaaaggccagttctgaggcctaagtaaactaactta

SEQ ID NO: 140995 - DNA, 498 bp, Homo Sapiens
cttaagcttttttagtggggtttttgggaaccaattctctctccattcatcttaactcctcaccagaagtgaccagtttcttatgagcagatgaccttaagacccgcagcatggacttcatttggggttggccctttgtcgcctgaggagaggcttatcttctttagtgctttatttaatggaatattcttcacctttgagctgttagtagcaaatggtgagtggcttctcgtcaccagttttcagaattgttatggccctaatatgtacatactccagcccatacacatctgtctgattccaaagaatgactctgactatgcagatagtcatagttctcataatcaactggatatctggaggatcccagtgctgccacacattcatctgcatgtgcattttcccttctgatggtcaggccttctgttagctgctgctgcctgaagtgtacattttaaagggattcctccatcattcctgccaatactgccatattat

SEQ ID NO: 140996 - DNA, 789 bp, Homo Sapiens
cctatacttattttttaccctaatctagttattctagacccgtaacatcatacactttacgtagtagagtgactaagctcagatggaatcaacaaagatgttgagagattgaagtacttaagacatatgtaattgattttccttacaaagcaacacccaatccacggcttgttgtgttgcatcatatatcccacagaaaaaaccttttttgtaatatatttatgatcttcccagtaaaaataactttactaatattcagtgttcactgaaagtttagtatgagtcacagtaagtgttttgcatttaatccccctcccagccctattattaaccacattttacagaggagaaaactaactggcccaaggtcacacaactatgaaacactgcaaccctgatttaaaggcagggcacctggtatgactactgtaacatattgctactttatctgaaaatctccaaaatgtaattattacaactcctggagctgaaaagtaagtactgatgagccatctcagtttcctggcctttggggatattattcaattgagtgtacagaggatcaacaaaatatattaatccagtatggccacaaaaactactgtaaatcactatgtaatggtttttgattcctgttcccagggtaaaataaagtggatctgaaccagatccttaaatgaacaggggagtgtttccggaccaatcatcaactgaaaattagaactcattagtccaatcttggttctcacagggcttccttcatttttcactcaagacaagtcaatttct

SEQ ID NO: 140997 - DNA, 454 bp, Homo Sapiens
tttttaaaggtagcatcttttaatcctcagactgccctgcgtggtccgattgaattgggcagtcagcactaggctcttcaaagggaaacaggcttctttcttaggacggtgcacagtgaaagagtggcacacacgctgttcatccagtgctccaacccccagtcctggtgtcagatacttctacatttggggcatttccccttgagatggctgtggctagcgacacatgatgtgaacacctctcttggattgtggttcggccgcacaaggccccatcagagttctacaggtggagtgtggggcccagaaggggctcaggtcttaggggtgtcatcgtttctttttcaccacctgtatcgctaatcctcttaactggcaggaatggggcaagtcaatttcaacacgcgagtcttaggctaaatctgtttataggagttgcccccagaaagggagt

SEQ ID NO: 140998 - DNA, 358 bp, Homo Sapiens
ttaatccactgccagattttaattcatttccgagtactaggagttagtctgtctggtgagcctgagctatgtgcaggatttttaaaaaatgatttctgtccattgggaagcatgttaaaatgccctccctgagtaccccatctgcagtatggttacccccatcttccatcatcacttttcttggtatttccttcctagttcctatccctattgggagttttttgcactgatagactagtctctcttgcccagttagtgtcctctcctcaccctaagggtcagccccgggcaggccaggccactctgccttggggtgcctgtagcatgtgcccttgatgggtggcccccaggggaccca

SEQ ID NO: 140999 - DNA, 1155 bp, Homo Sapiens
  misc_feature (22)..(22): n is a, c, g, or t
  misc_feature (956)..(967): n is a, c, g, or t
atacgaggtagccggttctacnccatattagatatgctggcagcccttaacaaaggtataattggaggagtcaaagttcatgtgtatcgtctacagacactaatatctggagctgtggtagtacaacttgatttcctacgaatcagtgacacagaagagcttccagaatttaagagttttgaggaactagaacctcccaaacattcaaaagtcaaacggcaaagcagcacccctagtgctcctgaactgggacagcagccggatgtcaacattagtgaatggaaggacaaacccacccacgaaattcttcaaaaactgaatgattgcagttgtctggctagccaagccatcctgctgggtatactgctcaaaagagaaggccccaacttcatcacaaaggaaggtaccgtttctgatcacattgagagagtctatagaagagctggcagccaaaaactttggtttgtattagtgtccttgttgttatgttttatttttgtgttgttatattcgatagcctaaagaaaatggaccaatattaaagatagttattcatcctaatttttacttttaacctccaaggttacagcactttctaagaatgtgcctatgtagcatgtctgtccccccactgcctccaccaaaattctgagaacaaagacactgtagggattgaacctgaagagtattcgctggaatggtatgctaaggtttctttcctgctgtacacctcctctgccccaacaaggtgctttaagttctgttttttaatttaggaaacctgttctgctattatagaaggccatgaaaagagaccagtgatttatctaatcataagcaaaaatagtagaaggctattgtcttgtcacttaagttgaatgaatcccagtgattgtagttgcttcacgaaaaataaccaatttgttctacagaggtagtctgttcccagagattgnnnnnnnnnnnngatgtaggaaagtttaaataaataaaattgtttaaattcacaatggagggccaattcacatggccctctgcattttgatgtaattctaacagttttactagcagaatctaacaaattttgaaagtcagagcgtatgtataaatatatatacacatgcccacatttttttaatgataagttatccaaat

SEQ ID NO: 141000 - DNA, 448 bp, Homo Sapiens
tttagcatttttttgaattttattgaaaattgacatggacattagaaaggtatcaggctaaacagtgctggttctgggatgtttctcctggagaatgaaagccccagaggggcaatgactggtcacacctttgagcaaaaagaacaaaggggaagaaaggaaaaacacacacagattctggaaaacatgcaaagaggctctctcaagagacactgaacagcagaatggtggtgatggtggtaggggatatatgagaatgagcacactcacatggtattttgatgcaagttaaaccaatgaattcaaggcagatttaccaacatcaaagctctccctccagatcccaggttgagcagaaacctctctcaaaaccctaactggtctcggaaggtggaatggagtaattttgccctcactaagcttaaaccccctcccttctctacctaag

SEQ ID NO: 141001 - DNA, 471 bp, Homo Sapiens
  misc_feature (309)..(399): n is a, c, g, or t
acataagttaggaatttccaccatacagactacttggacttaaaacatcggcttccaaagagtagaaagtgatttcacatgtcagttaacacttattgataaagactatgcatgttctaaacagggtagaaactattcctatattcagtggagaagaatcacgcgtgttttttctaagtcctcagagaaaacaaagatgtgttctacatctgagacaacaccgcatagtagttaagcgggcaggctctaagcataaatagactggattttaatctggttcttccacttcttagtagttactgtgcatgnnnnnnnnnnnnnnnnnnnnnnnnnnnnnnnnnnnnnnnnnnnnnnnnnnnnnnnnnnnnnnnnnnnnnnnnnnnnnnnnnnnnnnnnnnnagctgacctacagtaagcactcaaatctgtcatcatttctgccagctaataacccattcttatttttccatc

SEQ ID NO: 141002 - DNA, 1020 bp, Homo Sapiens
  misc_feature (167)..(277): n is a, c, g, or t
  misc_feature (313)..(333): n is a, c, g, or t
aaatcccacgagccccctttttccgaggccccggagttttttctttgggagaacacaacttttgggccccctttttcccttcccccccagggggggtcggcgggggcccaaaagaaaaaggtttataaaaaatttttttaaaggggcgaggggcccccccaaaaaannnnnnnnnnnnnnnnnnnnnnnnnnnnnnnnnnnnnnnnnnnnnnnnnnnnnnnnnnnnnnnnnnnnnnnnnnnnnnnnnnnnnnnnnnnnnnnnnnnnnnnnnnnnnnncccctagtgtacgtgtctttatttctggatgatatnnnnnnnnnnnnnnnnnnnnnaccccaaaccaaacaccaatggatccccaaagcgatgtgactccctcttcccacccggataaatagagacttctgtatgtcagtctaccctcccgcccccataaccccctctgctatagacatactctgggtatatattactctactcggcaatagacatctcccgaaaatagaattcctgccctgacacctgactcttccctggccgcatcagaccacccgccactgtagcacactggtgtccttgccccctgtggtcagggccatgctgtcatcccacaagaaggccacatttgtcacatggctgctgtgtccaccgtacttgtggctgagggctcgaggctgacagcaggggtagctaaacaggtgaactttgccaaagtcatcagctgaagccagcaacttcccatcatgagagcgggccacagcgttgatatcagtgccgtccgccccctcagaccagatcccaaacaccccaaaccctaggacacaagtagctgtggcccattccatgttcctcacagcatccgcactggtgatctgcttacaggtagccgggtcccagtacagaatctcatagtccccggagttggtgacaaagcagctgctgtcctgggcccaatccaggtgggtgataaaactggaatggcccgagcacttgcccaggcggctgaccttgcggccgca

SEQ ID NO: 141003 - DNA, 314 bp, Homo Sapiens
ttttttcttacttgagaatttgggtttttgagtaaacgccattattctctctttttttaagcacacttttgcatctcaaccacctaacacactgcatccctgagcaacccggaggggccggttcctgcacccaggccaacacaacttaaaccccaacacaccagaagaggaataaaggccaaccaacttccgcccacccactacaaacgtcgagagaaattcgtagatgaggccttgtcaaaattcagaggcgtcctacgtctgctttcccaatgagacagttcctttttgtttgtctcagagactggggtttt

SEQ ID NO: 141004 - DNA, 430 bp, Homo Sapiens
  misc_feature (384)..(384): n is a, c, g, or t
  misc_feature (409)..(409): n is a, c, g, or t
tttgttttaaagttttattgtagactttgctgttggatacaaaatgaaggcatacaactgtcacaggcagggcagtaagtacaaagtctaagctgtaaaaaccgtttgaaaatataaactcgtttttggaatacatgtgtcaaaggctgcccatgttaatacctttggtataaaacggtaacgattcccttgacaaacccatccatcacctgacgcacattcacatctcctggtaactactctacctagtctagtctcaaccacccctgtcagtcacgactcactcctgttcctttgcaggtgcagaggagcctgggaggtaggtcactgagaacacccgtcctacataggcgctgcgcccagccgggctccagcaggggccgncacctgtgccccacaagcacacgtncccacccacagtcacacatat

SEQ ID NO: 141005 - DNA, 773 bp, Homo Sapiens
  misc_feature (458)..(458): n is a, c, g, or t
  misc_feature (573)..(573): n is a, c, g, or t
  misc_feature (588)..(588): n is a, c, g, or t
ttttaatggaaaaaggaacagggagaaggcttttttcgaacctgtttgcagagagccgtcttgcccgctttgagggccctttcttgggagacctgtttgctttgttcaacctttgaattcagcagaccccaaatccaccaaggccactagcttgtgagtgaatgtggtcccttcaggtaagggccagacagcccctgccagggcttggggagggttttcctagaggaatcctggcagtaaaaaaaccaacccccaaactctccaagtgctggacgctggagaatcccagcaaggaaaaggaacaaatcttatctcatgccggaagataacctcttccctttgttggcgcctttccttgcgttcaggatgaattaaaattcttatctgctctgcatccagtgaacttggcctcgccttcctgattgtttgctgcggctgactttcccaagctttgcggngttatttttgcctctgggtggtggtcattccttccttccatggcatttggttccacacagtcacagaaaaagagtaatttagcaaacaccctcaaaatggcaggactggccccanaacctactttcattntcctctgttctggttgtggtaatttcttgacactcaccactggcttttgaacatcgcttgtatctctgcgcgcagaaagcagagaccatcaaggcctgggctactcttgtctgacttatgcatttatgccacatagaacactggtactcctggagcccactgtgcgaatcttgcctgagggcaaa

SEQ ID NO: 141006 - DNA, 384 bp, Homo Sapiens
tttgacctataagaaaaaacttttatttgtgaaaacagcattaaagtgattccatatcaactccaaaagtttaccacaatggttcagtttacatgaaacaatgatggaaatatacatagcaagtcttagcagggagaacaaagcttactatgattttcacacacttccatgagcaatatccactgcacaacatgccttcctgcagctattaaccagcagcgtctgacatgatctagtatttgtgaggtgccaactaagagaaatatattgttcagaaacttgaaaagactatttccttgctatagctaatttaaaggcactgctctatggttattcattatattatgagggagtgcggtgaggggggagtcatgacctttttaa

SEQ ID NO: 141007 - DNA, 516 bp, Homo Sapiens
tttaaagcaataactatcttttattttgctcttaaatcttggagttgcctgagcttggctaggcagttctgacttgggagggtctgtctcatagttgtagccagggagtagttgggactgaatttatccttaaagcttcttcagtacatgtctggagcttgggctgcaaagacaaagacagctagggctcttgggcatctcacttgttgtctgatgtctctccagggtagccagggatctcacgcagcagcagaaggctcccaaagcaggtatcctggtaggtgctcaaataaatgtggatgtccctttcagggggccatctcttctttttcaccttctggccactctttatccatttcctgccgatcatgaacataatgaggggcagtgtgcaggtccgagatgaggcccggcatgcttcattcagagaaagcaggggaagccaatgcttttccaccagccagagcccggctgtttcactgggtggagtgagctgtcctcagtgttggagtgagg

SEQ ID NO: 141008 - DNA, 656 bp, Homo Sapiens
agctgtgatggcgcaggggccctcggcatctgggccattagcagagggactggcagttgcacaggccagaaaggagcccacctgtaggaaaaagataagtctgataggccagactcagtttccctagctagaaaatgagggcatgggaccaggagatcatacccacagctactaacattaacctcctgctatgtgtcacactcctttcttgggccttccgggaacccgtcctgagctggccggactcaccattccaacctcagcccctgccactctccccacaccatcctgccatctttcaacctcaccaggctcatgtacgccaagcctgttcctgcctcagggcctttgtacgtgctgttccctctgcagaatgtcctcccgtggtctttgcctgactggctccttgctatcacctcttcagagaagccctccatcatcaccctgcctcaagtagcttaccagccacttgcctttacagtactcagttttattctttgtcactccattccccttccggcataggtgctccattaaatcaggaaccttgttgcttttggtatctggggtgtcccaccgctacccccatgtgagtgcctggcacatatagatacttgatacctgcttgctgaaccaatgaataagtgcaacttggt

SEQ ID NO: 141009 - DNA, 877 bp, Homo Sapiens
ctgatttttgcttaacacatttttttaggaatgcatctatcctattataacagagatacttaatatattatagctttgataagttgttagcatccgtgaagagaacactgtctacatccgaagaatctggccccatttctgaaaaaggaactgatattcttggagcctcagaaacgctgctgcagacaccatgcatagccactgcctcagttcaccctcacgacactatggcaccttgcaagacgatcattagtatcttcactttgtaagaggtctgagctggcccagcaaacctggctcctaaaacaacagcctttacctatagaaatcagcacacaaacaccaccattgataacaaatgtttaaatacgaattggcatcttcatgaggaaatcagcaggaaagccaagcaaggaatctgccttgaccctgagcccccgaatggaggggctcacccctggccaggcctgcccagcaggcgatgctccgggtgcttaatgccaagctggtggaagcgggacacacagagcggccacacacactgcacattcatctcaaaaccctaggcccgaaggtcatgaatggcaatttttagagacctaaaggcctaaccctccactagagaatcatatcctaagtatctggttttacaaatctcctaggacagaaaggaacatctgagaagtggcaagagggacccggagaagctcactgatggccacgggactagaaagaggtgcgtgagcgagctggatgctcgccaggctgccaggtctcctcttcagaagctgcatctggaaaggagtgaaatttcattccatttccattctcaccaagaggttaatttcaggtttcaaacttaattttcttctttttt

SEQ ID NO: 141010 - DNA, 1210 bp, Homo Sapiens
  misc_feature (393)..(403): n is a, c, g, or t
atgttcactacaggggcaagcatctgattttatttcaaatattttgcatccaagtttgcttacatacacagatattaaacctacagatacaaaaagctgagtgtacttacaaattaataactggacacaggcagcataaaattctttttgtacatgccaaaaacattccgtgtccacccagggtgaacacagccacttcacaaacagggtgtaaataaggaggttcactaagtacaggaaagttacaagaccatattggcattttaccagccatccctgagaaagagaatgggaaagggcttaagagtcagaggagaggaaaagaggaaaacagatgacctcctacatcagaagatggagcagtgagaatacagaatagggaagcaatagttnnnnnnnnnnngtagaaaacaggatttgatgtcaatttgctgtgcaaagggtaaaaaggggagttttatttccaggctatctgccatgatcacagctagtttgttactggtgatgtgaaatttggaaaaataaaagaacaatatgatggccagaagtgatacagacttggacacatcatgtttgaaatatctgaggtcccatacgtagggatgtccaattgacaattgggaatacagttccagagttcacaagagagatcaaacctcctggagctccaccaggctcctgtggcaaatacctgagaaaacttgcttcttgcttccacctgaaagtctcaggtttagggtttcttctactatccatggctctgctccttgctctagcttgaagatcatctcaggtttggtaatgcaatgccccaatgataccaggctgctgtaggtctccagcatcacgtccctgtacagggtcctctgagcgtcatccaggtcctgccactcctcccaggtgaagtgcacagctacctcctcaaaggacaccaactccagagatttattcttttcttgtagctcttggaaacagccagagaacactggaaacatagctgcacttcaggccctgcccgcccgcgatgcgcccacgcgtctgctcccacaactggggaacactggtccggccccccgggatcccccgggcccacgggttcctcttcgccctcgcaccgacccgcagggacatagaaccaagccccaggctggcccagctacaagaccgcctcgtgccgaattcgccacccaggcctcgctacctaggaccg

SEQ ID NO: 141011 - DNA, 519 bp, Homo Sapiens
tttacttttttagcaaatgtttatttatatcaaaatacaaaacatttctgaagcagagtaatgttacatgaggagcaattaaatactaaacgtcttttcatcagtttaacttgcaacactcccggggtacctgcactggctgcacatctcatcatttgatgtgtgccttcttttttctcatttgcttatgcacgtgtttgctcattttgatttgtaattcaggatatgaacatgcagtgttactggggatgagttggttagtacttagcaagcctggaaataccagcgagtggagcctggcgtggtagcctgagctgaggcaggctgcaggttctcttcctgactgagtctggggtgtcactccatttttgactgccaagtcaaaggacaaagggatcaccatcatcagcagccagggcaggcgtctattgcttagggccgtagagcaggcgtggctttggggtcatctcgcgggtcttctcagtgtttgggaagaagggcaggcaggtaccgagctga

SEQ ID NO: 141012 - DNA, 401 bp, Homo Sapiens
ttttttgagattctaaatcttttattgttattttggggacagaacaaatgtaaaattctgcaaagaaggcaagagacaatggtccaggagattccattctctacttgcttcatcatgatagtctctaaagagagggaaatgagctggcggcaggattggggtgaagagagcttgttctatttaaggttgggctaagaccatattctagccgtcatgtatgttcctgttcttccagataattaattcccttagtaaagaagtaaagaaatgcatcttttatttttttgaaagtccgtcggcttgatggcatgagagttgtctggtaagttttccccgtgccgtggtgcccacggtttttggtaatgcatggagataatttcggacgtctgcttctcttaact

SEQ ID NO: 141013 - DNA, 1368 bp, Homo Sapiens
  misc_feature (85)..(85): n is a, c, g, or t
  misc_feature (159)..(159): n is a, c, g, or t
  misc_feature (164)..(388): n is a, c, g, or t
  misc_feature (407)..(435): n is a, c, g, or t
  misc_feature (463)..(478): n is a, c, g, or t
  misc_feature (516)..(542): n is a, c, g, or t
  misc_feature (1219)..(1219): n is a, c, g, or t
ttgtttaggcgacttgaaccacaggctttagtctgcttgtgcttgtaattttctggttcctgttgtgtacgttacgcttgatgangtacgtccgcacgagaccggccaggatcatggcgagagcgagagcgccatacgcaacgcttttcccgcgcgtgnccgannnnnnnnnnnnnnnnnnnnnnnnnnnnnnnnnnnnnnnnnnnnnnnnnnnnnnnnnnnnnnnnnnnnnnnnnnnnnnnnnnnnnnnnnnnnnnnnnnnnnnnnnnnnnnnnnnnnnnnnnnnnnnnnnnnnnnnnnnnnnnnnnnnnnnnnnnnnnnnnnnnnnnnnnnnnnnnnnnnnnnnnnnnnnnnnnnnnnnnnnnnnnnnnnnnnnnnnnnnnnnnnnaagaattcggcacgaggcnnnnnnnnnnnnnnnnnnnnnnnnnnnnncaaactgagaaaaagcagttttaatagnnnnnnnnnnnnnnnnttcataggactttaacaagatgtagtataaaatctttnnnnnnnnnnnnnnnnnnnnnnnnnnntctgtatttacttcctaagagctggtggattaactggctgacaggactgcccaggaaaaacaaatgcacagataatgaggtgcgcccgacactgttcatgagtaaggaataaccatggatcatgctaactgctctacgtgccccgccgcctggaccctactgttgcctccttagcgacaaaccaccacagtcatcccctaattctccaactcagtagcttgtttaatgggctacctcttaaaattttcatttttaatttaaaaattactcttggcttaaagacgccacacattattactggccagtccccaccaattatatttgttttgataaaaataaaaatgcaaatactccaactaagcctggatgataacacgccattttgtatcttttacatttgaggagatttttgtgaagctgaaagcaagctactatttgcgcttgaaagcagaaacaaatgcaaccttccaaaggtgacaaggcaccactgccatcaggagatagaaaatgtacaatgctgttactttacggctacatcatgcattttgtgcatggagagcctcttaatgtgataaaactagtagaattatattttcagtaacaagaaaagcagttagaaaaggcaacagttacacacaaagcataaacacttacaagtaccttaatgtgcagcttgncaagaagggtaataagtttgccatacatatccataaaattagacaaggtgatttttggcacagtaatattgccaacacaccaccactcagtgcagccttcgtttgccagtccccaagtggcctgacttctctgtgcatgaacatttctc

SEQ ID NO: 141014 - DNA, 497 bp, Homo Sapiens
tttcatattgggtgataataatgtatttatgttaagatgttttgattaaaacacctaattttgaggaaataatatctaattttttggtttggggattatttttagatcataaggctggagatggagtcctgaagccagaaggaggcatgctttcagaagaattaaaatgggcatccagacctgtaaaactgtgtcgaaaagaattacgtcaaatttccgccttggaactatcattgcgacgttccagtcttggagttggcattggatcaatggctgctgattccatcgaagtatcttttccttttgtcctttcctctgttgctgtggatttgatcatctcacataggacccaaactgtcaccctgtgctcaaagactcaaggcttcctttctctcattgctagcccctagggagtagagtttcttggtctccttgctaaaaaccagttcttttcatttcccacaatgatccaggattccaatagctctaagacagat

SEQ ID NO: 141015 - DNA, 499 bp, Homo Sapiens
tttgagtctccaataaacatttattttgtttttgagatttgtctaaactgctttttaccatggtaagtgaggtgccttctgctgtcagtggtcctggtcacttgcagctgctatttccgtaaagaactgtgtaatgctccacagactacctgcagtcactgatacaaccacaccacatccatgctggatcacaactacaaaggaataactctgtgaaaatgcagaaatcacccgtcttctgtgtcgggcacgctgggagctccagaccagagctgttcctatttggtcatcttggaatggaatagcctgaaagaagtattggtaatgaaagtgcttacttgtcagcatggtggctcttgaagctaaaaaccccaggaaggtgttaccagaagaaagtgactcatttcaattatttacaaatttagcactcatatcattaggttattttttaaatcattaactcttaataaaagcatatgtaacttctgtgtctatgata

SEQ ID NO: 141016 - DNA, 386 bp, Homo Sapiens
  misc_feature (233)..(254): n is a, c, g, or t
tgtgctgcctttgtgtatatgatccactacacatctgagtggtcatctcgcagaagggcatccagactgcaatgtcttctaagctctaagctggctacagactgtggctgagcagtagaagatgcgtagccctctctaaccaacgcggaagaacctgagggtcatctggaaaccttagcagtggaaatgctaggtttggcccttgggcttttggctagcccagggtcaagtgnnnnnnnnnnnnnnnnnnnnnngttattttaaataagatacatagcaattaaaatagagaacaaataatggatgtttcctcaccatttgtttcatttcaaataaatataaacacatttacagcaaaagtatatggacattttctctagtttggc

SEQ ID NO: 141017 - DNA, 531 bp, Homo Sapiens
tttgaaaatgttttaatcctgttaaatttctttattttcctcctatataagccagaccttaacttttcacttcagagcactaactccgtttctgtggaatccttgttttctgaatggtcattcccagctttttacttgaataaactctttaaagctgattccaatcctttcacttatttcaggttgacacagggcatgaggatggcttgtctctgctccccgatgtctgggcctcagctgggaagaattcattggctggggctgaaggcttccctgctggaaacttccccacatctggcacccaggctgggtagactgaaaagctcagctcagtggaggctgttgacagggccaccaagacagggacttcctggggagcctgggcttccacagcatgttctgaccatggatgaaaaccagcacaggcccatccaactccaagagaaggcacatagaccccgcttctccatgaagagagtgccagaggacatgcagccattttaataaaccactgcaagcccctttggtgaa

SEQ ID NO: 141018 - DNA, 482 bp, Homo Sapiens
ttttgtgtgtggttttcttgagaagcaactgtatttaagggactgcttatacaaaatcaagttcttcttagcaaggattgctttaaatattctgacttgaatgaaggccagtcatgttctgccattttcaaaaatcttctaactggagtcttagagttgattttcttttcatttgtgattaattttccagaataacattcccagctcccaccccacccagcgtttatagtccagagattctgagagtaggaagtcttagtaaagcccagaatctaaaacaaataagaccagtcagttctctagttagcttttttcctttcaagttgttagcaatataaactctggaaagcctaaactttaatgcacccatctcagcaacatctcctgctgggataggtgggacacatgtatttccggggccaccccagacctcccggaggatgctgattgacactgtccagtttgagaactactgtgtccag

SEQ ID NO: 141019 - DNA, 549 bp, Homo Sapiens
ttttttactgaaagaacatacagtagtatagcttagcacagcacagaacagaaatgctagaatgaaccacatgcagtaaggcccagtgttatgtagtgaaactttgattttagttttgtgggggtgtgtatttgtgtttgtacagagctgagaaacaaagtctaaaatgtcctaccatcaactatggtcgaaagagcttgctatatctgccctgaggcacacagggccgagggaaggacaggcaaagggggaggaagtcctcagtgtccagacacaccaacccacccactgtgcacaggcagggtagaaaggaagtggggggagggggcaggactccctttgctttggatgtgtcaaggggccaggcatgaggctgcagggaaccacatggcccttagtgaaaccaaatgccgagcttccaggctagcatttcttcctctactgcccaggctagaggatctagatttgatcctactttaaggaagcaaaaagtgtctgtttgtggcggatcctgaagggaaggagaatgtggcctcgtgccgaattctt

SEQ ID NO: 141020 - DNA, 462 bp, Homo Sapiens
aaccgggttgccattatgaagaaattgctgtgctcatcaacttactttgaaccaagctgttctttactgaatgccctgaagtcattggaaagtcacactaccttgctttaaagtgaagaattagaattgtttctctgaagatgagggaggtgcacgaaggatgtcaggtaccacagtggtacgggtttggatcttaaatttctaaagccacgtaggccttgattcaaactccagtgtgaatattcagttgaatgaatctaaacagtttctgaagcagtttaaggctcagtttttacattgatggtaaaagtaacatctctcctgcaggacggctctgtgaatggaaggaaacagctcgatccaggtctctagacgtgacaagcattgactcagtggaaagtcctgctatttttgtggtttttagaccaggcagatctgggcatgactagaggaggtttttcc

SEQ ID NO: 141021 - DNA, 1118 bp, Homo Sapiens
  misc_feature (991)..(1026): n is a, c, g, or t
cttcccggtggaagagatccccccgtaaaaaccccttgggagactcccctttttggaatttttttcccaaacggttgggtttacacccgcggggggtttttttaatgggggggaattccagggcccttagtcatgggccaggggtctcctttgggaaacaggttagggcccattttcccttagcttaggggggcccgggccccccaaggaaatggtcttaaaaaggcttctcgaggggccgagggcggcgaccaggaatatgtttagggagcgtggtgtgtgggaactttcaagttcaatatttcccattatgtttatatgggctttggagttgtaatgctggcatgttttttctgacataatcaaccacttgacccaactggtttgaactacaatactggacctcattatcacatacgtaacaccatacactccagttgtccaaactaagaaccagacagtgaggttcagatcttggcgtcagatagtgcttcaaggcatgctgctcctgagaatttctgccacagccctgatggccacatttaagacacagccaaactgaaggcttttcttctgtttcttcttcagctttatctttcactttattgtcagtcttacagtcttggcagatattccattccacattcactaaagcctttttcaaattaccttgttccaatccttttctaatgtgtctgcacacaggttctaaagtttcagaggaatcatcgattggaacagtttttccctttgtccgtttctttcccatgttggcactttatggattacttactgacacaaaataacaatccacggcgacagagcccataactgcatcccctcatgggcctttgggctgggcagccagctccgtcttcctcctggtgacgaattgagagcgacggagtcgaagccagagtgacccctggaaagcaatccccggaccgtaatggccgaattcccgggcatatgctccggtaccgtcgactgnnnnnnnnnnnnnnnnnnnnnnnnnnnnnnnnnnnngccgcttcctcgctactacttcctgcgctcgtcgttcgactaaagcaggatgcgcccatatgtggtatatacgttggcgcgctgtgagtggt

SEQ ID NO: 141022 - DNA, 483 bp, Homo Sapiens
aactagaaaagaaccaaggagttaggtactttttatacagattccaaatatgccattttagtattccacaattatgccaccatttggaaagaaaggattgttgacagcaaaagatacccctactaaatatgggtcacagatattttaccctaccctaggctatccacctaccacagaaagctgcagttcattgctggggctaccagaaatgccaagatgagattacctagagaaacaggagggtcggccaagcagcaacggccaccaccctttccggggaactccttatggcccttatcccaactttgcctaacaacctgcccaccctgcaatggggtatcaaatgtgaatatactctaggactgaaagattgtataaattgggagaggttctttatttcccccaggttctccagcagaaagcaataagggcactccctaattcttgtttctgtaggagaggccatctccatcagctataacc

SEQ ID NO: 141023 - DNA, 585 bp, Homo Sapiens
  misc_feature (62)..(98): n is a, c, g, or t
cttccttaagtttataaatatttattttttaaaagaagatgctgtgcctgggagaccatacnnnnnnnnnnnnnnnnnnnnnnnnnnnnnnnnnnnnnggggactgcaaaggacagagaacctttccactttggccatactgggttgctaagccggagccatttcagctcctggctcctcaagataacggcgagtccagtgccatcttggagaagctccaggggcagggctgacttttctcctacaggaggaacaatgtggggatctgagggatgggagggagacttccccctagagtggtggtcctgctgggggctcatatccagggacccaaaaggggggctgtgtaggaggttccacattggaggggctctctctctcgcagctgtcagagttggtcctggctgtggcgtccaaacagcttgagggaaaaagatcctgtctaaccacctcatctactactcaagttctttctgaaggagggatttcttcagttaaccatggacagtgaggtttctcaccacagtaacttgagtccaggttgagggggagacagatctgtggtaaatctctgacttgggcagc

SEQ ID NO: 141024 - DNA, 404 bp, Homo Sapiens
aatgctccactatatgagttttgccctacacagctgcgggtctgagcagaagggcccttaagtactgaacatgctaggactatgaccaggaaatcttaactaaccctgaaagtcgttggctaaatgtaatcattggcactgttctattgtggcgcagtagataattagttctcatctgtggttgtattcttatcagagagttatggagggacctgttatcaccaatcattatgttaatagagataatttatgtgcagctcaaatatcagtgcttggctccctaaggtaagcactctcaataggctctattagtttagtccataagatttattttttctaaccacatttcttttccatgtggtatgtggtgaaaacccgagaaacaataaaacccaagaagtctt

SEQ ID NO: 141025 - DNA, 380 bp, Homo Sapiens
tttaatggttgcatcaggggaaggatttattgatccacaccattttcttggattttctatcctccccagggggcagaggtgggttgattgtgtggcgtgtcggcaaaggccaggtccaccctggtatggcttgcttcagtgtccacagccactctgtcagatccacatcgtttctatgattcccaagctgtctactgagtaaaacgctcagcaccgatttagaggccaggctgggtcttaagtattcatccaccttcctcctgatgctccacgcagatgtgctgggacctacttcagagtgtccctgagccatgactgcttgactccacagatggcttcaggaagacagcacagaagagggaccttattcaggcttgaac

SEQ ID NO: 141026 - DNA, 495 bp, Homo Sapiens
tttataagacaattattcatgttattagaggtcaaatcagatgaagatattttagtgtattttttccaagggtatggggtggctgtgttttctaaatggtgtagattgttttttatttcccttaacttcactttctggggatgagtgatgtcgtatggtttgcttctctgccagcactgatagattcttccccagatcttcccactaggtagatatgtaatcattctatttcacatctttgcttcagcacaattccgtgctgacacatcttctctctggagggaagagtgtggcctggtggtagcagcacacattctgagagccaggaatcattgagtgctaatctcaatattaggttcctcagtgacttaggcaagtcacttccttatccctttgttccatataacaagtagtgagatcagggccagtagtaggtgatacgaccatgggagcaagacgtcagagtgatgcaaagtcattagccaaggaatgcag

SEQ ID NO: 141027 - DNA, 398 bp, Homo Sapiens
ttttcctttttacagtctggccacttttcacagggctgctgtggtttgctgggcatctgctctagtccctagtcgccttaggttttccagtacctgagggtatcaccagtgaaggctgcaaaactgcaaagatggcagcctgccccttcctctgggagctctgtcccagaggggtacagacctggttgctggcccaaacaaccaggtggtaggtggtggctggagacactggttgggaggtgtcacccagtcaggaagagtgggatcagggatctgcttaaagaagcagtctagccacacttttataaagcagctgtgctgtgtgggtgtaccacttctgcccctagttagcttgggctctccaaagtctgtaaactacggaagttgctgagacagaa

SEQ ID NO: 141028 - DNA, 744 bp, Homo Sapiens
tttttcataacaattagaattgggtgagctttaacttttgtcaggcactgttttactactttacatgaatgaactcacttattctttacaatagtctcatgaattggaaagccaagaggtcagcatcccaggagatctaaaggagtcagtctaaatagtcagttatatatgtaattcaaggaaaaacaaaatgggccaaaatacctatgaggttacctcatcattcaaaagactaaaaagattatgctgctaaattaaaccctatgtatttagattaaaactagagtccaggctggcattgtactatgtattatatgaggcttataaaagatttaggatgatttacaacttcaaaacagcttatgtaaaaaagtacttgtgaaagaaccagacaacagtaaagaaggtgtctaatacaggagaataatgcaaaccatcactacaaaggatttctaagaaggcaggggactggaagtgtcacagagtcaggatatgagcatggcctttaaaaaagggtggatagggtttctggaatacaacgaagaaagtaggacatgtagaagtgccaaggaacagtttgaaaagaagaaaagtgtgagaagagggtatagtagggacaaaacaggcctgcccgcatgtattatctttgagaagagaaaggaagtaaataagtagatcaaactatgaaagacctttaggttaaagaagtttacatttggggcagaggtcactgggaaacgacta

SEQ ID NO: 141029 - DNA, 1140 bp, Homo Sapiens
  misc_feature (107)..(107): n is a, c, g, or t
gggatccaggccaggcctgggtagagggagaagcccccacccagtccccactcctagcaatagccagcaaactgtccatccatctgaaggcgggaacaaatggcagngtaggtcggaagaatcaggctggccactgccccccagccctctgtccaacacaggagggaatcgaggtagcaaacggctgaaatgctctgactaggggttaaaagggaagtgagggaaaggaagttcctacttgtatacagtgcccacagcctaggggctggaagaaagcataccttgcttgtaaagtgctgtagcctctagcagggctaggccccaggcaaacttggaagaaagcagaccaggcaaggaaccaggtaacgggcattcctgactggtatatgccctgctgtgctgcttgcaggggtggcttgggagagtggggtgctaactctgccattagccttcaccacccaccaaccacctcttgtccacacacaaaccaacacccaaccaatactgtgggaccgacccgctcacagctgaaggttatgggccaacagagtttattcagggttgtggccccagcctgggctcctcaatggaagccacaccttgattgagcctgggagtttcttgccggggcagggggtgcttctgtctgccacctcccagggtcacacctcatagaggatcacagggaaatccacgtggatgcgggggtgatccagcttcacgatgccctgaggaatcagattcttatgcactcgcctcagcttggcccgcttctgcccgttcttggtgacgattgtctcctcatagaactcgtgagccagatccccatcctcatcatagaacatagagccgcggcgcgtgaatacgaaggggggcacagctcggccccgaggccgcaccaaagcttgctcagctcctgctgcctctgagccgccgcctccggccgccgaggcgaagggccacaggccccgagctttggacccgctggcgcccatgtcagggccgccggcgcatggcgggccccgtggccgctctgctcacaccgcagtccgcactaccataacctgccccagccgctgatcgcaggtgccgccgccgccgccttccgcaggctatcccgggaattccggaccggtccac

SEQ ID NO: 141030 - DNA, 414 bp, Homo Sapiens
tgagccactgtgctgggcccgaggccctgacttcttgctgtaactttccatgcattttttttaaaaggagcagtgtggattttcgcaccctttgtgaactaagttcaatgcgctctatccaaatttgcctaattgaactataagaaagtaataattccattttctatcccctcagggactgaacaaatggaaataactcccaggcagtatcaggtggtcactacagagacttccacaaaaacttttgaatgatgtgaaacacgatgtcatgaataagggttgagccaactatagctctgtgttcctactgggctttccctaatgtggttgggagttatgccctagactaactgtattgtcctagtcacagctccttgctttgatttcctccttgataaaatgaagatgaaactt

SEQ ID NO: 141031 - DNA, 954 bp, Homo Sapiens
ggaaaggacagcggagagcagggcagagcctgagcaggcaggtcacctccaggtgggcgggagctaccactcagcaccatgagcaccgccacagtcccagaagctgccccaaagccaagcgccaagtctatctatgagcagaggaagcgttactccacagttgttatggctgatgtatcccagtacccagtcaatcacctggtgacgttctgcctgggtgaggacgatggcgtgcataccgtggaggatgcctccaggaagttggccgtcatggatagccagggccgagtctgggcacaggagatgctgctgcgagtgtctcccgaccatgtcacgctgctcgacccggcctccaaggaggagctggagtcgtacccactgggcgccatcgtgcgctgtgacgcggtgatgccacccggcaggagccgctcgttgctgctgctcgtgtgccaggaacccgagcgcgcgcagcccgacgtgcacttcttccagggcctgcgcctcggggcggagctgatccgagaggacatccagggggctctgcacaattaccgctcgggccgcggggagcgcagggcggcggcgctcagggccacgcaggaggagttgcagcgcgaccgctcgcccgccgctgagaccccgcccctgcagcgccgcccgtcagtccgcgcagtgatcagcaccgtagagcggggcgcgggccgcggacgaccccaggcgaagcccattcccgaggcagaggaggcgcagaggcctgagccggtggggacctcgagcaacgctgactcggcctccccggacctgggtccccggggtcctgacctggcggttctgcaggcggagcgggaagtggacatcctgaaccacgtgttcgacgacgtagagagctttgtatcgaggctgcagaagtcggcggaggcggccagggtgctggagcaccgggaacgcggccgc

SEQ ID NO: 141032 - DNA, 577 bp, Homo Sapiens
tttttgcaaagaatcatttattaaaaccaaactactatttgaataaagcattaagatttgctgcatagaatgccccttgggcagcactctgaaataatagtgaattgctattccaattcacaatggaacattttaataagtgtgataaatgactcacagagagctgtagatttcaatgtcagtggaattagaatcaggcaaacgctggccctggatgatggatgtacaggatctttgtggtaaacactttgcaatgtcaggacaataccagcttatgaaactctcagaggtgaaattcatgtccatttgtcaacttgttgcctgattctctcccttctcccacgttccagcctctgataggccccatatgcgttgttcccatctttgtattcgtgagttctcatcatttagttcccacttataagtgagaacgtgcagtatttggttttctgtttcttacattttatttttaaaaaaactgccaaaatacttcccaaagtgtcactgttatttcacattcctttaagtatcagtgtgtacagctataaaaatgacagctgggattttgacagatatg

SEQ ID NO: 141033 - DNA, 320 bp, Homo Sapiens
cctagcgagaaggaaacacagtttattacatgtttctcattgtccataaaaagaaaacataccagctataaaggggccatgaaggtgttcccgccattgagatcttattcccagagagattggaaacataatcaccaaagtcagatgaaaatatgccttcaatctgcagctctggagagtcattccattccacagtctctctaaaactctccagcttgggtttcgcagtttgacccttctcttgaacttcatctttcagtcacactgaactttcaggctctcctaatggctatgtgttctcatcctctgggcattcacct

SEQ ID NO: 141034 - DNA, 334 bp, Homo Sapiens
cctagcgagaaggaaacacagtttattacatgtttctcattgtccataagaagaaaacataccagctataaaggggccatgaaggtgttcccgccattgagatcaaagtcagatgaaaatatgccttcaatctgcagctctggagagtcattccattccacagtctctctaaaactctccagcttgtgttttgcagtttgtcccttctcttgaacttcatctttcagtcacactgaactttcaggctctcctaatggctatgtgttctcatcctctgggcatttacctctgctgttccaggaaatggtcttcaacatcttcagatacctagaag

SEQ ID NO: 141035 - DNA, 563 bp, Homo Sapiens
ttttttgacttagtagcccttctttttattgaaaatacctgcaaaaacgtcacttaggaagctcagaagagttgaaaggacttttagcaaatttcacatacaagcaagatagaatcactgtgagtatggggaggtggagagttgatctgacacgcaagaagctcctcaaaggcacagatactggcagagagggtggggaggactacaaacagctacatgtgtacactcacatggcttgaagaagggtaaagaagccatgtcctgggctagatgactgtttctgctgtcacctgtgtctccttttgtactgagctcggttctcctcccaaactctccagattgtccaggtacaggctcccgtggtcctcctccatactctgggaagtggacaacaagtgccagcaagggcaaaccatttcttgaatgaggcagatggtaccagccactatgaacagaaagatgccgaagcccagcacgtagtaaggccacagcacggagaactgcagggggccgagcttcatcctcagagccttgatctccagggcatgcagcaccaaagccag

SEQ ID NO: 141036 - DNA, 559 bp, Homo Sapiens
  misc_feature (474)..(498): n is a, c, g, or t
tttttttacgatttgtactgactttattccccttgatcgtctcactcgcatgcctgctgtgccccatgctctggggctgtggggtgcctgtacacgagcagttgtcaatggtctcaacacacacctgggcatggccattctgccactaccaagccctctgtgaagggcaccgtggagactatggcagcatgagccagggttgaaggctcccagaactgtggccacagggcttgagttcatcactctagccacccatcgccagctggcctgagaccagagagccccaaggagccggggagggggcagacccagactccaggcctgagttctagccaaacaggctgagaagtccagatggacggtgggacccccacagatctccttgggaggggatgatcctgcgtcccccttcccccagccgtggaaagtgagtatggtgccctagtcgcctcattctgacatctgggggcacannnnnnnnnnnnnnnnnnnnnnnnnaaataaaaagatgtaaaagctagtaaaacaggaacccctatccatactggaactgctgagg

SEQ ID NO: 141037 - DNA, 1116 bp, Homo Sapiens
  misc_feature (1004)..(1038): n is a, c, g, or t
tgggtttaaaaataaaagttcggaccaatgaggtgggaaagactgcgcaggctggttcttttacctaggatctcagtaataccagattccagattccctctcggcctctaaggctctgaatccaggttagaggtctgaacccctccccccgtccccaaatggggggcatttagttttttgtttcataaatactgtccaggcaactcaaagaagacaccaaggttatactatttgacaacagctatatgaaaaatgactttggattctgtttcctttcctgctcagttttttgctgctccagtgtatgaattgagatttattttttaaggccctcctacatttatcctgtgttgctcagaacgccgacgtttcccaactgatatctgtcctatactttccaaagaaggtatgatcttctgggatcagatgaattgcttaagtggttacagtttttttgcaagggtgttctaactgatgacagtggggtaaagtgggatttctattgtcttctttggttacaatttgaatctggcttcttactatgtcattttagaatctgctttggatactatttacaacgtgcttattctgattcttagcaaataggaaaataggtgtggtgtttggcttttcaggaagaatactgctttgaggaactgcagagtacaggtattttcatgcaatgtgctctggggtctgtatttctaggtagaatgacttattttgaacttaaggcttcatatttgctgccctcttttctgaagctatgaaaaaactccttaacattacacaattgaaatactttcagacatttgctgccaagaggagtgtgaagaaaacaaccaaaggtattggcaatagaacagtggaatggaagaactgagtatgtccaggagtttaagataaagctattattgctagtgtttacacatttctttagtgggtagaggaggcccggccgtaatggccgaattcccgggcatatgtccggtaccgtcgactgnnnnnnnnnnnnnnnnnnnnnnnnnnnnnnnnnnncgccgcttcctcgctcacatgactcctgcgctcgtcgttcggctaatgaacgctagcccctatagtgatctatcattt

SEQ ID NO: 141038 - DNA, 473 bp, Homo Sapiens
gtttttttcttgtaacaaggcatttatttgggatgaggaaaggaaattgagcagaaggtacaggagtaatagcaattccctgtagctctcaaagcaaattttgagctcatttttctttttctgcaagctcagcagcagaatgcccagagtcttccctggtagatgcaggttccatagcgacgttctcctgcaatgcacgctggtattctgcaatagcaggccatgtttttccttgagcctggatgctttggagccaagctttcgtcccatgcaagggaaacaaccacttctgggatgtccgctgcaatctgctccggggctgcagcaacctcatcagctcttgcctggagtggctcagcctgggcctgcagggccaccaggagaatggcagcaaggatggcgagggtcctcatggctggggtcacagatcctctagctaggcagggtgaccagagagggcagacagcagcctc

SEQ ID NO: 141039 - DNA, 517 bp, Homo Sapiens
caaaaaagcagtttatccaatgtgggtttgcagaatggaaaatccaaattgtttgtgatattttgaattgtgtgatgaaaaagcccaaggaattaagcagtcttcagaagattcccatcccaacaaagaaagaaaatcagttctggtaagtcagaaccctcctttgggcaatgagaaaatatctgcagaggctgttggcgttgatatcagtggcaggtttatgacctcaggaaagaagaaagctgtggtgattcgtcacttgtataatgaagataatgttgacatttctgaggatacattaagtccaataacagatgttaatgaagcagttgatgtgtctgacttaaatgctactgaaataaagatgcctgaagtaaaggttcctgaaatcaaggctgagcaacaggatgtaaatgttaatcctgagattcctgccctacaaactatgcttgctgaatgccaagaaaatcttaagcatctgggttcgattagagagaatggttagaccgtttggaac

SEQ ID NO: 141040 - DNA, 705 bp, Homo Sapiens
ggagaaccgtggcgagcggcgaggagtgtttggtgactgaagtacaggtcgtgcagaaaacttgagactggggttcagtggcttgtgggggtctgcctcaatctccctggccgggccaggcgcctgcacagactggctgctggacctgcgcacgcagcccaggaatggacattcctaacgggtggtgggcatgggagatgcctgtgtgatttcgtccgaagctgccaggaagaagaacagaacttgagttctccctcactgactcttttctttttggagtgttcccaccttaccccttggcagtcctggttgccccagctctgtcctcttgttctcctggccaaaaagatggtaggctttctgtctgaatgttgttgttgccacacaccaccatgcctgtggctcacaggtgatgtgagtgtgcacctggaaaattgagaagaacctacaggtctattattagaatgaatacagagcttagcagggtgactaggcacaagccaatatacagaaatcagttgtatttctattcactagcaacaaaggattataaaatgggaaatgtttaaagatgccatttaagaagcaccataaaagattacatacctgagaataaatctaagggaagatgtgcatcacctgtgtacagaaaatttataagcattaccaagaggaattaaaggcctcattcaatcaaactctgca

SEQ ID NO: 141041 - DNA, 438 bp, Homo Sapiens
gtgtgagatatagtgcccagtcaggtgacagggtttcaagatccttcttaagcccatcaactagctcatcttgtctgctagaatttgttattatgcaccattcaaaacttccttaagctcttttgtacatgcaccctgtttttcttaccaagaaggaaaactagttcctcaacactctcttccatttctccccttcccagaagctgaccaaagcctaaattcttgagagcattttaaattctctttacctgtaagctgccctcagaaactgccactgtatgctgaagcagtggataaggaaaagctgaagcagtggatgaggaacctgtgaactaaagtccccaacttttaaatcccatcctcctggtctagaggaggcatgtccaggtcacaagaccagagcaggacagcactgggacatggactctgcatggttct

SEQ ID NO: 141042 - DNA, 544 bp, Homo Sapiens
caatgtctgttcattgttaagcagtaccatcacactacttgaaatatggactaaaacacactacttgaaatatggactaaaacgaattttagtttctctgaaattctttcctgtaaggcactaggctgtaatgcaaagagcatctcacacctttaagagcaaaaatatcaaatgtcaacagccactactgtggggtaagaagaaaacctcacctttaatcatccttaaacttcacctttaagcatgctgagggctaatgaatgcgcgaaagacgttagtaaagtcaccttctgctctattcacccactcacaaattctccctccttatgtaacttcctgtcttcactgggaattgtgtactgatgcagctcacctccagctgtggtgatgaagtaacgtttaaaagtcagatttggtttgcatgccatccctgcacttaatgactgagctgtcttatgcaagttactttagtatctcaaagtctcattttccccatctgcataatgggtttattaaagattaaaggatcatgtgtaaactaaaa

SEQ ID NO: 141043 - DNA, 549 bp, Homo Sapiens
tgaagttgacttaactttattcgcatgatagttgtaagggctgacaaagacttcctctaacattccttctggcaggttgaattagagtttggttgcagaccgtgtgggttgaagggatgtgtggtgagacagatcaggggcttgtaacaatcctacatcatcatgaatccagtttaattttaactttgtggcttgtctaacacattttcagttaagagttggggaataaatctaccgttccctggcaaacacttggcagcccttgggagcagcatctttggagaacacataatcaatcctagcactacagcatagcagatattgtgagtgcaggtcacaggtgccctcggatggagaatggcatcctgtgacaatgacagcagtggggtctcagggcatagagcaggcagctccggagcatctcagtcaatcccaggaccatggcatggcctctcagtactgataggacctcacaaggagccacataagaataaccgtaatcaagacaatagtgaagttgagaaacagctcccgggtgtttatccccat

SEQ ID NO: 141044 - DNA, 375 bp, Homo Sapiens
aacagtttgatctggcttcagaaaaggaggccacatattaacttttttattttactcaaacaggagagtggtttgttttgctggtaatttagtaaggtgggaagtcttaaataagaaggggaaagggaacgcttacttcacttaaagaacttaatctccgtgtcaacacagtcatagaaaaggtcccccacttccgcagggtccagtggctcggagctggtcaggatttcttccatggcttccaggccttgcttctccagctccagcatggtgctcctcagcttgcgaccttgctcctgaggaaggacacgactgctttaggtgtcagcaaaatagcaggggacattgcagcggacactgaaaccctctaggggg

SEQ ID NO: 141045 - DNA, 865 bp, Homo Sapiens
aactttctcattttactcaaacaggaaagtggtttgttttgctggtaatttagtaaggggggaagtcttaaataaaaaggggaaagggaacccttacttcacttaaagaacttaatctccgtgtcaacacagtcataaaaaaggtcccccacttccgcagggtccagtggctcggagctggtcaggatttcttccatggcttccaggccttgcttctccagctccagcatggtgctcctcagcttgcgaccttgctcctggtcactttcgatgatggcacgtgcccactcgtgggctttgtacagctcatgccggcggtctggtttctcctggaaccgaggctcctttttggcagggtcgtcatccccaaaacagggagactgtgttttggggacaagttttacgtcatcaacaaagatgaaaggcttgaatatggacctggaaggatcaggggttccagtgaagtagtgaatgcacggagagcttctattctgcggcaggacagacactccactggctgtggtgaggaaaaactcagagtctatgcacactccgctggctttgtcccgtaaggtgttcatcatagtctgcactgtgatgctttcttcttgtttttctaagctgtctttgccagcaccgcagtctagatgatcctcaactggagaaaagacttcggaaaaattgaactcgccctctcccgtccaccaaccttggctctgagcgtaactcctgagttccggatgctctgcatccatcttagtggtgagcgaaagctgactgcaaatgcacctcactccctctgtgactttctcggcagcccagtacttccctatgtctcgcgtaagtgtctccggaccgagctcgc

SEQ ID NO: 141046 - DNA, 524 bp, Homo Sapiens
tttagctttgaaaaaaactttaacatgaaaaaatgcggtgacattgtttttaatgtaacataggctagaatttacctatgtttgcacatgctgagaattgtcccaccaggctgacgtgttcacctcttcagcttggatcctgttgtggatttttttacaaacatcaattgccttcaagccatcctttctgctgtatgttttgcagccttcttacaggactgtggtgtggatgaattgcgatgatgtgtatgaatccagctcagggtcttctttccttccttctttcttccctgccactgaatttccaccaagctatacttctcaggtctgactcctgagaggctaggcacacagtgaagcttgatgcttgctagaaactgaggggctaggcttgagtgttagggaacctgggaatgacatctgtcatccatccgggaaggccgaggaggaaagcgaggcagggcagcagagtgggaagtggtaaccatggaggccacctttgggctggagcctgctcaaggcac

SEQ ID NO: 141047 - DNA, 574 bp, Homo Sapiens
  misc_feature (319)..(327): n is a, c, g, or t
ttttttagtttaagatagaaatctatgcactttaatgattgccagaattgcccagcatagcttcagtaaaatagagaattgtctagaaaatacaatctccaaaatgtgtgcaagtactgcaaaccggacagaccggggcagggcaaggcccttgaaaccaagtcctccttgagcacctttcccaggttagaaacccctcttcagcctgtgcttcgcacgtttccttcagcgtgccgccattcagactgcgccacttacgtcccagtgccacgctgcgtggatcaagtgtcaacgggaaagtatgagttaggcaagcgcnnnnnnnnnaagctgtaaacgcttcacatgactggccccgtaagaaattgtgggagcttagatgagcctggagcttttcaggaactggatgaggactctgtacacaaatgtgtactggcagagagtctgcaccagcatcattctctgttgcctcagcatgtccagcactcttgggatgtccagcacctcattgatgttccaggcaggcgatcatgatctccgacaaaatcaacacgccagtgctttctaccccagc

SEQ ID NO: 141048 - DNA, 1316 bp, Homo Sapiens
ttttctctgcttgtctcagccattttacttgagacataaaaaaagttttaagagtagttgttttgctttttcgatttaaacattcatgagaacggatgggacggtagtgctgtggtgtggacttgtgtctgagtggccatgccggtcggggtccttcagaccacatactggtacgggtctgccttcccttggtctggcgtggcaaaggggctggcccagcctagagagaaggggtggccaaaaacggctttcatgttcatccattttgtttttttagcccatcttctctcttcctttttcaattgttctattcccgtctcatctgtgcagatggagtgcacctgggtcccaaacatcactgatgtgaaaatgaggaagagcaggccctcaaagcacagcaggataaggagaatcactgtggtgggtggagagaaggagctgcactttgtccaatcttcttcaaagcaatgcaggaagtggaatcccaccatgatgagggcgtgcaaggaaatgagagctatgtacattgtaaacaggacgaagtacttctggttgttctcgcctacacagttgttgacccagggacagtggtggtccatcttccgaatgcaccgcttacaaacactgcagtggtgggctcggtcgggcttgatgctgcagcatttggggcacttgtacaccacctgcccaggcttcaactgtaaactctcgatgaattctttagtggcatttcctttgggcactgccccggggtccgtcagcatggcccggcagtgggaggccagggccaagaaggccagcaggttgaacacaattccgttgatgatgctatacacgtagtctcgagatggaatcagcatgacaaagaggaccacgaactccgcatagaggaccagaaaccaggtaacgatggcacaggcgatgccacagccgtcacggataaaccacatggttcccacaggaccagggtaggggggtgggacacacttctctggctggaggtattctggtttccgctcaatgtttcggaagtggtgggtggggataagcatcataagctattctgtccatactggcatcgtgaagccggaggcagttccccagtcccagaccccggtggggctcccgccgccgccgccgctgccttcccctgcagtccccaacccgggacccggcctcgggcttcggcgatggctcctcggaacgaggcgccgcggctctctggactcggccagacaccgggcggcgcgcaggagaagcccatcgagctctcccggcagcctcgtgccgaattcggcgcgccgtcgacttcatac

SEQ ID NO: 141049 - DNA, 683 bp, Homo Sapiens
tttaatttcttccacttttatttcttaacatatgattttgttttgtgaaacatgaaagatgagtcttatatttaggaaccatttggttgggaagctgggagagtaaaatttaattgattttttttcttctgcagctcttgaagaaatagcatgtgaatccagattaggtggcatcatgtatatttttgtaaaaggaatttttacttgcttaggctgaattcatccttataagcctccctcagccatccttaattcctccctttctctcactcctgaagtcaaggattactatgttttattcctttttctgctgcaatatcccggactcttctctgtccatcactatagccacatcagctaataagctcctcttcctgtgtccttcttccctctctactcatcctctatagtgccatcaaagtcagagtattaataaacaaatcctgacatgtcagtgtgcttactccccacattttgaacggattaagttcaaatgcctcacaggatggcatttgaggtgctgatcctaatttatctttctaaccttgtttcttgcctctttcttccattcctcacatgcaaacactgaactccagtaacaccactttgtcttctcaacatactctgcactattgtgtcttcatgccccttggtacatgctatttcctctgcccagatattct

SEQ ID NO: 141050 - DNA, 873 bp, Homo Sapiens
  misc_feature (860)..(860): n is a, c, g, or t
ttttgtttggacggattgacatggagaaatttaattttgataggttctagtacacagaagttaagcttcctaacagccatgagtttacagcttcctctttctgaatttggcagtgtttttgatgtccaaattgccacgatgtctacacatatttacaatagtttatattattcattttgtattactaattgtgcactttggccaacagtgtttcatacatcatggttggtttccaacctcgcttgaaaattggaagtgacagccctttatggaatgttgcttttgacactcttccatttaaggctctgtgtccccacagtgttacgaagacaaatagtcatcactcttccattttgagggggccagggtaagcagatgcaatttgagaatacaaagtaccttggaaacagaatcatctttcaatcagttttagtgtgaatttcatttacattagaatagtctgttcatgcactcataagatttcagggagggacaattgtcacctttgaagaatcaaagtgaccaatgggcttccctcagtattttgtttatttgtttctggaacttagtcatgccattgtagatcgtttcttttggaatcactgggtgatgagaaaccccaggctggagagctggacaccgtggagtccctgtttactgctgcgatgtgtggggcctgtatccgccactgggcactccacctcttcaagtggggtcctgtgcattccttttggaggcttcaaaagactttcctctctgactcccggcgtcttcacctggacactgtaggaccccagatctgtgtgtttcccaagtgtctatagcgccaggtgccccattgtgacagggaagatgaccanaataagtgattag

SEQ ID NO: 141051 - DNA, 162 bp, Homo Sapiens
tttctgcaaacttttatttattgtgcacctgtgatgggccagggggttttttgggtgccaaggatacaacagggaaaaacatttcctcttttcttggagcttgcattcttgtgggagagacaaatgaataattaatgccaaggagtgggaaatatgagtaag

SEQ ID NO: 141052 - DNA, 426 bp, Homo Sapiens
agaggcggggatgaagaatgttgctccgtcccttgttcctggcttaaggtgattgggaagcagtcagacatttctgagcaggggctgggaatgccaggcaatactacacaatgaagaattgtccagcagctcagtctacgttctaatgccccagccggcattgagtttgatgaaaacccagtttgtaattatttcagccaggagctgaactccatttttccccccttactccaaatctacatggaattttagccataccattggtggtaggccatggacatagcctgtctgtcagcctaaattggagctgacatattcgtggaggatgtgggcatctcctgtttactgctagtaatccattcctcttttaaaaggcgtaactcatacacagtaaggtgcacaaattttaagtgtacagcttgacag

SEQ ID NO: 141053 - DNA, 1167 bp, Homo Sapiens
  misc_feature (421)..(421): n is a, c, g, or t
cacctctggggcctctctttattgagggcactgggcccaggtcttccttcagggcccacagcgcccataaaacccaagggagaatagaagagaccccctgatacacgcacactcgaggggcgcctcccatcccctcccacaacacacaggacagaagcccctctgggccggcaggggaaggcccagcctcaatccttcttgctcccgtgccgctgactgtgaaacttgtggtgcacaaccctcagggtggtgaagaaattgccgaggaaaaggaggaggaagggaaagccgcacataagcacctgccactccttgcactgagggtcctgggccaggttgaacaacgtcagcgcgttaaaaagctgccagaagtgtccaaagaaaagaaaaggcagcaggaaggtgaggccccgcccacatnccaggactggaagccctccacagtgaggtccatggtgtgccgctcgcccagcgcccgcaggcggtagaggcagccgctctggtagtagtactggagaaactgcacgaagctctggtacatggaaaaggagaggaattggttccggaatttctggtacatgagaccgtcgggccacgtcagcatgactcccgacaggaaggtggacacgtagtgatggaacacccaccagcctttgatccgggagccgttgttgatgaggatgctctcccggatggtcagggtgcagtagtaccagaccagcaggaagttgaaggcagcatctgtcaccctggagttgagcaggaagcggcaagtgaaggagatgaggatgaggatgatggtgaggtagagcttgaacttctcatactcgtccttgtaggcaaacttagcctgcttgctcaggagtgtgacgttgacgttccccagaaccaggctcaggtacaatccattcttcttaggcaaataggcctccatgtcaaagaagaggccttggcgctctttcatctggttctccagctcctgtgcggccccctcggcctctgctgggagggagggtttgcatttcttcagggcgagggccagctcctggagccgcttcttctgccgcgtgatggagctggtgcaattgttctgaagtttggtcagctcctccagcttcaggcggtagagccgatgggtctccttcccggaattccggaccggtccag

SEQ ID NO: 141054 - DNA, 925 bp, Homo Sapiens
  misc_feature (566)..(574): n is a, c, g, or t
ttttttttcattaagaaaatatctttatttattctgaaatgttccaataatcaatgtaaaaactgtggtagtggctctttcacaactttacaaattatagaaaaatgatttttcctcttctttacagaaatgtcactcccaaatcgtaccgggccctattatggctaaaacccagcaggaagaagggagcagagaatacagcaagcagggctccggctctctgggtggccagaaggcttttcctacacattaaagcccaggctgagtctcaaagacctgtgacccctctgaaggaggctccatccacatggatctgtggcacactggggcaggcctctgtcttgaaggccagtaggccacagaagacctgaaagcatggcactcgtggttgcaggccacagtcaaggcagctttgtgagaatgagaacaggaggcgagcctatagctcaaatccctttctctaaaacacagccagaaaagaggctgtggacactggccaaacagtgcactaggtttagaaatttccccttttactcagcaaagactaatttgttaaacagctattnnnnnnnnntcagaaaacaaacatttggttccatttcagctgtaatcagcagttggtaatttttggaaaaagagcagttttctcatcttgagttgctcattaagtctgtattttttatcaggcccctgactcctttctttctcatccatggttttttggggaggggggcaagtacagctataggagaaggctgtttgttgatttgagaaaactgttaaaatgttttgcactcacatacaaaggctgatggaattcaaaaatgatcccactgatttttatgagaaacatgactgttcctcttgggtgtctcaagtcaaaacaaggcaaccgcctagtgatttatagttcccacatttccgc

SEQ ID NO: 141055 - DNA, 549 bp, Homo Sapiens
tttgcactacatctctttttactgcttcagaaccctccctggaggtttacccatcaacaggaaaatcaattaaacttgaataggaagaatttgagtaaaaatattggatactttttactttaatcttcagattaagcatgatttccactcgacattatcatcgaagagaagttcttccttggtatttttgcatgcttaaaatttagcccagtctttgaaaaccctttccagcttccagctaagcagaaccttgccactcactttgaactttccggcaaggaaagccttctgcgggttcattttgcccaaaaccagctccataaagacagactccgggattgtaaagacagtgtctgctgggagcctggcaggtcccggatacatgtccccagaaccattcttcagatcaatggtccaccgcaaaatggtcttcccatttttggtgatgtccagctgaaagacggcattgactttcttgaccaattgagctcccacttccctgatgtgaagcctaatgtcctgaaacactcggaagctctcaaattctga

SEQ ID NO: 141056 - DNA, 698 bp, Homo Sapiens
tttcatgtctaaatgtgtttactatttattttttactcttaaagtgatgttatttacatgtgttgttagaatgcaaaccttatcagtaggacatcaaggattaagctctggcagtattaaagttagaacagtcacatgtatgcaaatttttacatagttaaaaagaagaatcactgtaaaataaatgcttattctttaattataagtgatgtggaacaatgtgtacttagttctaaagttcagtcaaggagacttccaggatgtgcatagctactgtatgagtgtggggtgcagagatggaggatgcttctggaagtcaagcagtggaattccatggtatactcagaaaagttaatagttcagttatttccaagaagccttcttgctgcagaccagtaattaatggtcccgctgctcctctctttcattggtgccttcttcttcttcagggaatgctgattcattctggcctttcagatgcttaaccccttttatggtgggtggtgtgtacacactctgcttcctttgcttaggggatgcattctgtaattccccttgtgtgttgggccccctcttgtcatctatttctggggggttatgctcattgagaatcacaagtgatgctggtgtaggtcttcttttcctgatctttttagatgtctttcaaaagagaatcttgaagagagaaaacattcttt

SEQ ID NO: 141057 - DNA, 1020 bp, Homo Sapiens
tttggcaagggtatggtattttattgagttattcaacagccagcttctaattgaaactggacaagcagatgctgaaggcctggagcgggctaaatggaaagcagaagtccatggtgaatgtgtctgggcccactcggccgaactggagcaccagatgttcttggtgtttgggatccacgatttggaagttcttcaccgaagcccgagtgactcgaccatggaaattgagcgtgtagacaccgttctccttgtcccacgacggggttttgttgtgcaacaaaagcaacccttgtttgtccccacgttggtaacgactcagtagcgactcctgttcatttagtggctggacattgattcgctggttctggctgttggttcctgggagaatcacagtcattttccgaggccccaggtatcctaagacgttgggctcataacacacagcccccagctcctgtctgatccgggcagtattcctggttaaatgctcccggtcaggattcaccccattgtcaaagatggtgaacttggtgctgaagacattggatctgactttgcccacgaaattgtccccgtcccgagataggtgtgtaggatccagggagatgaggtaattagaagttttgctccttcttctctttcgcccagccaggaggaagcgctgcaggctgtcagaggtctccaggtagaggtagtagagggggaacaagcccttgtccacgccgtgcttgtcacgggtgaggtagcactgcatcatggtgcccgggagcgctggccgcagcacgtaggcttccatgtcctcctccagcccagggcagggggagcggattgccaaggaggcttcgtgcctcatatggtcgctgtccgtgccaccctcgcctttcagggccttggacaactcttcgttgtgtgctgctgaggagttcgtccctgtagactcagaggcctctctcttcttttccaagtcttcttccttttggaaggccaagttttcatatacacagtcaccatccattccag

SEQ ID NO: 141058 - DNA, 632 bp, Homo Sapiens
  misc_feature (467)..(467): n is a, c, g, or t
tttggtctttactgccaccggataaagtgggctctttattgtcgcagatgaggaaactgaggcagagaacaactaaggaacttgcctaggatcgcacaggaggtaaggggcagaggagggacacccagacagtgtggccccagagtctaggcttgtcaacattgtgcttcagaacatctctaaaggaaaacattggctgtttgggagactgaggcagagggaacagaccagtgggaaggggagagaggtctctgaggaggaaggaaaaggtgggctctgaaactggagctgggtttaggtaggaggaagggcaggtcgtggatgaagacagctgcaggtgcgtgcctggtcacccttgccacacgcttggaatccagccagagctccacctggcaccagaaaagcaacagctacacccttcaccaaatgcccactatgcaccagaccagggctgagaagcccacacncgcctgtgtcatctaatccctgcgacaatgcactgcccctgccttatgggtgacggcccggaggtccgtcgatctgtccacactcacgtcactgagaagcagtgtagtcagacagcccaggccctcggctgccagcacttgctccaaaccacacgatgcattctt

SEQ ID NO: 141059 - DNA, 389 bp, Homo Sapiens
gtgcatacagctattcatgtgggtgccagctccatcccccagtgacctcttcatacgggcagagggtggcatggcagctgtggtgggccagtggggcctacagcctttgcttggtctcatgcagcagctcttgcacagttcttctccatgtccctccttgcagttgacgaaggcatcctccagccgacgcatggactcggccagcgtagggttggtgcgcatcaccaccatgtcataggccatccaggtcgcctgcactgagattttctccatctcttctaatagcttttccaagtccttattcagatctgacagcattttcagcatgttgtcatagtttctttcctccgggtcagcatcatccatctccagcttggcccgcgctccgg

SEQ ID NO: 141060 - DNA, 561 bp, Homo Sapiens
ttttagattaatagaacattttgtattttatttaatcacaatcatctactttttgaaagtcaatttcctatagtcttacggccctccctgaaaataaaagtaatctctatgctaattccaccaacccagagacataccaggggagacaggtgttggaatagaatgctttgggtgttactgtcctcagaggcttggttaaggagaaggaggaattttcagaacagaaaggataaaaagatctgtttaccaggcagaagtccaatgtttgccaaaagtgccaagaaacccctccctgctcgtatattttctatctgacactcagataacagttctatcccatcccttctaggttgctgagggaccggctcctgtcacattatgagctgtttctttggcaaactgattggaataagaggagaaataacctaaagcagttttcacagaaatactgaaattcctgctggcctccgaggtggagcataagacagggccctcggggcaggccgcagtacaatcagctacactgtgcactgctgcctcccagttctagtggaaactatg

SEQ ID NO: 141061 - DNA, 406 bp, Homo Sapiens
ttcactcagacacgctgcaactgtttattccagaatcagaggttggaaacccaactgtatatagactgaaagcaaaacaaatacacaactgaacacaatatatgcagttatccagcaagacaggcaacgcaacacaatatatgcagttattgacaagacaggtgcacaggcacagcacacagagtgagatgaaggcagcctagcgagcagaggctctgcagcacggagggctgggaaggccatcgctcgagttaatccaatcccagtgcttcaggacaccttgggccacgttgacatctctcttttcctgggaggagccctagggtacagctgcatggttccatggagtttcaggcgtctgccagctctgtttcactgtttgtggttaaactgctttctccttttt

SEQ ID NO: 141062 - DNA, 487 bp, Homo Sapiens
acggagaggattctacaaaggcggatttcactttctaagtagcattatattggtctacattaataattttcccagcaggccttccaagattttactttgaacaatcacagtctttgtttctcagatcctcttacatgtgacatttggtcaaagttttaaaatcagcagctaacggaggaggagaaaagtactgttcactaaggcactgcacaaagccataccacagcacgtttcagggttccaacaagctggatcacattttccagctaaacactatttcaatgttgtgttacattttctgtacactgtacactatgttttattaacactatacttcatcacactgatcaggaaaacatcttctaaacatcattaaaataagccttaagaaaattcttcggttctttcccacaggtgtgcattttttaaagtatcaggtacagaccccttaattttattcctattcaaggtatttgtatacagcctt

SEQ ID NO: 141063 - DNA, 565 bp, Homo Sapiens
ggccgccaacatagcatttaaaaataaaggctagttttaattaattaatgttactacaaaaagtcattgctaaaattttcatagtgaaacagattttaacttttgttaaaatgtgctatgctttaattaaattgtatttactctacaagcagggatgttttacctgccattttaactgtatttgccaaattctaaatataattttgaaaattgaaattgaagcttatgtttatgtggcaaaagtaagcttcaggactgggctgtgtatttttattggcatgtaacagttaatatgagctctacaagaatttgtttttaaggagctaaagctatcaacagctgcagatttaaaaaattatatattaaaactgttaggttagctcagttgtacaacttagtgaatcttgtatcctgagtttctgaaggctggtggataggtatctctgaaatcattgtgttttagtctttttactgatagttttgtatagggaattcatcttctcttttaaaataacttttttccccccccttatttctataacttattgtactataaatttcaaat

SEQ ID NO: 141064 - DNA, 497 bp, Homo Sapiens
ctttttcaatatttttcaacctctctggagtcacttttctaacaaccattgcttgataggtgatggctttcttgtctttaaggcctgcataactaaaatccgaaggaataacaccaagtttgatagctaaaaaaccaatcgcttcaaacatttccaggttttcctttcgtagggtaaaagctgtatatataacttttccttcttggcattcagaaagaggccttttcccacgtttgtgtgctttttcccgaaatcttactgttaccaccacattcggattaccagcactgcaattcattttagaaaaagatttggtttccacaaggtttccaaactttttgttgacaaaatggtggacagcttttctgtggtctttgtttgtatcaggtttaaaggtaaatttggaattttctttctttgcatccaaatatttaaaaaagtcaaatgcttcctcttcagataccaaatgacaaagttctttatattcaagatttggt

SEQ ID NO: 141065 - DNA, 555 bp, Homo Sapiens
  misc_feature (334)..(370): n is a, c, g, or t
aagtcatctattgtttttcttacatgttctttccggtgctcaactagacctacagcctgctttgctgagcactttgcaaaccagttgtcccccagtaaaacagtgacttcattagtatggacaagttttcctggcatgaaggcaaaagggccaaatggtaccattatattataagacaatttatcaggcaaggtgctgagtctttctcgaagggcattatagtcattatctaccttcttccaatgctggattctctcttggcagttagtgaccaccttttcctgctcctcgcgcagccgcgccacatccggggcgcgcaacggaaccagggcannnnnnnnnnnnnnnnnnnnnnnnnnnnnnnnnnnnntctccacggtgggcgcctccatgacgggcccgcgggcctcagcgcggcgtgtgagtcctgaaccagcgcctgcgcaggcggcatctcacacgtgcatgtccccgccgccgccgccccgcagcgggctccgagtagcaggccgcctgccaggtaccgagacgcctctccggagcgggcccagccag

SEQ ID NO: 141066 - DNA, 583 bp, Homo Sapiens
tttaaaaggggatatagtgactttattacagctaacagtttggaagggtgggatatgcagccatgtttcaagagaacaaagagagggcctgtcttttatagggaaagtgcctgcccggtttcccactttggtttgcttatgcggataaagaatgcaaacttgcttagttctaattggttgatgcttcttgagttctgattggccaatgcaggtcattgtccattggttgattcaggtggcataaataggaacagacagctatacaaatcccaaagttaagtgagcatgggggttctccaggaacacagactatgtgtgtgacctctagtcagcaaacggtcatttcactctattttgaatttaggcccagttagccactcaggatccaactttacagactggctctttcagggttcacatatgtgatagtaaaccttaatttctctgtctgaagacatttgtcctacctaagtatcatgggtttcattaaattctctcaactctgagcatattttatcctaatatcctaatactccacatttgtgagtatactgatacacatgggttgcctgccaatttatct

SEQ ID NO: 141067 - DNA, 484 bp, Homo Sapiens
ttttttttgacactttgatcagaggttttattgaatggtttcagggaaagaggcaggtttgtcagagggatgagggaaccctgaggttattttctctaggcgatgcctctgcccactgggccagagcggatctgaaatacccaagaggtgaaggtgaggctgtgtgagcggacagagtcaggtgtgcggtggcgctggtgctgcgtgggggcggggagccctcggtgggcgctgttgacagcgggctctaggttatgctgggctctgcactgggggcgctaggtgacagatgggaaccaagcaccaacagtgggccttcttgacggatgggggcgctctgggcagcagctgagaaggggcggtcctgcggaatgcgtcgaagagggctccgcgctccaagagagaaggtcggtagggggtctggggccaggaaatgatggagggcacaaaggctgggagcgggggcgctcaggagttcccagcg

SEQ ID NO: 141068 - DNA, 461 bp, Homo Sapiens
tttttttagttattgagaaatattttaatatgggaaattggtcaaaaggaattataaaaggtaacaggtaatcactgcaggtagcagctaccattcctagagctaggaaaggatggaacaaaagaagtggttggagtcatcagaacctaaaagcttgaaggagggccctgaacaccttagttcaggcctatgaagaatgaagagagggtgatggctggctgttactggatctctggagcacaaagaagggatcccacggtgttgaggctcaaacttctgaggaggtggctcaaacattggctatctcaggagctcaggggaggggccgcatgaaagtagaattcagatctctgaggagagcactgactgctgctgtgatctctgaggggtgcaataaggctgattagaatggagcaagtcccttcttcctcttgcctttgtttccctcttgttcgtcctgt

SEQ ID NO: 141069 - DNA, 354 bp, Homo Sapiens
cataatgactttgtttgggatttgaccttagtttttttggtgctcattttcaagtaatgctagttttcctgacttttaaaagggaagacttaattagggtagtttttctaatttcatggctctcctttctctttattgattcatctcaaattcaataacaattcaataagttggcccttgataagctgattcagtatcttatctggatgagaaaaggcctaagaatagccaaagaattcatggtcattggcagaaggcctcatttcttcaccatgtgcacctctccaaatggcaacttgagtatcctcacgacatgacctctggcttctccagagcaagcgctccaagacatgg

SEQ ID NO: 141070 - DNA, 539 bp, Homo Sapiens
  misc_feature (488)..(488): n is a, c, g, or t
ttttttacatcatgtaaggcatttaatagagtgcttgcttgtactgtgtgcttaataaatgtgggctattcttatttcctcaagcattccctaggcagacagcgggactcctgcctttgtgctcctccggctcgctactcatccatctcttccagcccttggagtattgaatttcaataagccatttttatgtctctcaaccccgctgggtcttattcagctcacttcccttggcctagtacaaagtaggtccaggaaatacatgaataaatgcgaaggccataaagcgttccttagctggagaacagagaggccgggggtcacgtgcctggggcttccaagtccttagatgtcctgtttcttggcccttgtgtaagaacgaggctctctgaaggagaaaggggccccttccagtgtctttttcttcttgcctttggccatcctgttctcttgacttacagggccatgacatcttctctatctgtcanataaggataaaaagtctgccccatggattgcctggaatcaaaatttcagag

SEQ ID NO: 141071 - DNA, 634 bp, Homo Sapiens
  misc_feature (80)..(80): n is a, c, g, or t
gacattcgtagcgaacagcagaggagtgagagcgagacggtagtggctgggccccccccagggcagctgtagccccagcntcagccccagctccaacagaagcagcccggccacccactccccgtgaccgcccacgccacatggacacagccctcgccctccgccccggcttttctctgcctttctaccgaccatgtgaccccgcaccagccctgcccccacctgccctcccgggcagtactggggaccttccctgggggacggggagggaggaggcagcgactccttggacagaggcctgggccctcagtggactgcctgctcccacagcctgggctgacgtcagaggccgaggccaggaactgagtgaggcccctggtcctgggtctcaggatgggtcctgggggcctcgtgttcatcaagacacccctctgcccagctcaccacatcttcatcaccagcaaacgccaggacttggctcccccatcctcagaactcacaagccattgctccccagctggggaacctcaacctcccccctgcctcggttggtgacagagggggtgggacaggggcggggggttccccctgtacataccctgccataccaaccccaggtattaattctcgctgg

SEQ ID NO: 141072 - DNA, 312 bp, Homo Sapiens
ggcgagcatcttttatctttatgttttcatttttggtgatatgggaaagttaaaaagacaattttttttatgagagtaatctgtcgctggaagacactttttatgtttgaagacttgagtattaactcactgctttcagacctgagagctgctagaatatattttctcctaaaaattaaggagtcctttgacctttactcaggccctgcctgacatccccacacgtgtcctggggtccctggcctcaccagttctccaagattgaggctaacgtctgaagtggctgtgagaaggaagagacttgaacagtga

SEQ ID NO: 141073 - DNA, 1090 bp, Homo Sapiens
tgaaaagggagggtagggataagaaagaaagcgggccatagaagccgggccgcccccagaagcaattcccgccccctttgcaatccaccaccagcaatgtacgccaggattttcccacttccaaagtttcccccagggtgagccagcggcgggcccgatcagggaagaagtacaggtgctgctgggttgtagggtaggtatctgcgtttcttcttgcccatactcgacgggatgacttcccccaggaaggaagacgggcgccaccgtcacgttctggtctttgtggaagatgttgggcttggcgtggtgctggaagtggcggaagttccaccagtgggcggagaagccctttagctgccccatcacgaacttctgggccacgtggttccaccaggacttcttgaagatggaggcatggcccaggtcatgctgcagacaccaggactgagccctgagagatggccaggatgaaggcggccagggcactgggcacccagccaggacccaggaggtagataaggagccaggccagcacctccatggccaggatgtggcccagtaggaaagcaaagaaggtgggactggcatcaaacagcttcatgtcctcggctgcctggtgcagggctcggaagtcctcgaccagctgcgcattcaggggtccatcctggctgggttcttccggagccagctctccaatcaacaggggctgtaggaacttgcgcacaaaattgagatcttgatggaaggcacggaaggcatccgtggcgtcctcagcgccgtggtggccgatgaggcggctgccccctgggtgccgctgtgcccagcggctgatgtcgtagacgcggcgctcgatgaccagccacttgtcgccgggctggtcgtgcgcgcggatctgctcccagcagaaggtgggcagcggtgcccccggctgcgcgggtccctcccgcggtcccggctccccgacgccgcccatgctgcacgcacgagtcctggggatcccaggcggtggccgaggtccgagcaagaccccgagggaagcgaagagcgctcccgggcgcaacctccgccgccgcccgctgctccggcaccg

SEQ ID NO: 141074 - DNA, 472 bp, Homo Sapiens
tttaagttatgtcttctttttgtcaacttttatttttaagttccggggtacatgtgcaggatgtcaaggtttgttacataggtaaatgtgtgccatggtggtttgccgcacagatcaacccatcacccaggtattaagcccagcacccattagctgttcttcttgatgctctccctgcacctcacaggccccagagtgtgttgttccccttcatatgtccatgtgttctgctcgttcagctctcacttataagtgggaacatgcagtgcttggttttctgttcctgcgttagtgtgctgaggatgacagcttccagctccattccagagtctacgaagaactgaggtcacagaaccagtgagtggttcaattgacacagcagatgcagatccaggtgtgtgctgggaaatgtttaacaaccacctttccaaatgtagttccaacatggcctaaagactgtccaggacttggc

SEQ ID NO: 141075 - DNA, 771 bp, Homo Sapiens
ttttaaaagaccatattcaatcttatttttattatatctttttggggaggcacaaaagcagtaactcttagcagaggaggaacttgtatgccatctgacctagaaacagatgctactgattgggaagatcacaagcaaggatatacacagtctttctgtatctttcaaagtaaagatggcccttgtgaagcaggaaatgaccttgttcttgagtttggttcttctgattaatgttcttcattggctctcacagacaagtgacacctacacagcatcattggccatgtgaagcttcagtttcttaggtgaaggaggaacttacagaaacttacaaagcaatctaagaccactattcttcccatttttaaatgatctgatttccttcctcaatcttttatggttgtcttggtcaaacttaagatgacagtatttatttttaaggtgacctgactttattgtctcttttcaatgcatttgatttggtttttgtagaggaagtagatcttttgttcttcatatccataataattgcttttaataatatttaatgagactgcataatgacagtaataagtacaactggaatgactggatttagaaatagaaatcttcacatgttgctaggcatacaaggcagggtctgggacagaattgtatggatatacagcactagcgagtggcctagcagttgtgagaatttggtattccatgggtaccaaacagcaggttttatagaaggcagtgagagctccaataaatctttcctacttg

SEQ ID NO: 141076 - DNA, 422 bp, Homo Sapiens
tttatggaataaaccccggagtggctacagagagtttaataacagggcccagaacacaggtgagattgagagtcttgtatgaacacacagccaaaagtagaaattgtcacatgcccaagtgtacacaggtcacaattgaggttctgaatctcacacccaggggcagtcaagagttgttgctacaatcccaaatgtaggatcatgcccattgccctaagcccaggcatgagagtcgacatctctcctcttatatacagatccagtccacaggtgaagtgggaactctccaaccaggattcagcacaccattgatgttgcgactcctctactggaacacagcttggagaagggattggggctctcatggcaggatgcaatccactgttgagattgtgactcatgcacttgaacctaagtctcag

SEQ ID NO: 141077 - DNA, 1824 bp, Homo Sapiens
  misc_feature (129)..(129): n is a, c, g, or t
ctccaggacaccaagggcttttccatcccctttccattgttgaaaagcttaattcacacaaaggaaaaggcagcccttcggcccctgggaaaaagcagggtccttcagacagccccccaccggtgcatncccaggggccacaagaaagccaccccagagaatttcagtgtaccatttccagataagaaatcagcttggggctgaggctcggggagggcacacactgaaaaaacacaagccctacccttggcgatgagatgaagaaacatactccagggaaacgttaacgtagagagaagagcacagggcagaacacaacacagaaaggcgggtcccatccagtgaggaagctctttatccctggcaacccttcccacaatcaggggtctccagtccgatggcccattggtcataagctttgccttggggaaacagagccaccctcctctgcccccacttctggctgcctcactcccctgctcaaagcttgattttgaattctgtgggctgcgtggtcacagaggcccctgaggacttgaagagtgccttcaggatggtgtcagggtccacttcggcaggggggttggaggaggaggcagagttcaccctgcgaggcagctcgctctcctttttcattgatgggctgtcactcagccgcagcaggatgggctggtctgaggtgataacattcccattcatgtgaaggttgcacttcatcggctgcccgtccagacaccggttgttgtacttcttatatgcggtgatggcatcgtcctttttcacaaacaccacctccgctaccccaggatggaccagtcgagctcgcttgagggccccacacacacagaaaagctcaacaatgtcctcctcagtgactcgagggtgcagattattcacagtcatcttggtgccttccaatgggctgagaacaggctcagcagctggcagctctttggggggttcttccttgttcaccagtgtccgggacatgttggtcaaggcttttgttcgaatagaggaagggagagcaggagctgtgtatgcatcattctgaaccactttggtgagagggagggccttggacatggaaagcttggaactgcttagcccagccatgtggtggagaaagccgcctgaggctgcaaacttcatctgtttagtaggaacggaagctataccatcatcatcttcatccaggtcatataaattctgtttggcctggtggttattgacaacattgattctcattccggcaggatggggatgaagtggtgccatggctttctgctgtggaacctggatggttttggtgagcttcagagcaggggtcactgtcccaatgggtgggtttatgaaggcagcaggggaactcctcttcaagctgatcttctcccgggcatcagcaacctggcggggcttctggggcaccgtggtctgctgcttgcgagagttcaacatctctctggcatcctgcactttccctttgattcgaaatcgggcatctttctgcaaaagcttctcccgggcatccttgactcccagtttgagccgggcatctgagaggccaatcttctgccgggcatcaaatctctgctggaaggtggctgtgcgtgttgactggctgagaaggccttgctggatcccaactcgagatcggacacctccaactcccggtctggcattaagccgtcctttcgccgccgccccgcgcttcctgatgagttcgtccagggagatgtccgccatcttgctccgccgagcaagccgaaagcagtcgagacccccctcgtgcggaattcgccacccaggcctcgctaccttgga

SEQ ID NO: 141078 - DNA, 606 bp, Homo Sapiens
ctagccctttgtttttgccttcaatatttaaacaaaatgcaagactgaacgttacctcaaaatgaaacagtgtgtgtactggctgttagaagttgatggcggtctactgtttgatattcactgccatcttcctctgccccactctacctcaactcgggaccgcctcacctaatggtgggctttgccgctttatgccatgtagagaagacactgggtaaccacagcaaatcaacacgagatcctgtactgcctactctgggaatataaatggctctgaggccaggggataaaaccaaaagatctaggagtagctgaatgccaagagacgagttagaacaagttttagttccaaagatgattagactggaaagaaaactgatccaaggagggtcatttctgtgtagatctaaagacaaaagcatgatttagattttcaggaagacagatttatcaaagagcaggcttgcttctgacatggagaaagcttacacactgctaagaaagtgagctaaacactctggacagaatactaactaactcgagggatcatttatcagcatataaaagaactgactaatagttctcccaactggaccctcaattctc

SEQ ID NO: 141079 - DNA, 517 bp, Homo Sapiens
  misc_feature (14)..(14): n is a, c, g, or t
agactcggtgagcncaggctgatggaccgtgcagtccagtttgagccagcccagcagccctcaatcgggcgggcagggaagaaggcctcctactgccgggaagaggccagcgcgctccaagttccccgcaaattccgcccttcccgcctggcacggttcccttgcaccgctgtgctccgctcccaggcttctgcccgccaagaatgcttgccccgggggcgcgctcgctggtcaggaacctgtcggcagcccccgggaacccctgaggatgcggaggtgggcccgagagctgcggcttcgatgccggggtgggagctaggcaggccgcgcgccgccgcagtcctgtcgcagcgcgtgccctggtccctccggaccgaaaaggccgaagccgtcccccgcgaccgaccccgcgcaactggctcgggtctgcacctagatggctgtgggccccacagggatggccgggcgggcccgttcggccgctacctcagggtcgccagtccccgcgcgcggccgc

SEQ ID NO: 141080 - DNA, 403 bp, Homo Sapiens
taaccattccttagctgttttggcatctgctctgttgtcaccacctccccacggcacgggtcagggtctgtcacagcctcgtggccccacgcacttcacctagtacatgcccctgctggataataaggtttgtgtgtgactgatgtgggggatatctttggccagtggtggcatcccctcaagactttgtctcgaatgagggtgggtagggcctgtgtgtgtctgtcttggtcattgcagtcttgaccctcgttctccctgctccagaaatccttgcggacggaatggctaagcccagagctagggccaagtcaggcagggcttctgcattggaaggggcttgagagggttgggggcttcaccatctcccctctcccctgcccttctttcatcaatcaacaaa

SEQ ID NO: 141081 - DNA, 708 bp, Homo Sapiens
ttttctagaggtccatttcatttcaatgagtgtgacagccgctcttcttggggcctatgggggaaaggcattggtccgtggtgggagtgaagctgctcccacaagatgcattcccaactggatcaggaagaccttcagatttaggggaggtctttgtggaagtctttagtggagtcttcccctgcccgctagatgtccggtcggttttagcccgcgttggctactggatggtccgctgtgcgggcttcttgggctcctgcttctcttccctgggcttggagcttcgcctcttgtccttccctgacctcggcgtggtgtcttccttcacggcctgtcctcgcccctcgtctgccgctgtcgctcccgcttcctccttggctctggcacacggcggctccttggctctcggccttgccctcctggtcctcctcgccctggcattggccttggctttcgccctcgcgttccgtctccacacttctctggccttcctggccgccttgcgaaggggctggcggcgcctccgggagctccggggcgcggctggggtcctccagggagcgcgcgtgccctcctcttgcctcgcgcgtcccggctttctcctgggcttgggaaccttccagaccctgaagtagccggcggcgtcgctgccgctgacccggaggagcgtggccttggcctgccccctgggcgcttcgtggcggccgc

SEQ ID NO: 141082 - DNA, 427 bp, Homo Sapiens
cacgttaaccgttatttattattatgttacgcatatgtgagaccacaaaggctgctccccgcagtttcctggcaacacggccgtgagttcttcacacgcaagttaccaagtgcgcggctccgagaagggcgggtgggaggagctggacgcggtttggggtccccggcttctgcgctttcctgaggggacccagtggggacggccggtccggatgaagagtctgtctggcactgcggcgacggttcatgatctgcacagcagatcgtctgcaaacaaagaccatttagaggcaaagctctggccccgagaaagacgccaggggctggctcaagttcaaggaggaagagggcccttcttggtgttctgggcagccggccacagacaccttccatcccaccaggccactcagggaggaggaggtgaggac

SEQ ID NO: 141083 - DNA, 644 bp, Homo Sapiens
cagtaactataagcgggtttttacggtagcgaggcctgggtggcgaagtcggcacgagggcgcggcggcagagcaggcaattcgcagcagtgaggagacagccagaagcaagctctcggagctgaaggaacctgagacagaagctagtccccccatctgaattttactgatgaagaaactgaggccacagagctaaagtgacttttcccaaggtcgcccagcgaggacgtgggacttctcagacgtcaggagagtgatgtgagggagctgtgtgaccatagaaagtgacgtgttaaaaaccagcgctgccctctttgaaagccagggagcatcattcatttagcctgctgagaagaagaaaccaagtgtccgggattcagacctctctgcggccccaagtgttcgtggtgcttccagaggcagggctatgctcacattcatggcctctgacagcgaggaagaagtgtgtgatgagcggacgtccctaatgtcggccgagagccccacgccgcgctcctgccaggagggcaggcagggcccagaggatggagagaatactgcccagtggagaagccaggagaacgaggaggacggtgaggaggaccctgaccgctatgtctgtagtggggttcccgggcggccgc

SEQ ID NO: 141084 - DNA, 704 bp, Homo Sapiens
  misc_feature (168)..(168): n is a, c, g, or t
atgagagtaggggtccagcatcgccatgccacctgtccacaccatgtcagatgagtatatcagggcagggaatatgggctcatctctctcctgggcagtttctaccagcattctcagaggccctttggtacacagcacagccacgagatcatacacagagatggcgcncagtatgacccacgcggaccactctgggaggtacttgatgaacactagggccatgagcgcactgatcatgatgaggtaggcctgctgcagcaccagagggcccttccagtggatgcacaccatgcccactgccccgaagttccagacagtcagcaagagggtggggtagtccatggccacattgtaggtcttgagcacttccccaaggtagatataggtgaagaggaacagcagcatcagtgaagacatgatcaaccagccatggatgaacttgtagcagcggtacttgtagagcaccaccaagaagatggtcataaccacgatgacgctgatcatgatgagggtgttcagcacggagttgaggaggcgctggcccaccgagggtgtgtcctcagtgaatggcgtgtagatgagctgtccattcttctctgtgtagaagcgcacagacttgatggtggctaccaccacgatcatgcacagagtgacaggcacaaacagcatgatcacgtgcttcgctcagtatttgagggtcagct

SEQ ID NO: 141085 - DNA, 400 bp, Homo Sapiens
cacctgccaccctttttcagggaggtgagtacctgccatggtcactgttaccagatccttaaaatcctgggctctgagctaggtgcattgctctgttacccatttcctacatttgtttgtttgttcttgatttcctgggggaatgggactgatggagacagacaaacccactgtgggcagcatctaagccatgtccaaggttggtcgaattaagggaaccctggcctctcagcaggacagaaagctgagctgtggttccaggccctcctctctgggcccctggtgtgtatcttttttccttgttgcttttgaaatttttgcaattattttaagaatccagtctttcagaccagcccttttattaagctttgaatttttaattgatttttttaaagtaaaa

SEQ ID NO: 141086 - DNA, 523 bp, Homo Sapiens
ttttgtacttctcaaaaatgtttctttaatgctatgtataatgatttttatacatttttgaaaagagaagaaaaatttattcttgaagctgcatccaagagattccactctatatacaacacctgtccagctgtgagctctgcttggtccgaataaagtcctctgggggctccctgggccctgatgggcagcctggcgggggtgtagaaacctggtagggaagactctgcccccttctctcctcccagggcctccctctcaatccagagccctcactgagaatgatcatgagggctgtgattctgtaacccagtggagcagccatcagagcccagtgctatgggctttgtgcttagtatccagcctgggaagggctcagtgcccttatgatgggggcaggtagaggtgaggctgcaggaagaggcaggtgtgagttgaccacgttcctccctcctcaggtcatgctctgcaagcattccatctttttcagctccatcccttttctccaggatcagtgtggtcc

SEQ ID NO: 141087 - DNA, 945 bp, Homo Sapiens
  misc_feature (395)..(480): n is a, c, g, or t
tttcaggattgagaaggattttattttgagataaaacagaaagatgcaaaaatagtgcagagtcctgtggttcgttctcccagattcccccctgctgggcctctcgagcctggtgggtgtgacatgggggttggccatcttcaccccgttgggcctctccaccgtctacatctttgcacttttcaactccttgcaaggtgaggcccctgcaccagggaggtgatgggctgtgttgtcttgcaagttgggtgtccatcgtccatctctggtccaatcagctgcgaccagaagggcagaatcatgtgatatgatgtccacatgacatggatgggatctccagggatccttccccacagagacattccatctccagacacccagagacgctccagaannnnnnnnnnnnnnnnnnnnnnnnnnnnnnnnnnnnnnnnnnnnnnnnnnnnnnnnnnnnnnnnnnnnnnnnnnnnnnnnnnnnnnaaaatgatgaggccagttgaggtgcggaaggaggaaatcaccttaaagcaggagacgctcagagacctggagaagaagctgaggacacacagcaagcctgggcttctggttcccacctcttttctcctttgcattcagagcttccctgccatggcttcaagcggtacaggaaagagagaggggaggcccggctgcccgtggccctaaccccatctttgggcttctgaccaaattcgtcagcttctccagtcagagggcattagatcagacactcctacagtccagaaggtttccccctatcaggaagtccatagcccctggaatcgagtatttgcaatctattactatgaacaatcttcccaaggtccagtttccaaatctgaccttagaagttgcaccctgtaggtgttcatgccacccttgggtgtgggcagggccgggggttgtggacactgagcattattg

SEQ ID NO: 141088 - DNA, 880 bp, Homo Sapiens
tttctgttttaaaacatgattttaattaaaaaattcactctttaataaacaaggcgtttgacaccctccaaagaagtctgcctgaaggccctgccgtctcttaattgttattatgtaacatcctttaaagggctaaagtatgaaggtcaagcgggaactgaagcagcagtcaagtcttgtgatgccgggaggaagcgtccagtgaatctctagtctcttattttccaaagtggcagcgagaggagggcggctctgggcgttaaggtgttggccagtttaaaaccgctctgtgctcccagggagcttctgttcctaaggcttcccaagccaaggcaggaggaaacggcagggctttgagagctgagcagcggtgaggtgggaaaagaccgagggcaggggtttggaaataccgcatcctgtgctacacacaaagaaaatgctcactttgggatggggcactagcagtgtcggcgggtgccaaggggcaacgactagaactgggagtgcattctccacagggtgacaggctcctctctcctgcggccagcgccacaagcagcgggttcctggctgatcggagggtgggaacggggctgcggaccccgttgcgctccaggaggagcgccggcccttacctcgcccgtccggcttcatcagcagcgcgtggcccaccagtgggtaggcgcgggccaccgtggggatgggccgcatctgctgccatttccgcgcgtagctcgccaccctctgcagcaggctcaggaccagactggcgccggccagggaaagggcactcgccgcgccccacagcagcagcttctgccacacgagccccagccagagccccgccatcgcccggctgcggccccagcttttccttaat

SEQ ID NO: 141089 - DNA, 624 bp, Homo Sapiens
  misc_feature (475)..(577): n is a, c, g, or t
gcttgtccgaatatgtgatgctcacagatgtaatggctggagtgtacaatggcaactatgaaaaaaatcttgaggacaatagccacatgccaaggatggcagattagaaaggaaaaaggagcctgggatgatgttggcactgtgagactccataagatcctgaacaccctactgtggacttcttttatgtgagagaaaggacaccactgtcttacttaaatctacgttatttcaggtctcttcaccagcaatcaaatgtgatccaaactgatccaacagaacattttgtatactgcatagcaccaaacaagttctccattccccagagatgtttgtttatcactgttaaaaggattgagcattcttctgctcttagcaatgcccaaaggtttattagaagccatccatttcaacctccaggtcagcagttctcagccttctcacctgggagccatttgcagctctccttcaatgnnnnnnnnnnnnnnnnnnnnnnnnnnnnnnnnnnnnnnnnnnnnnnnnnnnnnnnnnnnnnnnnnnnnnnnnnnnnnnnnnnnnnnnnnnnnnnnnnnnnnnnccctaagcagatagaagaatcccatctattaaattaaggacttctga

SEQ ID NO: 141090 - DNA, 598 bp, Homo Sapiens
tttttgatacattcaagaaaaagttttattttgaaggtacggtctttaaagataaaatttggcttccattttccatatctaagtgcatccaacaagatcccaaagcaaacaaaacaacaaaacaaagacccacaacattatgtacagagctctaaaatgagctgtgaatatctacaagaaactagcatatactctttgtgaagggatgtagtagtgtgtggctttctacagttctcagtcccccagaagaagagttaactccctggagctgcaggtgcggctgcagcaagggaagagctggggtcagtgaagggctagggatgcgaccccctgggtaggagacgtggagaggtgtctggggaggggagcagcggcggcacgggacagatcctgggcttctctagaagtcctgccgcggggtgtgagtcaggctgtgccgccgcagatcacagtttcgcctgaacactttgccgcactgctcgcagctgtagggcttgatgtctgtatgggtgagaaggtgagttttcagattacttctctgattaaaggttcttccacatgtgggacatttgtgtggagattcctgcatgtgtaaagt

SEQ ID NO: 141091 - DNA, 672 bp, Homo Sapiens
atttttatccacagtaaatcttcagcaactcatgtctccaccagatagtatttttctgtaaatgaaatgctgacttcgcctcttcctgctgtatgctcatccctgcactgagcacagatatgacaagcagtagccatgggggaggtgggtgacaaagataggaccccgggagggggcgcaggtacatgctagtttcaattaccacagtattctagagacgggttgcaatgacaaggggggcaaatgaaatcaatgcaagatttcttaataatgggcagacagaaaaatgtaaaaccacacaaaacggactgctgataatattttaaaatatacttatttgtcttctttttgcattgtgaaaaaaacaaaataaattttgtgtgataattttgatgatgaaaggtggaagttctacctagatttgaatgagtgtttttttaagggaatgagaatgtcatggtgctaaacctgacaaataagagatcattgaaatgctgaaaattttaacagtcttcttaaaagtattgagggggcaaaaattaccaattatggtatacaaaaataagcctataaatgtgtttcacattgctaacttgagtttcagttgattcagtttgtaataactagtaatgagcttctgtttacaataaaaattctgtaaattgaaaaaaa

SEQ ID NO: 141092 - DNA, 660 bp, Homo Sapiens
  misc_feature (16)..(16): n is a, c, g, or t
  misc_feature (213)..(221): n is a, c, g, or t
taatattttaatctgnacatcacattttttgggcggaccattacatttttaaattaactttttcttgcagaatattcatttcattttttccaagaaaatcttataaaggcaaaaataaaattttattttggcaaatgtcatgaagtcgatactggcagcatatggagttagttaaaaatagacaacacctgctaaatatattcaaaattctannnnnnnnnctgagcatagtcaaagagaaattttcatttaaagtgtggctccacccaatggaggttttcgttgttgttgttttttccatttaaacgtcattgtttatatgcagaataatataagaaaacaacttaaataaagggccacaaacactgcacctggcttggtagcccccctcctcatgtggggctggaagtcaaatcaaagtcctgccattatggccctgctggcggcaggccatgagggatggtgggggcacactgctgccctcctgccaccagacctgagtcccagggaagccaatccggggttctccaagggcaggcagcaaaggttcccatcatggcctggttagagggaagggatttctaggtagatgtcacccagtgtggagtttattgctacgatacaatgaaagttgcttcctctcaccttttctgtatttcc

SEQ ID NO: 141093 - DNA, 506 bp, Homo Sapiens
gcatattcctgaggatctgggtggcatgtttttgaacttcgggatcctgcagaggtttgggtcctgtgatgcgttgtggaggtggtagaggtggaggaggtggtggtgaggggatcactgacgtgattcggggagctcctgctggggatgggtcctgctggagcccagagatgcccatggatgaaggtgaagagcccaggagggtgagtgcgacataggcgccagatttgatcagctttaccacttccaggtgtgagctattggtcaccatggtgccgttgactttgatgatccggtcgccctctttcacaccggccttcatggctgcacctccaggccgcacagactgcaccagaacaatgcgatccccactgactgtgaagccgaagccatgctgtgtctttttggattatgacacagcgttgaacgagacctgttgtctcagaggcatcagaagactggcgatggtgggtaggggacttgcggctctgtgcagaaatctccaa

SEQ ID NO: 141094 - DNA, 589 bp, Homo Sapiens
ttcagccacaatgtgattatcatttgcagcatcagaagtcaaggactcttcagttagcttcttctgatacagctcctgaagggcattgatgtccagatagcatttattgtaaatcttccaggctttcctaaggatccacccacctttgatataagctgacaattcttgttttacaaatgaaagcacagccaggtaaacctggcagtcagctatgattatctgcctctgaagccgatcaaccatagagggggcggattttcggacatcaacgttcttcttaattttattcttgattgtttcaattactccagcctcttcactttcacacagtttttctgtggtttttaagtcatcacatgccaactgcattttttcttcctcaaatgtcatcatggcattcaaaaaactgacaaagctggctccaaaactcattagtgggctatgatttctgtattgtttgaaaagctggtccgactccctgaagccgttgttgagcagcatgttgatgccggccagggccagctccgcgtcctgcaggggcgccgccgccgccgctgccgcgtccgagtttcagtcgtcccgcccccgc

SEQ ID NO: 141095 - DNA, 592 bp, Homo Sapiens
ttcggcacgaggtttttttatctttaatgaatatttaattaggaccttttcagacagtgtaatagttgggggaaaaaagatgcctttttccaacacaccactgagttgaagaggatggaaaaagtcaacagatgagtttcctgtctttcccgccagttcccttaaaccatttctgcttttcatttcttctccttttcttacatctctgcatctgtggactctcctatcgtctccaggagcaaggcagagacacattcttgtctgtgagcagatgacttgtctagaaatcatggacagcctgcaagtccttccagtcctcccaagaatctgacatggttttaggcagagaagaggctcagaggcctgctgactcaacatctcttacaagcgcctttgagtttctccaggaagcgctgaggttttctcagaagtcaaaaaactttttctgtattgtttgaaaagctggtccgactccctgaagccgttgttgagcagcatgttgatgccggccagggccagctccgcgtcctgcaggggcgccgccgccgccgctgccgcgtccgagtctccgtcgtaccgccgccgcggacgc

SEQ ID NO: 141096 - DNA, 726 bp, Homo Sapiens
tgggtcgcagactccgttggctacgatggctgggaggggtggggcattgttcactgggagtgtagggtgatacgctctcggtgttgttctcctcgctccgttcgtcgctgatgatgacagagtgggtcctcgctggatcttgctggccatgtcaagaagggaattggcacctgatggggcaaagatagagcctgggagaagtcctgtttcagaagagcagcctgcctccttctcctccatcttctcaaaaacatatttgtcaatggggcgccccagcaggtactcgtcacggttcaccatcccaccaggaccctggtacatccagtccaacttttcttcttttttcttgacggccccaacatcctccgcatagcgctgcatctcttcccgggctctctcttctcgcagctcccgctgaagctcctcaatcttcttccgctcagcctcatgcttctgctcggccttccacactttctccacattcctgagggtctgcgggtgccagctcttcttcagattcaggtctccgccccccatgacggtggagacgattcctcactacgcggatctggaagatttcgggaggatcaagagaaaacgtagagaaatagttcgggggctacctcgcgggatctagtcccaggagccgtcaactgccagtttcaccaccgctctccccggccgtaatggccgaattcccgggcatatgtccggtaccgtcgactg

SEQ ID NO: 141097 - DNA, 427 bp, Homo Sapiens
  misc_feature (85)..(243): n is a, c, g, or t
actcactacagtaaccgtgatcactttgttcagggatagaaactaaaagttttttagctgtcatgtctgtgtccttcaaagctgnnnnnnnnnnnnnnnnnnnnnnnnnnnnnnnnnnnnnnnnnnnnnnnnnnnnnnnnnnnnnnnnnnnnnnnnnnnnnnnnnnnnnnnnnnnnnnnnnnnnnnnnnnnnnnnnnnnnnnnnnnnnnnnnnnnnnnnnnnnnnnnnnnnnnnnnnnnnnnnctgacagcatttcatttaatcaccccaaattctctctttcttcctatcttgagtgtttgtaaaaggtggagcctggccctgaagtctttgcaagtttggtgtttttaactactttttggctttcattttttagacaaatagtaacattgtttaaatgtagatgctttcaagtttcctaattttg

SEQ ID NO: 141098 - DNA, 579 bp, Homo Sapiens
  misc_feature (432)..(432): n is a, c, g, or t
ttttttgttttataaaccattctttatttatgttaactgggatcactttcaaagaagtttcttttaaacaccttacttgtgacagtgttatttgaggcagtcaatgctgttagagtattcacatcccaaaggaatatttgtctgtccaacccagctgatgctactagttctttatccttggcatatgctaaggcctttacgtaatccttatgtgtccttaatgttgacatgcaaaatcccttgtgtgcattccatacttttactgtcgtgtcagaagaagcagatattaatgttttcccattccaacagagtacaatgtcgtttacccaatcagtattgtggttccatagatgctatatatggatcttgcttgtgctgattgacactccatattcttatgatagagtctcgaccggctgtgaaaagtctatntagtgctggatccagctgcagagcattgactccatttcggttgtacttctccacttcatctcgaataacataggaaacctgcactttcctccgccctgctgtgttctgccggtgatgggccgccatcttgcatgttgacactccccc

SEQ ID NO: 141099 - DNA, 706 bp, Homo Sapiens
ttttcaggatttcccacaatcctatatgagtgttttcgggatcacagagaatcacaacgtccccaaagaactaatggatcttcctctcgatttccgggagcatggagtgagtgtgggtgggcgcgcggggggagctggccccacgctcagaagtaaagccaggtcgctaaagctgccgagagagacaccaggagcaccgggaacgccgggagcagggaccccgccgccccgttgccgctgccgcagagttcgaataagctgccttggatgttgaggtttttggattcttttctcagtttatcccacatatctttcgccccttcctggcaatccgtaagggctgtgaccgtgcagctgtggaaatcctcccagtatgtgcacacggtcttgatgttcgtcttgtcgtccaggccctgcgggtagttggccatgctgtcgcccagcttgagcaaacagtccgaaaagcccttgaagaccgcatcgcacttgcccgctgctctcacggcctgcaccagatacgctatttgcaccgcgaggatcagtgaaatatatctgccgttcaacttaagtcccatcctacgtttagtcaaaccatttgcgaccgcagacctttaaatagttagtttagagaacgcgggggaaagccacaaaataggcattgccaacaagttccgggagcgacagagactttatgcactgggaaggc

SEQ ID NO: 141100 - DNA, 505 bp, Homo Sapiens
ttttatcggaaaggcgtgcatatcttgaagaaatcaatcatcttgtacggtgtgtctggacactcggcgccaaggcggagatagcgcctcgcggctccgcctgcctgggggatgaggctctggtctggacactcccatggaacgggccccaggacaggcccgtggcgaggctgagtcgggcccgtatgcgcctctgcccatcctgcaccaccggctccagctcgtctggcccgctccagggactgcccggctcttcctccgtgggcctgggttctggttcctgtccttccagctccttggggcctcctggggatgtggggggcggcagcggtgggggtgagttaacatctgcgctgggagggctcggggcttcaggtgccgtggccttttgctccatgtggctggcacccaccaactgcacctcctctctggcctccatgtctccgagggaacgcttgatctgccgggggttgctctgtttccgcctggacatgtctccggcgcc

SEQ ID NO: 141101 - DNA, 583 bp, Homo Sapiens
gataagggttaatcaaggatttaattcattaaggagcttgcgagggtctccggggataggcagatgtgggttctatttctccctctgctgtttgatcctgggtatttgggcaattgacttaacatcttggagcctcagttttctcatcggctccgcctgcctgggggatgaggctctggtctggacactcccatggaacgggccccaggacaggcccgtggcgaggctgagtcgggcccgtatgcgcctctgcccatcctgcaccaccggctccagctcgtctggcccgctccagggactgcccggctcttcctccgtgggcctgggttctggttcctgtccttccagctccttggggcctcctggggatgtggggggcggcagcggtgggggtgagttaacatctgcgctgggagggctcggggcttcaggtgccgtggccttttgctccatgtggctggcacccaccaactgcacctcctctctggcctccatgtctccgagggaacgcttgatctgccgggggttgctctgtttccgcctggacatgtctccggcgccgcgcgccctcccggcggccgca

SEQ ID NO: 141102 - DNA, 402 bp, Homo Sapiens
cttaatggtagggctgaggggctggcaccggcccaggagtcatccccacgggctgccctttgccctagctgcagtcacccctccctgtccgcctgcctccgcatttagtcctgctctggcctagggcacaggccatcctggggatacgggcacggggttagaaacgctcccaagtggggagataacgtctgggggcacaaggggagccaaggccagaggagccgctggggctctgtggggagcccggggaggaaggagcccccgctccactcttccctcctctgctttatctcctgcagaattaaatccttgattaacccttatctccccagcgaggcgctatctccgccttggcgccgagtgtccagacacaccgtacaagatgattgatttcttcaagat

SEQ ID NO: 141103 - DNA, 597 bp, Homo Sapiens
catgccctttcagaaaagcaccgttcgcacattccttataggcagtccatgatgaccagtgtcgtaagatgacagtttgggagggcactgcatgtcaattatgattgcaacactctcgttggaggataggaatcttgatgagtctatatcgacctgcagatttgcacagcgagtggcactcataaagaatgaagctgttcttaatgaagaaattaaccccagattagtgattaaacgcctacaaaaggaaatccaggaactgaaggatgaactggccatggtcactggggagcagaggacagaggcactcacagaagcagagctccttcagctggaaaaactaataacatcctttttggaagaccaggattcagacagtagattagaggttggcgcggatatgcgtaaagttcatcactgttttcatcatttaaagaaactattgaatgacaagaagatccttgaaaacaatacagtctcctctgaaagcaaagaccaagattgtcaagaaccattaaaagaagaagaatatagaaagctacgagatattctgaaacagagagataacgaaatcaatatcctggtcaacatgttaaa

SEQ ID NO: 141104 - DNA, 450 bp, Homo Sapiens
ttcaatgtctaatatgtttattttccttaaattctgaactagtttttgtcttggggctaataactttgttaactctctttctcattcagcactgtaatgctatagggcttctggaagggtagggacagcaacaaaatccaccctagcagttcagttccacctgaatcttgactttgcatgctgtctcctctctccagcaggaacactgtgtgatgctgatacctgaccagggcctttgctgaaacagatcctgcctcactcattggtttctgcagaagagaactccatcagaggagcttggtgcttttaatctggggttaatttcttcattaagaacagcttcattctttatgagtgccactcgctgtgcaaatctgcaggttgatatagactcatcaagattccttttctccaaggagagtgttgcaatcatagttgtcatgcagttcc

SEQ ID NO: 141105 - DNA, 836 bp, Homo Sapiens
aagcaatctgtatcaaaggtttatttggaagcttctgagtatgagggttcttgcattaaatgaggattcaaggggggaggaaaaaagtgtgcttgtcagtttggaaagtcacagggagtttaccattctataattagattaggaggaaaatgagaacccactggtagaagaagaagcaacagtcttctagggtctggcatttgatgagataggtattcagttactgtgcatttccattgtttttccatggcagaacatacggcagagatttgggaactcgcatgcctgaagccaggttattcttatgttctgtaactatgttgctcgcagggctgttgttgtcagagtagtgagttgtgccccagacaaatggggtgctggtctgctcccacaaatctttatcccagtcttcatcgcaaggagggcactgccaagtgctctcagccagagtctcttgtctaaggctcctggtttggttgacaacatcttgctcaatacaacttctgtcatcacagcttgagatatgatgactaatttcagctcgaggaacctggtggcgagcattgaagggacaagtagccaatttgcttgcaacatcaggatgattctttctgcacttgataagatgataaggaaacctgcaagccctgatttgatggtttttgtcataggggcattgcaatagcttctcagggtccagggagtcggtgtaagtttcttccatgttggaaatgaagaagctgaatccaagtgctcggtggacacacaccttcctcacagtcaccttcctcccacgcaagccccagcaacggccacttccggcgcctaacgttccc

SEQ ID NO: 141106 - DNA, 454 bp, Homo Sapiens
  misc_feature (236)..(244): n is a, c, g, or t
cttgaggtgacagaagcaaaggacagttctgcgagaagggtatatggttattgggctgactgaaaggatgacataaacaggagctgccatagactcatctggtttgaaattaagtctgaatcatttttacttaaagaacattatgcatggtaagccatatattctgtttccattggattttggtcagatttagtctctatgctataaaaatatatgattattatggtgctctgggnnnnnnnnntcctatcatgttccaaacaaaacaaatgaatgcattgccatgtaaaatttttatgatgattttaaattttaggaatacttaactataacaaaggataaatgtttgaggggatggataccccattttctatgacatgattattatgcattgcatgtctgtatcaaaacatctcatgtaccacataaatatatgtacctactatgtactgac

SEQ ID NO: 141107 - DNA, 541 bp, Homo Sapiens
tttttttcagtccacactttattaagaaaggaatacacacactttctccgagagccctcacgggggtctcaggcagaacacgctctgagagccgggcctggctccagcgtctctctgccctgtggttgtggagaactggcgcccagcagggtggtgggagctgtcccgcttttcccttaaggcacggagagctggaggtggagccacagccgggcctaggggttgagccaggggtgctggaggcagtcagcggcactggcccgcttttcggggatgtactccatcatgggcagcagaaaggcgctgaactgtgtggcctgctctaggggccactcgtacttttccatgagtacctcgtacaggccccagtgcttgagattgtggatgtgccgcagctctcctctccggttgaagaactccgggaatagcggcctgagagggcgaaggctggggggatgtccccagaagctccactatgtgagcgatgtgtgtcctcatcacgactgtagtcttctccagaatgcgggtcggaacagtagtc

SEQ ID NO: 141108 - DNA, 874 bp, Homo Sapiens
gctttccaatggaatactacgtttattgaggcaaaatcacattatttttagttcttggagtgaaaaagcgtacacgaatgttcttcaacacagttactaaaaatacaagaccaagttgaatgtgccaaagagataccattcagttgggttttctagagtcatcaggaagaatattagagaagggattttcatggttggtttccatagcttggtagaccggacacactccaaaaaactgccgggacaacaaacagcaaaatttttatccatacgggaatggagcgtcccttttttgtcttttctgacttgacatctgccaagggaacatacttaggaacatatttagatgaaaaagactcctccatcctgaaatcactgagttctaatggccggcctgcagcccctttgattggtctgcggcaactagcactaattcctgttggtgtagatgcttcataggggaacatttccttaagaatatccctttctactcttctttcctctgttttttctcccacttcagctcttgtcaatggtttctttggtgctcttctgggtatgtctgagaattcagtgattggcagaataggagatgcatgcttgaaatttccagtcaccctattgacaactaaggattcgttgcttgaagccattatagtttcagctatgggagtactctctgaaattactggaccatctatacgaaaatgttctgaagtttccacccttttccttggagttcttcttgaccctcttgtagattccctagttaatgcctgcagaggtccgccttttgaagatccacttgtccattcagtctcagttattccagcttgagaatagctctattcaagcatcaacacattaaaaagtt

SEQ ID NO: 141109 - DNA, 397 bp, Homo Sapiens
tgctcgagattagctcttcaccaggtctgtgtggtaatcatatcgtagttaccgtaggtcacgctgcaagtgtaatttacagtgaggcatagtcttttccagtaattggaatacttgtgtcaccgatccagggtttctctttcctgagtctgaaatacctgggaaaccagttagaaggtgactgggtagcctaggagtcaaggatcagaaagggtacttcatatatatatggcagaattggtgcaggtgatcctttgaaaaatgacaagaattgatgaaattttgtttacttcctccaattttttgctgaataacatctcctttctacctgattggagtaggcttgctttctcttacttaatttctataaatttgccattgttttatctcaagtaaa

SEQ ID NO: 141110 - DNA, 426 bp, Homo Sapiens
  misc_feature (61)..(73): n is a, c, g, or t
tttgcttatacttttggtgtcatatctaagaaactattgcctattccaaagtcacaaggannnnnnnnnnnnngtaagagtcttatagttttagttcttactttaggactatgatccattttaagttaatttgcatgtgttctatgaggcaggcatccactttcttcttttgcatgtggataacctgctgtctcagcaccatttgttgaaaagactaatctttccctattgatgtatcttgccaaccttgtcaaaaaatcaattgaccataaatgtaaaggtagcgcccatgcttttaaccagtatgttatactatcactacacctagactgatatttaaatggtgttaataaaatcagctaaatccccaaaatgtttattattaatcattattattattaatcattatgtctagtaagctttcac

SEQ ID NO: 141111 - DNA, 1610 bp, Homo Sapiens
atgactgaactactataaatccacaagcaacggttcagacacggtgcttctgaagtgtttcacccctccccgccagcgcaagctgcatcaaggagagggtggactcccccacctctgctcaggcatcaggagacagatagggccgttactgctgagcgccagcggcagctggaacaggcatcccaagggggttggcagcagcaatcactggtgagcctgccagaggtccaaggggtgaaggggttggcactgaagaaatccctgacatcatattggcgctgctgacgggcgtactgccccctggcatgctagatgaacccattcgagcctggtccttcacaacagtgtagaaataggggtgctccattgcctctcttgcagtaagccgtgactggtggtcatatcgcagcagtttgtccaggaaatccaaggcctcagggctgacaaggtgctgattttcactgtggacaaagcgttcccatcgctttcgagagtgtctgcccaagatatcattgaaacgtggatctaattcaatgttgtatttgtcaatatagtcatataaatcttctgtccccagaaccttggctatcctcaccaactgatcataattgtcatgtccatggaaaaatggctccttccgaaagatcatacttgccagcatacaacccaaactccacatatccaaactataatcgtacatctgatagtctacaagtagctcaggacctttgaagtatcgggaagcaactcggacattatattcttggccaggatgataaaactcagccaaaccccagtctattagtcgtagctttctgtgctcatgatcaatcatgacattatggggcttgacatctctgtgcataattcccatgctgtgaccataatccagggccttcagaatctcatacatgtaaaatcgaatatcatagtctgttaacgtctggtacaattgcttgaagtctgtgttgtttacgtgttcaaaaaccaaggcgggggttcgtgacacagggtcttttacaatgtctgccagtgtgatgatgttgggacctcctctcaaattctccaaaatctttatttcacgcttaattttcttcttttttactggcttgagaattttaacaacaactttttcattatttgtgatgttgatggcttcaaatacttcactgtatttacctcggcctaattttcgaaccagctggtagtcatcttgatttccccattccaccacatgtgactcgtaatcccagtattctcgaggtctgtgtgtattaacatctgtgtaaactctggccctgcttggcacgggtcccgacatgtcagacaggttggcggacaaagctggacttgatgtttggagatctggcagtcactgtgttcagaagcagctgggggtaagaccttgtttcagacctgttttcttcaaacaaagagatgtgaaactagtcagtatgggtgaatgatgtttcttggagattttatgaggttccacgctgcatgatttaccatgtgatgagcacactgcttgacaagccttgatagagctgtggtggaagcggcagcggcggcggccgctctcccctctgctcacacagacaatatggccc

SEQ ID NO: 141112 - DNA, 470 bp, Homo Sapiens
  misc_feature (201)..(213): n is a, c, g, or t
  misc_feature (286)..(301): n is a, c, g, or t
tttttgccattattagtttttattgaaggagaaaatttttttaattcatctcaggtttaagataaattctgcaaacattgattaaaacatgaaaggcacttaaataagcatacgtatctctgaaaacatgaaatgttatgtacatgtgttcaccattgtttggatttagagctttgaattcactaagagtttaaaatgccnnnnnnnnnnnnnccatgccaaaacgtttgactgtgaaatatcaacccagaatgctctgggaaaaagttagcaaggcttcaaccgnnnnnnnnnnnnnnnncaattgcaggctaaaaccatctctattcatatagaacccaaaaagcatgtctccttggacatgccatgtggcctctcggtttcaccaggcatcttgaaacatcgagggcaagtaagagagttgttcattcatacctttatcaccaatatcaagtttcttttaaaaattc

SEQ ID NO: 141113 - DNA, 594 bp, Homo Sapiens
aacctggttggccatcggggtcttgtgcaagtcgcgcaagaacagaaagaaacgacctctaccacgctgggtatgtgggctggctgtcacgaccttgttgggcactttgttggtgagcccggtgaccatcgccacgtacatgaaggtccaatggcccgggggccagccgctgtgcgagtacagcaccttcattctgctcttcttcagcctgtccggcctcagcatcatctgcgccatgagtgtcgagcgctacctggccatcaaccatgcctatttctacagccactacgtggacaagcgattggcgggcctcacgctctttgcagtctatgcgtccaacgtgctcttttgcgcgctgcccaacatgggtctcggtagctcgcggctgcagtacccagacacctggtgcttcatcgactggaccaccaacgtgacggcgcacgccgcctactcctacatgtacgcgggcttcagctccttcctcattctcgccaccgtcctctgcaacgtgcttgtgtgcggcgcgctgctccgcatgcaccgccagttcatgcgccgcacctcgctgggcaccgagcagcaccacgcggccgc

SEQ ID NO: 141114 - DNA, 876 bp, Homo Sapiens
  misc_feature (604)..(620): n is a, c, g, or t
ggcatccgggaagccaggagaagagcagtgatcgaggtgcaaactctgatcacatatattgacttgaaggaggcccttgagaaaagaaagctgtttgcttgtgaggagcacccatcccatagagccgtctggagcgtccttggaaacttgtctgagatccagggagaagttctttcatttgatggaaatcgaaccgataagaactacatccggctggaagagctgctcaccaagcagctgctagccctggatgctgttgatccgcagggagaagagaagtgtaaggctgccaggaaacaagctgtgaggcttgcgcagaatattctcagctatctcgacctgaaatctgatgaatgggagtactgaaataccagagatctcacttttgatactgttttgcacttcatatgtgcttctatgtatagagagctttcagttcattgatttatacgtgcatatttcagtctcagtatttatgattgaagcaaattctattcagtatctgctgcttttgatgttgcaagacaaatatcattacagcacgttaacttttccattcggatcataatctgtatgatgtggtgtggtttggttggtttggtcnnnnnnnnnnnnnnnnnaatcagaaaaccaaatagaagcagctttttgtagattttaaatggggttgtgccaagcatttaaaatgcagggccttttcaggaatcttaaaactaagccattaacccttaccctaaatacctagggaaaatttatggaagaaaaggggggaaaaatatttttggggtttacacaaaaaggaagttaaagggtttccaaaacccccccaaagccacggtacccctggggtcccgggggtttttccccttttaaagc

SEQ ID NO: 141115 - DNA, 580 bp, Homo Sapiens
gttcaaggaactatgcttggcacactatgatatatcttattttccttctcatcctaccaaacctggagatggaacgcttaaagcttctagctgacaacacaatccttttattaggaacttaactttgctccctaactctttgatacacttacttttcagtataatgtgtttgtggaatctgtttattacctagcagaatgttttcatttttgtttacttgcttatttccattacttgttggtttattattattttcagtcttggtccctgctacctaggtttacttgtgctaaaagacagaatttttggtaagtataaaatatcaaaaactataaattttctccttttcttaagattttctattttatatgtagaattcctttatagacatgtcatgcttcagacattttgaaaatgtgctgttttgaaattgagtgggtttttttccttatttttagagagtttctcaaataagaagatgcattatttcccccaagtgattccaaagggggttaaaatcctgtatcttttgatacttcacaggcaggaggcatcaaagtcatcatttgtattccatgga

SEQ ID NO: 141116 - DNA, 529 bp, Homo Sapiens
ttttcctaacatgatgggtcaccaatgagaggaggaaagccaaataaaggcacaaggagaggcctcttggctctggagaaggcatccttagcatcctcttctgaagggtgatcataagccccaagttaattaaataggcccaatgtctgcctgctctttctgtattcccttcctgaatctagttcatgtcaacaaatgtgtactattattgtagaaaatcgaatgctctcatacttttaataggtttgcttcttggttaatatgcccaggtcaggaagtggcttatatttcaggagtgctctctaatacttattgcagatattcaagcatttattctctcacacacacgcacttaaaaaccgcacactacctcacactctgcaataatccgatagtatggtggtcatcatacccacatatatacatgataagatagaatgcattgcttaaatagcacataagtcatctataatcctccacaccctgtaataccagtagcacaatggttttctatttggaggttgccagg

SEQ ID NO: 141117 - DNA, 269 bp, Homo Sapiens
ctgtgagtttcggcaacggagcccgcccctgtgagcctcagtttcactcggagatgattgtgtctgcctcgtaacggtgattgaggatgaaatgaagtgctctacaagtgtttgcccgtaatatattcttagaggcccctgggatgctctcaaaatgttgattcccgggacttcttcacactcctcttggagaaacagcctgtcctgagctccagtcgttatcacctttggtttcagttgccacagacagcactgcagcggaggaggag

SEQ ID NO: 141118 - DNA, 608 bp, Homo Sapiens
ttttttatcttttaaaatctactttaattctgttataaaatttataatgcagtttaaactatgatttctctccacttgatgatgtctctcactctgttcctttaattacgaagtctctgaagactctgaacttgactgaggaaatgttaaacagatacctcttcataattctgtaagtgtttgcttttaactttgaataaatgtcatatctaaacaaatattaaaaagtatttaacatctcatacagtcagagttcactggcgctttgttccagcctggacactgaccattgaaaaatagatgcctttctgtgccagcagctgctgatgcgtgccatgctccttgactctgccattctgaaacaccactattaagtctgcattctggatggtggacaggcggtgagcaatcacaatgcaggtgcggccttctctggctttgtccagggcttcttggacaaccttttcactttctgtatccagagctgacgtggcttcatccaaaagcaaaatatgaggctgtctcacaagggcacgagctatggccatgcgttgtttctggcccccagagagctgagttcctttgtctcctactttagtgctatattt

SEQ ID NO: 141119 - DNA, 486 bp, Homo Sapiens
tctttctcacattctttacatttatagggtttttcaccagtatgaatcctctgatgtctagtcagggatgaactatttctaaagacctttccacatgctttgcattcatagggtttcttaccagtatgaattctctgatgacgagcaagttctctacatactccaaaagccttcccacattccttacatgcataaggtttctcaccagtgtgaattctctgatgttcaatgagctgtgaactaattctaaaaaccttctcacagtgcatacatttgtagggtttctcaccagtatgaattctctgatgttcggtaagctgtgaatgaaatctgaagtccttgccacattccatacatttgtaagttttctcatcagtatggattttctgatgtcgagtaagttgtgcatgcactctaaaggatttcccacagaatgagcattcaaagtgtttctcaccatcatgaactctttgaagtggagtaact

SEQ ID NO: 141120 - DNA, 533 bp, Homo Sapiens
caaatttcccaagataaactctgtaatgaatctgccctttagacctggcatgcacccaggttatgtgtcctgatgtggggcttcacaaacatggtctctgtacatttacagcacctggccagcctgtgaccctcagtggcccttgctggcagctgcactgaaatgctgtattagaggcctctggatcctgtatgttctatgcaaggttctcacgggtcctccctccagaaatgcctcgactgggcagaatggaaggagccccaggtggcagagggcagggtgctggcagaattgggaacacctggagaggacataaggtggggttggagtccttttctgccttcacgtggttatccactcgctctcttcccatagagcctgtcttccaccgtgacccttgaacactcttcactccctcctggggtccacatttcttacgaatcccagtgtgagggtcctgagaagagggagggtaaggctgaggatcgaggacagtgcaaccacgtccgaatcaaccagacggtgagagccag

SEQ ID NO: 141121 - DNA, 536 bp, Homo Sapiens
cagggttaagtattttattccagtttgttctaacagccacgccatagcagacgtgtgaccacctccaccagccctacgaggggtagaactgaagccaaggccccagtcacgggccgggcttcaaaatccaggcttccctgcggccagcgccgttggctccctgctccccgagatcgcctccccagtagctgagaatacgctgagtttttatggtttcacattcagactaagccgcccgcgaccttgtaggtaaagatgaatccgaatgggtcggcgcgcctgtttcctagggtactgctttcgggcgctttctcctgaagttgacacttcccagccgaggagccttaaagccccacgcagcggaaggaacgcggccccggcggcggcgagacaggcctgctcccggccgggaaaggcgcacgagaaccaggacgcgtccacgccactcggggcgggcgttcgccccgagcacgcccacctcagacgccaaggaggctgaccgcagtccggtcgacgatgggcatggtctctactta

SEQ ID NO: 141122 - DNA, 990 bp, Homo Sapiens
  misc_feature (908)..(908): n is a, c, g, or t
tttatagaaaataaaaactttatttttttcaagtttataagatagttcccattacatataacattacggtcacggattctacagccacaaatgcccgcagtcacataaatatatccaatccaatcaatgccttttcctgctaacagaggcatctgaagttcagagggagagtcgcattttgagtagaagtcgtccttaatgggagggctcctgtcagtgcattaggaactagccaaggagccttgcttgccagagctgtctgactcagaggagaggaagggacagatggcctgctgactggggctgaggcagaactagattttctctcttgtggtttaagatattttagaatctcggaattcagatcctatagtgtgaatatctggggagttctaacttctggatgaaaaaggaaaccaatttagtggtaagaaatagaagcctgcttaagagggaccctaactgcctccttgaggagtaaggagtcagaggaagaccctaagctcaccattccttggcccagaccattgctctaccccatactcctctcccctgtggttcagtgacactgacaaccattcaaggtagtaaacatctagaagctccacatgctgcagctagagtttgcaagtcagattctatttggaattttaaagctgagtttgtgtaaactgcgaacaagctgtggcatcagtctcttgggacaactcactagctttacagaagacaggaacgccgcaaatcaaacaaaagcccagatgggcatctaaatctggagcaggtgtccattcttctggacactaccagctgccccaggggcactggacagggtgatgctaaggcacagtcagttttacattcgaaagtcaagccacctcctcaacccaagacacacctcactccagatntactactagagagagccctcaccgtgacattacagacccatcctgtagaacccacagtgcgtggccaggcatggtggctcat

SEQ ID NO: 141123 - DNA, 513 bp, Homo Sapiens
  misc_feature (494)..(494): n is a, c, g, or t
tttggataatgagaagagtttaataatgtgtaggcagacatcaagaaaaccagtaaatttgtacagcaatctcaggctagcaagggctaggagctgttaccaccccttgatctaaagtgtaagaggaggaagaagttgcttgaactcaaagagagtagtttcatagaaagggctacctgacagaaagaactacttttggtggagtgaggtggccaattcgtggcaggccaccagagaatgagcttagagaatatataatgcaacctcattcttctccaccctctcatcccttaccagtgcctctcattggctaggcccaaccaaaggacagagtgcaaagaagccaccagcatagcccatacaggccaacttggtgaagcacagagcaggatggagcgtggcctgtggaaggaaagtggatctggagggataaactgtaatgtccatcagagcctacttcttccaccattcagccttcatgcttgagctttctncagtgaaaaattcctctct

SEQ ID NO: 141124 - DNA, 774 bp, Homo Sapiens
tccattttgggggaggaagggaaatccccacctttttagggggaataattcaaaaattcgggccacctttcacattgggacctcccccaatgattccttcccaatgaccccattgatagccgccctctgctgggccatgtccaggtgggatgggtgggaccaggactcattttgtcagaagcctcggcaaataaaagaactctcctcatctgtgtctgtactctgttccccatctgaatgtatttctgcttctacatcaataaaaccagcctttaggtccaatttagatacagctgactctgtgaaaggtactaatcctgccttaattgcatgggcatgtgacttcctgtgcttgtacaaattgctctttgtcttgaaagagaaaccacaaggtatacatggatatggccgctccccagtatgggacctgatgtgttttttcagtacactaggtttggcacacgctctgctgcagtaagggcaaatgtacttgccaggcctttttgcggtttgtgctactttcttgtgagcctcttcttgcctgttcaactacttttctcgggcagtcttggctataagccagggttcagaacttgaacatcttttttctagcgataaccaccagctgtggcccatgtatacggaaacaggaaactaagtcctcagatggcaacgggatggcaaagggccagggaaaagccacggaggaccttcgaggctctgatgtggcttggtgctgtgcatgaccccctgtggcaatgagtgctgagggcc

SEQ ID NO: 141125 - DNA, 534 bp, Homo Sapiens
caggatttgccttgagtcacacaccagggcatgggttcagatgcccaattgaggcccccttcagacatactgggaaaggtcttccctgggtcccgctggggcagggtgagttgctggggctcatctagcatttgtctggcattagtgttgagtgggaaaaggccagggctgctgtctcctcctgctgtcctccctttccaccagggccatgtggaagagctgtggggcctggccacacaccccagtcgggcccagtttgtgacctgcgggcaggataagctggtgcatctatggagctcagattcccaccagcccctgtggagcaggatcatcgaggaccctgcccgctcagccggcttccaccccagtggctctgtcctggctgtgggtacagtgactggcagatggctgctgctggacacggagacccatgacctggtggctatccacacagacggcaatgaacagatctcagtggtcagcttctccccagacggggcgtacctggccgtgggctcccacgacaacttggtg

SEQ ID NO: 141126 - DNA, 821 bp, Homo Sapiens
ctagagaggctgggtttaaatcggcacgaggttgacaaacatgagtaaacgaagtatgtgctgtgtgtgacctttttggaaggtggcgacgtggtcacgggggactctggggggaacctctatgtttggggcaaaaggtgggaaccgtatcacacaggcggtgctgggcgcccacgacggcggcgtgtttgggctctgcgccctgcgggacgggacgctggtgtctggagggggccgtgatcggcgggtggtcctctggggttctgactacagcaagctgcaggaagtggaggtccctgaggactttggccctgtgcgcaccgtggcagagggccacggagacacactgtacgtggggaccacccgcaattccatcctgcagggctccgtgcacacaggcttctcactgctggtccagggccatgtggaagagctgtggggcctggccacacaccccagtcgggcccagtttgtgacctgcgggcaggataagctggtgcatctatggagctcagattcccaccagcccctgtggagcaggatcatcgaggaccctgcccgctcagccggcttccaccccagtggctctgtcctggctgtgggtacagtgactggcagatggctgctgctggacacggagacccatgacctggtggctatccacacagacggcaatgaacagatctcagtggtcagcttctccccagacggggcgtacctggccgtgggctcccacgacaacttggtgtacgtgtacccggtgaccaggcggcgcaggtcaggcgctgggcaagtgctcggccatccagtttataagcact

SEQ ID NO: 141127 - DNA, 889 bp, Homo Sapiens
  misc_feature (798)..(806): n is a, c, g, or t
caccacaggcccaaagcttggggttttttccaggttttttcaaaagagggccttggccgctttgcttcaaggttgccccccctcccaaggttcccagaagtagaatgtgagattttccggccaggtgataagacacagtgggggtccagtggggtggaaaggtggccaccaatacagcctcattggagcacttgacatccaccccccttggtctctttggccccagtcccacactgagagcatgtgatcattggattcatccactgcacacagcaggttgcctccattagatttggagaagcccacacagcacacggctctgtcaaacacccccaagcccagcacgtgtaaggtggagagggaaactgagtcccagatgcgcacgtggggcggcagcggcttcccttccttagtggttcccgccacctgtcccgtggcgatggtgaccatatctgggtggatggccaagcatttgatgtcatcgttgtgtcccaggtagtgtcgctgcctctgctcctccacgctgtatagcacggctacggaggccacaaagtacactatctccccggtgggcagcaaataaaggttggcccggcagtctcggccacggtagccatagacccactccagcttgagccggcaagaaggcagctccgagcgtgtgtccaggctgtaggtgggtgccagctcgtctgggatcatcatgggcacagggcggcccctcaggaacattttcacggagccatcctccacactgaagataacttctttggttttgctgtcaggaaaggacaaagnnnnnnnnngggtcttagtattcagttcagaaaaggggagaaaccattcctccacccccaccgctccccggaggtctccgatgaaaacgggg

SEQ ID NO: 141128 - DNA, 535 bp, Homo Sapiens
  misc_feature (181)..(226): n is a, c, g, or t
tttaattttaatcattttatttaactcattatgtaaaaagtatcacttcaacatatgcataatcaatataaaaagtattaataagaaattttacattcttttttcacatgaaggctctgaatctgttgtgtattttacacgtacagcatatctcagttcagaccagccacactccccatgnnnnnnnnnnnnnnnnnnnnnnnnnnnnnnnnnnnnnnnnnnnnnngtctagagcttgggagtctcttctttgacacctgccctacaacctactcttctggagtaggaggtagagaatgtgaatctagatacagcctatcctcaggtgacagtgggaggagttgaaggacaggagtggtggacagagtctgagagtgtctcaggccaggtaattacagggaaaggaggaacaaaactgtatctattaaacctcagactcaggcctttcctcctgaggagtaggtggagccaaaaaggtgctccgaagcctacaatgctccaggtccctcattaatcagaatacttaattctggct

SEQ ID NO: 141129 - DNA, 879 bp, Homo Sapiens
ggattttaaaaataactgctttaatgagacataattgtgtaattcccataccatacaattcatccatttaaagtgtgcaattctgtgggtcttagcatattcagaggtatgcaaacatcaccaatcggccaatatcaaaacacttcctcaccccagaaagaaaccccaaaccagcaaccgtcgctcccaacccccgtcccgggcaccggcagcgccatctcccttcttccctctggacgtgcccattcgggacacatcacgtgagcaggatcacgccgtccgctccgtgtgcctggcttttcacttagcatgatgtctccaagtctgtgtcgcccgtctgtgtcgcccagtgcatcagggtctcattccttttgaccgtgggcgccgttctacggcctggattccagtgcctggactggccatgtttagtctatgcacgcctcagtggatggacagggtttccaccttgccgctatggcaaaggatgctgacgctatgacgaaggatgctgccgttgggcgaaggatgctgccgtatggcaaaggatgatgccgttgtgacgacagattgcttgccgtgtgacgaccagatgtctgccgcttgtggcgaaggatgctgccgttatgaccgaaggatgctgcccgttgtggcaagagatgctcccgttatggagaaggatgatgccgttgtgacaccgattgctccccgtgtggcaaaggatgctgccggttgtgaaccaacggatgctcgcggtatgattaaagagtatccccgtgttaacacggttgttgcccaatgggcaagagataccgcgcagactttggggcaacgacctgttggcgctgcgccaccctgggtggccaacgcggcatctgggcc

SEQ ID NO: 141130 - DNA, 146 bp, Homo Sapiens
cccgatgtacataaatgacttaaagtatatcaatatgactatattctctataacacacaaataactagcataaatacgttgcatttagacagtatagtctaaatacaagttccctgtcctattttgtaggtctttgaatgttgttt

SEQ ID NO: 141131 - DNA, 443 bp, Homo Sapiens
ttttaaaacaacacaaatttattattttacagttccagaggagggcagaagtccaaaatgggtctcactgggctaaaatcaaggtgttggctgaacagaattcctttctggaggctctaggggagaatccatttcctcgcatttgctggcttctagaggctgcctgaattccttggctcatggctccttttcatcttcaaagccagcaaaggctgacggagtctttttcagatgccatctctctggttcagattgtctgcctccctcttcctcatttaagaatccttgtctttacactgggctcacctgcactatgggtttcaaaggatgtgggcttctgttttctaatttctaattgtttcaaattcttcaaaagttgatcatccatacatcatatgcttggtaattttcaatcagaacattccatttcttaattatttttg

SEQ ID NO: 141132 - DNA, 1148 bp, Homo Sapiens
  misc_feature (571)..(571): n is a, c, g, or t
  misc_feature (863)..(1059): n is a, c, g, or t
tttttcgtttatacaatgagcctgtgtttagcaacactcagcttcgttttattattgcgttttatgaagttgccaagacaactgaggccaagtaacagaaccttgactttatgcgccatgaaaatttaataaagaattttgaaaggctttttagaggcaggagctgcagtctcttaaaggcagagctcagcacagagcggagggggctggagcacgtggggcctctcaccagacctccaggagcctccgctgtcaggggcgtggaggtgggcagacgtatttcctggcatccgtcttgtttccgcacgtcgagacccttccttttctcgacagacatgtattaagacacttcccaggtgccaagtcccgcacccggttctttacatacactacgacgtgatccccactatctaggcaaggagcagggatcagagaggtaaagtcactggcccgtggtcatttaggcagagcgcaacagatagaacaaagtgcatatgaaggtctgactgcaaagccctcgcttttccagaacagttcacggcctcttctggattctcagccctcgctttcnccattctgatgcaacaggttctgaaggaaaaatatccctgcgttctgcgaggggcttggggagcagtcagtgttctgtggcccaagactgggtcctggttggaatcttagcaaacaccttcatgttggaggacatgtttcccgtgagcctcttggtgagcacaagacactaccgcagggctgcaaagagccctctccactccgctctttaaataacactcggaagccaatcaccagaaatgagaaaaacatcgtaattttgccattttctaccaaagctcaacggtgctcannnnnnnnnnnnnnnnnnnnnnnnnnnnnnnnnnnnnnnnnnnnnnnnnnnnnnnnnnnnnnnnnnnnnnnnnnnnnnnnnnnnnnnnnnnnnnnnnnnnnnnnnnnnnnnnnnnnnnnnnnnnnnnnnnnnnnnnnnnnnnnnnnnnnnnnnnnnnnnnnnnnnnnnnnnnnnnnnnnnnnnnnnnnnnnnnnnnnataagcattatgctgcgtggtttttccagttatataaaaatcaagacttttggctactagagataaaggtaaatgaagacgtggcctcc

SEQ ID NO: 141133 - DNA, 744 bp, Homo Sapiens
tggtattcaatgcgtgttcatttattttacacttacaaaagaaatcgcccacccctttgccccattcccccaaaacagtctctttttacaaacatttaaaaattaaaaccaaatgaagatagacaagttaatttcagtacaattatttttcagtgtagctgtcataattagagtttaaatttcctacaagtgaccaatgtccaagtgacttatagggaaatcctgattatcggccaaaggaaattcaatattacaagttagcaaattctagtacaaaaatagtccgtgtgttggaacagctttccttttacataggtcttaggtcagtctgctgtaatacctaacgcttccggattctctctcacaaatggctcaatcgtcactgctgaagcagcatggcgcctgcagcagcaggggctagtgtccaccttggggccgtgctggagacggcaggcctgggactgccttgctggccccagggaggaggatgggagagaggagactgcgaccacaggtggagaacactgacagcatcctttttttacaggcgaacacacaccacgtcacagctgcccgcagagtgaggatccggctggtgagtaccgtctcccactccttcccttcacggttgcacttcaggcggctcagcttcacgccccccaacactgtcacttcattctccaactcaatgtacatggaaggatcggagctgacctggagggtgaatgctctctgggggcttgg

SEQ ID NO: 141134 - DNA, 847 bp, Homo Sapiens
tcctttaaaacagtaacttggaaatatgaaaaggccagaaggaggagcaaggatctgttttctggagtggttgaggtgttgtcctgcagttgtcattgtcttctccaccgggctgttcccatttatttcctgtggaactgaatccctcctccctccactccttgggagcccaggtggtccttggccaccattcaggctttccaagaagccaaccaccttggagattttttttcttgaatttcgctgttttcttctgcttcctttagataaaaagcagctcgagaccttatcttagggatgagaaaaacatgcatattaattccatctgagtgattgtcagtgtaaggccttttaaaacaaaagcaagttctttgttaggaattggtcaaaattcatctctttctttaagcccatcaactcccaggacggtttgagttactcagttacctaagcttgctattcatccaaatcattttctagagtcactgtataagggtctatgagtagctgtgtatgaataaatattacctgtctacctcaaaatacacatactgctgaagcattctgtacaaccgtgtgttatcacagtgcagttttaagtgtaacgttagaacttaggcattttcctgtgtggcggaataagaaaggattaaacagttacaagcctccaaattcaaataaaattaaatcacagttcagatgaaactgaatatcattgtaataatctcataatatatatttgtaactttgtagctatctttgaaatcacttgactttgcaatggtgctaagctgatagatttaaatacacagacgggcgagtggcgcccgtgtcgatgtcttcaaaa

SEQ ID NO: 141135 - DNA, 1544 bp, Homo Sapiens
ggtcttctaaatgccggtttgctcggaagtataggtgatgccttgacttgccattcttccagcgctcccaggtgtcaacgccgcgctgggttccccaggcacacacgtgtggagttgccaaggcctactggtcaaaaccttggcgtttggtggccacatcagagaaaggagcctgcttgtgcaacaaaggagaacccccaactcccagggcacaggcagtggggccagcgcagcctgcacaggacttcagcccccacgtgcccccaacacccacagatgaactcgggtagctctggacatccggtctgacctcctcatcctgaaacccttgcccagagtttgaccaaaccaggccttgggatacgagcagaatgaacagagtctcttgagatactgagcgctcagtgatggcccaacaatggcccgacctatcagttccttcccaagagacaagagacctgggcagggacgagggaactgggagcattctgagcagggattactgctctgagcagtggtctgagctctcaacatcttagccttaggagtagtaaagtggccactcgtccacggcacacaggatttggacggcctggctttgcctcaagctctggggcctcaggtgtctctggagatgcaaacaaagatgcagatcaggtggggtctggggcactgagttggcttgctccacagatgaggagaaggtgggaggtagatacctgaggaccaagcagtcaaggttcttcaagccacaggcgttctcgggaagcaagagccccaggccctctcctggtaggggaccaaccatccccacttgctgggtactgtcccagttttagcattgaaagttccatgtcctgggaaaccaggacagctggtcaccctgttgcctgaccataccctaagatgccaggttgagggcctcagaagaaccaggtcatcagggctttgggcgttggcctgggagctggctggctacaaatcccgtggtccacatcgccttctgcccccaggaggccatgacaaggcagccaggctgctgctggactggacagtggtgagggtggccatctaatcactttagacaagagctgcaggtgtaactgactctgctgttctctgggccacctctcccgcagctcaggagtgatgctagagggacggagcactcaggacttcccaccccgccaatttgttaactgtggggaatgacagagctgacgtgacttgctccccattcccagcctgctggtcctcgggctcctacatgaatgttcttgccctgcagcagtgccagcccatattcccaccacagctctcccaggactcctagttcaggttcccaccagtccagggaccacaggactgaagactgggccctgcagagggccgcatccaggtcagttctcaggaagcaataaatagatggaggttgtcttctcttctcagggcagcaactggctctcagcactaaaaacaaggcctcaaacccgcaggggctcagaaaatacctggcaatgcccacctgtgcctgctgatctgga

SEQ ID NO: 141136 - DNA, 1115 bp, Homo Sapiens
tccactcctgcagaactgttgccttgggcctcccttgtcagggtctcggacagctctgcagtctcttttggagctacccctggaactggccactcttcttttctcccacattcttccgagtagtcttgtctttcttctcctgacctcagcctccactctgttgcctccagttgtaccaaactctgttcctgagactctctggagtcaggtctccatttatgggcctctgtcaggcccaacttctggtaggcagattcccctgggctcagtctactttccacctcttttctcctggggctttgctctcgagactctgctagtctcagactccgctctggagtttctccaggactcagcctccatttccatgcctctgacagtcgggagctcctggtctcccacctgtcctgggctttgcctccagtcccgagcctccagaggcctcaggctcaactcttgggctccccctatccccagcctcctctctctggtctccctcggacttagtctctcttctcttgactctcttcccttggggctctgatcccgcatctccccagggctgggtctccgctcccgggcctccagaggcccaggctttctctctgctagcagctcttcactccgttgttgttgctgctgctgctgctgccgctcctgccggatgaatcggttctggtgcactggcccgatggcctccagaaggaccgcagactcatccgggtctggaggtccagcctctacagtccctagcacagggctaggctccccaggggacagcccaagcttggcccggcggcgctccaggagccctcgtttccaggctggcatctgggacaggcgctcccgttctgctttctctcggcctcgaacggacgcctcctcctgccggcgccgggctagcagctgtagcttccagtctgggatggtgtccatggtcgtcttgaggtgagggtagggagcaaggccgcgggacccccgggggagggggtgcggaggagccgggcgtccagagagaggaagaggagcgacagcgtgggtcgacgatatcccgggaattccggaccggtaccagcctgctttttttaacccactgttctatatctcacctaatg

SEQ ID NO: 141137 - DNA, 1357 bp, Homo Sapiens
  misc_feature (524)..(608): n is a, c, g, or t
  misc_feature (1328)..(1328): n is a, c, g, or t
gcagatgaaaccaatgcattctttattgcagactgaagcttaggggctcactcactgtgagctctgatttgggggcatctgtggctgcccacactttccaagacagacaagggcaaactctccaagcagaggagaaaacaacttccagaagctgccccttcaaaggcctgaggtgaggacctggggcagcaggcagcttggcatgcaggggttaaccagaaaggccgggtctggagggctgggcacacctaaccctcatctcctggtgactgcaggtcccactcccttcttcaggagtgccatgcagactctggaacaatctaacaggccaagtgtctcccagggtgggttagggaggaggctgaacacaggctcagatccctggaagtggcagggagagaactgagagaaacttcaccctctgctcggaggacatccccagcctaggtccttgcttctcaaactctaaagtgcttataggaatcagctgggggtcttgctaaaatgcagggtctgagtcgggnnnnnnnnnnnnnnnnnnnnnnnnnnnnnnnnnnnnnnnnnnnnnnnnnnnnnnnnnnnnnnnnnnnnnnnnnnnnnnnnnnnnnttgcaaggctctggtcatacattgtgtttgtgcacatcagagaaggatgcctcttctttcacaaggagaaaccccactccagggcacaaggcaggtggggccagcgcagcctgcacaggacttcagcccccacttgcccccgacacccacagatgaactcggtagctctggagatcctgtcttgacctcctcatcctgaaaaccctttgcccagagtttgaccaaccaggccttgggatacgagcagaatgaacagagtctcttgagatactgagcgctcagtgatggcccaacaatggcccgacctatcagttccttcccaagagacaagagacctgggcagggacgagggaactgggagcattctgagcagggattactgctctgagcagtggtctgagctctcaacatcttagccttaggagtagtaaagtggccactcgtccacggcacacaggatttggacggcctggctttgcctcaagctctggggcctcaggtgtctctggagatgcaaacaaagatgcagatcaggtggggtctggggcactgagttggcttgctccacagatgaggagaaggtgggaggtagatacctgaggaccaagcagtcaaggttcttcaagccacaggcgttctcgggaagcaagagccccaggccctcgacagcgtgggtcgacgatatcccgggaattccggaccggtaccagcctgcttttntttacccactgttctatagttcactatgc

SEQ ID NO: 141138 - DNA, 814 bp, Homo Sapiens
aatgtctaaattttctctggtcggcagatctagctacaggtcgtgtgcatctgtaggtctaaaaaataatgtctcgagacacatcactaaactaatgatatttgtgtataatgcgtgttctgaagtgctatcaacttcgattacagtttcataaatagactgtaggcacgaactgctgtgattgtatcgatatgtgtatctatgtgatactgagactacttcggtccagttcatcatacacgtggcagcgcacgtgagagaacagtgcgccacaagctcgcaggactcactcagcgatcagtgccctctgcctatgctccgacgcgccggcctctcctgatagcacctggcacctgcgtgaagtatccctactcatctttcaagttgataggctttcgcagtttttcgtccgtgaagttggaactggggcttctgatcctggctaaaactagcctttcccaccccattcgaacggccttggtggccagcgggatgataaaggtgatgacaattaatactggtacagttctgccatcggtgttattgccatctcagtcttagcgccacgatgatagccacgcagtcctttcgagctgtttcaaaaaagaccgcaagcttaattgattttttaaaatagcagccgaattctaattctcgcgaggtcctcttttccacttgtgagataagccattgtcgcaacacattacgattatttaatgtttgatcaaaccttcctgccaccgcggcttctggcgcggggctggctcacggggcatcgggtgagctgagcggccagagccagcccggcgcgcgt

SEQ ID NO: 141139 - DNA, 507 bp, Homo Sapiens
  misc_feature (191)..(200): n is a, c, g, or t
tttgaagcaggaggattgaactttattctagaggcaataagagaaagagaaaactgtttaagcaggggaggaaacgatcaggtttgtcttttacttgttcgtttcgttacagacctccgggttttggaaactgaggtgctccgcttgcttcatcagaacagctcgggtagcctctgagctgaaacacggcnnnnnnnnnnccaggtctagaaacggcatgttttcaatatacccaaggctactaagtttgatcccagtgcccatttgtgctaatgacgttggccagggacgccaatttactaccctgaccctgtccttcaaatattgtctctctctccttggctagggttggacatgttctgacacctttcgtctctttgaaccccatttttccgttctgataatctttttcttcagttatgctgaccatgtctttaaatacattgctaacgttttagctcatcccaccctacgttttaatccctcagatgcagacatcgcggacag

SEQ ID NO: 141140 - DNA, 487 bp, Homo Sapiens
ttttgagtaatcagtccaaatgtttatttcaatggtagattaagactagcaaccacaaccaccaaccatccccattgcaattatttgatggaatgcttaactttccatctagtggaggcacagtcctagaaaagcagcaagaattcattctatgtggaacagcttgattgtcatagattgtaggcaccatagagaatcagagtgaagagcaatcactgatttaaattgaggtacagctgtgtccttatttcatttcaaagagtaatgaagcagaaatgcagtgagagctcacacatttgggtggcttgggaacggaactgttttggatatgtgaaaatgcagatgggtccaggttcccagtatggctccacacagttctctcccagctccctagcagttctccgagtctttccaagaccaaggaccaggactccagccctcctggactctcccaagagttatcgttttcttattgacttctcttagt

SEQ ID NO: 141141 - DNA, 546 bp, Homo Sapiens
  misc_feature (408)..(447): n is a, c, g, or t
ttttttaatttaaagaaaacttctttattaagtaaatggacagttggtacacagatattgcaaaaatttcgaggcgggtacatgaatgactgaaattcaggagacgcggggagttagcacagaagcactttcctcattcagagctcttttggctgcgagaaacagacacccaatcaaatcagcttcagcaaaatgagagaatgtatcctgacaagggacgctcacagggcctaaaggaagagtgctgggcccctggaggactgagggaagccggcaggtccctggaggcggtgcccggctgctctccaggcgcctgtgattcctctggtccctgccttgctatgcgtatcttccctctgagcagagccattttctctaccacattcatgcaggtgcccatcccccgcnnnnnnnnnnnnnnnnnnnnnnnnnnnnnnnnnnnnnnnngctccagggtttctatgtgttcaggtaagggacctgcaaagcctgaacagcctccctaaatctagatgcccacctctcatcctttcagctcccatcaga

SEQ ID NO: 141142 - DNA, 581 bp, Homo Sapiens
  misc_feature (20)..(20): n is a, c, g, or t
  misc_feature (209)..(245): n is a, c, g, or t
  misc_feature (353)..(409): n is a, c, g, or t
ggattcatttttgttttcgncaactacatgcaaagggtgtgaaagtctccgggcaggtttacttggttcactttttgcatgaacatgcttcagctcctttgaagaagaaattttttccttttcacaatgctcacttgttttaagggtttctttggaatcttcttcatattgctgtttctttttggagttctcttcaacattccttgaannnnnnnnnnnnnnnnnnnnnnnnnnnnnnnnnnnnnctaaaactttccgttctttaaggacttctttaattctggcggctttaggttccaaactctttgttgatgattcttctaagtccacactactcctgccttgacccttgnnnnnnnnnnnnnnnnnnnnnnnnnnnnnnnnnnnnnnnnnnnnnnnnnnnnnnnnnctattgatttgccttcttaaaagcctctcttctttttctttggcaatggactgtcgtcgttgttctacagtaagctcatcatcagaatcactatagtattttgagtaaagatatggtttgtggacatacgcatgccgtacactttttgtttttccttcactagaatcactag

SEQ ID NO: 141143 - DNA, 1065 bp, Homo Sapiens
  misc_feature (1040)..(1040): n is a, c, g, or t
aagggttaagaagtattgcagtttattaagatgtatattttcaagcttgatggaaatgacagggtctcaagctgcagtgtgactccaggccaaaactagagacagtttccaaattccttattgttacacccaggaagaagccctgcacataggctgtagatttgtcaaaaacttaattctccatgacaatttccattgaaggtagaggaaagtcaatagcctggagttcacgtcatcttggacagcggctgaaaatccaaaattggtttgtttcaagatgctggagccattaacagtactgaatgtaagtcagggtattgctccaaactctgttcctccatgtttgccttttattcagcttttttgatccttttctccatttccaaggaatgatataatctctgattctgcttttggagtccttcccagcccatttctttgttgtcttctaaccttccatccatgtgtcagagtggtgtgaaaacatccaagcatcccctcaactgctactcttgattctttactctgcttcatttcttttcattgcacttattatcaccttccatttttatttatttgcttgcttatttgctgtctgtctccctggggttgacagcctctaaaacagcctcagtgttctctgccttctggtatttctcatcttgaatgtgggctgaatctagtgacttctttcagatgttttccaggcaggagttacaatggaataattaattattttatggttcttcttttctgtagggtgttgggtgcacatttgtcacctgggaatactaccagcaagcctcatattttttctgcaataaatgctttttacaaaacaaaccaatgagtggaagcgcaaggtcaccccttctcctgttttcacttgctcgcgattgacatggggaagtaaaacctgtactatggcacatttaattatgggaaaatgaaaagaaagaaataaaaaccagaccaacaaagcaaagatttaagttggcatcgctttccctcgtgccggcacgaggcctcgtgccgaattncttggcctcgagggccaaattccct

SEQ ID NO: 141144 - DNA, 631 bp, Homo Sapiens
taagtctcacttgactttaaaatcattaaggtcaaccatgggacactgctgtatatttcagggcatcctgttcatacaacatcagtataccttcaacaagggaaacgattcttcatgttaccccacacgacagagtctgcaggatcccagaggccaagcctactgtgtaacagctgacaatgccatcaatttctgtggtgtttatggcatgttccagcacatcacacataaggtatcatgtgactagctgaatgtgattttaagagagtgatctccaaacttttcatttgccttaaggatgacgcctctgtgcgaaaacactttaacctctcttttagaatttccttcaaaatctacagcattttttcctgaaaaacccttcacttttaggtcaaagttttattcgcccaactgggtacctaactcccactggtctcagtctccctaagggaaccttcctctacccccacaatcttagctggctcccacaacactctctcaaggcctcatcaactctcccaagtgcaaaaagcaccacaccacctcaatggtttctcaggcttcaaatgtttacttaataaaccagtggattccgccggccagtgctgcctaacgcagcacccacgaaaaa

SEQ ID NO: 141145 - DNA, 509 bp, Homo Sapiens
ttttaactttaaaaatgttttttttatttaagtagcacaaactccttaagagacatgggcacattatccctctcaatcctagaaacgtgaaggagcaggccataccacctcagaatccagagtgatgtgtatgggtctattatacatgtttataaatgttgccgggtccatgaattcttcggatttgcacaagtactttatgatttgttctgggaggagtaggtcaggtgcaacttggtgtaagttatcgcctggtcctttagtgcctactttcatagtctggcaaaggtagagtgacagtttatgagtttgtgtgagaaaatctgtgatgacctcctttagggactgtgactgtgtcacatcgtcgagatacataactggaacttttatcactgaaacatgccattgcataaaaagcctcattggaatgttatgagaaatgactataattttcatttgttgaataaaaaatactgtttcatctttgacatggccaatataatctaaaa

SEQ ID NO: 141146 - DNA, 413 bp, Homo Sapiens
ctgggcagaaggggaggactgaatactgtgatgtccattctggttcttccaggctaggcacatatctgtaatctcagacggtgccagtcaggaacaccaagcttcctggaatcccaggactggcagaggccagtgcccactgacaggtacagtgctgggccatatgggctgtggctgcattagagaagttcactctcaccagagtgtctccagcaagagacaagacagcatgaaaccccatgtgacccagggggagaaggacctccacagaggcccaaccccgggcggacctacctggctcccacactggtccctcgccgtcctgtcgattttggccatttcttcatctggatcctgcaaaaaaacggtcacgtttgccttcctcttcctggagcgagccgagaactccgcgc

SEQ ID NO: 141147 - DNA, 904 bp, Homo Sapiens
  misc_feature (196)..(196): n is a, c, g, or t
  misc_feature (266)..(266): n is a, c, g, or t
  misc_feature (714)..(776): n is a, c, g, or t
ccatctgttactaccccaatggtccaactttggggaatgtttcctccagtttggtgcaattaataaagattaattcccattagcctgtaaaaagtttttacaccattttcttgtgtcgcataatccggtcaaagaaatctgtgccaagtaaagggtctccctgtgaagtttatagacttcacacacctcccattanccaatccagaagaaatgctcgcatttttggctgcagaagagggtgttgctcaagaaaagtgctgatcccnttaagtatgtcttttccttgtttaacatgattttccagacttccttctctatttgcccagctcagtacaggcagcggggagcctctggatggtgcaataatccgaggcttgcacgttgagtttgggtaaacccggtcatcatcttctttgtcaggtgtggggatcagggagcaggggtctgcacagactgcattattgtcccaaggctggctcccacactggtccctcgccgtcctgtcgattttggccatttcttcatctggatcctgcaaaaaaacggtcacgtttgccttcctcttcctggagcgagccgagaactccgcgccgccgtcctccttcatggtgtcccgctccttcgcatcccgctccctgcgctccctcggcatgatggggctgctccggcctgaggccagggtcttgtccgcggcggacggcgcgctccagtccnnnnnnnnnnnnnnnnnnnnnnnnnnnnnnnnnnnnnnnnnnnnnnnnnnnnnnnnnnnnnnncggcggtggcgggatccgcgcctgccccctacaccgcgctggccctcgtgccgaatacgccacccaggcctcgctacttagtttattttgcctccgtttgtgtggggggtggggtgtatgagaattgg

SEQ ID NO: 141148 - DNA, 586 bp, Homo Sapiens
tttttaatttgaagctctcaaattatttattttcaattcaagtgaagacaattaggccactgcagtcatttcctcatctgaatcacttgattcatcgtttagttccaattcccccaaatcttggtctacagttatagtagttttcctcttgcacgtcttgggaattgcatcattagcgcaaatttttctcattttaatgtttggtaatttcttcagatcaaagtcccattccctaaatgttttcagattacttgcatttagaatgtctggaatctcaaggccatatccctcaaactgctgtcgctcccgctccatcgtctgcttgatgacggtctcccgggaacagtgccgcctcccctgcctgtccctgatactgttatgtaactcaatctgctccagctcactgctgaatcgatttaagtacctttcaattagttcacaagcatctttctttgaatatctctttttttggggatcaagatgattttgaaaccattgcagtttttcaccaacaaggtgagacgcaaggccttttcattcttcaatttttcctttttttcttgtttgtgggcctctcttcgtaatc

SEQ ID NO: 141149 - DNA, 383 bp, Homo Sapiens
cggcctccgtgattcctggccttagggtctttcatggcagagggtagccaccaaggtgccattgaggattggtgtctggctctcttattgtcaagagctccaggggacacacagtgggaccggaacacttccagaatgtctcctcagtcaggttttcaagggggagggaatgcggagacaggagaaaaaaagtgctgaggtccaaagctggtgcagggtgacggtgcgtctgggtaaggcaaatgagaggcagtgaggtgatctcagaatggcgttgaggcggtcagattaggccgggctggctcacacgagggtcccgggcttggctttttctctgcccgtaccattggacatcagctataatgcatagagggaggaatccc

SEQ ID NO: 141150 - DNA, 597 bp, Homo Sapiens
ttttttttgaggagttaatttatatttaattctaaaggtgaacgatggggacaagctgtgtcatatggtccacaactgccacagctcagttattttggattacattttcaatccagggtatatagtaaaaaattttggcatagatgccaacatcagctctcaaaacacatccatccgcaaaagacaggattccttgaagcatcccattgcagattgccggggcagcagaaacttccttgcagggctgcctccttcctggcacaatgcccacacacagcatattttccgtgatgttgtaggttttataggcatcgcgacactgaggcttggagattacagggatgttcacagttttgagtgaatcgggctctttgtagatatcacacacattgtagcttcaggtagagacagagcacatggtattttcagagatagtttggtagggcaggttggctaatttcacatagtcattgagttcagcctctgttttcagcttgattagcatgatgtcatgatcaatagaagtgactgagaagtgtggatgatgaatcatcttctcatagccaatcacttgcagatgcttttcattagagtctg

SEQ ID NO: 141151 - DNA, 449 bp, Homo Sapiens
tttttacacagtgggtagtcaactcgtctaattcattatccccaagaggtgagacaggttgaaaatacaaattgctctttaaaacgtttggagaaactggcggatggtcgattcacagtggattcttgggtagatcgtgacttttaggaggggatccctaaggactgctgcatggccaatccatgaatggaatcatctaggaaattccaacatcatcttttcacttggctgctgagcctgtgataactgaagtgtcaccactgcgatgcccacagttctccttctcttggagaggagaaggccagggtgacagggagtctaggtttgcaccccaagccaagtaagaggttgtgtcactgatccccaaagcatctcaactccactccctcatgaggttgaacccactgggcccggagtctccagttccctgcccacatctaccatggcct

SEQ ID NO: 141152 - DNA, 574 bp, Homo Sapiens
attaataatacttattttaatctgttccctttagtatgtcgttatacagttcccctcgtgtatatacactgatataactacaatttaaaagccactaattaatctgttttttattttgtaagtaacaagatatagacatttgaatgccaatgtcttattctggagagacactggagctgaagttcaacaatgatcacacttattacctggcaataaaaacacaaccatctttccagtcaggtcaaaatatcctactttttgcctttctaccaattcccaaacattcacagtttttcaaggaccactaataaaatacaggaagcttttaaagacagtaagagaacacctagtgtaagttaggtgaattaaagatggcaaaggagattacatcctcaacactgacagcttccaagacttagaaaagagattgttccttgcttctaaaattgttctattttcctctgtaggaaaatgaaagttttttcttacaaatattaaataatcaaagtacttacgcaaaattaatctgctcctcaatgagatgagcactccatttaaatgatctttacagatc

SEQ ID NO: 141153 - DNA, 624 bp, Homo Sapiens
tttggtaataatcttttatttgagttcattttcaaaaccattaggccttcgtagtagaggccccctgtaaaaccagcccctcttgcacccttaatgaggttagccctctccactgtctacatacacagtataatctggaaaaaacagtgggattcccacatgtttagtgcatgaaaaacaggccagactcagtcattttccataattgaccggggttctgttctgttcttttacagcaagcacagccagcatctctgcccctctgccctttagctcctggacacaggcctccagacaccactctctccaccatccagggctctttgccttgctctaggaaggagatcacatcaggtttggaaacggcaagacccagtgagaccaggttgctgtaggtctccaacatcacgtctctgtacaaatccctctgagcaggtgccaaccactgccattcttcttgggagaagactatggccacatccctgaacaattctgacccaagggacatgacttttagaatttcaagggctgataggtcctccttctggttcctctcttggggaagggcagagtcctgcgacggtagagtgccgcctcctcgggtccaagtgccaccgcggccgc

SEQ ID NO: 141154 - DNA, 666 bp, Homo Sapiens
ccttttcccaatgggtttcctggagaagggattccatttcctggaatggggaaaaaaggttcctgttctggggattttcccctgtttggtcctgtccaaaacctggttttcttccatttcccaatccatcttggaaacttgaacactcaaggcccataacttgtaaggcttttccattatctcccattggggtgattcgacttcataaacatgctgctttggaaataattccttggtatcatatctggactccaatactggacacaggcctccagacaccactctctccaccatccagggctctttgccttgctctaggaaggagatcacatcaggtttggaaacggcaagacccagtgagaccaggttgctgtaggtctccaacatcacgtctctgtacaaatccctctgagcaggtgccaaccactgccattcttcttgggagaagactatggccacatccctgaacaattctgacccaagggacatgacttttagaatttcaagggctgataggtcctccttctggttcctctccttggggaagggcagagtcctgcgacggtagagctgccgcctcctcgggtccaagtgccaccgcggccgcgcccccggcagcccagggcgcgcttccaccacggtaccggtggattcgccgtgcgcccc

SEQ ID NO: 141155 - DNA, 551 bp, Homo Sapiens
cacacttctctccaccatccagggctttttgctttgctctaggaaggagatcacatcaggtttggaaacggcaagacccagtgagaccaggttgctgtaggtctccaacatcacgtctctgtacaaatccctctgagcaggtgccaaccactgccattcttcttgggagaagactatggccacatccctgaacaattctgacccaagggacatgacttttagaatttcaagggctgataggtcctccttctggttcctctcttggggaagggcagagtcctgcgacggtagagctaaggggtccatgcacctgggctatgaggctggaagcagaaagggggcgccagaaagcgcacgccgcgagggccggcgggaaatgtagtctcacgccggtaaagccacagagcgacgatgaggcgagacgtctgcgttcttctcaggcctgagacccaaccggcccgggcaccagctcctgctggaccccagagcgcctggaaagctccggaacctctcacctgccgcctcctcgggtccaagtgccaccgcggccg

SEQ ID NO: 141156 - DNA, 599 bp, Homo Sapiens
ggctcttctgaatcttagaatcttattgttgaagctttggtccatctagagattttaatcttagagacatacactagatgtgcgtattaggcatatagactaaataaataaaacataaaagcacataaaagaatagtaatatttaaaatgcataatacagatcaaatataggtaaagggtaaatatgtcaattatatttatgcatcctttttatttgatttatatattttttaaatcttagacctttattgtttctagtggcccactaaagtaagtcaggggcagaggttaacaactgaatttgctcttcagtaatattatataacaacctgagagccctaaatgaattcttatgattctcctaagtacctgctacttaatataaaaagataacttcacccaggacacttggatttatatttctcccttgaacatcatcatatatcaaggacaaggtgagattgttcttattgggcaggaaagaaaaaaactacctccataaagtgttccattttctttcttaatattaaatctaataactaggaaatgttgggcagctcagaatgaaagtcgaagagttaagggcattgagaacacac

SEQ ID NO: 141157 - DNA, 451 bp, Homo Sapiens
ggttttcaagtcagcagtttaataggataaaaatatactggggatcacagaactacttcaagcccctcatgttagacagagagatttgttcaggggtccattgttagataatggtaaggtgaagtacagacctagaattctcatctgtttacttcaaatccaggactcttttccactccgccattctcattcttccagagttctgaagaccacagtttccacaaagtgcatatgcaagtggattatggctggacataaaattccaaatgttcaagcgtacatgatttcagtgcacacacaggtggctagtgtcctttccaacctttgtcaaagtaccaactcactttgtgaggcaaaatgagtaatggagtcaaagtctaagtagaaacaagcagtagattgtagatatgtatagagatcaattatagatacttcagagttccaaaatggg

SEQ ID NO: 141158 - DNA, 385 bp, Homo Sapiens
  misc_feature (351)..(351): n is a, c, g, or t
caggagacccgcggcgccgctgcccttgagcgggcctgcgcctccgtgagggaagagttgctgccagtgctgcaggtaggctgggtccactttgaggaaggccgaaccgccggggtctccgggcttcagcatgtccggcgcctcgaactgaaaactcggtgctgccggtgggtgcgtgcgggtgtctcggtgagcgtgcgggtgcgcgagagtgtgcgccctgcgtgcgctacatgcccctgagcagcgcgggaggagagtcctagagattgtgccgcccggaaacctcccgacctgcaagcgagaaaattgggaggcccgcggagggcgcgagagtgcggacggacctgngcgcccgactcaaccgccgtgggctgctgcgctt

SEQ ID NO: 141159 - DNA, 408 bp, Homo Sapiens
ttttatagggacaaattaaccttgttagatgtgaagtctgggatagggaatggtggaggaacaatttggctctctgctttaacaatgtggtctttaatgttcagctttttatctgctttgtgtgttgattccatccagaggtgagtcatctgctgggctgtgcttccaggacctccacatcccgtctatgaaaacgctctgctcttctcttacaaggctttgtgaatttattcttgctgtttatctcctcagcttcttcacagggaagacccaattttagaatgtcacctgtgctgaaaacacgctttcctttcacattacagaaaagatgcctgagtttaacactagagggcaaagagtggaggtgtcctcatgccatgcaaatactcctgaagctgctgctgttgg

SEQ ID NO: 141160 - DNA, 405 bp, Homo Sapiens
tttactcagtgcctgattttattctgggaatccaaagtagataatgcttgttattgtcagatcagagacagcagagcccgtgactgtttaacttactcaagtacaaggccttctcaaatgtgatgaggcagggctttgcaaattggaagaaggtgagtgcaggtgaaaagtccactgtgagtggccggccctgggaaggcactttcctgaaatgctgctttggtagaagcaacacaaaccctgtggccatgaaagagttatctggtttcatacgaaccttcttcacagggaagacccaattttagaatgtcacctgtgctgaaaacacgctttcctttcacattacagaaaagatgcctgagtttaacactagagggcaaagagtggaggtgtcctcatgccatg

SEQ ID NO: 141161 - DNA, 645 bp, Homo Sapiens
caaaaaggccattggaaacaaggatgccaagtttgtggaggaacggagaaagcagctccagaattacctgcgcagcgtcatgaacaaagtcatccagatggtccccgagttcgctgccagccccaagaaggagaccctcatccagctgatgcccttcttcgtgtaagtactgctcccacggacatgggccgccagccctgccagcatttttttctcggtcgttttggaaggtcagggagcacagcggctctccgtgatgccctgatcgccatgggacccaggcgaactccaggggctgttccaggtgccaaagtggaggttgggtctcagcgctttggagcttctaaagggatgggaagagagcaggcctgcaaatgagcattgttgacttgaggctcacaaagaaacttggggctctgtgattttgtactttcacacatttcgatcaagggaagattaattttctgtacagcccacgggtgctccaaaactgaaacaaattgtgtcagtgtttctcaagcttgggtaatgaacccaaggaaagttctcccagactcctaccagtattgacttaaattatttttatatgagttttacttaaaaatccacattaatattatttaaatgccttcttctctcttgaaa

SEQ ID NO: 141162 - DNA, 708 bp, Homo Sapiens
  misc_feature (31)..(31): n is a, c, g, or t
agtcacacttgtgtcatttcttatactgtanacatgtggttccaattctgaggtattttcccggcttgtaggacccaaaaagaagttaggcttgagaaattttaagtgaagagaacaattctagttcagagtgattggctcttcctaaaagctgacatttgactgaaaattttgaggggagggaaagaaacaataccttttacggcatgtaataggaagaagacctggattttagttgctgctctgatgtcccaacttgggtaaggcaacataacataaatgtcagtttcttcagatttgtgatgaagctgataatccatgctcagcttcctttatgggtctcttgcctatcaaataaggtacagtatgtgaagatacattgcagattatcttatgcattgcttcaggggatgattaaaccatcctttattatagccagagtctagtctaagggaagaaggtcattctctataccagtgaaggctccatccaaaccagtgtttgggggcatagtcataattgaaaaatgattgttttccttatctgtaaaacaggtaaatggtattaatcctcaggtggttgtgaggattaagtgatacatgtaaaaaaaagaaagctttggatagtacctattataagaaactcagtgttgctgcaatgtatgtattataatggatttgaaatttgccctaaccaagagtcacagac

SEQ ID NO: 141163 - DNA, 985 bp, Homo Sapiens
tcattttgttacccacttgcattttgttttcactcagcagaaattctccttctctgttttccttttatcccatccccaagaatgtggaaggaaggtgagaaacatggcaggatgggaaataggagagtatgactctctatagctcatccaggagtaatcaattaagaagataaattggatgactgtggagaagctctgtgataggaacacttcagtgtggttgctgagaggagacagtcattgaggtagaaggtttgccaaagatccagagctcagagctccctttgtgctctttgggaattaccttgcattcagtttagaaacatggatctaaaagttactgggaaataagcagatggagacacactctgttgtttacgtattggaagaagggaacaagccagttttgttagaggtaactcattttccatgaccaaacagactcaacagattcaagtactctgcttactctaattgactagactctaggttttatttgacatcatagcattacataaatcactctgataacataagtgcacagtaatatgcctgatctcttcctttttaaaagccaacttgagttcagtaccatctgaatacacacacatgcacatatacccacacacgcatacacacctactcctgtggcaaacataataatgtatttatttagaattataatatgaccatcatgttaattattttttacctaatcagagttgttattgacaaatgtcataagtggaaagtattaattcttattgtcatcagtatttagccattatttagtagctcaagaatatctttatgtgaatgtctctgtaacttggaattgcaatttcactgtgttaagtaatcagaactctgcttataagatttatctgtatcttgtttcataatttaataatgaaactaaattcaagttaatgtaatgttgatctccgtcgaaaaataacttgtgagcattaaaatatctgtatgg

SEQ ID NO: 141164 - DNA, 454 bp, Homo Sapiens
ttttttgtttttgtaacttgtgtatttattcagtaagtaatatatttgggcctgatgatgggttatggttgtaacctttcatattagcattgggaagaatctctaggggatgtgtgctctggaagatcagcagcttattcaccgcgtggatttggcttctgggattctcccatcaagaccaaatcctatagttattcagtcactcctccccagctcctgctgagaggccagagctgcctccttgagagtgaagttgtttacagacaagagaagagatcttggcggacacatcacagctagccgcgaatcccgaagggtcagcagagcccaggtggctcctcgttgtggcgtcacagaacagccgacaaaagtgatggatttcaggggccagcgacggcgaggtccaggtcagagagccggtgggcagccaggcacagaacccgctcaggccctg

SEQ ID NO: 141165 - DNA, 362 bp, Homo Sapiens
gtacaaagatttgattatttcaacagccccgcaagagataagaacgtcgtataattcaagaagagtgtcatcaggaccaagccaccattgaattcgttaatagtatcttcccattttccatttaaatatgattacttaatgcttgattggatttttctcttcgatctcattttcagtcctcacagatactaacaaagtaccacatctaagtcagaagtgtagtggcaagtgtataacagggagcaagcaaaggagtctaacaagcacattggtgttcacaagttttcttccttaaacctcttcttctcaggcacattatccaggatgacaaagatctgctctggtaacaaaactcaaatctc

SEQ ID NO: 141166 - DNA, 611 bp, Homo Sapiens
ttggctagtggcagccatcttgggactgaaagaaactcaccctgacgaagctcgcccattagtgactgcaatatctgtttttagagttttggtattccgtgatattcaaatactaaaatacatgagtttttattggtgtaattccatgcgttatttcattatttcaacatttaaaaaattcaagtctatgactcaatgattccacagaaaagacaaacggatgggttggcttcaagtctagactcgccttcagagtctgtcttctccagagaatcatcgcagatcacaacaggcagccttctaattatgcatcacgaagcttctacccacagggtaattcccactctggtccaacaggtttgcatggtcgtcacatcctggggagacacgtatttgggtctgcggcaaacctttttagttgtgccatagaccaggtttttctgaacgaaggctttgaaatctaactcgtagttgtgctttccggcctggaacttcaaggtggctgcctggccgtcagaccccggtgtacagtaggccaggtaggccttctccacgtcgctactgctgacagtggtcacagggtgcaccgtgccctgtcttccatattcctg

SEQ ID NO: 141167 - DNA, 933 bp, Homo Sapiens
  misc_feature (97)..(97): n is a, c, g, or t
  misc_feature (240)..(240): n is a, c, g, or t
ggagggagggtggtggtactgggatgaacatacctctggggtaggaccttggtgtttctccaaagatccacaaaagatgggaggggtcggaccaccntgttccacgcaagctatcatagaagggcgttgttccagccctcctttggccggcggacgggacaaagagggcattgcccctgacgaattcgcccaccagcacccggggccaggaacatcgtgtgggtctgcgtgtcggattgnctgtagtgtggggaatatgcagcatctcgggcacagtagctccccttgccgtaggaagtgccatgaacaccacagacccgccagtcaaagttctgcgggcagatggcgtccacaaaaatggcgctggtgccgtggaacagctgccgctcgtccacggccttccctccgttctgcttctgcatctgtccttttggccactggtagacttcccagagggccaggttctgtactcgctcaatcttctgaacaaagtagaaaggcagcgtgcggttaaagaggttccagaccttctgatactcttccgaggaagaactaagggtgatcttctgaaagcctgggtctggcagggcagaggagtcccaatagtctgggatgctcttcgggcctggaaacttggtattgcaggtttgcatggtcgtcacatcctggggagacacgtatttgggtctgcggcaaacctttttagttgtgccatagaccaggtttttctgaacgaaggctttgaaatctaactcgtagttgtgctttccggcctggaacttcaaggtggctgcctggccgtcagaccccggtgtacagtaggccaggtaggccttctccacgtcgctactgctgacagtggtcacagggtgcaccgtgccctgtcttccatattcctgccaagaaccaaactcatcactccagtaccaaatc

SEQ ID NO: 141168 - DNA, 935 bp, Homo Sapiens
  misc_feature (608)..(619): n is a, c, g, or t
  misc_feature (822)..(822): n is a, c, g, or t
ctttatgatagaagtccaaccgttttttataaaataaatttaaaatttaacagcaatcagctaacaggcaaattaagatttttacttctggctggtgacagtaaagctggaaaattaatttcagggttttttgaggcttttgacacagttattagttaaatcaaatgttcaaaaatacggagcagtgcctagtatctggagagcagcactaccatttattctttcatttatagttgggaaagtttttgacggtactaacaaagtggtcgcaggagattttggaacggctggtttaaatggcttcaggagacttcagttttttgtttagctacatgattgaatgcataataaatgctttgtgcttctgactatcaatacctaaagaaagtgcatcagtgaagagatgcaagactttcaactgactggcaaaaagcaagctttagcttgtcttataggatgcttagtttgccactacacttcagaccaatgggacagtcatagatggtgtgacagtgtttaaacgcaacaaaaggctacatttccatggggccagcactgtcatgagcctcactaagctattttgaagatttttaagcactgataaattnnnnnnnnnnnnttagactccaccttaagtagtaaagtataacaggatttctgtatactgtgcaatcagttctttgaaaaaaaagtcaaaagatagagaatacaagaaaagtttttgggatataatttgaatgactgtgaaaacatatgacctttgataacgaactcatttgctcactccttgacagcaaagcccagtacgtacaattgtgttgnggtgtgggtggtctccaaggccacgctgctctctgaattgattttttgagttttgtttgtaagatgatcacagtcatgttacactgatctaaaggacatatatataacccttt

SEQ ID NO: 141169 - DNA, 420 bp, Homo Sapiens
ttttgctgtcaacattcaaatatttttggaaagtttgtatgtttctggctgtgctctgagtgaagtcgtgcttatttcacaagttgtaggctgggagatgaagtcacaaagagctcatgcatagctgagcaggaactcccacttggaggctttatttagatgtgccccagcattccctccatcgctctcttgaactgccaggagaagtttcagagctcagcctgaaggatatggaaaattgagagaggatgagcctggagagatagatggaggccagatgattcgtattttattctgaaggcaataggaaaccgctggaaggtttacagcaggggagtaacattatcagctttgcatttttgaaagaccaccctggctgctgctggagtacaggatggaaggatggatgcaggcacagac

SEQ ID NO: 141170 - DNA, 573 bp, Homo Sapiens
caattctctgcctttcttgctccaagagctttcgctgctttgctgccctggctgcttcacgctgtgcagcgtatacagcttcttcttctagtcttaacttctcttcttgtaaggctaactctttttgaattttcttatcaagatctttttgtttttcggcaatggaatcataatgcctttctcttaggtcaacaatttcttcctcagtaagaggcctatgactgcttcctgggctctccccttcatcactttctactagattctcaaactctattgttaagtgctcacctcttgagcatgttctaaaatacttggatcctccgccgccgcctactcgctgcagccgccccgcttccttgcgaagcagtccgaagcactgcgtccagcagcagttccccatcgcatgccgcccaggcgccgccgctcctcctcctcctcccgctcaatgcccaaacccaggcccggcagctgcatccgcacggcacgagccgaaatggggttcaaggaccgagggcgggccggccagagcccggcggcgtgagggcacggggcgacgaaagacgaggcgctagg

SEQ ID NO: 141171 - DNA, 519 bp, Homo Sapiens
aggcctggatatggggattgaaggcaaagaagatcatggttctggagctcacgttgaggaaatggacctcactcagggaatggggcacattagagaaggtaaaacacatactgtacttacagcagaagtgaagggcttcaggaagttctctttgctttgctgagttcatgtgtgaattcttttgcactgcttcttcctgtctttggcaattgaaggagactaggttttccttgatttgacctgtcaccccatttctgtgctgttaccttcaatgtttttagtgtttacctttctaaccccagctatcttggtttgtttctagaatggagatttacagacagtcatctgggtggaggacacccttttgggatcagcactgaaagtgacgccatatcccactccaaaccagcacaactataaatactaagcagtgagtggtattctgaagactttgaaggaggagctatttctgaaaataaatttattttgttgaagaatttaaccattaagcgatcaaaa

SEQ ID NO: 141172 - DNA, 514 bp, Homo Sapiens
ttttctcatgctggctacttcaggatttgagtgtctactacacctgtaggtctcatattttcaacaaagtacaaagaaagatgtagggatgatattacccgtgtctgtccctttttatcaggaaaaccaatgtttctccagaaactcccctatgagaccgggtgccatggccatccccagcagctgatcataattggcttaaacaaattaggatttattgcttggggttctgttagcaaaagaaagggataattatctgtattaatagacagttaataatgtctcccatagggagtaccaaacaatgacaatgacagaaaccagttttcgagtatatgcactgtatcactccctccccaccactgtccactcactctccactagacctcacatccaggtattagcttctatgcacagagacttacctcttacctattcaactttaattgctggtatcaacaaaatacactgcttaggctttaagatatagaaacccttctgaaggctttttcac

SEQ ID NO: 141173 - DNA, 713 bp, Homo Sapiens
tttatgatgagaatgaatgtttattattttaaggaaaagggggtccttaaagccttatctagaaaatggaaatcagaaagctaggagcaccagctaatgcgtgaaaacatcagaatttcttaacctggtgcttccgcctttattctctctcccttaagcagtaaagggacattttccctgttagcaaagagggaattaaacgtcggttgaagaggcaaatatgggagacattttggagtcattcattcatatatttctggcaatggctctgaagagtggatagcattaccctcattttacagatgaagaaaccaaggcttacacaggttaaccgcccggctcaaggttccacgattgtgaatggctgtcatgacgcctgtctgactctatgacacatgacacttcaatttctatggtggcttttccagccatcctgggataactggcaagtcacatgtaggagaatgaaactggatcctcatctctcaccttatacaagaatcaactcaagatggatcaaatacttaaatctaaggcctgagactataaaaattctagaagataacatgagatatttctttatacaaatgcaagaacagactaatacaacctcctcgccccaactctcagatcctttcatggacaaggcaggaaggttgaaggaggcccaggaaggtggaggtgtttgccttctgctgagggtggggcttgtc

SEQ ID NO: 141174 - DNA, 862 bp, Homo Sapiens
  misc_feature (635)..(635): n is a, c, g, or t
ttttttttatgattaatataattttatgtacatataatgttggggtattgtacagaatcttggtttctacgatgcgcttttcttgtttcaaaaagaggaaaatgcttgatttttgttgatgatacttttgttactgtccttaattttccatagtttggtttcttaattgtgctcactaagcatcgatctgtgctgatgccaagctatggactatgtacgcaagaccgagcaatagacagaggtgcctagggtccaaacacactgaacgcacgtggaccgcctggatcaggagcctcatcagacccttctccatgcacatccttcccaaacagtcacagattccattgaaaggagcagattctatcagttcttctgtgcagactttaagagctgaacgttctggttctggaagccatgtgactgcgcagaacaacctaagaaaccctttgtgtcctgaggggtcgttgacctctccttccgggtcggagcagtcactctgagggcaaagcgtggtccactgtgtgtgatgttttcaggatgctagggtcaaagaaagaaaccaagtggtacataagcccagcttttctgctgggctaagtgtaagtgtgagtaacatggtcaagcccctctttttntgggctaatgtaaagcctttcctgccttgcattaatgctatctccctgtgtactgtttctcttaaatgagcagatagaaatctgcagtgttggcagataggtgatggagaggatgatattttatcttctggccacagagctgcaccccagttgtcagagtccttaaatgaaaccccaaatccatccctccttccctacccccactggaatattctagaataagagac

SEQ ID NO: 141175 - DNA, 152 bp, Homo Sapiens
tccttttgttgctttacaccttctctcacatggtatgatatactgataacacctacacttttttggaagtgttttcatatacttcctttggaccaataaaaatgaaccttctgcgatgtggaggatatgggctattaccccaattttaaagg

SEQ ID NO: 141176 - DNA, 483 bp, Homo Sapiens
ggccggcgccggccgggccccaagcccccgagggcgccaggggcgggatcgcgaccggtgcaacttctagccttgttgtcctcctggtgcgaagagctcggccgcctgctgctgctccgacatcagaagagccgccagagcgatccccctgggaaactccccatgcagccccctctcagctccatgagctccatgaaacccactctgtcgcacagtgatgggtcgttcccctatgactctgtcccttggcagcagaacaccaaccagcctcccggctccctttccgtggtcaccacggtttggggagtaaccaacacatcccagagccaggtccttgggaaccctatggccaatgccaacaaccccatgaatccaggcggcaaccccatggcgtcgggcatgaccaccagcaacccaggcctcaactccccacagtttgcggggcagcagcagcagttctcagccaaggctggccccgctcag

SEQ ID NO: 141177 - DNA, 681 bp, Homo Sapiens
gaccaatgaccgactgcagtgcatcaagcagcacttacagaatcctgccaacttccacaatgccgccacggagctgctggactggtgcggagacccacgggccttccagcggcccttcgagcagagcctgatgggctgtttgacggtggtcagtcgggtggcagcccagcaaggctttgacctggacctcggctacagactgctggctgtgtgtgctgcaaaccgagacaagttcaccccgaagtctgccgccttgttgtcctcctggtgcgaagagctcggccgcctgctgctgctccgacatcagaagagccgccagagcgatccccctgggagactccccatgcagccccctcttagctccatgagctccactgaaacccactctttcgcacagtgatgggtcgttcccctatgactgtgtcccttggcaagcaggacaccaaccagtctcccggcatccctgttccgtggtcaccacggtttggggagtaaccaacacatcccagatccaggtccttgggaaccctatgccaagccacaacccatgatcagcggcacccatgcgtcggcatgccaccacaaccagcctcaactcccacactttctgcgcagcagcagcagtttatgccaagactgcccgctcagccctaatccgaagcagtgccggggtcctctaag

SEQ ID NO: 141178 - DNA, 503 bp, Homo Sapiens
tgatcctcctgcttcagcctgccaaagtgctggattacaggtgtaagccacctctggacatcttatctgtgaaattttaggcattgatcagtgcagaaagaaccatgaactgcaggatgttctcagagactatgacattatggcccacaagaagctgcccactcagcttctagtcagttaggtgtggacttcatcaatcacagaatgaagactcagacagcctcccaggaggacacaaagtcagcctcagagaggcatggaggtgttaaagagggaagtgcctgctagaatttcagtgggttggatatgctctttaacgatgcccaaatcataggtatacattttctgacaattggaatctattattactcttgaaccagctgttccccaggctgtttcctgtcttggaagggatactttgagtttatatcttttcaatcctacatcctcagaaatttaccctgatactaataaagggactcatttcccccataagaccccct

SEQ ID NO: 141179 - DNA, 667 bp, Homo Sapiens
  misc_feature (69)..(105): n is a, c, g, or t
tggggctgtagtgggcagcccatccagccccttgtggccacctgctgccagctgctcagtgacagccannnnnnnnnnnnnnnnnnnnnnnnnnnnnnnnnnnnnactgtcctcggtcactttcctagctttggcctgcactggggctgggggacccagggcagcagccgctgtgggcctggggaggacagctggccagggggggtgcctggatggtggacagtggctgactcccacctcccagaagcagctggggggccccctgcgcctgcctggactgcacccgcctggacctcaccccccagggctgttgctgcttccacctcggccacctcctggtcatagctgtaggggtcttcgtagtgtcgctcggggtcaccctcctcggcatctgagaagttcccgtggcaaccggggagctggtagcagatgagctctccaccggcgtcagggcagtggcaggcccggcagggcggcaggtgaacagtgtggccagcggcgtacttgtggcccgcgtggacgcagcccacctggccgcactgtgggcagctgtcagccaccactacagcctcgatgcagttgggcggcagctccgggcacagcatgaactggcagctgatcttgccgccgcctggtgggcaggagcactcagtgctcccgaagtcca

SEQ ID NO: 141180 - DNA, 401 bp, Homo Sapiens
ttttaagaacatgcagacaggtgaaaaacaaaatcctttgagctcaaacgcacctgaactaaatcccagagggctgagtgctgctgtaccactccctcccgctcttacttggttttcccaaaaacacattccccaggtcgaggtggtggagctgacccagccttcacttcactgaaagacaaaccagacgggctgagagcagttcccgggcctccagaggctgcggctcgcacagctttgccggctgtggttatgaactgtgatctgacagtggaaggcagcacttgttaggaaatctttatgtagcatgggtcacttaccctggtgaaggaaaggcgaggaaggcgtcgagttcagacttcaaatacacatgaggtacctgggattaggggaaagaaatg

SEQ ID NO: 141181 - DNA, 550 bp, Homo Sapiens
tattcctcacactatatttacattaataaattgattgagaagtttatagtaaagggaaacttacagaacacttttgtatcatttaaaagatgacctgaccaaaaactttacaggattcataaatcagggatcattttgctattgacttcacagtaatcagtagttttataggtaatattatagttaatttgcagcattttagtacttgtattatttatttttggtcagaaatagtaaattaaaatattttttgatagtttataggtaataatcaacccataacttttaaaagaaacaaaacatttctattattgagttaacatttgattatacaaactaggaaaggcagggaaattccccttctccccagtgattctattaagatgacctttatgttaaactttcaaagtactttatgaatttagttaccagttactatttattaattgacaattttctgaaaaatcccgtttcagcagacttaatgaaggtgaaagcaacccttatgtgctttctacttatttgaatgttcctcaagtattttatatta

SEQ ID NO: 141182 - DNA, 939 bp, Homo Sapiens
  misc_feature (50)..(70): n is a, c, g, or t
  misc_feature (793)..(806): n is a, c, g, or t
ggtcctaaggtagcgaggcctgggtggctaattcggcacgaggctcgagnnnnnnnnnnnnnnnnnnnnnacccaagagagcctttattcagccacactgacggctctgagccagagccacctcctggccccactggtacccaggaaacatgcccaggttaaagctgccccccaggggctaggggctgaggtatggtcagtgggctgaggcttgtagactgtcggggcagtctattgaaccagaaagacagttccttgccctggatggcctcagatgtctttttccatccagaatatggggcgccccctcacattttgatattgtgtctccagcaggctttttgaagggggccctgatggaactgggggtgagatggtcaggcactcaggtaggggagggggtggtggcaatggaggtcccttgggaccccttggggcagcttgggcagtcaggtttggggccttcctgggtggccggggagagggggctgtggggaaggcattaagcagggtggcaggcagccgtctgctggtgaagaccaggccctgcacaggctcacccagctggtagcccaagttgggtatagaagtgcacctggtcatgggtggtgagatgcagcttgcggaagccccgggcccgagcaaagacctccaggccctccatgaggcggcggccaaagccacggcccctcagggcccgggccaccaccactgtctccactaagaggctctggggctggttcagcacccgtgacaggcgggcatggcccaccacaacgggtgctgcttcaannnnnnnnnnnnnnggggtttcccccccatcccaggtaaaggcgggaagggcatcccgaaggcatggggcccccaggacaacgccctaccctagcaaggttgccccccttcttatgggcccccctggactctttcgattgggagggc

SEQ ID NO: 141183 - DNA, 1017 bp, Homo Sapiens
cgacgcgcgggtgctgggaggccttagaacgccgtggcgtgccgcaggacgcgacggctgcagaacatccgccgcaccgctgggggccaacgttgtcggaccgaggagtccgaggtggcgactgagtgagatacccagctgtgcggagctaggacgcggaacatcccggaggccagcatcaacatgaggagagccactgtggtctgaagagatgctactgcctggagactggggtcttaacctccagcctggcactgagccacctgcaacctagcagcaggtgaccttggctcccagcctgactcagctgaacctggatcctgtgcataggcaagagctgactctgagccctggcccagccaagctgacccctacactagaccctacacaccggatggagctgatcctgagtaccagcccagctgagctgactctggatcctgcgtgccagccaaagctgcccctggattccacatgccaaccagagatgaccttcaatcctggtccaactgagcttaccctggatcctgaacaccagccagaggagaccccagctcctagcctggctgagttgaccctggagcctgtgcaccgccgacccgagctcctggatgcttgtgctgacctcatcaatgatcagtggccccgcagccgcacctcccgcctgcactccctgggccagtcctcagatgccttccccctctgcctgatgctgctaagcccccagcccacacttgaagcagcacccgttgtggtgggccatgcccggctgtcacgggtgctgaaccagccccagagcctcttagtggagaccagtggtggtggcccgtggcctgaggggccgtggctttggccgccggctcatgggagggcctggaaggtctctgctcgggcccggggcttccgcaggctgcctctcaccacccatgacccggtgcacttctattacccacttgggctacaagctgggtgagcctgtcagggctgggtcttcaccagcagacggtgcctgcaccc

SEQ ID NO: 141184 - DNA, 486 bp, Homo Sapiens
tttttgaaccaacgaggagaaaactattcctcattcttagtgtcgactaggtggtatgttatggcagttttccttcgtgatgtgacacagtgttgtggagaaaatcagaggcaacgagaatgtgttcagttcatgatatcaacttggcatcctggcgagccagttctattccctgccgggtataacgaactagatctgtcatgatgcttgcattaaagatgagagggcccattactttatccagttcagcaaagaattctttttgctctttggaaagctgttcagcttggtcccaaatttcggtggcatagaggaagttggatgtgacctgaacatagctggctgccatctggtggatcttctgtggaatggtcactggagaaccacttgcagaagcactactggccccagatgaataatttcctgaattgcctggtgacagctttggagaaacaggggaaggcatccccacagctttgcttccca

SEQ ID NO: 141185 - DNA, 505 bp, Homo Sapiens
tttttctgtcaaagggttggtttattcctttacacacttgacacacacacaatccttcccccacccctgacacccttttcaactatttaaggtctgggggctacttccgggtatttttgggtaccagcagggagacagaaatgagcaggatttatgggagagtcaaatgcccctctcaaaacagttaaaggccttccttataaatggcctctctctgtaaatataaaaactaactataagaatctcaaacggtcagccctaaaagaccaggtcttgtgggattgtagagttggctgctatgaagggaagactggaaaaagtgcctccagagacacggggtggtccacagcctaacagttaaaatgctcatcacttttaagaactttcctaacccctttaggtctttgatgctaagcagggaagagggaggcttggagaccagggatgtcctcccaggtggtgctggggcctgggtaaccctcagggttgccctcaggagccctct

SEQ ID NO: 141186 - DNA, 515 bp, Homo Sapiens
actttggaaatttttaatgtttattatttacatcactttgtgaattaacacagtgtttcaattctgtaattacatatttgactctttcaaagaaatccaaatttctcatgttccttttgaaattgtagtgcaaaatggtcagtattatctaaatgaatgagccaaaatgactttgaactgaaacttttctaaagtgctggaactttagtgaaacataataataatgggtttatatatgtcatagcatagatgaatttagaaacaatgctcctactgtttaaatacatatggacacatctggtgctgagaaagaaacaaacacattaccattggtgtcaagaaatattactatatagcagagaaatggcaatacatgtactcagatagttacatccctatataaaaagtatgtttacatttaaaaaattagtagataacttcctttctttcaagtgcacaatttcattttgacttgagtcaacttttgttttggaacaaattaagtaagggagctg

SEQ ID NO: 141187 - DNA, 475 bp, Homo Sapiens
  misc_feature (449)..(449): n is a, c, g, or t
ggccgccgcagcttttctgcctccgcattcgggcactaaccaacctcccggctggatcgcccagcccgggtttacctgcaaaaatgcggtccctgggatgccttcgcgtcttctcttccctcgggtgacttgaggtttgtggtaaatatgccagctctagaacacatgaatcagattttacacatcttgtttgtatttttaccctttctgtgggcacttgggactctgcccccacccgatgcacttctcttatgggcaatggagcaggttttagagttcggccttggaggctcatctatgtcaacccacttacggttattagtaatgttcatcatgtctgctggaacagctatagcatcatatttcattccaagcactgttggtgtggttcttttcatgactggatttggtttcttgctgagtctgaacttaagtgatatgggtcacanaattggaaccaaatctaaggatttac

SEQ ID NO: 141188 - DNA, 593 bp, Homo Sapiens
  misc_feature (65)..(65): n is a, c, g, or t
tcatgctcatcctcctctgctaagatatccgtggttagtattctttctactgttgttgatttgtntttggcgtataaacttgtgaactggatgacaaatgcagtaaaaagcattaatccacctgaaagtgctgctgtataatagtctttcaggatgcctaactggtacaaaagtgttccgactccaccccaaacccatggcattagaaaaagaataatttgattaacatatatgtaaggaggggcacaatagcctaatttgaatcgagggcctccaagaacagtctgtggaaagcgcttcagaaagaagtcctgcttgtaatcattcagtagaggcacatctggactcatcctcactcgggattattctgaaagtcacatgcttttctgtaacacagcagtttctcaagtcacccgagggaagagaagacgcgaaggcatcccagggaccgcatttttgcaggtaaacccgggctgggcgattccgccgggaggttggttagtgcccgaatgcggaggcagaaaagctgcggcggccgaataacgagctcaccgcggccccgcccgggccagctctcggtttccatggctaac

SEQ ID NO: 141189 - DNA, 454 bp, Homo Sapiens
gcattttgtgatatgcaaaaatgtctctagatatttccaaatgtccatggggaggtgagtgggaactgtcctggatgggaaccactggtatggttcatgtaggttactctccctggaagagagcaggatgtcgatgtgtagagagtagatcttgctctgttgcttttggtttctcgcccctctgatttctgcttctgctgctgctttcttgctcttattttgtcaagaatccaaagtgttctgttagttaccatgtgttagtcagcctatacaacaggctgctgctgtaacaattaactctgacatctcagtggattaagtaaaacaaggcttatctcccacatgaagtgccttctcacatctttctagttatgttgtctggaacacatggtctgactgcaaaggagtattcagttctttggtgagtgtgccaaatttctagaagcttgagatt

SEQ ID NO: 141190 - DNA, 812 bp, Homo Sapiens
ttttatatttatttttgatttgggtatttcttgcaatttatttccacttctggaggaagaaaatatgtttagagtattttaactgctgtacagacactgccaagtcaagtccacgaagcttcagtaccaagggtggccctgcctggccaccttctgcagggaggccaggtgctgccccagcacctcagctgtcatcactctttttcccacaggctggggacccctgtgctgttggctgtccccagcagcccaggaacggggtctctgctgtctggttcctaaaaccctttctttcacccactttgttcttctggctgagctttgaggaaaggaactgcctttcaaacgcagcctgacttaggtcggccgtctttttctcttttcttttctgttttttgtctgcatagatgagcttttcaggggtgtatttgtaagttttactcctggctcttgcagaggctttatgccactcttttggaatcacacagtgtgaagtgaaagtgaagtagggcgagctggcatgcagcctggccttctctatttcttcaagttcttttatggaatgtcgttttcctacaggaagataaaaaatcgaaatcaacactcttcaagaactccagttgctcttgaaggagtgagaaatcactggacaattagcagtctcaaaaaaatgaggcccagtgatcacaaagcacctgtctcacactgaagaccagttctcctctcttcatccacctcttgctgtctttgaaacagaggatcaacaaatggtgggactgtaacctacaagagaaatgagactctttgagtac

SEQ ID NO: 141191 - DNA, 536 bp, Homo Sapiens
ttttttagctgtttatgttttattctgtcctctacatatatttcataatacaaaggtgatgataataataataaaactataaactactaaaagacaaaagtgtgactagttacaagagcttcagtaggaaataaagtaagttgcaagttaaacaaatatttgtttgttctgctcatctgtacctgtatttgtaagttttactcctggctcttgcagaggctttatgccactcttttggaatcacacagtgtgaagtgaaagtgaagtagggcgagctggcatgcagcctggccttctctatttcttcaagttcttttatggaatgtcgttttcctgtctcacactgaagaccagttctcctctcttcatccacctcttgctgtctttgaaacagaggatcaacaaatggtgggactgtaaccttcacaatggaattttctttaaataatattgcacatactgcttcatcaatgtcttctctagctaatacctcaggccagctccgggggaagtcgcaggccccgcggctccgtccc

SEQ ID NO: 141192 - DNA, 543 bp, Homo Sapiens
tttaaatcaattacaaaatgtcaatcaaatttcatcagggggaaacatctagaatgatcatactgagttgaaaaaaatgccaaccaagagaaaaagctgacattctaattaaaatgtgaaaacccgttgtgggataaacatgtgaccagtgataaactttctgaagaagacctcctgaagcgcacacacctacagctgcatcctgtgcgtgtctgtattacagctctcagcataccgtattgaaattctgtttctatgactggagcccgtcccacactctgaatttcctatagatagggaccatgtctcactcatttttacatctctagcagtgtccctgtgataagctgtaatgaagccattactacctcttcgtaatccccagagaccagaggagcccaaagctgaaaaacactgctcgaggatcttaaatgtaaatgggaagatcacacatgtgtacatatactcgtgttcatgtacacacaaactcctactttaaatgccaagacaatgcacatgaagagggctcagaagaatgatacc

SEQ ID NO: 141193 - DNA, 451 bp, Homo Sapiens; identical to SEQ ID NO: 119689

SEQ ID NO: 141194 - DNA, 583 bp, Homo Sapiens
  misc_feature (88)..(96): n is a, c, g, or t
gctataaaattatctgggtttaattattatcaatatcagaactatagaacattaacgtactaaacctgtatttacaattacatgtacnnnnnnnnntgttctttgtgaggagcaattttcagcaaatctgacaaacagcaagagtcattcctattttgggtttgaaaagagaaatggaaatttccaagacgcccccctcctccctctcactccagtgacccttgtgaacatcaatttgcaaaggcctgaggtagaaagggaggtattaacaatatcaggcactcattcttcccctcttatgaaagggatgaatttttaggaaccgttttccatcatttattatactgatgtgccatccatctgcatcattaggttcagtagttaccatgacaatatgatgcctacagcaatctaacttgatagccacatgccagaatgtgaaaaaataggaccagctaagaaagtgagagaaatataattaatctgaaccacattcaaaaaaatgtgcacaaaactaggaccaagagggaaactgctgaaatatcattgaagaggaaattataaagggcagcaataatcaagt

SEQ ID NO: 141195 - DNA, 367 bp, Homo Sapiens
ttttttgtcagttaacagaaatatctagtagtgggtttaagacaggcgtgcgggaagtctgccagttggcagtcctctgacgtaaaagatagcagatactgccacttctgcttctccaagcccctctgcagggaaacacctctgcgcaaggcaggctttcttcattccagacaaggatcaccacaaaacccagtcaacgccggcactcatttggaggtgggggtgaagatgaaatgacgtgacgaatatgagtgtggtttgtaagtacacagtagcattcagtggtatggttgtttcttagagatgacggcagagcacacagcggcccagaccctgttcctccttccctttcagcctcacatacacc

SEQ ID NO: 141196 - DNA, 524 bp, Homo Sapiens
gcttcgttgtttttagctggaatcattagcttccatttttagaataacagctattggctaaattaggctacagtaggccattaagatggatgttggaattaaaaacatttttggaaaaaagcctgctttgagcctttgttataagcccttgggtagagatctgggtcctgtttctgatttcttgtgagccttcactctgacagttttgtttccagaaacacactcttagcctgctcctgaaatgggaacagacaggccaacttcccctctccagtctcccctgcgggtcaaagctttactttcctgtcatgttaagaaagaatagatttaaccttgataatccatgtagtattctgtatttttaccttttccttatctgacaaaaagtgtatatatggcatggaattgattgcacaggcacatggcatgttggcttgtgaaccaattgttaaaatttcaagttaatcattaaaataatatctttccaattaagttctattcaaaacaaaggtaacattctaaaa

SEQ ID NO: 141197 - DNA, 495 bp, Homo Sapiens
cggggccgccttttgttggcgccacgcggcggggggaggggcggcggcctggcccgggtcggggctggtgcggcccgcggactgtcgccgctgcgttcgcgggccgggcctggcgctgccactcgcgctggagtttgcgggagtttgttgggtcgactttggcgccgccccggggccgctcgcgcgctgccagggccagggccagggccggagccggcgcaggggcgggcggatggcccggaagagggaaagcgctcggacccggggcccggcggcgtcttgggccgcgccgggggctgcgtgggcggagttggcgcgagccggggcccggacctccctcctccgcctctcccgggggcggagtcacggtctgaaccctgggcgggcttggtccccggaaacatcgagttccttgaaacgagttctcatgagttggtggagacgctggccctttgctacatggttgtagaacacatgaatttccagatatgagtg

SEQ ID NO: 141198 - DNA, 730 bp, Homo Sapiens
  misc_feature (393)..(403): n is a, c, g, or t
ttttttcatatcaaatttacctgtttattcattccatagcaagcaggatattcactatttaaaacaaatttaagcagatttctgttagatttctttaaatcactgaaaagtaacacaaaaatacatataggtagtaactaagtactgacaaagtattctacctatgcaatatcctattaaatgtctaaattaccatatgtaaatttaattgtattatttactcaatggggaaaatctggattacagaactgaggaaaattatgttttatgtaaattataaaaggccaaagtcaatcatgttgaataaaataattttgaaatataagccagtaatataccatatgagtatcccaagagaaaccctggatagaaagaaacttttaaagtcactcnnnnnnnnnnnattagtaatgttaatgtttgagctcagtgtttgagcatgctggttttacctatttatgctaattttaaaccaacaattgaagtgagaaaataatcatttatccttgaaagtatctttagcatggtcttcctaattaaaaataccacttaaaaaagtgaggcagcaaaagcatgaactggagtcagtggtctgtctgggttaaaattggccccacgatttactacctatgacttcaagcaagttgcttaacctcgcacttcatcccacttcattatctcatttgtgaaatagaggtaaataattaaccctgtactcacagggaatacc

SEQ ID NO: 141199 - DNA, 1004 bp, Homo Sapiens
  misc_feature (28)..(28): n is a, c, g, or t
ccttgaaacttattatccgctcctggtnaaagttcctccgtcgatggattatcaatggttctgaatgtttcgctttagctgatgtcctgggcagttctgcccacgcgctcttcttcatcatgccatagtgtaagatgccaggacagccatcccctagcagctcgtctcaaatatcatgtccatccttggtcggttctggggttctcgattaggagccaggccatttcacaaatgcatactgtccctgagcaaccagatactccagtgagctggcatcaaggagaggggttgcatctggaatctgttttttcctcgtagccattcttctgcttctttggagaatgacgccacactgactgctcattgtcgttggttccatgccaattggtgaaatagaacctcatccggtagtggagccggagggacatcttgtcatcaacggtgatggtgcgatttggagcataccagagcttggtgttctcgtcatacagggcaaagaggttgtgacaaagaggagagatacggcatgcctgtgcagccctgatgcacagttcctctgctgtgtactctccactgcccagccggaggggctccctgtccgacagatagaagatcacttccacccctggctcaggggcctccaggttcacctcagtcttcttggagctcctcattttagcacagaaagccatggcattgcagtcctcttttatatttagatactgcatttattcagctgtccagtgttctccaagaagcaaactggattttcttctctactttccaaagctacttcagagaagcgcacttccgtgtgcgcctgggccaggcagcgccccgtcgctgcgctggctggggtcgaccggcaggctcgctaggcggccagccccgcggggccccagcgtgcgcgcgcccagggctgaggaggggtcgcggcgaggacagccgggactgggcgcaggcccgcactgtctgcagctccaggatactccgcggccgccccc

SEQ ID NO: 141200 - DNA, 536 bp, Homo Sapiens
  misc_feature (518)..(518): n is a, c, g, or t
ttttatttttggtttagaatgtattgtgtgtttctttaagcaaggtaataatgctttgttaggcaaatgttagacaaaatttacagtttcataaactcagaccaaatagttggtagaaggtagttcaagaaagaaatgaacatttcttaaataattatatggcccaggcatctccttcatgtgttatccccagcatacaactttgaggaagatgttaccattcctacatttgcagttgaggaagcaggaacttaggttaaaaaacacttgctcagagtcacaccgctagagttgtctgaacagagatgaatctgaccccagagccttatcaataggtttccatggtcacctttggctggagcatattttaattctagttgacccactttactccatgttgctttggacaagtagaagtctcttctgaacttgcttatgggctttgcaggcaggcaaggtgaagatcacagatatttgcaaactagttcaagtcttactcaaactcaggaggtagattntaggatagaaaactagat

SEQ ID NO: 141201 - DNA, 586 bp, Homo Sapiens
tttgttttttagatagggcatcctctcgagccagagtagggggagagactccagcactagcatttctaatatcaaatcaaaacattcatgtctattagttaaatatagatacttaaaagccaaccccaggcctgctgctgctcagtttccttttaagcctttacattctatgtatttgttaagatctataattcagatcttttattaatttaggcgaacccttcccctaaatcagttgcatgaggccagcagtccatctttgcattaattggctccttccaacatatttgctttagaaaattaaaagcatggcatgtgatcaaatttttcactctccatggtaaagtatcagacagatacaattcaaacagagccccaggcagccaccaaaaggtcttgaatgacagcttgtcaatttctgtcactcgggagcagcttgaaaagctgagcgcgctcacatttagaacatgctgccatttaggcaaaatggtttaccattgaatcaaggacattatgagccagaattttaaatctgcttgtaaaaaacaaaaattaagagagggaaggggttcaacctttgtgttct

SEQ ID NO: 141202 - DNA, 792 bp, Homo Sapiens
tttttttccgctttcaaacccactttattcttttcagaccagaaacattcctcattgcacccccctccctgccctagatctttactgaccaggggcctcaggaggggctgaggagacagtggtatactctgcctccagggacgtggtgctgcagtggcagtggggactggcgcggcccagcagctccagcctccgggagcgtagctggacttgaatggcccaaatggggggccggtggcccggtagggaggggtcctcgtccctgaagctgtaggtggtggagtcaaagctgtcttctgtggcggccaccgactgtttgcacacggggcaggagcgccggggggcttgggagaaccaggggtcaatgcatttgcagtggtaggtgtgggagcagggcaggatcttgagttggtcgccctcctcgtactcatccaggcagatggcacacaggtcgttgtgccacgtgaaggtgcggacctgggccttctggcaggtagacgtcttcaccggccgtctgtggctgtcagcaggcctggggccagagccacaggtggttcaggacaaagtaggctgatacgaccagtgccagggtacagttcagcactcatgacacggtcagcacggggtgacagcccaggtcgtggcacggtgggtcgtcgggcaggagcagcgcgtgggccgacttgttgcagcccaggatgacccgcaggtcctgcgaggcggcctcgctcacgaacactgaggggatggcgatctggcccctcaagtcctcgtagacgtgggtcatgctca

SEQ ID NO: 141203 - DNA, 598 bp, Homo Sapiens
tttaacatgtaaatagcttttttaatatacgtctaccatcagattctcctggtatccctattgctccccgtaggcatactttggacatctctagaagtctccaagactgtttttcatgctgcactttaagatcagcaggggtccagtgaagttattgttgcttccttggaaataacatgacttggaatcatcttccttcctttcagttaatggtagtggtttcatttttcctaggttttattggaatttatggtcacagtagtagtcaaacactatacccaagaggtttgagatgatgatggaataatgaagaatatccacaattctcagttgcttcgagagaacaatggacaccctgcgcccggtgggtcccaagcctggtcactcaatgctcctgggggttgctagatgccccactgcaggtcccacttctgataccatcttgcagttcctgtggatttaaagtccagacatggccttagctgggtcttctgtaagctgcaatccaggtgccagccaggattgaattctcacctggaggcttgactggggaaggatctagttttaagctcactcaagttaatagagttcatttcct

SEQ ID NO: 141204 - DNA, 868 bp, Homo Sapiens
ggatgctatctatttttactaaaatggtaatgcagaaggaaaaggatgtgagcagaaagataaacaaatccacaaaataagaaatactgggctatctacggtagcctcccccttacccgaagtttcactttccacagtttgttacccacatacaactgtagtacaaatgtagtcaacagaaaattccagagataatccactcacaagtcgtatattctgtgccattctttgttgcatgatgaactctcattctgccctgccccagtggcactggatgtgaatcctccctttttccagagtctccccgctgtagatactccccgtccttggtcacttagtcaccagctgggttatcacattgactgtagcggcattgcagtgcttgtgttcaagtaatccttatttcacttaataatggccgcacagtgcaagagtagtgatgctggcgattctgatatgcccaaaagaagctgtcaaatccttccctttcagttaatgtagtggtttcatttttcctaggttttattggaatttatggtcacagtagtagtcaaacactatacccaagaggtttgagatgatgatggaataatgaagaatatctgaggctgagcttgatgctccttcatgggtcccacaattctcagttgcttcgagagaacaatggacaccctgcgcccggtgggtcccaagcctggtcactcaatgctcctgggggttgctagatgccccactgcaggtcccacttctgataccatcttgcagttcctgtggatttaaagtccaaacatggccttagctgggtcttctgtaagctgcaatccaggtgccagccaggattgaattctcacctggaggcttgactggg

SEQ ID NO: 141205 - DNA, 393 bp, Homo Sapiens
agaacacccaaagggccgttgccaaagccctaggagttttttgagccccataattccaaagatagaaacgttcattcatttaagtgatgtagatgttttggttggtttattagatgtgtaagtttataaaaactgatggggaaaaaaagtgctccaggtgaggatcgaactcacaacctcggcattgctccgctcgcactgtcatataagtaccgcgcgctaaccgattgcgccactggagctccggccgcacccctgcgccggggtcttcttcagtggttcatagccacgtgacctcaccggagggccccgccttgtgttatatatgcaaattaaacattttgcattgaccaataggagacagtgcattgccagttccggattctcacgcct

SEQ ID NO: 141206 - DNA, 637 bp, Homo Sapiens
tttcagagattatgaaaattttattaataaagaaaatctgcattacacatatcccctttaaaaacaaccacctcaaacatgtagaaatgctttattttgtatttgctatttgatcaatgccagaaaaatgaaaccacaacaccaaagtacagaccagtatttttgaaggggataataatcatttgagataataaactactagaaaatcagaagaaatgattcaaggtattcatttcaaaggctaaaccactaattcttcatccaaatgaatgtttccactgtgagtcaatacatttgccatcagttctttttaatgctatcctgaatacacaatatacacctaaaaacatgatagagtgctctgagaatagcaagaactgatagccaacatgatttacagaaatttatggctatgtagcaacggttcagagacaatctctagaaaatatgaaggtactcttcatgataggaaaggattggttttgcagggcagcttttaagttcatttctgattgtctttaaataaccactctacctttgtcccttgatctcaccccttgctaaaattttataaacatattccagacatactgcatgcaaaaagggaagtataagaatattaagattctcatgccct

SEQ ID NO: 141207 - DNA, 462 bp, Homo Sapiens
  misc_feature (354)..(375): n is a, c, g, or t
tttggtggaagaaacagatacatcagactagtccagcgtctcagtttccacacttcataacaatggggcaccgtgcacctagtgtctaacttaccacgctgcctttgggccacaaattccatactgtaacagccaattacccaaaacactaaatagggaatggctcaaaaaaggctgtctctgaaaaagcagcagcattttgatgagcaaaaatagtaagagaggattttttaaaacttagaaaaacgaggaaagttgaacccagctaagaatatttctgagacaccccccaccccttgtgatttttctcccgctaggattttcccttgactcgcctctttagagactgctaannnnnnnnnnnnnnnnnnnnnntcattttttaatcccaccaactctcctcgccccaaggccagaggcttggcggtgacagcttcgaacaatgacatcaccctaggtttg

SEQ ID NO: 141208 - DNA, 1173 bp, Homo Sapiens
tttgaacaggatttttaactcagacagtgtaaacatcatgacaattctggaatgtctgaagtttgagatagaagattgtctaagaaaagctgagattgtcttagctgtttgtggtatccgaattcctctggaacatgggcatcaggaaccaagcgatgccactgctactgggcagggtttttatattttacctaaacagagacaaatgacgctgacctaccttaatgaaatttcagaaaaaccatctggaatcagccccatcatgtccagattggaaggtatctggggatcaatgaaacataccagaactacttttcttcccccaaaccaatgtaatgaatgtcaaagtattgatgctaatttagattgtgattacatattaagttttgcttcattaattgtagcactggcagctgttttgtgaacgctgcatattaaactgtaggcagctgacaacaaatatcagcggaaggggatatttaaaagccagttaaattaatcaatgctttttaggaaactgagccaagattaaccccctggtgcttttacccacagaccctcgccaaagtctcccacaaggaacatttgtaggctattttgttttgagatgttaacccatctccgatgccttgctgacattttagattatatatacaagccctataatgaatagcattcacaaaatttatgaggcaaaaaattaaaattgttcaaaagcctgatttttgctggcaaagtttatccatgagaacatagcaattagccccctacctctccaaaagaaaccctacaaccctaaaaccctaaaaccaatccaaatcatgtaatttagaagaaataggttttcagtgtgtacgactgaagagttcattaagggtttgcagctggaggtttaaaaaatcccacttttcgaaaatatctgacaatcaagggcacagagactagcgtaatgctgattctcactggcgcaaacagcttgtggattgcataggccaccacgaaggtacttgtgcctgctgccatttttgactgtaccagggactctttaaatccgagtttcagcaggattgcaggcatgtccacaccacttgacacaaccatgtaaaatatgcccaaggaaattaatgagattccaatgtgcaatgacacgccaacagtgccatactcttgaaa

SEQ ID NO: 141209 - DNA, 867 bp, Homo Sapiens
ttttgcacatcaattaatatcatgtattgttctctgacttcaagttcaaaaacatgttttttgattgatctgaaaccaaagaaaataaaagaagacaaggagaatattttgcatgaactaatttgagcttcttattcattcaaatgttgtaacaattaacagaggtgtactatttggctttttatgctagtatttatgcttgttatccaaatcatgttcacatttaagaagtcattacacattttctgatgtattttatctaacaaaagacatttcttgcttttggaagcaaatgaagacaggtttttcataccccactgagtgacgtgttccactcagtacacagagataagatctccacagttggtagttgaacaggtgaccagaagcacggaaatgcagttcttcaaactgagaaacacagatttggaagaatgcttacaattcttttaatgagtctaagtaattcatctgccttgggaagggacacagacagccagattaagtaaccttttgcatgttcacaggtcaactggcagcaaaacagagaaattaatttgcttctaatactctaggtcttgcttcccacaaaccataaatgcttgatgaaaatacttttaaatatctcccaaaacatgtccccaagctcaactttcgcaccataccttggagtatgctctttactataacttccgtgtgatcagccaggagatctgccttggtaattgcagccagagacaggtagttagacatattcctgcacagttccttgttgcctctgtggaggaatttcactgcaatggggatggctaatgccatcactggggggcggttgtaattctgtaaaatgcaactcatgatatcaga

SEQ ID NO: 141210 - DNA, 573 bp, Homo Sapiens
tttttaaccttggatagccacaattttatttagaatataaaacatggaactcgacttcggaattttagtctagaaatggggacttccccctagcttttatgatttttgaaactcctgcttggacgcaattgtcatcttgcataatcgacagtaattttcaggtttatggaattttgcaaactttaagcaaagcacatcaatcaggctcagtgctgcggcttttcttcgcatcaccgaggtagaatagcacctctactcccagaacttaatccaggcgaatgcagaaggcctttgctggttttctggtttgggtagtctttgggtattcacttggaaacaaggcgaattgatggatggatagagtgatggatggatatgtaataaatataatatagttcaatgacaggatccagatggtgggtgtaggagagtttactgtagaattcaactttctgtgtattttaaaggttttcatactaaaattggtggtgaagtggtgttgtcacacagatttgaccaaatccctgctgcgtattagctgtgagattgggacaacatgcccaatactcaagt

SEQ ID NO: 141211 - DNA, 656 bp, Homo Sapiens
aatatacatttgtaaaaggcaccatatgttaacagagtaaaaaaaagcaagaaaccaaaatggaagcacttactccaaacttcctttttgtacaagtgtatatattttaaggcagatgcttgtctgtgcaaaatacaccagaagaaaatcaacattgtattatatgttcacatgatctcagatttttttcaataccatttgtcaggatatttatttatgataaagcacattaaaacagtttttttctaataaaacataaagaagttgatgaacaatttttaaaaattatttagagatttcattacagacccttcatagaagataaagaaaagtcaatctttttttcttgtttcttcttttagaaatgtccatatcaatttgttcactatgtcaggttggtcttgctgaagccaatgactggcttctgacaaaatagttagcctgaaatagtttttaacataaatctttgtgacttcagccatctcaacctccatgaatgcgtcattctctccccacagtagtagtgttggagtggtcaccatgtgatgtttgagaggcaggcagctgaagatatttcggtaatggttaattgggccacttaatgctccaggctgagataagacataaatataagcttcaagatccctctgtgtaaa

SEQ ID NO: 141212 - DNA, 1376 bp, Homo Sapiens
  misc_feature (919)..(930): n is a, c, g, or t
tataatgaagaagtataactatagattgttctagcttcagaagaggtcctgtcaatctgtattaaaatgttgtgttttcttcaaaatagttcacagtgccttgtgattttgtaaaatatggcccttgaaatcagaggaaccgaagtaaggagttgctcatagatttactataatgaagaattagaatacgattttagtaaaatgaggaaaccataactttgattttgaaaaatattaaatgaggagaaattattctataaattctgtatttttgaagatactgtaaaatgcaacgatgccatatcactagttattggaaatatgccttcattacttatatttaaaatcaatattgactttaacttctaaaacaatcatttgttttctttttcagcagtgggttatataatattctgtaaatttaaaaaatatagaaagattaatttgaaatctgaagtcttacacctttagcgttaatattcaaattctggaaaaagtggaagaagttagtaatgatattgaaagatcacttgaacttccccaaacaatagttctctcatatttttcttttctctcaagacagttaacagtaagtattagtgaaacagtatttttacaaatgtttactgactagaaaaataagactgggttagaaaactctgaaaaatgctccatatggaagtatttgttgtttttatatttttcttgactagtgattgaagagatgaaaaatttgagactgtcagatttaatggggtatccaatatctgcaaagccaattatttgaaggtactaaatgccataaacacaagttgtgtttttcagcaagttttcaagctagctgttttccctgttgaagaattcattgtttagacttgtgacccttatactttcttggcttttgcattgttgccatttnnnnnnnnnnnncaaaggctgcccagtattgttacagtgggctcctacaaccacaagacaacctatatttgtaaaccagtgagctgaataacatggcacaggaagtgtactgagacttaatatctctctagtcttatacgtacgtacatactctttcagctacagcatacactcaaaaaatatttgattgatgaagtgagattaagagtatcctaaatgatctgaaagaaactcaaatataatgtcatgagatcctgaccatcacattgctttctaggcactagtcatgactgatatgcaaacttacataagaaaataaaaatagtggggcagtggccatactcctctataccacagggttctacaagaggccattctaaggcggacgcgtggtcgacgatatcccgggaattccgaccggtaccagcctgctttttttaccactgttatattcctat

SEQ ID NO: 141213 - DNA, 563 bp, Homo Sapiens
  misc_feature (533)..(533): n is a, c, g, or t
tttaaatatataaacttatttattttaaacaaaattaattgtttgacaaagagttagctgcttgtagcatgaagcttgaaaagccagacactgtaaatagtaactgtaattatttcctttttcagtttgaaaatgaacaccatattcgtttcttcacattgttggttcttttccatgtgatggtgttgctgaggaatcatagcaggatacaaggggtttctgaagaatgagcagccaagtttcagataccagtgggcacaagctcttccaaatgtctcctgttctggagatgttcacagtcctcacatcaaaactgagtctttgttgaatgagaacacggtgcctggtgcggccactgctgccaccagggacgccaggccaagccatcattcagtgctgctctgcagcgtgctgccctgccctcctgaaagctgcgtgattcattggatttaatattgtcctgagtctcactccagggaattctgagcacagaacaaacaatatctccacctaatgattgcaagcccaacttncaggacttgacttccgaggccttactgact

SEQ ID NO: 141214 - DNA, 392 bp, Homo Sapiens
ttttttttagcaggcacatgaattttaatgaggggggttgacagcaggtctctgtgcccagagagcttgagaatggtaatcaccagcactcaaggtagtcttggccactgcttctcataagaccagtcggtattttcctctttgccagaaatgcttatcctcatgtaggactggaggcagcaggactgacaatttctgcaatagaggtagggctgttcgttctttttgcaagaggccctacaaattccactgttacccatgcatcgaaggatgtggcgtttgcctgatatcactggttcttctatggccagaaggatggcaagaaacaggtaaagaagtttcatggctggcagacctgagaggaggaggtggctgagctgcacctcgtgccg

SEQ ID NO: 141215 - DNA, 517 bp, Homo Sapiens
  misc_feature (1)..(1): n is a, c, g, or t
nttttattatctcacagttcctatgggtcaggaacctggccttggcttagctgggtcccctgctttagggcctttcataggctgcaatcaaggtgtcaactgggtctacagtcatctcaggtctcaaccggggaagcatctgcttccaagctcactcatatggttgttagttggattctgttcctcccaccgaaggccacagttccttgctggctgttggctggaggccaccctcaattctttggcacatggcctctccatggggcagctcagaacaaggaagtcaatttccactgggcgagacttgatgaccacgagagggaaataggcacaagactggggccacccagaggagtagtggggaggttctgacagcagctcaccaccagggaaggctgaccgcagtggacttcagacctgagaccgttattactgctgttcatagagattcatttgagaagacttctaaaagcattcaataattgggtgcctgggtcactgtggatgaaatgagagt

SEQ ID NO: 141216 - DNA, 470 bp, Homo Sapiens
  misc_feature (397)..(427): n is a, c, g, or t
  misc_feature (450)..(450): n is a, c, g, or t
  misc_feature (460)..(460): n is a, c, g, or t
gcgggagattttgcggcggggggaggagggagaggagggccgagccggcggcacgggaggcccggttttgaagccgcttctctgcccgagttaggtttcgcccagcgcaatttctttctctatgtactttgcgaataagtttcggagcatcggttaacagcctatgggtgaaatttggctttcattcatgaatgagaaattattcttgacagaagtattttaaaagaaaaatctttacgatggcctcagcagtacttagttctgttcccaccaccgcttctcgttttgccctgttacaagtggatagtggcagtggctctgattctgaacctggaaaaggtaaaggtcgaaatactggaaagtctcaaactttaggaagcaagtcaactacaaatgnnnnnnnnnnnnnnnnnnnnnnnnnnnnnnnggaacagcaccagagtgaagcanatgagctcangaatcttgct

SEQ ID NO: 141217 - DNA, 357 bp, Homo Sapiens
ttttgaatataataataattttaatgcattttacagtgtgcctttatcccataagttgaaaaaaacatccttatgactttgttactgtttttctttctcttctctttgcagtgcctccaactattaagttgcgtctgagtgttcgaggagacactatcaaggttaaggcaggagagcctgtccacatccctgcagatgtgacaggccttccaatgcctaagattgaatggtccaaaattgaaactgtaattgaaaaacccactgatgcacttcagataaccaaggaagaggtatcccgaagtgaggcaaaaactgagcttagcattcccaaagcggtccgggaggacaaaggcacat

SEQ ID NO: 141218 - DNA, 498 bp, Homo Sapiens
tcatttttctttcattttattttaagaaggggaaaaattgttattaaaacatctacattattatcaagatactagaccttatgaatatttaatattaaagtgtggtattcttaaatttttaatacacagacattttaaaggaccattaaattgattactgcccagctgagaaatgcagcatccctccccacccaccccgcccccatgcttgccatgccatcttgtccctgcctgccggggggaacacaggtcccagattcagtcctctgagcctcccagcctggggccctagaaggctcacaactgaaatagttaccctcatcattaaaagggtcttcctgtccctcctccccatcacactctgccttccactctctcttccttaccctgtgggggctccagctctggccaggccaggaagccccagatcccaagggtccctggacagatcacaggctgaagatgaaaactctggacttgaatcctgttcttttcagc

SEQ ID NO: 141219 - DNA, 353 bp, Homo Sapiens
aaacagaaccaaggttttaatgatagtgatgttatctacaggagcaagtggggaagatacaaatctgacctctggaaccgtggttggttattgtttatggctacatcttagcagaattcaggcctctcccataattctaattttgttgcctttcattagttttacaaaggcggtgtcagtcctcaaacaatgaaggggtagttttgggaagggctattatcatccctactttaaggttaaactacagactaattcctcccatagttagcttggcctatgctccagaatgggcaagggtagttgttagcttgtgaagttagaagcaaattggtgtcagctatgtcagatttttc

SEQ ID NO: 141220 - DNA, 798 bp, Homo Sapiens
  misc_feature (570)..(690): n is a, c, g, or t
tttttagtttaaaaagtatatttacaagtattagttgtcggccagcttgatctcatacaaagtcatttacatcctcttacagctaaagttttaaaaaagtatcttcacaaagtaagtctcaggcacactaggggttctatcataaaacaccaagtagatcagaatgtccaaacttactagagaagaaaagtggaattattggctatattttcaaattgcattcaaaggaaatttaagttctgaatttttttcaccttcatacttccaagttaatagaattcaaccagaacactccattccttcaaagcctctagccagacaaagttttactggattacttcttgctttccatggatatgaagcagagtcctggtaggcacattttgcatacctgcaaagatgcagaactaaacagttccatctgttccatattaaaacaaaagtcctgtgaaccttggatggtgagtgtaatacttcagcactagcaccaaagcctcaaatatgaaaagataccaagaacaccactagcaaacaaaactaaattcttgaccaggagcaggagctcacacnnnnnnnnnnnnnnnnnnnnnnnnnnnnnnnnnnnnnnnnnnnnnnnnnnnnnnnnnnnnnnnnnnnnnnnnnnnnnnnnnnnnnnnnnnnnnnnnnnnnnnnnnnnnnnnnnnnnnnnnncatggtggcacacacctgcagtcccagctacttggcaggctgaggtgggaaaattgcttctgcccaggagttcaaggctgcagtagctatgatgatggcactgcattc

SEQ ID NO: 141221 - DNA, 495 bp, Homo Sapiens
ataattttaatggacacacaataattatccatgtttatgggtttgcttcctaaatgctttctagtatgagagcaacttagcttatttttctccctggccttcctacatgtgctaatgaattgtccgtggctgcctccaatcccccagcagaccaacaggaggaaaaaaatcaatttgcacttttcctaggaagcaatcctgttggcagagctgactcataaacagcctccttttctgtgttagcatgttgctgagaggccagcgtgacagtgcttctgaatgtggccacctggatttaaggtggagtagtgcctcaactgagaggcccttgaaggaagagaaagtgtgtaaggaagtgcatagagaataagagatccagtatctccagggtgtggaatcccaggcttccttcctaaagataccgtgaagctttcccaagaaagcagagtggatacccagtgggagttcccacccgtatgtcttgaactggaacca

SEQ ID NO: 141222 - DNA, 552 bp, Homo Sapiens
gctgttttcacgccattcccagtttattttatacagtatgttgtttatatacagagccttaagggcaaaaatcttagtaatcatagaaaaattcaaatgaacatttcaaagccacaaagcagtggttctcaaactttagtgaataacctaagaaacatgtttaaaagaaaaataggcagataccctcctcaggttcccaaggctgggacttagcagggctgggctggcacagaatccccatgcaggccctgatgccggaggtccctgggccacccctgaagaaatgcttccctaaggggacctcccggaggccggcagcagccacctccgttcttggcctcagcaggtgctgctctgatgcacctcatccccctgggtactacactgccctagcccagtgcttccgatagtcaaggcttttacagagacatctggccttaaagatcacccacttcagtgcccctcctcacgtcacacaaatgttttactgactgggagatgacctgagagacagaagtcaggtgctgaggtcacagagtcagaggcagggtc

SEQ ID NO: 141223 - DNA, 606 bp, Homo Sapiens
  misc_feature (467)..(467): n is a, c, g, or t
  misc_feature (512)..(512): n is a, c, g, or t
  misc_feature (557)..(557): n is a, c, g, or t
tttttgcttccatccaaaaactttattgagtctatatcagaatcagcctccaggccttctcatgtcactttcccatcactctgttctttgctgttccctggtggttctgactacaagggctaggccctaggacatctggttttctttcttaccccagtccagctcgctgactatccttagcccctctaatcctacgatccccccaacctggagccttggtaaggagttgtgaggttttcagacttgtccatccctccctcttcctcaccccaagctccaggcctctaggcctcagatagatcctccttgggaggtgcttctcctggtggggcctcctcaggtgctggcctgcaggcaacccctccctgtagccatgctgttttcagcatatctttcagcccactgggaaagagatagcccttggtctctcctcccgcatcaatgacccctccaagccccttccagtngctgtttgaggtaccgcaggccaaggagcaccagagccctgcagntaggaggtgacagccagcatgctaacccagtgtgcctgcaagtcnctgaagtgctccagcagcacctcatggcacccttgggcccccaaggttt

SEQ ID NO: 141224 - DNA, 987 bp, Homo Sapiens
gaatgattgggggccggggggaggggcccattctttcccaaggggaggggctcctccacctttggatgggtctccgctaagtggtggcatttcctcccccagggctggatttctttcctccttgatagtctgaactggaagcaaaaggagaaaacctttctccaaacaggagtttctcctctttccctggtcctgcagaagaaagaggagctatcccctcctcagctagcagcaccttgggggcaatgcggactcgcttgctatggcgggcaagctctgagctcatgagggaagccgccaggggcaatggcaccttcaccgagggctgcaacaccagtgactggttcaccgggaactggataggcaccaggtatgagctgacccgtggtagcagtggcttcatcttccgccgtgcgcccagggggagttcggttttgatggtcatgttccggcggagctctggattcggtcgtttctgctgtgattccaagtgctcgggcaattgtggagaccctgggtccagtggcttaaacacctggtccaatgtcaagtagcggttggcactggggtgaatggtccagaaggagaccttgccattggcagacgtctcccggacaaacatgtcgtgcagggaaaggttgtggcggatggagttcttccagcctggcttggcaatgtgcttaaagtagggaaagtggtcctcaatccacgtatagatgtctttcaaagtcatgcgcttcctctcagtgctgttgatggcgaattgtatcatggccatgtaagagtagggtggccgctcagacacagagttctgccaggacgctgatggtctcgaaggctcctcaaccttaacctgtcgctgctccaggtgacaattctccttttcctccatatcctgcttgatgctgcggggcccagtccatcagaactcatttttcgaagccactggattttggaaaggccatttttgaaattgccacccgtggg

SEQ ID NO: 141225 - DNA, 1000 bp, Homo Sapiens
gtagcgaggcctgggtggcgaattcggcacgagggcggcttccctcatgagctcagagcttgcccgccatagcaagcgagtccgcattgcccccaaggtgctgctagctgaggaggggatagctcctctttcttctgcaggaccagggaaagaggagaaactcctgtttggagaagggttttctcctttgcttccagttcagactatcaaggaggaagaaatccagcctggggaggaaatgccacacttagcgagacccatcaaagtggagagccctcccttggaagagtggccctccccggccccatctttcaaagaggaatcatctcactcctgggaggattcgtcccaatctcccaccccaagacccaagaagtcctacagtgggcttaggtccccaacccggtgtgtctcggaaatgcttgtgattcaacacagggagaggagggagaggagccggtctcggaggaaacagcatctactgcctccctgtgtggatgagccggagctgctcttctcagaggggcccagtacttcccgctgggccgcagagctcccgttcccagcagactcctctgaccctgcctcccagctcagctactcccaggaagtgggaggaccttttaagacacccattaaggaaacgctgcccatctcctccaccccgagcaaatctgtcctccccagaacccctgaatcctggaggctcacgcccccagccaaagtaagggggactggatttcagcccagtacaaacctcccagggtgcctctgaccccttgcctgaccccctgggggctgatggatctcagcaccactcccttgcaaagtgctccccccccttgaatcaccgcaaagggctcctcagttcagaacccttagacctcatctccgtccccttttggcaactctttctccctccagatataggacgttccccaagcccgggctccccgggagcccaccgggttttctgggcccttggcagcccaattcgttt

SEQ ID NO: 141226 - DNA, 587 bp, Homo Sapiens
ggttggttaggatcacatcccgtagctgggagagtccactgtctctctctccttctgttaagaccagtttaagtaagttattgatttcagtttcacctgggtacaagatatttaaaccagagctgatggcaaggcagacttccttctgaatttcagggcaaatttgatcttttggagccatcaacaactgccaaagaagcaatcccgaccgtcgaatgatgtctcgattcctttcagtttgtgggctgaagaaaaatttaaataccacctgaactttccctttcatgctgttcttctaaggccagctggcgctgggcattccacagtcctcgcaaggcattcaggcggtattccagcagccgggcataggcattgctctgattcccacaaacagagcgcaaacgttctgctaattccgacgggttcttggtctcaaaggttaaaatctccaggtcggtgtccgcggcctctggggccccgaggatctcgctgggcagctcggccaggtcggtgacccggctcagcccgtcgtgcaggaagatggtctcttccttcaccgagagccactgcgccgagtcagcggccgc

SEQ ID NO: 141227 - DNA, 540 bp, Homo Sapiens
gcggccgcgcaacaaaggagtcacccggcgatgagccccggcacccccggaccgaccatgggcagatcccagggcagcccaatggatccaatggtgatgaagagacctcagttgtatggcatgggcagtaaccctcattctcagcctcagcagagcagtccgtacccaggaggttcctatggccctccaggcccacagcggtatccaattggcatccagggtcggactcccggggccatggccggaatgcagtaccctcagcagcagatgccacctcagtatggacagcaaggtgtgagtggttactgccagcagggccaacagccatattacagccagcagccgcagcccccgcacctcccaccccaggcgcagtatctgccgtcccagtcccagcagaggtaccagccgcagcaggacatgtctcaggaaggctatggaactagatctcaacctcctctggcccccggataaccttaccatgaagacttgaacttaatacagcaagaaagaccatcaagtttaccagttgaagtcttg

SEQ ID NO: 141228 - DNA, 486 bp, Homo Sapiens
agaatatatttagaacagaaaaaaaccatttcttctagaactaagttggtctaaaagtgcatatcttggtaaggctctgtgaggaaatgacctaatctggagagaagctgctgggacactcgtctgtgtgtggcctgtggctcacaggggcaggtattctcagaacgcacatgggataatcaccatcctggtgtgtccaggctctgggaacaggctcttcctcgtggctttcacatgagtttcctggtgggctatgtagtcacttttctgcatccttcttttaaaggctcatgaatgtcaaagtaacacagaccctgagatgaggcaggaaagttgtatcggaatgttttcagactatcaaccagaccaaacgttctggaatccataagatccagggctggggataaatttaatctattaattattcttctgaagttggcagctttgaaaaagatgccctgagtcagcatagtcattctaaccaaa

SEQ ID NO: 141229 - DNA, 614 bp, Homo Sapiens
tttccaaaaggtgacgagttttttaaataaaaattttgtgaaaaataaaatccaaaatcggcaaagcacaaaacagcaaaagaacatgaaatgctgctccaagcaggaccctggatagggaccttcattgctgatgggatgacacaaattaactgtacgagaagtctgggagacgctggaaccgatggtggcttcgcatgttcctgtcaacccactgagtcagactgtatctttgcagatgtttctgtcggcgggcgtagtttcgcgtggtgaggtccgaaggatgctgccattttgagtgctgcatatgatgaacttgatccatcaaggcacaaagctcccccgagataccttggttagtgtcctctgggtcttctatatgagcaatgacactcctgagataaagctgcttctgctgttctagatttgactgtgaaaacgtcggaacattagtcctggtcttagtttgtagaacaggaatgactttgcctagtcttctctcatggcctttcatcttcccagaatccttgttaagaacatcctgtttgtttgatgaggtggaaacaaccagagatctcatttcacaacttgacttgtgtgaaccaccatttctg

SEQ ID NO: 141230 - DNA, 427 bp, Homo Sapiens
atttatgtacagaaaagagccatggagaggtgaatctccatctttggtttgcctgaataacctctttcttgaaatacaggatgtacaacttgcaattaatttgtcaccattctttgaactctcttggcccttgactaggagctcacagatgtttttcatccatcagtttagacagggtttgttccagtgtctttctcttctctttcaaatgactcccagaatgcccactttccaaaatccatggtttttaataggtagcctcaaaaaaggattataatttattttaaattattcctaccctctagccccaccaaaagatgcttatgaaaaaactccccaaattaagtattttaatcttatggtcagtgtgtcctcatatctctagaaagggcacctacctggagaacctagggcaggagctgaggtt

SEQ ID NO: 141231 - DNA, 736 bp, Homo Sapiens
  misc_feature (620)..(620): n is a, c, g, or t
  misc_feature (690)..(690): n is a, c, g, or t
  misc_feature (714)..(714): n is a, c, g, or t
ttttaaatctaagtacaatttcatatcctacacccaaagctctatacatttggtttttattctgaatcaaaatgaatttccgatagtgaggagagtagagtgagggaatggatattccctcacaaacagattagtgcagctgccacactgtgaagaactagtcccactctgggcaccttgggacttgactaatcccaggtggttcacaggcagatcctctgtcacactctctctgcatccacactggagccaggatgtggtgagacacggccgatactccaaatccaacaacctgcagtcacctccaggacatgcggctctaacttttatctgagtgcttgtctgtgagggctgatccagccagcctttggcaaagaatggtgtaactttcctccaccttctttaagtgttcaaggtcagcctctatcttatgaatgtactccatgatctggctctgtgaatctgcacaagaggagggactctggatctcaaaacaggaatactccatagctccccagcgctgctggaccagaaattccggggtgaatggtgaaattgccccaatcggagtgagtatttctgagggagaatgttgcttgctgggtgggtgattccacagncaggatgcctgtcatgggggctgcagggaagtgaggaagcaaccctcctcatctgtggaactcttctgcnactggtcatagccattcaagatcnaatagtttcctgggatgcgtaa

SEQ ID NO: 141232 - DNA, 579 bp, Homo Sapiens
gactttacaatggagcaaaattgatatgtattcactacactccttgacttatgatggggctatctctagataaacattataatttgaaaatatcatgcatttttgacttcagatttttttacttacaatgtgtctctctggacctaaccccactgtaagtcaagaaggatctatatacgtttaaatgactttgagggactaaagaagaaaagaggaaagcagcctctgcacaaagaaaaaaattagaagtggtcacaaagatttaactgagcagacaggccaaaaaaagctcgcataaaactgctgttttcttgcaattaatggttaagtgttgtcaatgactgtgctgagtgacagacacaccattcaccgagtactttcctgtattagcctcatggtggctggctttcttgctgctgagtgttcttctttttctaatctataatttgtcttttaatttatgaaatatctcttattttaacaaaataataaaagagaatgaaaatacatttttaaaagaaacttttctctagattgagctttatcagctacgaacctgccatgtgaacttgaacaagc

SEQ ID NO: 141233 - DNA, 461 bp, Homo Sapiens
  misc_feature (442)..(442): n is a, c, g, or t
ttgcctcttttgttaaacagcaacagagctctgccactttggccaaccaccctcctttgtcctcttccttttccctcctgccaagtgtcctattctcaaaaggtctaaatcactgccttccagcttggtgggcaacctgctgggggccccaagtgaggtggggaggggctccctagctatttcccagtgacctctatcacatcatcgtctttatcctcatcatcattggagctgaacccaacctcggcaacctcatgagagtcaaatggaggcacctgggaccgtagggggccaccagctgggtagcctgcatgtggggacatgtagcctggatagatagacatgccccgcgaaaggttgctgggcaagacaggggaaggaaaaggcgcaaacatcctcggctcggacaggagtggctgtgagaatgggagtgaatagctgngtagtatccctggcacaga

SEQ ID NO: 141234 - DNA, 1372 bp, Homo Sapiens
  misc_feature (303)..(334): n is a, c, g, or t
  misc_feature (670)..(670): n is a, c, g, or t
  misc_feature (1183)..(1226): n is a, c, g, or t
acaagttttagggttttggggttcgtcggcgtgctcgagtgtacattttaaaaatcgtttaatggaacataaactcctttggaaaaacattcagctaggtgataacacccatagaaaaaaacgccaatcttgtgtttatcttttttaatttggcatttgttatttgcatttatattaaagcaaagtgcatcttttctttatttttcttgtttatacacattgcacaatacataaataatgatgcttataaaacgtctttatatttacaagtaataatatatttatatataacataaaatacannnnnnnnnnnnnnnnnnnnnnnnnnnnnnnncaggagtcctttctctctcaaagcactacaatgctaaatttccaatgagaatgcttctcttgttcatttaaacctttgtagtttagaaaattagcttatgttaaagtctaaacatgctcattgagctaagaacaagtggtcgaagtatcatacgagtgtatgagttgtagaagaaatgaaagaagagttaggtgtcagcctaggaatggtaccttgggttatgacggaccgaatccttcttggaagggaaggggactgctaagcatgtccctcccagggacatccccgcttgctggcctaatagcagagcttaacacacaggatgggagcaggcangtgctgagctggttttctaagtccgggaaaaacctgatgtcaccagggcaggcacggggagagctgaggggagagggcactgggtgagcaatactgtgagggggctgccccggcagcccttgggaagcccatctcagggagatccaggagcagatggccaaaaaagaaagacgctacaatggcaggggctggcaggaagggaataagacaaggatgaaaataattggttctggttcggccactagcaggctcgctgctcagaagcctgtggacaggcccgtgtccttgatgagggagaggaggggcaggggctttcccaggctggggacagagccgtgctcctggcagctgctgggaccccagccgccagcttgcccaggtactgcctctgccccactgagcgtgtccaaggggcaggagagacaccgcttgggactgcaaacctctctgctggggacatccataagagacacaaaacaaagagcacgttgtctccccatctgccgctcctgnnnnnnnnnnnnnnnnnnnnnnnnnnnnnnnnnnnnnnnnnnnncctgacaagtgaaatgatgaccgccccccttcatacactgtgtttggtggtgcttggatttctgcttcccctcttcctatcagggtgtcctgccgatcatacgtgccccccttcgtgccgattaacgcccggcctcgaatcctgcc

SEQ ID NO: 141235 - DNA, 975 bp, Homo Sapiens
  misc_feature (198)..(234): n is a, c, g, or t
  misc_feature (897)..(922): n is a, c, g, or t
tttggtaatttcagttttaattcttaataggataaaggggacatgcacattataaatcaatgctctgtgttaacaaataatcaagtaagcagagttgcaagtattggctaaaatgaattttggatatttttagctaccaaatttctcgaggcaaggcagacatacatctggacctgaatatctgcattattagggaannnnnnnnnnnnnnnnnnnnnnnnnnnnnnnnnnnnnaaaagtaggtgccaaattaggtcacctgctgtctgggcaatgttattttttgccataaccacaaattgaagaaaattgactgctctttttccttagtcaacatgctgtgcttccagccccaaacatctttgagaagttgtttagattcatgagcaatgcctctgtccccaacaggctaagacattaggcaggtccctgcacctctggagtcctcagttccctgcaaagtgaggaagctagactaagtaatcgttaggctcccttccagaccgaccaatctgatggtattagatgcaattgctcctgaattagggcatgaaatgaattcagctttggtgcaccaatgtgatgactctgcttcatcaaagcctgagcacgcgataggcctagcaccatctcacacagagacaaagggcaaccctctgcttccaaaggaatgacacaacctgtttctgaagtgattcacatcatctttacttttgaacaacccaatgctcagaaaacaatctaagaatcttcgctgactttagggatgtaagatacggtttcttgacagtatttgggattgtggaaaaaagcaattgaggaaagggcatctccacaacgcaatattgaatttagtgcccaaggtccatcacaggaatccctaacgatccctacaannnnnnnnnnnnnnnnnnnnnnnnnnaccctgaaaataaactgagaagttagtattgggataactattccccttgacct

SEQ ID NO: 141236 - DNA, 435 bp, Homo Sapiens
tttgcagtttgaataactgagcctagtttttatttatggagggactgcccgagggccttcagtccataccattctatttgtccttgccaccagccaggtggtattcatctactctatagaatgactagcaaaatttacaggagcaggagtgggaaagatacccagaggtgctgacagatgttttgcatgagagatgcaggagctgggccattttctgctcttttcagtagttttcttattaaggtgaaggagtatggcaatcaactgcagtcagagctgtctggcaggatgtggcagacgcagtagtccgtcatattcgaagtgtttgctagttcaggagagcctcaccagattattttccttcatgagtaaagatccagtgatggctctacactggtcggattcagagtttcttttcccttttctgccaccctg

SEQ ID NO: 141237 - DNA, 499 bp, Homo Sapiens
atgactatatactccttttaagaagcaggaaagcaggtttcctgagtgatatgttgaggcacaattattttttcctttttggttacttggtgtctttatttaagaggcatgaaattttgagagatttgggggctttgctaacctcccttatgctctgtatacaacacttctccatcccccaactggtgtcttaccccaaatcagaccatctgagcccactactatcaaacaaacaaacaaaaactgttaatatattagccataatgtttttaaatgataaaggatgaaataaattcccagtgctcatcatgagggaaacatgtgactatacctttcctatgaggaaagccaggttatacatagagttcctttgtcatatctttagacttgatttgagtagacagcaatgatctttacatagcttagtgttctgatggcaaaatattgtatatgataataattatgtcctatttatttgagatttgtgtttaaaattaaa

SEQ ID NO: 141238 - DNA, 842 bp, Homo Sapiens
  misc_feature (49)..(49): n is a, c, g, or t
agacttcatggggtttaatagtgcttttctgatttttggtagtcattgnaagaaggaagttgaaaagttgttgtatactgtaacgatgtcctgcccatgtcctgcctgaataccatgattgttaatggaaagtatctttaataaagctggatacagttggctggggaatgctgcctctgatctttccccacaagtggggtacctgggtttatccaagtctcttggaacagggtacgttctgctttgaggtactccatgtacagtctaatgatgatctttcactgatttatagtcagcttccaaaacacacagtgctaggtgcagttaggaaggattccaggagtagacttagctgatggtgaaaggctgggagtatggagtgatttctgtacttggttatgcagcattccctgcagtgtttgttttttgcatgactccgaatacatgaagtgtattaaatgcagatttttggtagatctgcggttttggctgggtagctgacaggagcctctctacttccatctgcatttgcaacttctataaaattagcaaattaatagactcatgtcagagagtgtctctgtgaatgtgtacacagttgtccatttgtaaggtagatgacactttgctcctaagtagacctgcaaacaaagacaatggggtctttcctgattcctttagtttggagatgcagagaaccccacgtttctctaagtgaaatggcaagaagttatttgttagaatatggaactggtaacaaattcatgtttgcaccttgaatttgctttcacagacctggctgtattgttggacaggaataaagtaaattggagactaaaaaa

SEQ ID NO: 141239 - DNA, 578 bp, Homo Sapiens
ttttataattaactgtttttttcatggttatcaaaccattgacataacgcaccagccagtgcattcttttccactactatgcaccattccaatacacactagtggaacttttaacaactagactaccattttgtaccagagtctatctgtacccatcaaattaaatattaggatcctattgctagcttgatggtaaataagcatattttccaaattcctatgaatctcctgctgctttgaattgttcctagtacgagttgttacttggttgagttcttcagggaagtagactctgagatgggagtgtctcatgcagatcagtaggcagtgttttgttatcaacacctcggtctgggcttcttttgtctagttttttccatttctgcctttctccacatagttcccatcccaggtttgtgggactctcccttactattgattaatgagcatgcttcagcttgtgttgactacaaattttaggtgatggttgccttgctaattactgctacccaaggaaggttatatagctgttaaatctatacttgttgcacatgtgcatttcttaggaaattctcctt

SEQ ID NO: 141240 - DNA, 592 bp, Homo Sapiens
acttaaatcaactgtctttaattggacaataatcacatgttgggggggtcaatttgctctaatgtgtctttagtcttgactatcttccagtgaatatacagtcatgaaccacgtaaccatgtttctgtcaaagacataccacttacatgacggtggtcccataacattgtaataccatagttttactgtacctttcctatgtttgtaaacacaaatactcaccactgtgttacaattgcctgcggtattcagtgcagtcacatgctgtacaggtgtgtggcccaggagcaacaggctgtaccatctggcctgggtgggtcataggtgtcccatctaggtttgtataagtgcactccatgatgttcacacaataaagtcaccttacaatgcatttctcagaatgtttccctatcattaagtgacatgtgactgtattatttctaactgccttatacatttgtaacttgaatattgaaatattaaagcatactcgaagttgcattattctaatctaagaacatatacacattaagagtcaaattaagttaataattcaagtgataaaggcactgaaattgatttgagctattga

SEQ ID NO: 141241 - DNA, 626 bp, Homo Sapiens
tttgagaaagatccaatttaattctaataatctttaacagaattgcccaaagatagaatgaattgttttgagagatggtacagttagctgtcagtgggagtgttcaatactaagcaagattcactcgctcaaccattgagtgatgaccacatgcaggcactgtgctaggctctctgtattttcagtaagctattgttgtacaacaaagcaccctaaaacagtgtcttagaacaacagtaaatgtttatgatctctcacaaagtctgtgggtcagcagcttggcgtgtgtgtttctggttcagagtctgtcatgaggttgcatctgaaggcttggctgaggctggaggatctgtttccaaggtgaatcactttacatggctggcaagttggtgctagctgttcggaaggggcttcagttcccccctgtgttgacctcttcacagggctgcttgcacgtcctcccaacatggcagctatcttccctcagaatgagtgatccaagagaaatcaaggtaggtgccacaatgccctttatgacctcagcctcctcctgggagcacagggcatactatgataacagcaggaggacacggcgtccccatgcaggagctgcttttgatcctgcc

SEQ ID NO: 141242 - DNA, 506 bp, Homo Sapiens
agattagcagattttggggtcagctgggagaggcgttaacttttcttcgcacactcttgctttgtgcgctcaaccacagtctgaattctcgcagaggcgttccttgagtagcccttggccacactgctcacctccctgcagaagtcaaagccccagccctcctctgcgaatcccgaggccagcctggttggttaccttctccccttcgccctttactccaggccgtccagcatcaaacactagcctccacacgtggaaaagaccctgactcccacagtagactagtcttatgggagtcctggctcttgggccaggctgcattaggaaaatggaaaccagactgtcttcaaattcttctgcctagccttagccattagagagaggtcctgctaaagatggactgcaaatgcgcttgatggaaggagatgtcaattccactgaagtcctcatttctgctgtaggtgatattatgtcgtgactttaggagaagtaatggtgataccaaa

SEQ ID NO: 141243 - DNA, 568 bp, Homo Sapiens
aatactccttatgttaatgaggtatcaactgatgaagctctcctgaaaaggtatagaaaagaaataatggatcttaaaaaacaattagaggaggtttctttagagacgcgggctcaggcaatggaaaaagaccaattggcccaacttttggaagaaaaagatttgcttcagaaagtacagaatgagaaaattgaaaacttaacacggatgctggtgacctcttcttccctcacgttgcaacaggaattaaaggctaaaagaaaacgaagagttacttggtgccttggcaaaattaacaaaatgaagaactcaaactatgcagatcaatttaatataccaacaaatataacaacaaaaacacataagctttctataaatttattacgagaaattgatgaatctgtctgttcagagtctgatgttttcagtaacactcttgatacattaagtgagatagaatggaatccagcaacaaagctactaaatcaggagaatatagaaagtgagttgaactctcttcgtgctgactatgataatctggtattagactatgaacaactacgaacag

SEQ ID NO: 141244 - DNA, 431 bp, Homo Sapiens
cacgtttggaaatatcaatactataattccaaaaactatgccagctgtctcaggctgtgcgtgtaagatgattgtaaaaagaacggagaagacaggagggaagaggagaggaaagcgtctttttaattctcctgctttgtaagcacaaattcctatctatcagcatgtggattccagccacagccaaccagaattgcctgtcaaagaccagaaactcagaagactagaagaatatcctgttgcagaaagatctcttccacttctgcttgtcccccagtcattcagcaccagatacactttggtaattctgtctgctgatttctgatcagatgcatttatcggctcctaatgtctctccttcctccttgactgcctcttccgtgattgatagaataagctaagcacggacatacagacatggaaatgcatta

SEQ ID NO: 141245 - DNA, 660 bp, Homo Sapiens
  misc_feature (542)..(542): n is a, c, g, or t
  misc_feature (638)..(638): n is a, c, g, or t
  misc_feature (640)..(640): n is a, c, g, or t
gccaaagcatgccaaaaataagtttaatgagttatcaatattatcagcatgatctcatcctgctggattagaacttcctgtgtttgtgccctgttctgctgcttgattccgctgtggcaactatgtactactcatctttgtgccccaacacagcacctccaacactggagttcaacacatggcatgctcagctggatcgctgttgctggggtcttgggctggcacggctgcatctgacacgcaactgtccacacgtcctttgggaggttgttcaggatctttttctggggcttttgttggctgcatttccagtaactttgtctgtttttcaataaaagattccatcgcagacatggatagagtctcagactccacattgccttcctggagacaataaagaatcttgtcttgtgcttcagtcacacttagtgctggagaaattttactggatgagaacctcagcctagacttgctagccttcttgccttctgtctggggcttgctttcggtctcggcctcactcagctcctctgtggggctcntgggttcagagcgaggaaacgctgtctttcaggtgtccacaatggcactcaccaccatcttgtctattctagagaccataaatggtttcttgacananggcatacgagcatctgtgtc

SEQ ID NO: 141246 - DNA, 557 bp, Homo Sapiens
ttaagaaaggaggtggaattttaatataaagaaataaatgcatattttaaacagagtggagccccttttcaaacaaagcgttacctagagccccagtatattaaactgatcaaagtgtaacttctgtggttgggtcatggtccactcagttttccctgagcttctaagttggcttcagaagcacttctgcagaaccctagaactctttgaactagggtcccaaagataagacgaagaaacttttgcatgttttcggtacatagccatttccactgttctgttagtagcaagaggagcagatccagggctgtgtcagctaactctgtctctgttcctggatcgctgttgctggggtcttgggctggcacggctgcatctgacacgcaactgtccacacgtcctttgggaggttgttcaggatctttttctggggcttttgttggctgcatttccagtaactttgtctgtttttcaataaaagattccatcgcagacatggatagagtctcagacttcacattgccttcctgggagacataaagaatcttgtcttgtgc

SEQ ID NO: 141247 - DNA, 696 bp, Homo Sapiens
  misc_feature (552)..(603): n is a, c, g, or t
aattctgctgcacatattctgatgccatgtgtctgtgcttaattaactaagaccctataaaacgtgtttagtggggactgtttgatatagttgccctctccattcctctatttgcctgattttttcagtttccctttctgtattttactactaaattagaaagcactggttatgtaataagttactacattgctttggttgagtaaaaacaagagtttatatttttcttgtttcttattttcttaacccttaactcctgctgaggtcataacaacctcagtctaagctctgtgtccatcatactgttaacttaaacaaatgggtggtgggggtgggaagggtaatacagtcctgccattgcctaccagtaggagagtccaaacagaacactcttttgagtagcaattatttaatttgcccagtcaaggcaccgtgtttatatactatttcacattgaatttgattatgccctacagacctggctggtcaaggatttgatatacacatattggcttgggattcgagctttcttttttatttaaataaaaattnnnnnnnnnnnnnnnnnnnnnnnnnnnnnnnnnnnnnnnnnnnnnnnnnnnntgggtatgttttaaggattttttcgcatgagcgcagctgttgcgataaattgaccgattgggaggtggtagaagcactgaatgaaggtgaggc

SEQ ID NO: 141248 - DNA, 481 bp, Homo Sapiens
cttgtatttttccaattagctcctcctttttccttccagtctaaaaaaggaatcctctgtgtcttcaaagcaaagctctttactttccccttggttctcataactctgtgatcttgctctcggtgcttccaactcatccacgtcctgtctgtttcctctgtatacaaaaccctttctgcccctgctgacacagacatcctctatgccagcagccagccaaccctttcattagaacttcaagctctccaaaggctcagattataactgttgtcatatttatatgaggctgttgtcttttccttctgagcctgcctttctccccccacccaggagtatcctcttgccaaatcaaaagactttttccttgggctttagccttaaagatacttgaaggtctaggtgctttaacctcacataccctcacttaaacttttatcactgttgcatataccagttgtgatccaataaagaatgtatttgg

SEQ ID NO: 141249 - DNA, 409 bp, Homo Sapiens
tctctttacttttggagggaatatgagagcacctcagaggttaggaggagaccagtccattaaaacatctttttaaccgtggcaaagcctatggttctcaaacttgagcatgcaccaaagacccctggagggcttgttgaagactgctgggccttgcgctgggagtttcggattcagtaggtctggtgagggcaagatgtgctgatgctgttggcctagggaccacacattgagaattcctgctctgggcatctccctttctctccccattgcttcccacttctccaccttgccaagattgcttctttgctgaatgtcttcatgacatgccccattcttcaacactgtactttaaaaattttttattccctaaatctggcaattgtaccaagcatttatgatgtctact

SEQ ID NO: 141250 - DNA, 527 bp, Homo Sapiens
agggtaggcattaatgcaagcaagtggtggtctgcatagctgagcagagtctgctgtgtttctgataaattgtgaagagccatagacctttgcctaatgaagggcctcaagctcctgctggacattgtaaactgctaggagaagctgagtgaatattatcaaatgccttaacaaaactgcattatatgaagcaaattaagtcactggtttccacgtcctccagtttctacaataatactacataaacagagaaaaaacaggatccggagacaaagacaagcctggaaataccttcaacactgttaaataggtccatttccttatgctttttctcaataactgaaatttctccatttccctccatttcccatgatgaagtttgcccagacccattggatgatgatatcacctaggatatcaccaatactatcagctttcttcactctgtgactgtgtagttctgtaggggggttgggtagtttctctggaactaataagaagctagaattgtttgcttcatgaagagt

SEQ ID NO: 141251 - DNA, 643 bp, Homo Sapiens
ttttttttagtatttcacttaactctttagcaatcgtcagagtcttcacaaccagaagtcctccaaatccatcaatctccctgtgtctgcaatggttttaggtgacttgcagacattatctcttagcctccagtcactgtatcactcctcattccttgctagcgctgtctttccagatcgtgttactcatagcagctgaactcagcttgtcccgagtactgcgatcccgcgtactgctaatgggaatatagttaacccaactagtatgaggtccccagtacacagcagctccaagatcaaggcgaccgagtaacactgcttgcctagactcaggccaagttcggagagtgatcctggggttattttagaacgtgtcccttgcttcccagaaaaattcagtcgttaactcaagtccagatgcccaatgaccattcggataaggtgagctaaagcttcaatgccttgaggggcttggcagggctcgggctcatcccggagaagcagccccgctttccagactagcagttcccagggatgggtgtgtgctaatcgcaggccaacaagcccagcgcggtacagaggtcccattgtgaccggaggcgagaaaccccgcctaagcaacctcaccagcgcaggacccgcc

SEQ ID NO: 141252 - DNA, 626 bp, Homo Sapiens
cagcatgatgtgcttcattcaccaaggtggcagggagttgccttgggctgtaggagggacatgaatcggggtggggagagctgcctgctcccaggagatggggcctgggcacctgggatggagaaggctgccacgggacaggtttcgcaactagattttaccacggtgtgagcagtgtttgaggtatttgcggttgacatgttgaggtttaaaagcaccaagcaggctctcccagctgcatccacttcatggccttgaattgatcctgcgttcaccctctagagaggggccaagtcaccttcttcagctgccagcccctatggtccactctgaaggacgtgaaggtccatggcgttgcttccatctcttcttcctgctgatccaggccaggcctgtcagagtcctccctggtacttctgatggagctgtttccatggtccaccccacagctgcagctacacgtcccgcagttcaaggaagccatatccttccgggcattttcagcttttgcgtcccccttttcaacaggacaggtgtcccggttctcacacggactcttgcccgcgttctagggggccgtccgggaccgggagatggaggatgaaagtttagttcccccagccggg

SEQ ID NO: 141253 - DNA, 474 bp, Homo Sapiens
ttttttaccgttcctgtcagactgacttttattcaagcactgtcacattgtcagctaaagggaaggggagagcagacgtcgaggtcacgttcgaagcgaacagcggggagctgaggaaactgacgtccgcagctccagcctggcttagcgttaacacctgcagtagaccaagcctttctcccacagaggagtcaacaaatccatcagagatctttttgacctttccgttgccccctcgtcctccgacgtcactcttccggagatggtgtctggggtggcctctaagccttgaatgtacccccaaaagagtaagaaggcctgggtccccatgaggggccgtcggcctagataccttgcccgcgttctagggggccgtccgggaccgggagatggaggatgaaagtttagttcccccagccgggcctgggagccggcggaacgttatggggtgcgtgtgagaatttggggttcgcg

SEQ ID NO: 141254 - DNA, 365 bp, Homo Sapiens
  misc_feature (62)..(207): n is a, c, g, or t
ctcaaaaaccgagtgaaaactacttttgtggttaggtttaatgaatgatggacagttgtatnnnnnnnnnnnnnnnnnnnnnnnnnnnnnnnnnnnnnnnnnnnnnnnnnnnnnnnnnnnnnnnnnnnnnnnnnnnnnnnnnnnnnnnnnnnnnnnnnnnnnnnnnnnnnnnnnnnnnnnnnnnnnnnnnnnnnnnnnnnnnnnnnncaagagagagagggtgggagaaggtcagagggacctttctgtttttgtggttttccttaattgtcttctgcttaaaatactcagtatgctgaggggccatattttggggtagcatttcctgaactgcatcagcatctagcatactggtgtgtctattt

SEQ ID NO: 141255 - DNA, 533 bp, Homo Sapiens
tttatttaggaaatacatacattcattgaatgtttagttattgggggggaaggaggagctgaggacactgcaaagaggagggtgggcttcatttcttgctggcttttgctgcaaacttggtgaccttgccagcagtggaggacttcttggggattcaattaaggatcaattccagaatccctaacagagtagtctaccctcagccccactcaggcctgggtcacctcccatcttgcacacatcttgtaggggcagcctcctaccaccgctcctgcattgcctcttcccacttcggtgcctagctcagagccagggacatgaaaggttaaactgaaaagtaaaactgatttgcccaggctcacatctcctggactaattccttggctatatcgggtacttccaagcagtcctgaccctgacctttctcctgcattggccatcccctgaccactgggagcttagacagcccctgttcatccaatcaacttctatccccccacctctgacccatttctagtacaagagatcctgac

SEQ ID NO: 141256 - DNA, 1264 bp, Homo Sapiens
  misc_feature (39)..(39): n is a, c, g, or t
  misc_feature (41)..(41): n is a, c, g, or t
  misc_feature (136)..(276): n is a, c, g, or t
  misc_feature (344)..(345): n is a, c, g, or t
  misc_feature (352)..(367): n is a, c, g, or t
  misc_feature (1168)..(1202): n is a, c, g, or t
gtcccatccccactcatgcgcatccacttccgcatctcncncacccttccccaagcaccatccatcttcttcggcgccccatgcgctctcctccccatccgctgtcgcctccccacccacgcactcgccaccacannnnnnnnnnnnnnnnnnnnnnnnnnnnnnnnnnnnnnnnnnnnnnnnnnnnnnnnnnnnnnnnnnnnnnnnnnnnnnnnnnnnnnnnnnnnnnnnnnnnnnnnnnnnnnnnnnnnnnnnnnnnnnnnnnnnnnnnnnnnnttttgttcttacgcaaccgcccaccacgcgtttcgtcagggaagcccccgaagatgaaagaaaaaaanncggattnnnnnnnnnnnnnnnnaatccaaataatcgtggtctaggtaaccattcggggtaaatgcttcctttgctcactcctgtaataagaatgagcgcacacagaactgtatgtccaagtgtgtgtgccagagacgctcacatgcatcacacacacaagcacatacacccacagggacagacgcacagccaggttgtggtggttctaggcacttcatatccacgttcttaagtctgccaccttcccattacatttaacaagttacttcttcggcggcaggacgttttcttcgaagaagccctcattgacaacattccccgctgggaagtatctggccaccacaaaggaggacccgtcacttgcggacgccttccccacgcccatcttcttggtgttcttccataccatggccgtgaagtgtccagtccccgaggtgaagccaggctgctggaagttatagttcttgatttcactgtaccatctatcagccacctcctttcctgtctgatcataggatgcccatgcaaggttctccccacactggccacggctggactccgggctgtgcttgaggatcctcgtgctggccagggcctcagaatactgttgagcctcccggttgaggttcttgcagagcttcagtggggggacgccgtgcttctgccggtactcattgtgggccttcaggacctcattatgaaactgtttggaagctgacttgcccatggccggctccgcgcgctcctcgctccccgcggctgcgctgcactccccggccgtaatggccgaattcccgggcatatgtccggtaccgtcgactgnnnnnnnnnnnnnnnnnnnnnnnnnnnnnnnnnnncggccgcttcctcgctcactactcgctgcgctcgtcgttcgctcgacagcatggcccataga

SEQ ID NO: 141257 - DNA, 335 bp, Homo Sapiens
tttttcgctgtgtataattcagactttattgcttattaattatgtcactccacaaaattttaagtaaacagacattgagaaaatatactgggagtgttaaacagatgacggcaatattgatgaggctgttcaagtgttttacataaggtaataagaggtaccaccatcaccagaacccctacaaatttttacatttcatataaaaagagtaaaaatagttcattggcatgtaactagcatcattctctgtaatctatgagccataataagcctgaacaatttcagtctcttcagagcaaaacaaagtattttattccactagcagatgtttctcc

SEQ ID NO: 141258 - DNA, 432 bp, Homo Sapiens
  misc_feature (277)..(305): n is a, c, g, or t
tcctgtggtcttgacaatttattggaataaaaaacatgtatcacttattgacagagctttgtgttcaaggcacattcatacccatttcctcagcagaacctcacatccctacgaattagacaagtcagtcattattctgcagatgaggaaactgaggctccaagaggataagtgacttctccaaggtcataccactggaaacagcaaagtcagagctagaatttcggggctcctgagatatccagaattctttcactgtgcaatgctgcctctccannnnnnnnnnnnnnnnnnnnnnnnnnnnnagctttcaagggaaccctgaggaatcctccctcaagcctgcctccagagggagttcagttaccagactggcacctaagaatactttggcagaaggggtgggggtcatggctggattccctgggccag

SEQ ID NO: 141259 - DNA, 392 bp, Homo Sapiens
gcattatctttacgtgtttaatgtaactgcttgtttacgctgccaaaagaaaggctactttccataaacttgagatcatagggaaactggatattatacttttagcttaggcgttaactaatggtacaaagtatgtaaacccctatcacttctaaatggcagttcactgaatgaaaatcagtttacttccaatttttgttttgaggattagaggtttagaaaacatctttaaatattaaaaagtcattaaaacaagggaagcaaattaagtttcaaattaagttactgtggttttcctgggccactgttgtcagccagttacaatgtgctccatttctctagaccctagctcctattctgaagctggtatcttacttaaattttcctttcta

SEQ ID NO: 141260 - DNA, 582 bp, Homo Sapiens
  misc_feature (534)..(534): n is a, c, g, or t
gatgttattaacaatctaatagaaagtgtgtcctctttaccaacagaaaaatattgatgtgcaagaaaataagcttatttctaacttaattttttaaggggtagaaaatatgataaattttgcatacatacaatttttttatttatattatagccctgtatgatacaagctttttctcatctaaaagtgttattttaactcagaaaacatacttgcattaagctcttgagcctcagaatggagcacagagggaacaaaacccttttgaaattaaaaatattattcagcagaaactgatacttttgaaccaatatgaatttgaaataactaaatattttttcaaaatctcccttaacatcaaagttcaagatgattgcatttattttgatgtcactatataaatacaaggatgttaactgatactcacctaagtcaaatattccagttgcattaacaaacatacacataacaaatataaatttatatcaaatgtcaaatttccccattatcttctcctcttcttcattaggaatnttgatgttctgaaaaagtgcctttttttgtctgcttcgattttttggg

SEQ ID NO: 141261 - DNA, 926 bp, Homo Sapiens
tttagccattctatttattcatttaagattttattgagacacttaacccaaatctgcaggtggtagggcacatcttagaggggatgagttttaaaggatgggtaactgctagctgggcacagaggaggcattcatttcaaggagagcaaacagttgaaccaagtatttgtatgtgtgagtgttaggtggtaggggaggaagtggtaggcagaaaccagtcaccactaagtagctttaatgtatcctgaggtcaacgggatacctttaggaaattttagggtgggttaagagtgataatgataaagacagtaagctgtttttaattattaccacttggacacagttaagaatgtgctgcagtggctttggtgagatgtaataagaatctgaatgagaacagtaacagagggatgaaactaaagggacagatttgagaagtattaaagagagagaccagcaggactttgcccagttttgttagtgagggtaaagagtcaagcatggagcatatttcttgcttggataactgagtgctggcatcccatttgatcattcgtagatatgctgagtttcaggtggcttcaggacatccaagtggacatccagtaggattctgcagatgtatggaggcattccgtcactgttgttggcttgatcagataccctttacagatatagcaggtaatgtaaggattaaaatctttcaccaagtgtttcctttgggtagccattcgtggctagtgaagactggctttagtagtctgggcaaagaggggtcctaagtagatgaaagtctgatcccaggagctggtgtgtcgttcccagtaggatgtcctgaggcatgagaactagcatccagatttatcatgagatcgttgatcatcactccttttggtggttccgctttcccatgtccagcggccgca

SEQ ID NO: 141262 - DNA, 333 bp, Homo Sapiens
tttattcatttaagattttattgagacacttaacccaaatctgcaggtggtagggcacatcttagagtgggatgagttttaaaggatgggtaactgctagctgggcacagagaaccaagtatttgtatgtgtgagtgttaggtggtaggggaggaagtggtaggcagaaaccagtcaccactaagtagctttaatgtatcctgaggtcaacgggatacctttaggaaattttagggtgggttaagagtgataatgataaagacagtaagctgtttttaattattaccacttggacacagttaagaatgtgctgcagtggctttggtgagatgt

SEQ ID NO: 141263 - DNA, 445 bp, Homo Sapiens
tttagcagtttaaaacaacaagcgtttattatttcactgtttctgagggtcaggaatctggaagcagtttagcccggttgttctggctcgaggtcatccatgaggtttcagtcaagccaggctgcagccatctcaagatccatctggagcttgaggctctgcttcactcacatgcacacaggtttagttcagccatacatgggtctctcacaacatggtttccccttgggagggacgttcgtgccttttatctcaagacctgaatcatggactatcaatccctcttataaccttcaagagcttgagaggttagcctgagaaagactggggccatggaatcttcagtgggtttcacagggtccatgcgtatcttggaaacattctaattttatgttcacgtgcatttttctggaaagacttttccatagctgcatcaaaaggccca

SEQ ID NO: 141264 - DNA, 310 bp, Homo Sapiens
tttttaggataataattctgatgctttatttgtaggggatatgtctctaaaagggctgttcctcacagatgtctcaggccaccttcaattaaacccaagcctcttcctcttctactgaagcccctgtgagtaaagtccgtggaaatcatatctgttgaattttggagaagggtagtaaagtgttgaaaggtgtttcaggctatctcacaatatttgatatggaagaagaagcatttctaatggaaactggagggaattgctcttcaactcctctgcctgaaaggtaggactagcagagaactccaccaag

SEQ ID NO: 141265 - DNA, 393 bp, Homo Sapiens
tttgcagagaatttaatttttaatcagaatcccatgttagtgggtgacagtggggatggggaattaactaattgaagtccctgctccatggaggttgtctgttttcaacccggcaagttggccatgctgtgcagagccctctccctgcatctccccatggtctctgcattacgatggtgctgaaggaaccatggatgttcatgtattaggataataattctgatgctttatttgtaggggatatgtctctaaaagggctgttcctcacagatgtctcaggccaccttcaattaaacccaagcctcttcctcttctactgaagcccagttctagaggctgggcagtccgagatcaaggggctgcatctggtggcagctttcttgctgcatcacc

SEQ ID NO: 141266 - DNA, 754 bp, Homo Sapiens
aagcagaaatagaaatacaagactggtaaacatgcctttaaaaatatatatattttcaactagtattgtctataatgctgaaatattacttattggtgatttttctgtttcacacactctaaaatataagtaaagccaaccttttttttaaggctgagattcccaaaatgagaatactactttataccatttgtttataagtatgaactgttcttataaatattaatatttacatattcactaatttaacataaatgaaaattaggattaaaaattgcaccaaagcatcggcaaaaacaatactatattctttaaaagtgctcaggtagccaaggcccttgcttttggtatcaaccctcatgaacccataggagctgaatatttgtttcactgcttaataatcctcaatttacactattcataactcttaaaattattctctttttttctaagagcccctcccttccaaaagtgtatttttttcaaagattttcacttctcaattgttgcctttgtacatactatagagtgttgcttgtaagaaaggctaatatggaaccaaactcttgtaagtaatgtaaatagaaaggtgggtggataaagttttcaatactttctactacctcagtttacttgagtactacattatagtttattctttgcttatctggtctaagagacttttaatgctagtagtaaagttggtttctgctttcattgactattttcatcataatttcatcattgattaaaa

SEQ ID NO: 141267 - DNA, 791 bp, Homo Sapiens
  misc_feature (772)..(772): n is a, c, g, or t
gtatattcaactagttctttatgtttacacaggggtctgttacacagatttcagaattacatagcttaaagagttctaattatataaaaacattcttaattctgaaatatttccaacttcctactcatttttcttagaaatctacaggcaacatttcatagttttaccaggtaaagtttaatgtcttttcatatgatcatcaggaagttttctaaacttctcacctgcattcttaattcttagtctgtgtaagacagagtacaaaaaccagttctcctgggcatcaggtatctcctgacttataagtaagggtctctggcaggatgcaaacattttaggtcaaggccacttcttggaatttgtttcaggtttaggtacactcctctagtccttcattacatttaatgccaatctctttgtttcacattgctcattatcacttggaagaagctacctgtatgcataccaaaatttaatttgtcccttcctcccaccttttgtgagttaattatactcacttcttcgagtcaaccatgaaaacaaatgcacttcttgaggattttaaagaaatttgggtgtgttgagaaagaaaagaccttctaaaactgcaggacgttttcctctttttgcaaagcatgaattattcttctaggaataaagcttgctttcctgtgaatggattgaaatctggagctagctaaccttcttgagcagctgtaatagttttctaaactgtgtaacaactaacatacctttatgatgtgacagtttnctgtgggtcagaagaatgg

SEQ ID NO: 141268 - DNA, 657 bp, Homo Sapiens
aaactttattgctgtttctgtactcgtcttccttggtagacagtgtagaagagaaacattttgtgttgtttagatttgaatctgttagattcatgatgtttattaacatgtgtgcattgacccataagtggggtgtgaaattggtagattttttactggtactttaaaaaactggagtagaagagaacggaaactgtcaaagtgattcacacattaagaatgagtaatgcttcatgaaatttgtttctattatttatgtgagtgtcttgagtcacaatgtaaaatatttttactaaggatcatttaaaaaatcaataaaacactggaggctcagtaatttgggatagactataggaagaaacctagacctagagattctgaagttttcagattataaacagatctatactatacgtagaaagcaatgggttacacaagtttatagcttaagtaaaccaataaaatagcaaacatgtctatacattaaggcaggagtcagcaaactatttctgtaaagatagtaaatattttaggttttatagactataagtttcctgtcacgactctgcaactctaccatcatagcacaaacgcagccacagatgatgtgtaatgaaatgcccctggctgggttccaataaaatttgaattttacat

SEQ ID NO: 141269 - DNA, 548 bp, Homo Sapiens
ttttttaaagactgcttttagttttatcattctcatacgaaacaaacaaacaaaaccactgtggataaactttttttagaaatgtatatttcctgagtttttattcagatcataggaattataaattttttaataatccaggataattatcatagacagcatacgtttatttttttcccttttatgcttcaaagtcaagaagtacagctatcacttacactgttatatctgtctacgaattcctctccctttcctccatcttcctgacccacactttttagtgctttctacttctagtctgcttcatcaaccaaacttattctgaactggagattaaataaaagtgataagatagagtgagaactaatcagtaagtagatgacttcagtgctagggatttaaggtgattttatcctttggcataataatgtttcaccttctaacctagggataggagtggttagcgagtatctcactgatcgttatcttaaatttggcagcctgtatctcagcttgtagactaactgtgcctctcaactgaatgaatt

SEQ ID NO: 141270 - DNA, 821 bp, Homo Sapiens
  misc_feature (71)..(139): n is a, c, g, or t
  misc_feature (171)..(223): n is a, c, g, or t
gcaggtataaacctcttttctttattagcttatttgatttttagatgttgaacaaaccttgaattcctaannnnnnnnnnnnnnnnnnnnnnnnnnnnnnnnnnnnnnnnnnnnnnnnnnnnnnnnnnnnnnnnnnnnncttcttcccaatcttaaggggaaaacattcannnnnnnnnnnnnnnnnnnnnnnnnnnnnnnnnnnnnnnnnnnnnnnnnnnnngttatatttatcatatctaggaagattccgttttattcctaagtttgttgagtgtttttatgaaagagttttggattttatcaaatgctgtaataagacaatctgtgtgggttttgtgctttattaaatatggtacagttgatcctcattattcaaggttatgtatttgtgaatttaccaacttgctaaaatttataaccctcaaattgatatccgtggcacttttgcagtcatttgtggatatgtgtaaatgggtgaaaaatttgagtcacccagtacacatgttcccagctgaggctgaacaagatgatgctctgccttcctgcttcagtctcatagagaaatgactggagggtggaagtggcaggggcaattctgtgtagtacaagaagctctggctccggggccagctggatggggtttgaatttcagctctgacacctgttaggggggtgcctcaggcatgtcacttaacacttctgatacctcactttcacttctgtaaaataaggtagaatttgctaggatgaattaagaattcaagctcataatgtgtgtgagataaacatatgtatacacacatatacacaaatacact

SEQ ID NO: 141271 - DNA, 821 bp, Homo Sapiens
  misc_feature (269)..(269): n is a, c, g, or t
  misc_feature (276)..(276): n is a, c, g, or t
  misc_feature (285)..(285): n is a, c, g, or t
catcgcctcgggtttatttcctactagcatcaatagtagtagctcgtgacagccttaagcatctcggtaaaaataaggtgcctactaaattaaaatgtttccctaccagcgattttacgggcgacatggaaagtcaggtgtccaaacacgtaaggccctggttttgccatgtaaagccagcctggttttgacagaaaggcccatcgccgagtttatctgggccttttatttacacagacttcagtgccgtgccaaaaataaaaataaancaaccancaccaccanccaaaaaccacatatccagtaggctagatactatatagagagtattcccacgttgtctcagattaatttaaagaaatcctaaaagggcgtctttgaggcgtttgctggactcacaggagcggaaccaggtttccaaatggtattgtttacaacaatactcaatactgcgctcctgctctttgcctagaggtaaacgtgtccccgaggccagatgttcttctattgtgcacaggcccattgacttggagccttgctttagggataggatctccgttttactcagaagggttggagggtgaaggtgtcctctccttgggctttgctcctattcacatgaagcaaacagctaaccttcagatcgtcctcatctgttgaagtacttgtactcatctttttaagattaattcatccccaggtttggataaatatatatctttcctgtctccatagtaacgtagttataaatgaccacttcagtgtcacctagcattgcgttggaatccccttccctggtcggaggcaactcctactttgga

SEQ ID NO: 141272 - DNA, 361 bp, Homo Sapiens
tttttttatggatcaccaacatttatatagcagtcactatgtaccaggcattaatcactttacatacaaactagtaaatcaatcctcacaacaaccctaaaaagtatgtactattgttatccccagtttatagatgaagaaactgaagcatgaagaggctaagtaacttgcccactatcatacagtcaggcagcagcagagctgggatgtcaaccaggtggtagggctcgagtgtgtgctcttaatccccacatgatactgctcctcgaaaagctcccagtccaggaggcagggcagacacataattctgagaccagcaaaacaagttcgagaggggtcagcgtgggacctgttcctgaag

SEQ ID NO: 141273 - DNA, 445 bp, Homo Sapiens
ttttttttattatgtttaactgttttaccatctgggacatttttaagcttcacaaactctcccttctttgttgggatgccccagggcagggaccctgtctcctttcggtcttggtggcgccaggaacacatcagggctcaataaataattgataacaacaaagacccccaaaggagtcccttcactttgggtggcctgctgaactcctcaaggctttctgttaagtgcatttcatttgttttgaatttttttcaacttaaatggttgaaaatcaaagccaggagagagctgttggcttgtggagaggagtctggaggacaagcagtagccattgaacctgcaactgcatgatgtgcgggaggtgggggctgttctaaaggacgatagaggtgaagggcaaggccgtgtcaggggtcaggaggcctctctgaggaggtgggcaagc

SEQ ID NO: 141274 - DNA, 545 bp, Homo Sapiens
tttcttttttcataaatgaagtttacttacttttataattacaaatgtaacacatgcttactgtagagaatctgaaatgtatagagaagtagaaggaagaaaataaaaactacccataaccccaccacctgaaggcaaacactgctcacattatgttctagctatctatgcctgtttatagaccaagaccctcatcaagagtgctggccatgaagcacaacagccaaggggagtgagagcaatcaacaactgagggggtcacccagaggtcagagctagagaacccccactgagggacaagacaaaggccataaacaacagatcaagaggtcagaagctgacaacacaagaacaagttgtgttactgtaagaatgtagtgagatggtgcttgtcaagagtttagcccaatgcctgtcacatgatacattatcaataactggtagccattatactatcactattattatgggtcaaaacgaatggttcaggatggatactataaacagggcaaggaccctggagacccattttaggtgctatgagt

SEQ ID NO: 141275 - DNA, 394 bp, Homo Sapiens
ttttttgttgaggatgaagaagtttattttgagatattcctgaaactctagaaattcattatgatttcaacttgtattgcatgaaagaaatgcaaacatggcaattgacagatgacctaaaaatattgtaccaatgggcagtgtctgtaccggcagttcggagacagtatttcccaagcagtcttctcactgaattttaaatcccatggtggtaatctgggataagacagggtttctctttaggctgatgagtgagaatttttttctccctctgagagcacggaggccataaattccatttctactggctttggtttccttctcccctcaaacaagaaagtggggtggaacacctgcctcgctcgatgtccccctgaagttcaggctccctcgt

SEQ ID NO: 141276 - DNA, 554 bp, Homo Sapiens
tttcaaatatctctgaaataaaagtttattaaatttaaattaagtggaagttatacatcaaatattgttttctgaaatcaaaatctggtgtacagtatgtaatacagaatattggatgttaattccttttttaaaacaactacaagaaaaatattaggaatgatgaattatgctgattggtttgacttggatccaagcaaagtatccattatatctccccggccagtttccaaaacagtaggcatatttctcagttcatacacagaaacctgtccatcactgtctcctaccagaaggcaatctgtttgtttggcaaagagaatggttgtgaacttgattccagggttagcagtattcacaatcagagggtccaaagtgctgatatgaaggtcccaaatctccaccctgttctcatttgcagctgcaaatatataggatgattttggagaccaggcaacgtcttaaacaacagaagtagctggataaaaactcaaagatggctggacattttcctgttgccatataataacaccccaatctgcagaacagcttaa

SEQ ID NO: 141277 - DNA, 448 bp, Homo Sapiens
tttttgtccttatatcctttattcaacttctctaaatcttacataaccaccataaccaagaatagtattggtaatctacagatattcaaacctcaccaatataaccaatgtcctttttctggtacaggagccggttgagtgtcatatattacattcagttgtcaagtatctttagtctcctttaatctgtgacagttccttagtctctttgtctttcatgatcttaacagtttcgagaatatctgactccttaaaatacacgcggtgataggtgactacgggagctccagctcaccgtggatttagcaaaataccaagtgatgacaagaagttgcttttaaatgacccatcttgtatttcatcgtcaataaaaccacacttagttacccaaagactgagaagggaaaaattctatgtaaattatttgatcatctttttttgtggagag

SEQ ID NO: 141278 - DNA, 452 bp, Homo Sapiens
tttaaaaagaaaataggaattttatttcactgtaaataggggaggtttaaaaagggactgtggtgacagtcctgaagttctggcatcaaaactgttctgccttttagggccacacatctgtctgtcttcactctgctggtctgaagggaacatgctttcaggatcactagagccagctaccagttctcagtcctgcttgaagtttctcttggctctggggtgggcctggctggcctggggccttgccaggcagcttctgctgaccttccctcttggcttttgggcttcctggcaccactctgactgaagctgtgaaacctgcaatggccgaggttgtgctttgggctatgagtcctgggtataaccttggggctcactcccccaaaggagggtccttttcccagccgtttaatgcctgtgttttataatggtgacaggaattaagggaccct

SEQ ID NO: 141279 - DNA, 583 bp, Homo Sapiens
gcggccgcgcgttctccgctttcccggctccgtcgctgacgcgtcgtagacgttggggagcgggaaggcaacggcagcgggatcgggatgaacagcggcggcggcttcggtttgggcttaggcttcggcctcacccccacgtcggtgattcaggtgacgaatctgtcgtcggcggtgaccagcgagcagatgcggacgcttttttccttcctaggagaaatcgaggagctgcggctctaccccccggacaacgcacctcttgctttttcctccaaagtatgttatgttaagtttcgtgatccatcaagtgttggcgtggcccagcatctaactaacacggtttttattgacagagctctgatagttgttccttgtgcagaaggtaaaatcccatatgaatccaaagccctctctttattggctcctgctccaaccatgacaagtctgatgcctggtgcaggattgcttgcaataccgaccccaaatcctttgactactcttggtgtttcacttagcacgtttgggagctataccagcatcatcactagaccccaacattgcatcacttggagagataccacag

SEQ ID NO: 141280 - DNA, 258 bp, Homo Sapiens
  misc_feature (107)..(141): n is a, c, g, or t
gtctaaggggataaggaaaaataatgtgaaagttgcagtccttatcagaagtaattgattagaattcagcaatgaatatgccaaatcgtacttatttcagagtaagnnnnnnnnnnnnnnnnnnnnnnnnnnnnnnnnnnnctactgagtgttattagattattttaatgttactattgttattaggcaattaaaatgtttttaagcaagctttaaggcattaacctcccccttctgtcgtcttctcgcagccgtata

SEQ ID NO: 141281 - DNA, 700 bp, Homo Sapiens
tttaacagttaatgttctttaatgcagttagtaatgctggggattataaatttcaaagactgattctacagttaatatcaaataggtgattatctcttcagatgtaaccataaaaattgggattcaatatacaaagctgaattctgattcaagtgaataaagtgacacacactgcagcatctcaccccacaggaagaagtttcataacggagggaaagcacacatggaacagcctatattgcattcaagccatcctggtagcagaagagcagtggcagcagtgacatgccactacacgtaacatgcagatgagccctatctcatatcaaagaggctgccatcttcctcgtcaacacagtactgcaggctggtcatgccctgcagactcctaggtacagattactcccaggcttccgggtgaatgtgatgtagattcagctgagaatgaccgtggtacggagcgcatggccatctctggcttggctgccacaaggtcaagcatgagggcagtggcatagatctgacattaagcatctcatccatttccctctcactctcagttcacatggctgcatgcatgccctgccctccaatttggcaacttttccatagtcaatccatctgacagtagcaaaatttgtagattctgcacagttgaaaccatgattaaaaccagcatggtagccatatgggaaagtga

SEQ ID NO: 141282 - DNA, 223 bp, Homo Sapiens
tttattttaaacaaccctttatttcaaagttgactttgtgagtattgatacaaggctcagtgttttcaaaatattttaaaagttgagattcttatttaaaggtatattgagatccttttgtggttcatacatgtggtgattgggttttcacactcacatgtgagatgtgcctccctccaaccttgttatgatgtcagcacattacccatctgacaggaaggag

SEQ ID NO: 141283 - DNA, 317 bp, Homo Sapiens
ttgtcttgtggtttctcatggccatggtcaaggctatgcaactttgattcgcaaccatagccttgctgagaataggatgaggtccctataaaagtctgttgggcctgtgaatttccccctaccctcggggaacatgaatgaggataattagatgcattagcacccattttcttcagtcactcaggcattccgtctgcgggttcttcagagtataatcccagaggcctttatgaaccttcaaccctggatccagcagcctcttttcatccatttccggacaatctaacttccccctgggagtagcagtcctcaggcct

SEQ ID NO: 141284 - DNA, 442 bp, Homo Sapiens
ttttttgaattaaattatttttatttcatatcaagaaatggatgaaaagaggctgctggatccagggttgaaggttcataaaggcctctgggattatactctgaagaacccgcagacggaatgcctgagtgactgaagaaaatgggtgctaatgcatctaattatcctcattcatgttccccgagggtagggggaaattcacaggcccaacagacttttataggtaactttcagtttttctaacttcattttcttttgtgactataatagaattgtgttttcggtagtctcttaggcaaactagcagtctccattggtgttaaaacagcgaagtacatatttcctgtgtcccatttcatttattttgcccatacaaatgcagactttatacaggagagtttggaatggaggactcaaggtttcaaaatgtcgatatccttgt

SEQ ID NO: 141285 - DNA, 635 bp, Homo Sapiens
  misc_feature (32)..(32): n is a, c, g, or t
atagtggactactacgaggtgctgggagtacncgggtagggcctcgtccgagggtatcaagaaggcgtaccgcaagctggcgctcaagtggcaccccgacaaagacgccgaggacaagggaggaagcggtgagaagattcaagcaggtggctgaggcctacgaggtgttgtcggacgcgtagaaacgcgatatctatgaccgctatggcgaggcgagggcggagggcggctgcgcaggcggcaggcccttcaaggaccccttcgagatttcgttcctttggctccctgggaagtgggggcctttcttccttctgcatgtcctacggtagtgatgggacaggcagcttcaagtccatgtcgacttccactgaaatagttgatggtaaaaaaatcaccaccaagagaatcattgagaatggccaagaaagggtggaagtggaggaagatggagagttgagttaaagtccttcataataaacggcatagagcagttgctccccattgacaccaagtaattccagtccacatttgcctttaagcacatctggaggaatagcggactttttttaggattgaaagtgaactttactttcagcagagctgtacccaagaatttataaacactttatgccaaa

SEQ ID NO: 141286 - DNA, 619 bp, Homo Sapiens
atagtggactactacggtgtgctgggagtaccccggtaggcctcgtccaggggtatcaagaaggctacccgccagtggcgctcaagtggcaccccgacaaaaaccccgaggacagggaggaagcggatttcgttcctttggctccctgggaagtgggggcctttcttccttctgcatgtcctacggtagtgatgggacaggcagcttcaagtccatgtcgacttccactgaaatagttgatggtaaaaaaatcaccaccaagagaatcattgagaatggccaagaaagggtggaagtggaggaagatggagagttgagttaaagtccttcataataaacggcatagagcagttgctccccattgacaccaagtaattccagtccacatttgcctttaagcacatctggaggaatagcggactttttttaggattgaaagtgaactttactttcagaacagctgtacccaagaatttataaacactttatgccaatgcctgtctttattgttgggactgcacggataggacctctgtttgtctttcgatcattgtaaatatctgtatgcaatttgctatttattaaacttaagcctgaggcagccaatgattaaaaaaaa

SEQ ID NO: 141287 - DNA, 498 bp, Homo Sapiens
gggaaaagcattttaagatagtgacaatctgagtgtttgtataaaatgtaattctatgcgtttcttatgtgatctaaaaattcaatgcaaatatcttttatttggtagttttgtctacatattttatgctctagcatgtgcaatatatctttgtaaagcacgatgatacaaatctggtgccagtgttatattttgcataacatatttgtaacagcataaaatattgtttgatgatttcagtgggattttgtctataatgttttcttatgtaaattggagttgaatgactctggtaaatgtcatgactgtaaaaatggggaaaatgacttttagttcagtgaatgactttgaaacaatctgaatcttctcaagcacagtttaatacttttgcaactactgaatgctctaataacgtaatgaagtacttaactgtaatatactatggaaatgcattcagatggttatttttacaaataaaaacggtacaaatattgttgg

SEQ ID NO: 141288 - DNA, 515 bp, Homo Sapiens
ttgaggacctacatttaataaatcaaactgtactggcatcatcagaatattcacagtttgcaacaggatcagcgcgttttctcacttgcagactcggaggtatttcaggagaaggcgacgtgagcgcaccattccgatgcttcattcttgaccctctctggggctttcaatgtgtcattgtgtcagatccctctccccttcaggttttcacggtgctcctcatgcctccgccctctgggatccctttgccgtcttccggtgtggaagctttggctgctggccggctggcctcgaaggagtccaggtgagatttagggagctccccctggatggccaggcctggcggggctggccccgtctcactcctctgaccttctatgggactctctcttctgacctcttccagttctgcagctgcctgttcctttgtcagtttaattatttccctcccaaggctgtttacttcttcctcagaaggtaactggggtaatgaaggatgaaagagcttgcattgg

SEQ ID NO: 141289 - DNA, 625 bp, Homo Sapiens
tttatttttaattttggcataataatttattatgttaatatttcaaatatatactttgcatttaataaaccactgaataactgaagataatggcttataagcacgtttttgctccatacaccaggctgctattgcattgaaggcaatgaattccatcacgggggttatatgatccagggctgcagatcacacagcactcaggacattttggatgttgctggacattcattccatatcctggaaagcagcgattaatccaaaccatttggagagtaccttcaatatagtatatttgaggtaattgttctgcacgtctgccaagaatttctacttgttgattaaaaaatctctctatgagatttttagccttaaaaagtcttttgtaaggttcacagttatggtctgtacatcgcttgggtcctttttcagtgtctagagatgaaactgaaaatgcaaagaacaattcattttgcaaaccagctctttgcattttaacgcgatggcattcagacttaagtaaggaaatttcacatgaaaggtcaagaagcagtttgcttaatatctgaagaaatttcttctcaaaagagatattataaatgctattgcagggagctgcatgatatcg

SEQ ID NO: 141290 - DNA, 586 bp, Homo Sapiens
attttaacttatttacttttatttttagaaatgctagagcacggtctacactggagtttgtttaaaaattgcggtaaaatatacacaacatttgcagatttttaaataattaaatgaaatgttacgaacaaagaagtagcattaagtgttgccaatattaaggaaaaaaaatctgagctgattcgggtactctgtgtgggaggaggttacttggacaaagcaaaggtatttccagatagagatgctgctgtgaatccattctcagagcccagaagattgcacccctaaagtgacccttggaatggatgctcacagaaccccatctttctgtccacttggggcttggttgctaaggcccactgacaaacagcttacaaggactgttgcttcccctgtggtcccaagagtacttccatgctgggtcattcttaagcccaaccttacagggctgatacgaagatcaaataggctacgtgcatctaaagggctgtgcggacacctactgagctctgtgtaactggcattaaagattcagtgacattccttctcaatttcctgaaactgccaaattgggacagaagtaata

SEQ ID NO: 141291 - DNA, 796 bp, Homo Sapiens
ttttttcaacaagtttacattttattatggaagtagtggggaaagttcgagaacgatctggaggagagattttaggggaaactcctgcagttgctctctcagccgccctgggtgcatccccctaaggcatggcccccacagacaccttctggccatgcctctgggcacccaggtgccattccttaaaggacccagttcattaccctccacacaggcagtccaggggacagagagctttcttcagaggttagaatgcctgggagatggaggccttgtgaaggctaagctgagatggagcaggctcactagaaagaacagcagggatcatccctgatgtccagttccaagttacagtagtggcagtaacacttgggaggaaaaagtgaaccagtcccctttgttgtaggatacgaagaggtaggtcatcaccatgtaggcgcatttcaggaagttccacgtgttcttcctcttggggagtggtttcctggatggggtggtgcctgagaagggtttaactttctcttgcctggctaggatttgcactggatagaacgttcagtccaatgtgaaatgcaagtggtgatagcaagaacgtctcatctgtgatctcagagggaacatgttctacaccctcagccctctgtgtcgctggactctgcatctgcaagatctgctatgatactctcttcttccttccaaatattggcagtttgtttctcctctattttttcttgtcagtaatgctagaggattaaatttgtattacgcttttcaaaagaaccaaccattagtgttg

SEQ ID NO: 141292 - DNA, 532 bp, Homo Sapiens
  misc_feature (102)..(102): n is a, c, g, or t
agaagtataccatcaaaccccccagggacctgtgcagcaggtttgagcaggagcaagaggtgaagaagcagcaggagatcagagcccaggagaagaagcggntgagggaggaggaggagcgcctcatggaagcggagaaggcaaagccggatgccctgcacggcctgcgggtgcactcctgggtccttgtgctatcggggaagcgcgaggtgcctgagaacttcttcatcgacccattcacaggacatagctacagcacccaggatgagcacttcctgggcatcgaaagcctgtggaaccacaagaactactggatcaacatgcaggattgctggaactgctgcaaggtgcctagggagggggagctgggtgggtgtggcaggcacagtgcaggtgataggaatagagggaagcaatggcagccagaccttggggagagcgagacaccaggccacgagggctttgaaccttctccatagctgggtttccatgggccagtcccttgcccatgaataaccattctgatacgaaa

SEQ ID NO: 141293 - DNA, 1000 bp, Homo Sapiens
tttttttcattctgcttttctttattgtctggctaacttacaaagatgcagatgtctagggtagtctctaccctaccacttacactatcctgatgacacagatagcaaaatgtgtctgtttacatagtgcatgatatgaaaaaaaagtttttcttcctctacggtccttgactataaggagggaaaaattaatttcatgccaacatttttggggaactttaacaatcatcccatttctgctactaaaataacaaaactggtattacactttaaaatataaagacctaacagtttttacaaatatgcaaataatctactacttagacataaaaaaaagttgatttcttttaaatcacaaagtaaggcaccattggattaaacatttcttctggcttttactaaataaaatgcatggtgaaataaatactgaacactgagttttaatactgtaatacatttcaatataaaataagaggtgaatgtgaaaatactgtattacatgttgaatacatttatctgaaaatgttataaaaaaacacacatgtaagctctgatttcagggaagaaaaattcatttttgtaattttccatagtttaagattttaccacagaacttattcatagttttagatgcaattaggttgcaaactttcaaagaaagggtgtaggtgtattaatgaaacagtcacttaaacactacattctaaaacaatctattctggatgaatggcaactttgagctatcaccctgtttcagatttagaacggtacctgccaagttcagatatgcaaaggaattgtccaattcttactaccccttataaaattcagactcactttctctgagtcagacttttctccgtcatattttctaggaagggcaaattccatcttttgtgaaatgggtcattaggctttatcatagggatgtttttcactgttgaaatcagataaaagaatcccaaataaatgatgctgctaaattaccaaactgctagag

SEQ ID NO: 141294 - DNA, 423 bp, Homo Sapiens
tttggggtgggacccaaaatgcatttttaatgagttcctgtagtggcaaggccctagatagatttaagacccaaatactctaggtcctaaagcagggacttctggtagggaagatcagtagtctgtagttgatggtcttacaggattcagacaaaggaaaagtgctgaggaatgtgaagacaaacagatgtgaagtccaatactgtgcagcagattgagaacagggacttcagaagccccaggagcggaggaggaacttggcaggatggggcttcttccagctctcttaataggtctccagagtgcctaagggctaagtttgaagggaaagccctctgataaggcgacatttgagcaaaggcccggaagaaatgagatacgtctcgcccagtcgcaccctgtctctacctgacaagtctccgg

SEQ ID NO: 141295 - DNA, 885 bp, Homo Sapiens
  misc_feature (328)..(328): n is a, c, g, or t
aaggccaaaagggcgccgacccaacccaaaaagtttaaggttacccactttcccccagggccagtaaaggggaattgttaaggatcccacccttgcttaagggaggtttggcaggacagaatgcacctaaagattttcagcttgttttagggtcactttttctcaaaaatatttattaatctggcaaagggggatgggagtggggaacacttctctgtgaggcaaatggtatctcaccaaataccgacttttcaaggaagaaagctctccacttctctcataaacttatatactactttaaacagtatgcagtattcggcatattttntaaaaatgagtccagagaaatagaaggatatagttacctcataaagttaactgttagcaacagacgtcttcgtatgtgatttataaatttcttggcaagaacaagatttttagaagaggcttactcacacttaagacagagtgaaaattactctcacagaatgcaaagtatagaataataaacatcaccattacctttaaatgccatacaaacatcctacattgcaggttgcagtatcaggtttccagaatttccaataaggcaatacctacacacatattgccaggctaaaaatgtagcaaacttgcattcccaaactgggagaatctagcttatttgtaatactttgtgaaaagatactatgaaactaaaaaggtaaccgtggagtggaaactgctactagaaagtctgttatcagtagctacttctacttaagtcctccattctctcccagaagaaacaaaccaaacaaaaagcatctatcaatattaaaacctgcctcaataaaagcctagtgttctaacttagcacctctagtaaatctaatatagctgctg

SEQ ID NO: 141296 - DNA, 1647 bp, Homo Sapiens
  misc_feature (1129)..(1196): n is a, c, g, or t
  misc_feature (1355)..(1355): n is a, c, g, or t
  misc_feature (1409)..(1422): n is a, c, g, or t
  misc_feature (1526)..(1526): n is a, c, g, or t
  misc_feature (1617)..(1617): n is a, c, g, or t
atcctcatcaccctctcacccctctgactcttcgccgccgccgctgcccccaccacgtcgctcataaagcttatccctctgtcgttcctggatttctttcatctcatccgcataccggcaaaaggcgcctccgaacttgccccaggctttgaagggtacggtgatggcattgcggtaggacggcttcacctcgctcactcgcagaaacaccccgtatttgttgcagcccacatcgaagaagaagcgcttggagtccacggtgatggaggtgccctccgggagctctccatacaggccgccccctgggcccccggcgccgcctcccgggccgcctgccagctcgtcgtcctcgcctccgtagtcgtctatgagcttcgccagcgcgtcgcggaactcgatgaggccctgcgcaggcagcgcgatggtctggccgctctgcaagccgcccggcccggggcccgcgccgaagccgccaccgccgcggttgaccgtttggcggatgcgcaggaagcggccgcgctggttctccttgaggtccaagtagtacttgcggttctcacgcaccaagaattcgctcttgagcgcgcgccgcggcccgccgccctcctcggcgcccgccgccagctgctcggggctgctaaggcccatctgcgccgtagtgttctatgaagtcgcccagcgagtcgcggaactcggcggccaccgccatggacagcgtgaggcggctcttggaaccgcccgcgcccaccctcagggatcttgaggaagcggccctcgggcgttctgcttcacatctaactagaagcgcctttgttcctggacgctccagccgccttcgagggccagcttccctgcgaactcttgcatcgccgcccgccggtggggaaaccgggcctgggaaaccccgcacgggcccaaccggccggaccgaccgacgacttcgccgtgccgggtctgtacgaccggttcccgacacaatccctttctaagaggccggcgccgacgcgttcgggcgggatttacccgagacaacccggcccggttgggcattcaataggggcccgtcccgcaacatcgatgtagtcgacggagatcacgcgcgcgcgaactctttcgaggctgcggggannnnnnnnnnnnnnnnnnnnnnnnnnnnnnnnnnnnnnnnnnnnnnnnnnnnnnnnnnnnnnnnnnnntttttacctggccctctaagaacaccgaccgccacacccttctcccactccagtaaacaaaacgctctctagactctccccggcccccgagggagcccccgcgccccagatgtgggggcggccaccccctcaaccaaaattaaaataaacgctgatcanaaaagggagtgcctcaccttatacgccctctctaatggcaaatcgcggtctgcnnnnnnnnnnnnnncagatactgggggcggagacttcttccccgcgggacctggagccaaaattaggccgcccccggtggaaagccaccacctctcctggactaacaagccagaagtncgagaagggcttatagcgcactccccaaaaaaaccgccatagagggctgcacggaggccaccaagaacggggtgttaatctctatgggggncccgctcacggcgctgtgaggcggcacagt

SEQ ID NO: 141297 - DNA, 836 bp, Homo Sapiens
  misc_feature (122)..(234): n is a, c, g, or t
tgtttctttgcttccactgagggcaccaggagggtacagagctggaagcgccagctgtgctgtcccactgcctggactgcacctcttgttactctgacagccgctctgtaatcactcaaagnnnnnnnnnnnnnnnnnnnnnnnnnnnnnnnnnnnnnnnnnnnnnnnnnnnnnnnnnnnnnnnnnnnnnnnnnnnnnnnnnnnnnnnnnnnnnnnnnnnnnnnnnnnnnnnnngacacactgggacgttaaccgacaggctaggtgggaagcgcttaagtaaaacccttttctgccacccactacacatgaacaagaagttctagaaacagttcgttttatctgaagtgctttctcttcctgcccactccgtccagcctcaggcccgctttctctgcatctccgcagagctgtctctaatccttcaggagctccctctgaatactgggagtctggttcttctctcactccacaacttgaaactaataaggagctgtcttacgtgacctgagatgtgtactctatttcctggctatttcctcaaatcctttcctgcagagacccctctctgccataagtaagagcccacctcgtgtttatgcccatgggagcccacagttggtattgtgtaatcacttttcggagttttattgactgcttatttccgaaaaagccacacctaccctagccactagtcaatgaacagcaaaatggaaaaacaggccagcaagctcaaatccctgttcagagaaaaccagctgccttgacagatagcgtcaaggctgaaattcaatgttccgcgcactcaagtcaataaaatatttattgagcgcaaa

SEQ ID NO: 141298 - DNA, 487 bp, Homo Sapiens
ttttagcgagaaagttagcaaattgcctttattcagaagaagcaagttacatggaactggacatgaggctgccctcctccttgcacctccagctgtgcctaatgacaccgaaatgccgctgtgtgtggcacgccacaggccatggagtagctccagctaacgcagatggacatcccaggtgccccagggagatcaggcccacggagtgggatgaagccctgaggcggggaggccagcatggagacacctgtccggccgtccagtcgcccgccgggccgccttgaggctcctgggctgcagccctgatgcctggaaactttgggactggcctctagcctcgctgggcttccaaccctgccgaccccaacttgcccggacgtttccgtcccgcccgctccgctcgggggcgcgggaccgccggccagtccgtctgtcggtctgtcccggcgttcgaggccacccaccggccccgactgctcagcggcgg

SEQ ID NO: 141299 - DNA, 518 bp, Homo Sapiens
  misc_feature (136)..(227): n is a, c, g, or t
accttttctctccggtttattgtaacctgaccactcaatactgtcgttgaagggctgaggcgccgccgggctgcggggtctccgtctccacgcctgaggcggcagttaaagctcatctgtaaacactggccgccgnnnnnnnnnnnnnnnnnnnnnnnnnnnnnnnnnnnnnnnnnnnnnnnnnnnnnnnnnnnnnnnnnnnnnnnnnnnnnnnnnnnnnnnnnnnngcccccgcagatggccccggccacgtggtggtccgcgctctaggaaaagatatgaatggcctgggtggccggcgtgcggcaggcgggacactcgggctcgctcttgccgcagatgcggacggcgcagtccatgcagaagaggttgtggccgcaggggaccagcgcagccatcacctcgccctcggcgcacaccacgcactctcgcgccagggccggggccgaggacgccgaagggggcttgcggctgttctcggaggcgccggagtccaggggggcgcaggcggcggccgc

SEQ ID NO: 141300 - DNA, 304 bp, Homo Sapiens
gaccactcaatactgtcgttgaagggctgaggcgccgccgggctgcggggtctccgtctccacgcgaatggcctgggtggccggcgtgcggcaggcgggacactcgggcttcgctcttgccgcagatgcggacggcgcagtccatgcagaagaggttgtggccgcaggggaccagcgcagccatcacctcgccctcggcgcacaccacgcactctcgcgccagggccggggccgaggacgccgaagggggcttgcggctgttctcggaggcgccggagtccaggaaggcgcaggcggcggccgc

SEQ ID NO: 141301 - DNA, 1932 bp, Homo Sapiens
  misc_feature (1234)..(1248): n is a, c, g, or t
  misc_feature (1642)..(1673): n is a, c, g, or t
  misc_feature (1812)..(1812): n is a, c, g, or t
  misc_feature (1822)..(1876): n is a, c, g, or t
ttttttaatcatttaatcaataaagcattttattcgtgtggatagttggactgggtggggcttggggtggggtgagatacgggagccctaggctggccaagccttaaaatctagagagccacgccccctcctcactgatgggttggggaagagctgcctgcctggaaaagggcgacagttcaagtgagactgcacttccatctgtccactccagcctgggtcagggctggagaagagagggaagctgagaagctgtccaagctggtgctcaaagggttgtccaggtctggttcctatgagagcttcttccttctcccaacttctgggtatttcatgggccaatagacttcttttttcttccttcagaaccatattccatttcttaccccaacctcagtttccctatctgccccatgggggggaagggtgtgtccttctggctctaagccccaaataaggtcaggtcaacactaagcagggagccacttaaggaccttctcctctaatgtcttccttgctgtagggaaaggaaactcagaggttcggagaggggaagggacttgttcgagatcataaagcatgagtaagggagggaataggaatggaaggtgacctctctgcccttagacctcctgttcctgctgggagaagagacagattcccccctctctccatggacccccttggagaaaaactactacttggacaagtagtagtctctccttgccatgggaacccttgagtccttagatccgggcagacctggatggattgagtactttcccactgggcattgacatccagtctcacagttctggaatgagcctggaatggagtgatagatattaataacccccatccatgaagcttcatctcacagagcctaagaagtcacatctcaggatttgttctctgtattaaacaaacggggaagcagaggctttagaaggggctgcctgtctcaagttctttgggagagagagtagtcccagcgcccctggcctgcaggacatgctggtaatgataacacaccccgactaaggtgattttacatgattcttgaaaaacctggttaaattctcattttttctccatcctcttcaagaactcctgaaaacagggacaggtcaagtagagcagactcctgatccaggggcaggaatcatgcaggaatctgctgtgcctccacttgctgtataatttcaggtcaatttctttccctctgatacttaannnnnnnnnnnnnnnaaaaatgaagtttagacagaactcagtgggttgagacagccatgctggcagcatccctgatctttccagaactgagcaaccagtctgagccctattgggcctcactttgtcagaagcaagaacagggaaatgggctggacttgggttgagagagtcgatgtcaggctactagaacactgtagcagcccccacatcctgaagccacggtaatgcagtgcgctgggaggcgtggaaagggaagccgggagggggtgtgtccccagtgaaacgaggtctctggcttctcacacattattctcaatgggctgtctttcagtactaaaactttcaaaggcaattcggttcacataaattgagtttcttcctggatagtttcctttcgcggtctcctgcnnnnnnnnnnnnnnnnnnnnnnnnnnnnnnnnccctgttactgggagaaagaaagcgcatcactgtagatcagagtgaggcccgactgcgttgagagccgcggtgagagctgctagtctcgctctcctgggacccagctgcggctcgttggcgttcagagacaggactgangcgcagtagnnnnnnnnnnnnnnnnnnnnnnnnnnnnnnnnnnnnnnnnnnnnnnnnnnnnnnntgggctgtcgatggtgacctgtaagggctgggctagtgtcacggtatctcgtgccg

SEQ ID NO: 141302 - DNA, 543 bp, Homo Sapiens
  misc_feature (518)..(518): n is a, c, g, or t
ttttttaaaaaatgcttttatgttctgtttgaatgtaatcggagaaaattcacagttctgcttaacatgttacaaaaattgtattatattgtatgcattattgtgcaactttctacttttacttaatatattttagagctctatccatttctctgcatgcatagatcttgcttattccttctgtgatgcagtgacccgttatgtatatagaccccattgtattcattcattccctatggacagcccttgagctcttttcagtggtttgttattagatatggtcccgcaagagacagccttcctgagtacatgtgcaaatatttttctagggtagagaccaagacataggattatctggcacatgtcatgaatatttccagtttaaagacaaatccagagaatgcatttccccataacctcaccaatatttgccattgtctaattttattccttccttgcatttttgtagctgaaaagaccgaggcctgaggctgggtcacagagtgggttaggttcanggtcaagactagaccccacatcgct

SEQ ID NO: 141303 - DNA, 493 bp, Homo Sapiens
aaccctgtgcttaacccttttattggccagaagttccgaaactactttcggaagatcttgaagacccttggtgctctggaaggaagtaccagtcctcaggcttccccttttcccggagttccccggaaaccttttctcggaagaccattgagaccgcagttaccgacatggcgccgtcctcaccatttgatagaaggtggggcccccctaagccagtgtgaaaccattcccattggtggtatcgcaaaaaaagtcttttgcccggtatgcctggaaaatgtgggaattaagcaaaatcaagcaagcctctttcctgcgggacttaacgtgctcatgggctgtgtgatctcttcagggtggggtggtctttgataggtagcattttccagccctttgcaaggaatgttttgtagctttagggtatatatccgcctggcatttcccaaaacagcctttgggaaatgctgaattaccccgaattgttgcccaatgt

SEQ ID NO: 141304 - DNA, 627 bp, Homo Sapiens
tttttaatgttgagcagatatgagcagatagtagctctggagtcctcaggtatccagcatgtgttgggaaatgtggatttccctgggtcaatgctcccaccatggccacttgaaggctaccagtatgattttcctgaaaacagatttaagaagagatgtcaccatcagcttcctcaaaccatgcgatcaatcctgaaaatgagtgtcctgtgttgactttgtcctgccaaatagcatgcccacccagaacctcagaatgtgggtttatttagaaatagaatctttgcagatgtaatttagttaagatgaagtcatcctggattaaggtggtctctgatccaatgactggcatccttttacaaagaataaaatttggacacagagcatctcagaaggaagatgacgtaaaggaaggtaggtgagaaggtcaagtgaggacggaagcagagtacggagtgatgcatccataagccaaggaaccccaaggattgctgcagccaccagaagccagaagagaggccaagaagtatcctttcctggagcttttggggagcttggtcctgttgataccttgatttaagatatatgacccccagggccaggtgtggtggcttacgcctgtaatcc

SEQ ID NO: 141305 - DNA, 617 bp, Homo Sapiens
ttaagtaaagaatgtggtctctttatcttgaacttacaactttatataggaaaccaggtttagaatatcaatcaatcaatatttaaaaccactatgtaaaatgcagtttactttttcctgattctgtaaagcagtataagaggtgctatcatcaaggagataaaacaatcaatcatctaacatattttgatatacatttccttgtctaggaatacaacatagtataagaggcaccacccaaaacattaaaatgaaatataacagctaaatgaatgacagggggaggaaaaagaaaagccaacttaccagtttggtggatagttagaatgtttagggacaaaataaaatacttggccagagctttaaagaaatgtaagagtaagcgttagataaaagaataaaaattgagtatttcatgcatgagaaataatatgcacaaagatgacaatacacatataaagtttgggggaatctgagtaaagcaatttaactaaagcaaatttgctgaaacaaatcagtaaggttagagtggtgatacacaacagagtcttgccaagaccagtcactctggcttctgtgtaaaagactaagacagtagatgttaaaggttgaaatag

SEQ ID NO: 141306 - DNA, 484 bp, Homo Sapiens
gcggccgcggtaggacgggccgcgggtcagctccagctcgctgtagggcggcagcgcgtcgtcggacgcgtcctcctggtcgtcctgcgacgagccggccttgtaggtgccgggcggcgaccaagcgtagtaggaggcgctgcgcgggccgagctgcgcgctccgcttggatggcgtctccaggctgccaccgcggctggcgccctcgggccgcgcctggcgctcccgcgcgctgcccaggtacgagtggtcgtatttgggtgcggtgcctggcgtgcggctcaccagccgcggcaggtgcgcgtcctcggcgggtctgcggcgcgcggggctgaaggcccagccgcggtcagcatcggtcaggggctcgcggctgcggctgcgctgaccgtagtactcctccaaggagtcgtcctggtagaagccgctgtgcgcccgcgactccgagcgctcgaagcggctcccgccccgcgcctcgtgactg

SEQ ID NO: 141307 - DNA, 735 bp, Homo Sapiens
  misc_feature (599)..(599): n is a, c, g, or t
tttttttactatttccccaaaggtaatttaattagcttgtaacaatggttaagctgtagcagttgtaagcagtcattaatactgttcaaaatattaggttgtctcttttcttccaggcacatagcaagattatatttccctgctgagttgcaggaacatgtgacctgttttggccaatgaaatgtgagtgaaagtgcaagtgttgcacttctaagtagaggctttaagaacccatgcatgtttggatcttttccttctgcaatggcaacgtccagagcatcttggtccaccaggctggccttagagaggagcagagccactaccaaacccctgatgtacactttcattttcttttaatatatcccttcctttcttccaggtgtaaacaggttttggagacgcttttggcttacactcaaatgacaacttcacctcccactttgacaagagttactcttttcaagagtgttcttgaaaaatctggacctacagctataacactaagctctgcgttggaaaagataactccatgtttattctctgccaaacactgatacatgccagcatctgagaggttcacttatttttatgtgagtgtnccttgctcaatttgaattctatcccgagttagcagaggtttcgccattttttagccacccgtatgtaggcttaggcctttcatttgctttacattccccaaaggacattttcttccatggcccacctgatatcatt

SEQ ID NO: 141308 - DNA, 652 bp, Homo Sapiens
tttgatttgctcaacctaattggattcaaaaaataaatgatattcacgtggccatggaagaaaatgtcttttgggaatgtaaagcaaatggaaggcctaagcctacatacaagtggctaaaaaatggcgaacctctgctaactcgggatagaattcaaattgagcaaggaacactcaacataacaatagtgaacctctcagatgctggcatgtatcagtgtttggcagagaataaacatggagttatcttttccaacgcagagcttagtgttatagctgtaggtccagatttttcaagaacactcttgaaaagagtaactcttgtcaaagtgggaggtgaagttgtcattgagtgtaagccaaaagcgtctccaaaacctgtttacacctggaagaaaggaagggatatattaaaagaaaatgaaagaattaccatttctgaagatggaaacctcagaatcatcaacgttactaaatcagacgctgggagttatacctgtatagccactaaccattttggaactgctagcagtactggaaacttggtagtgaaagaattacatccaggctgtattcaatccatatctacatctgtattttaactgtgtatgtctctgttctcagatctgtaaataaatatccttatcacaaa

SEQ ID NO: 141309 - DNA, 489 bp, Homo Sapiens
tcaagtataatactaactttattgtaaaatgagattctctgggtgaagcagcagcaacactagccctgcctgccattatgtggatgaaaacagctagacttctgtctgtcagtgagacagtaacaagcactggatagacattgtaagaaaacggtgaacatggcaaccgctaatgcagagtgaacattacccagcatgaagtcagtgaaaaactgaacatgactctcattgtatggattgaaataagaaaaagaatatggtaattttacccattacactttgtaaaatcagagacatgaatttataagcagtaatttaatttcaaataaatatatttcctttctattcctttatcatgtattttattatgtttctagctggcaaaacccaccagattattgaactcagtaataatccaacccatgatgctccatctgtcttacatctaactcactttacgtacactgcaagttcacatagcatccctag

SEQ ID NO: 141310 - DNA, 558 bp, Homo Sapiens
ttttttcacgttgggcttatcaagtatttactaagggggttttataagcttggaaagggctacaagccatggtccctgagcccaagacacttacaggtttgctttctgggaggattggggtggattagagactgccttccagtcagtgaccacaggatgggccatcttggtctctgtccgtatctggtttgggggttttcgcaggactaggcctaggctaaggacagggagggcacaagttctggctgggtccagggtcctgggacccagggccatttgggacctgtgagaatggatggacagcatgggatggggcatgtggtctgagccctcagtagattcccttcaccctcttgttgttggggtcgaagggcgacttcaggtgagcctgggcaccataggtcacccccattctctccagggcatagtccccgctcttcacaaagtccagcgagaccggcccaccgctggggtcatggatgtaaccgtaggcgatggtcttgtcgatggcgaacccaagtcagccctccggacatggcccaccacttggccgttcct

SEQ ID NO: 141311 - DNA, 792 bp, Homo Sapiens
  misc_feature (556)..(602): n is a, c, g, or t
gtagaaacagtgtctcagtatgtttcccaggctgggaggaaaccttctgttagagccttttacacgttctcattcctataataaactgcatgaaagcaggatttctgcagctaaaagtgcaccttctactcagcaggtatgcaatgactgtttttccatggtccaggttccacagccccatttctaagctccctacttaacagaattttaggcagcatttagaacctcctggaaggtctgccatccttagggctcagatgttccatgccaccaaagaatttacatagcttgggcaagaccctcagagtctgtgtctatctacactaacagcaaagggtgtccaggtcagtcttgaatggaatcagggccgggtctgactatagcacattcccaaatgtacatggttgtggggaactaagctatcaacaaggatttactctgagtcatcagcaatgaaaacatttacaattatttctaatctcttgtagacagtttgaacgggctcttttcttgtggtttacttatttgtattattaaattttcacccagtttgagnnnnnnnnnnnnnnnnnnnnnnnnnnnnnnnnnnnnnnnnnnnnnnncagaatgggcaacatttcgagattctagggctgcagatccagtgactgaagaaagcacttcacagcctcgtgggacttgtcacccacacggactagacactcacactataattcctgtctttggcaccagagaaaaaatacctttaggaccttctagtatcacggatcttctcccaacagcatgaaatca

SEQ ID NO: 141312 - DNA, 564 bp, Homo Sapiens
  misc_feature (504)..(504): n is a, c, g, or t
tttttttgaaaattgaatgtcagttttattatggtggattttctcccgtgtcttcacgactcacagcgctgagtgtgctaaccaatggtgggcttaattggggtactaggctcaggaaatagctgccattcttgctaccaagtggcctcacataattatcttaaggcatctcttgagctgaaacaggtggggctggtaattggcagcctcaagtaaaataggaggagagataggctcagagtgggttgcagaggaactggtgaataaattcttgagccttcttcttctctgtcatatcaagcttttggtgaccagctgggtttcgaagcaataagctgccaaatatgctagctagaatattctcatccaaatgattttttgctgaatttttcagcagttctcgcaaaaacgccatcaagtagtggaagacctttttgtggaatatggggagagtagaaatgacctgtttgcttgctgtgtagttgccagaacactccaagcagntatgggaggtgctgtaacagatgacaggctctggaaggctctccaggaaaagcagccagg

SEQ ID NO: 141313 - DNA, 389 bp, Homo Sapiens
attaggatcgtgtctacggttcttggactatagtaggcacttgagaaatgattcagtgaacaaaagacaaatcccggttcttcctctttcaggtcatttctactctccccatattccacaaaaatgtcttccactacttgatggcgtttttgcgagaactgctgaaaaattcagcaaaaaatcatttggatgagaatattctaggtaagcagccaaatgtctatggaaagcatttctgcaaactgagagactcgtaatgagaaatgaggttgaggagggtcccaggtcccttgcagtagaactaaaatatcaagctctgggcaaagattttttaaagcagaaagttttgcgtttggacactcctcgccacgatcctaactctgggtccg

SEQ ID NO: 141314 - DNA, 597 bp, Homo Sapiens
  misc_feature (498)..(509): n is a, c, g, or t
ttttttttatcaatcccacagttttatttgtaaagaacaaagcatgaaaagtcatatttaaatgtactcccaaacctgaaaaacccacgtcagtttgtctgatatgtatgttaaagtgcttaatatcacaatactctttcaaattttatattatgttcagatgagaaaaaaaatccagttctgatgcattttgctaacaatacaaagaaaaacaatataatttaaattcagaaaagctaattaaaaaaagatacacaggttacatttatacatggttcaagtgtaacacagagcattctaaatgtttcacaccctcatttgattgacaacaggaactccttactatacttctctactgttgacaagatttggtgtttagaatcaagattggattcacacacaagtacattcaggtaaattagaacaaatatgattccctcctacataacccaaggataccctggatcccttcgaatgaggaaaaattttatttgaggnnnnnnnnnnnncctctagcttgatgtgatatatctctgaagtcaatctttatcttgtccttgagagggtgaacagctccaatcagattttggagatgag

SEQ ID NO: 141315 - DNA, 349 bp, Homo Sapiens
tttttttaaggttaaaagtttcaaactttattgaagaacctgatcaatggaaagctggttccgtctacacttgggagacttaatactttctagatgtcagttccccctagggtaagttaaattaagtgtagttaaaacacaatacatctacaggattttggggaaactcaaaagcaaattgaccctaaagttaatatgaaacaatgaagtacacaaaaatcttttaacaattttgaaagagaggagcaaaacgtggtgggatagtggagtgagaccccttctactcgatatcaagacatagtgcaagattacagcaatttgaaaagatggcattcacacagaaatagaa

SEQ ID NO: 141316 - DNA, 452 bp, Homo Sapiens
ttttttttaaaattataatcaatcataagtcattttatttgttattaagttatattatcaacaggttattgtcatcaacagattaaaacaaaatgtctcaaaaagacaaaggcaaacacatactattgagagtaaacaatgaccgtcccaggctttccaaagcatatatatcacttacactcatggacttttttttcattttaaaagggcattttgcatgtgttttataactatgaaagtaatacatgctcattgcagcaaacttagaaaatgcagaaatgcacaaatatctgtcttctgtacaacactaactgctagctaccctacacagctgttgtttctcgctttcaaaacattctagtgcttttttataacgtgtgaagcgttcccccaattaagtggtctattaactggaagttcacaggcttctgctctcattcagtagcagaatt

SEQ ID NO: 141317 - DNA, 499 bp, Homo Sapiens
ttttttttacattatttatgaaacagtttatttataaaaacagtcataagaaagcagaaagcaacttccattagctatgtgagattttgaaagttctcgaaatcagcttatgtaagagactatttccaataataacagaaggctacaaaaatgtcagaccaaaatagtaggcagaaggtagaaaactaaaccctgagaataatagtcattaagaagaccttgatgtagacattgcatatgagcatggagattcaggaaggaaattctggatgactggtggctgacaactttcaaatataataaatagagataggacttcaaaagaacttcaacaggaatatatgattttatagtagcacctggccttacttagaataaaatcgtttgttacaactaaagccagcatacatgattcgcaataggagtaaacttgctatagacattcctgtcctcaaatgattttaaaaccaaatttttctaagaacctcatagaaacctc

SEQ ID NO: 141318 - DNA, 300 bp, Homo Sapiens
tttgagaaatgaaactttgatttattggctagagaaaagagatgaagagaggatcactctggtagcaggagttttgggcatgtccctctgagatccatttgatgaaaacattttttaaaacatggtagggcctcattttgcacattttcttcacggtgtcatcaaataaacatcatggtaaatataaacttgttcgcccgtcagaaagcggcgccgggagggagcgagcgtgagaaagtgagcgtgtgcgctgccggagagcacgacccaagagccggcgcccggtgtccgagcgcccag

SEQ ID NO: 141319 - DNA, 921 bp, Homo Sapiens
catgagccccacatccagcattaattttaaaacttctaatcttcaaatccattgttattttaatataatttggtttagggagaaataattatattaaatacattctctgatacataaaaaaaattcagctgttaatctcaccattacattgaaatgtaaataaataagatgtaaaatagtagagtgtttttggataaactttactattactaatattcaaagaaaatcttgggaaaaagttgtctgagagttaaaagggcactgagtcaacttattttgcaccctttgatggaaaaacttgagaatgtttgggccatgtctcttctctgctgacaagaattaagtcagctgcattgattgtgttctgagaaaaagcccaagaaagctcatgtatttggtttctaatttcagtgttaaattatttcaattttgctcttagatgcttcccataatcctggcacattaaaagatgcttcgtttttatttaacaagactagtaggtttgggacacctttaaatcctcacttcagagactaccaaagaaatattctttgactcagatatttaggtggaagtcagctctctgttagtgactaaatatcatgcctgttgtggtgctgctgatgggcaaatcagggagccattcattcttgccaggggagataaatgctgttagattgctcttttttgaaggaggtcagaaaaagctttgattgactgtgaatgactgtagataaaacctaaagtatatgctttgccattatcagcccaccagccttctaagcttcaaaaaattaaaaatagtgatcccttagtaactcagtctgtgggtatttaggagccagatggagaccatatgcccatacatattcctttttatctgctgtggtgggacagtgatggtccctcttcaattaaaaa

SEQ ID NO: 141320 - DNA, 663 bp, Homo Sapiens
cggcatctttgactgctcctcccagtgatcccagagaggatgtggagttgaaagtccctgactgaggcagcctgcagagcccattgttggggtaagaggttgctcttatggtggccgctctgtgggtgagcttttagcgcgtagagactgatatccctccgctgtgtggacggtattgacactgtgagcgcagcagttttgcaggtagttataaattcctggaagatgaaaaccaaaatttaaaccaataactttttctccatcctggaagttttttctaggaaatatacaagaattgatgagggagaaaatgtttatccattgaatctcaacaggaggagtttcatatttgttgctaagaggaattatttttgaaatatttcaattagctttttaacaaaaaagaatgaggacccttgatgagatctacaaatagagtataagtgggggaaaaaatcaaggtccaaagaatgtaaattatataaccgttagtgtaaaaaagagggagaaagtggaaacgtctaagtccttgtttcttatccatggaattgatctggaaggatggacaggaaactgataccagtggaaaactgtgaagagaaaaacttaggctggagcacagaagaatggggagagcccacatgatgctcttcagttttcgtt

SEQ ID NO: 141321 - DNA, 738 bp, Homo Sapiens
ttttggcttttagtccagaaggacctcatctctgcacctcttacttgaggagcaagaggagggaagggagaaagggatgtaggaataagaggatgtggggcactgccaagggcaaggtcaaaaatcagggttgtatctgacttgagtctggacccagggcagcatcagcaggtgaaaatggcaggtttttgtttggaaggtggggggagatgccacaaggtgactccccacctcccttgcctcacagattggcctgttttccctgataaaactcctcccagcggctctcgaagaagcggcgcatgatgtgcccagccttgcctacttcagagtcatcctcgttgaaagtctggcagttgtcaaataccaggagggcatcagccgcaaactcctctgagctggtgtaccctcccctgagcagccgctcccgcatggtggaaaaatccataggatttttgatgatgcgccggtacccactcaccaaacgtgggttcacaggctctaggaaaggccaggctgcatcatgggactccatctccatcaggataatctcgcaaaatgtgagatcactgtggtggttccgcatagagagtcgccgccgcttggagggggagagcccttcttccgagtaccgaggccctgctgctgggctttctcggcccctcaacagtacccggcgtcggcggccatcaccctctgagaagttcagcgaataaccactattccgtactccccacc

SEQ ID NO: 141322 - DNA, 495 bp, Homo Sapiens
ttttttttgctttaaaaagtgcatattctttaatccaggaattagtcaggaaatttatacattttttaaaaagatcaccaaatgcatcccacatagttcctttacaataaacaaaagataaacaacctagcgtcctgtcctatatgcgctctaccagatgactcaattatattccatccatccatggaatcctagacaatcataaaaggacatttatgttaacatggaaagtgaagatacgctttgaagaataggctaccagagagaatacattacacaatcctactgctgtataaaacaaaacatctggaagaatctatgcttaaatattaatagtgtgtcccgcaaagtggtaggataatagtgacttttattctttttacttatctctattttctcatgtttctgtaatgaacatgtttcataaaacaaaatgggtctgttataaaaatctgaaaacttgcttttgaaagagagcagtattacaggctgtag

SEQ ID NO: 141323 - DNA, 394 bp, Homo Sapiens
ccagctccacttccaatttatttcttccactgcaaccttgatgctcccttcaagtcttgccctggagaggaatctcacacaggggaagggctgctctgatgtgctggagagcagatggacagcggtagataatatggggccctggctcctgcatgattattctggtggctgcaaagggcgataggcagtaggaggagacaccccgtgacaccaagagctgtgtccagacatgatcgtcttggcacagcttgagggttttctacagaaactggtagagatgctagacagacacaagatgccagccagcctcctttgcgattggctcttagaggtggaaaatggtaaagtcatcaggctcattctccctaggacaggccaggcgcggtggctcacg

SEQ ID NO: 141324 - DNA, 464 bp, Homo Sapiens
ttttgaagagttatttgggacctgtattcattggctagggccaccataagaaattaccccaaactgaggggcttaaacaacaaaaatttcttttttcacagctctggaggctgaagtctgagctcaaggtgttgacagggtggcctccttctgagggccatgaagtaagagtgtgttccaggcctctctccttggcttgcaggtggccatcttctccttgcctctccacattgtcttccctcatacgtgcctgtgtccaggtttccttttcctgcctcccgggtgctgcggcttccgccacgacagtctcgaccctgcacacggatttttttcctccgttccatgaaccaaacataatgattctggtttacatatttaagcgaaggggagaagaaacgcgactctcaggacccaagggctgaggcagggtttttctgtctcaaagacctccagttaagacattt

SEQ ID NO: 141325 - DNA, 484 bp, Homo Sapiens
  misc_feature (128)..(136): n is a, c, g, or t
tttcaaataggaagtaaatttatttcttggtcccatacagtcccaaaaaggttcccagttagccagtggccctctgcaagtaatgatgtatgctccttccatcttgtgactctaccctcctgaaggcnnnnnnnnncaaggttgcatgctcagctcgatcaatccagcaggtagaaaagagcatggaagggatattgcatgggaggttttcatggaccaagtcttctgttgcattggctgtcaattcagtcataagtcacccctcactgtagggtgtctgggaaattaacataaatgtacaaagtcatgaattttcacaaattgaacaaggcccataagcagcattcagatgaagaaacggaacagtatcagtgtcccagaaatctcccttgtgcttgcttccccttcagttgagtactgtcttggattcctggagtgaattgatgccaaggatttcaaatatatgaattctatttaatttttg

SEQ ID NO: 141326 - DNA, 504 bp, Homo Sapiens
tttttttaaatcttttgtcattaacgtttataacccacatgccatgtattttactacattcataaaggggcttggggatttatccagaatgacataccattcatttcaaaataacatacatcttttctctagacagctaagaatatttatagttgttaaagcaaaaagaaattcttggtaacaagttcttggtgtatggattgctttggctttgatggaaatatctactttctccaaagattggtccctgggcctcaaagcatttaccccaagaaataactgctatgacttaggtcttcaaggcagcttccagtgctcgagctttctctgtgatgttcttctgaaaaggcatcataaaatcgtcgaagtccacctcatgtgtaaacctctctcgccgtagttccctcttcctgatcagctctgctgttgtggcttcaggactccaaatcctccgtggaataaatgtgatatccactttcttagtataaccactggtaatcaatg

SEQ ID NO: 141327 - DNA, 403 bp, Homo Sapiens
  misc_feature (266)..(296): n is a, c, g, or t
tttaatgttagaattcttttttatttccgggaagctgagatacaaaaatggaaccaaaattcagtgatgtagatctttatcatatcttgcgtggtcctctttgtgcatcacagcagggtccatctgctctgggtccttatgacatgacactattctcagtgtcctggtatgttcccgacactgtacaatggctccaatcagccctactcacagtatgtagtcttttcagataggcttctttcacttagcgaagggccatttaaggnnnnnnnnnnnnnnnnnnnnnnnnnnnnnnncctgggaaagctggaggttacaaccatcaaatgaccaatgcccaacttctcttgtttattttaattcttctgttttaatagacaatatttcattttgacattttaag

SEQ ID NO: 141328 - DNA, 459 bp, Homo Sapiens
cctgcgctgcaccttgggcgccttttgcgaatgcgacttccggcccgacttgccgggtgaggcgccagggagcccggagcgaggggcgggcggacgcgggcagacgcgggagcgctgggagccctgggagcccggctggcgccggccagagaagctgaggacccagagggtgggaccgaggggcggggcccgcagacttgggagggtggagggtacccgttgaggtccaggaggccctgccaacctggagagaggcctcagccagcagaacccttggtggaagttcttgggcctccccggaatggcctggccgtcaaaggagaagtgcagtgcgccttggggatgggcggggtctgcggctgaccccgttgacagctcgcatttagagctgagtgcaatctataggaccgcctggtgggggcgctgccgagctgaatcaggcccgaaggtggctctttt

SEQ ID NO: 141329 - DNA, 553 bp, Homo Sapiens
tcaaaattaactgatgtgccagttttttgacacctttattcataagtcaatatatttgtcagtttgaatgttatacacatgataaaatagattatgagaagtatcatatttacaataagaacactattttatataactgactcaccaaatatgcaacctcttgcaacaataacagaatggactcaactccatcctttgaatagaccaatttcatgattctcctaaaaagttttgagttgagtatagttccttgttgcttctctctgtgatccagagcttaagaatcaatccctggaaaccagccactggaaccagacctctccagaattgagaagagacagccatagaaaaaaggacacaaacccaaaagtcttgagcgctgtgccatatgcttgatttcagagcattcaggcactcaaggtcaagtgtggggccatatatatatatgtcctgtcatctcaaatgccacaacggctacagttagcaggatatcagagagaggaggcatatcgtggaggaatgaatcagtcccaacaattatgtgagcatttct

SEQ ID NO: 141330 - DNA, 254 bp, Homo Sapiens
tttgttgctgttgttaaattcctgcatgatgcatcatgtgcaagggaaacttaatatacttttacacccttaacctttataaagtgactagcttttcccttaacataggaatttttaacctggagcccagatttttgagagtacacacaaaattgtgggtttgtgtgcatgtacatatgtccatttttttctagggagaagatccatagttattagatttgtgaaggatttggtgatccccttctcccatcaaa

SEQ ID NO: 141331 - DNA, 713 bp, Homo Sapiens
tttttttaactattaacaaatatatttattgtggtggctttctcccctactagatataccttgttagaaaatagtatcccttttagttccaggtggaccattaagcaggtaataaaattgtttttccctcattgagaaagaaaacacatgactttgcaaacatgttatattctccttgctctattttttttctataaaatcagaattttcttctaataagtatgattttgtttttggaagtaagttacaggcacatgtttacaggttgatatataatccaaggggtaacagaggctgagccacatagtgctaacatagattggagacctgttccaggtgaccacaatccttcacagttttgtaaagcacaaaagtagtctccagctctatgatttcttccacatttgtctttctccaatcccatatggtatattcaattctggtatgcactcttgtgtttcttataaaaatacaggatgagagtgatggaactaatcttaaaacagttgtttctgtgatgataaatcctgtgattccaaatgccaggccctaattctgagcactctctagatctcccggtcaaaacaacactgtcctttgaaggatgtttctcttccctgaactcctatttgttttgaagggatactgtatctttgaatttgcagaactatcttttgcttcttaaaacaacagcttgaaaacacatttttacc

SEQ ID NO: 141332 - DNA, 524 bp, Homo Sapiens
ttttttttgcacagcagaggaacacgtttacttgtcagttcatggtttcagtctccagccccacagcgttgtacatggtggaggtggcagtggtggtggggttgggtagtgcccacagtgcctcactctgggggagggcagggaggtgggcaagcatgtgggcaggatgaagggcatttaggaggacagggcttggtgcagggctggggagggcaggatgaaggagactgcgaggggcagggcaggcacttgggtggtgctggacacttttcccatgggcacttttcgaaacagcgttgcagcagcttctttaaacagctgggctggcatttggactcacacttttgttcacacttgggatcgcagttcttgggctcagtcttggggtcatttgatttacttttatcatcactcgacattgtttcttgattatctgagccccctctgtgttggtggtgaacttgacaagcagttgagtgaggtggatgttatggctgtgcctgggaaggggcttttccctttgg

SEQ ID NO: 141333 - DNA, 886 bp, Homo Sapiens
tttttgaacataaaaattctttatttaacctaatccagccagtattgagatagtttgctatattaaaaacaagacgtttaaaaaaattacagcaaagttagcaaggcagtgactaattaagtcactaagtttaattttatattcttcacagtcatttcataatcatgtaatggtaaacaatattttcagccactttggagataagttaacttttgaaaagaatagaattctagtagtcgtcattgaattttataaaagaggtttaaaacattaaagtttccagaaataacacagtaaagaaatatgaaaataaactggaaaataaaatatacccacccatccgaaaaatctacatcatctctttcatttgtccccaatgcctttcttttacctctccatttacttttcctagagtgcaaacagattacttagcaattaagaaacaactactgctttgtaggggcgattttgagcctaagtgctgctgttcctttaatctctcagttaatcctagaaatagtcttctgagataaacattatttgcatttcaaagattaagaaaactgcagttgagagaaagtcaaatcctttagccaaaatcatacatacagttattgaaagctgaactatgatttgaacccaggtctatccaactttaagtctgcctatgctcttttgttgcttcatggtcaggcaggtcaccttcctgggaagactggcatgtggtatttctcgagctaataataataaggctctttaggtttaaaagtgttcaattcggggctagaggccactctggtcctcaggcacttgcagttccctccccgcaaccctaaaaaaaccctccctcctgccccaaaaggattagagttgttccccggccttc

SEQ ID NO: 141334 - DNA, 458 bp, Homo Sapiens
  misc_feature (234)..(247): n is a, c, g, or t
  misc_feature (369)..(418): n is a, c, g, or t
tttttttcaccctgttccaggcctttattgttgccacaccaaaacagtggcttaaacattaataattatttatttggctctggagtctgaaagagtgagatctcagcttaggagttctcactccaggtctttcatgtggttgctgtccaatgggcatcttgaagttttttccatcatgtatctgggctgggaagattcaaacatctaggtgctggcactgctagctgctcaggnnnnnnnnnnnnnnattcctctgaattgtctgtccacatggagacttcatgatagctggacttcttacattcagctgaaggcacacaagcctgcacctggcttattttacaaatcacagattggcttgaatctgtnnnnnnnnnnnnnnnnnnnnnnnnnnnnnnnnnnnnnnnnnnnnnnnnnnccttccagccagataagctgagatctggtctgtttccact

SEQ ID NO: 141335 - DNA, 762 bp, Homo Sapiens
  misc_feature (311)..(337): n is a, c, g, or t
  misc_feature (669)..(702): n is a, c, g, or t
tttgagagtttttaagcaatatttatttgaccgtaggttgaaagttgtcccccatctgggagcaacttccagaaattataatcctcagaagacactgaaatgttgatctggtccaatcccttcctgtggcacctgccctctctcaggagctcctaatgatcacaatcttctttgctaccatttaccaagggtctgttatgttaggtgcttcacatacgttaatttgaatgatcctttccaaaattacctcaaaaaagtttaagaaaaaatcctgtcttttccaaatggttgtttaatccattagtgtaggnnnnnnnnnnnnnnnnnnnnnnnnnnncaaccagagcaaaaactaagtactgggatatttggagaaagcagagactagaaaatgcaaccaggtccaatttaactgcaaaattacttcctcacagagcaaaatggctggctctgacacccaagctgttcagtgggacataatgggcagagtgaaagaggcatcaatggctgtggcctctgaggatagtcacaaattcctctggattgtagttgcctcatgtgtgtaacccttaaaaatccaagtcaccatgtggcccagtatacaagcctgcacctggcttattttacaaatcacagattggcttgaatctgtcttttgtttcttaggannnnnnnnnnnnnnnnnnnnnnnnnnnnnnnnnncattccagccagataagctgagatctggtctgtttccactgaggggtagtcatcagtcta

SEQ ID NO: 141336 - DNA, 717 bp, Homo Sapiens
acagttacagagcaggtgtctaaggatgactaaggacagagcaggttactaagaatgactaaagacacagcaggtgttagaggctagaagggggttgtttaatgaaactaggggcaaggaggcataacgaacgaggaagttaaactttaaaacggagaacaaagaacggagaagctgaacatactgacatatttgttctttgatgaggaactcagaactcattgtacttaatcttcccccctcttgaattttaaaggatgtttacaggctaaaatctttgaagaggaattcactgtatcctattcgtcaggtgttctttccaccaagctttcagccgtgtcaggtgttctttccgccaagggtgcagcctcgtcaggtgttccttcagatgttccttctggattactattttgagaatttttagatatcttttgtttatattccaaaagttgttgatgaatgcatttaaacttatcaactccatttgcatttgcatttttttgtcagtaaaaattccacaatttgctcacttcttttccttatggccaataaaagtggtgtgtggccagccttgttcttcactttaatgtctgtaccacaggacagcaattttgccaccactgacaaattctcactgttaacagcataatggacagctgtgttgccatacacatctacaatatttggatcagcaccagaatctatgagaatatttgc

SEQ ID NO: 141337 - DNA, 329 bp, Homo Sapiens
tttttccatgggcatttgttctggtttatttgacaggggcggggagttcaaacactggggagggtggcattcctgttgatgttcttgtgctgatgatttgatgtccttgtgcttcggatgtgggcacagtctcggatggaagggttcagggagcaggatgcacatcccagcccactctcccactcataggatgctcatacaaatgttcccacagaaacatttcaaaagcgcaacaggtaagagatatctcatatccaggtctgatcctagagctgctggtgggagcccagcagaagagtcccttaccagcaactgtgctggatctctcc

SEQ ID NO: 141338 - DNA, 403 bp, Homo Sapiens
gcatgtgccaccacaccaggctaatttttttcttttattgcagagacagggtctccctatgttgaccataccggtcttgaactcttgggctccagcaatcctgggcttcccaaagtgttgggattacaggcatgagccaccgcacctgctcacagcatataatttttcctctgaggactgaggaaagaatgaatgccttgggcatgacaagaagcagccctgcttcctctggagctctgcctcaaagggaacaagtcccaccacttccctgaccaggccctggcatcatgggagcaatcccattctctggcctggagcattctataatgctggccacatgcagaaacattacaagcaaaacaatgccagttgctatgggcacagagttggagagaagtatttc

SEQ ID NO: 141339 - DNA, 586 bp, Homo Sapiens
ttttattcttaattgtttaatattatgtaacgagtaataactgtacccacggaaacccgtgacgacgattcgagcgaacctcgcccgctccttcctcgccaggtggtgggcagcgggtgtgggaaccggtttgggaaatgagtggatctgggcatccgggctactgcaccggctttttctgtgaaaaacataatgctagagcctgcctggacttctcttaaacctggatggcatatagtccggtataaaaaagccttgagtaaacacgtatagtcaacgttgcctctttctccatgaaaacctccttctccctggaaggtgcatatcagacaatgtgaattgagcagtgaagatgtgggcatggggttcgtgttcttgatggagttcaaaaaattgtgcatatgaacacgtaggacgtcctagcccttgctctttagaaaaacaatcggatcacctgttccacacgccagtcgcctccttggtcggctgccatttgtctgttgatggtacagtccctgccagggtgctggggggacctcgtctgcggagccggcacacaggtggctatgggcgggggagactgcag

SEQ ID NO: 141340 - DNA, 1347 bp, Homo Sapiens
  misc_feature (141)..(167): n is a, c, g, or t
  misc_feature (217)..(299): n is a, c, g, or t
  misc_feature (314)..(324): n is a, c, g, or t
  misc_feature (475)..(495): n is a, c, g, or t
gccatgtagcaagatcctgtctctaaaccaatttttaaattagtcagattggtgccacacaaggaccatcctagctattccatacgctgaagccggaggatcacttgagtcccgtagttcaagtctgccatgagctagctnnnnnnnnnnnnnnnnnnnnnnnnnnncagactgtgagaccctgtctctaaaaaaactaggcccaggcacaatggcnnnnnnnnnnnnnnnnnnnnnnnnnnnnnnnnnnnnnnnnnnnnnnnnnnnnnnnnnnnnnnnnnnnnnnnnnnnnnnnnnnntgtcccaccaaatgnnnnnnnnnnnttagcccggtgtgatggcgcacacctgtagtgccagctactcaggaggctgaagcaggaagatcccttgagaccagcagttcaaggctgtggtgagctatgatggcacccactgcattccagcctgggcaaacagaataagaccatctccnnnnnnnnnnnnnnnnnnnnnttttaagcggcttaaacaataaagcctttattaccacatagtccagagcagtatgagacagtccatgctagggcatgacaaataccatgtgtaatgtcaaccatttccatgaaaatggtaaaccttcccaggaagcccccagcagataccagctcagctcctccggccagaggtgggtcatgtccacagctaaaccagtcaagggtagggaatgaggcctgttttgggctccactattaacgattctctactgtttagagcaaggagcacaaggtctgctgtcccacttgctgtagggaccttatggggtggatagaggtggatggcggtggataaactcagtgatgtgacactgccaacagccccaggcaagtcagagtgcaatgtgggtcccgaaagcgtcccacacaccaggcacacacgggaactctccctggggtgggtgttgggatgtgcaaggtttagcttctttcggatggcactctcacggccactctccttaacctcctttctggaataagacctttcctgatgaacacggtgctagcagctaacgaccttcccatgtgccctgtcctcctgacgcctttctggagtatggactttcttgtgctgaaggagggtggaactatgtttgaaggccttcccacactctgtacattcataagacctctcttcagtgtggaactgctggtgccgattgcggtaggatctggtagtgaaggttttcccacacaggctacattcatagggccgttccccagtgtggactttccagtgctgatagaggcctgaacgggtccccggccgtaatggccgaattcccgggcatatgtccggtaccgtcgactg

SEQ ID NO: 141341 - DNA, 514 bp, Homo Sapiens
tttcagtttagacactttatatcagattaatccaaccaaggagccgtgaaagacattctttatggatataagccaccatagtagggcccatctggggcgctggccttgtggattctgggccagaaaatggacttaggatgatttagatggacattcaaggctatctttagaaggacttttgctttaaatagagtgttctcaagctgatgttctatgtttaatgttcctcatggagagagggtgcagagggccaggagagatgaaagttaattagtttggggaccttggcacctttccaaggcattctcttaaatgaggtttttcatgggcatacattgaacccaatgttgctgtgctgcaagtaatgagaagttctcctctcagcctggcttgtccatgatgcgtccacagctggaggtgctgtggtgtcatgcttcccagtgaactgcaagtctagcttcggaacagtgacattgacagttctggaggctcgaaaatccaaggtcagggtact

SEQ ID NO: 141342 - DNA, 526 bp, Homo Sapiens
ctaacacagaacttttctaacttaacttttggagaagaaaatagaaaaccacacccagaggacagctgtgtaaggtatttactcctcagcattaggcaaaggagtcctacagcactcttacatgtcattctatttcaacagatgattcaactggtcctgtagatccgatgactgttcaacattcttctgaatagcttcttgctggtattgaagatgtgttgttattattgccatcttccttaaactatcttctgagtgcaagatggcatcttcctggagtaccatgtttcgagctgcctgacctagcagctcggagctccgggagcctttcagcacctgcttggtgagcgcgattacgtcagtaccacaggtggtcaccttctccgtgagaagccccttcacggactgaccgaaccgcgcttgagactctggcgttccagtcgccatcatttcagttagcgaacggttgcgcactccccggccgtaatggccgaattcccgggcatatgtccggtaccgtcgactg

SEQ ID NO: 141343 - DNA, 721 bp, Homo Sapiens
tccctcaagggttggtcttagaaataggagaaacagtccagattcttgaaaaatgtgaaggttggtacagaggagtttcaacaaagaagccaaatgtgaaggggatctttcctgcaaattacattcacttgaaaaaggcaattgtcagtaatagggggcagtatgaaactgtggttccacttgaagattctattgtgactgaggttacagcaactctacaagaatgggcaagtttgtggaaacagttgtatgtgaaacacaaagtagatcttttctacaaactacgccatgtgatgaatgaacttattgacctgcgaaggcagctactgtctggtcacctgactcaggatcaggtgcgggaggttaagcggcacatcaccgtgcgcctggactggggtaatgaacatttgggcctggacctggtgcctcggaaggactttgaagtagtggactcggaccagattagtgtctcagatctctataagatgggttaaatatatgtgtttggaaaagaaatggaaacttccactgccacaaccattcttcttacccatgtgatatggagcaattcaacaaatgagtgtggtaccatacctctagggtccaaaaggaagcaggatgaaatctctcattgtttcgtttaccaacaccacgcactgaacatttgtaaattcaccattattcctggccagggtttacttctaaatgtgaatggctttct

SEQ ID NO: 141344 - DNA, 823 bp, Homo Sapiens
  misc_feature (353)..(410): n is a, c, g, or t
gtgtacagccagactcgcgcctgttgtttctttcggcgtccctccgcggtctcgcgcgcgcccagcattgttgtcctttcgaacgcgtgcgtgggagtgcagcgggttgtgtattaaagaaggagggtggctgcagacaacattctttgttagggcggcgcgcgggatggccccccgcaggaagcggaatttttctcttcgtggtgtagacgtatggagtggcagaggccgattgcgtggagtctgtggccgcgggagccgcccgtgcaggtgggtggtgtgggggttagctgggtgtgtggcggggttgttctgtggtctggatacgggcggggtggtttggtctagggggnnnnnnnnnnnnnnnnnnnnnnnnnnnnnnnnnnnnnnnnnnnnnnnnnnnnnnnnnncagcttctcaaactttattttcattgcccaaggttgagagatgtagcttcttgctactttgcaggtatttcaaccattatttccatgaattcctcctcctccatttggagggggttgattctgttctctcgggcgtggtcattcagcagttcctctggagatgttcttttcacgttcctcctgtagcgaaccactagtatggtcgaggactcagatgttttcatttttttaggagcaggttgcgggtctgagtccccagttggggtctccggcatcgtctcattcacctcgttggattcacaggggacgctcctcttcaccccgccggcactggattgtttgtccattgtatatattggttcttcaatgtctgcggcaggcttttgtaggttttgaatcttcgcagtggcccc

SEQ ID NO: 141345 - DNA, 565 bp, Homo Sapiens
ttttttacgagacaacagcttttatttcaatataaggaagaacttgatgtggagcctaatcgccaggaatgttaaacaggtgcttctcaaagaaaagtcaagtacggctaagcaaagaaaaccaggtacctttcaaacacggcttctcagggtcctggtgctcatggccgtaaggagtcaccagcaggagctgatgggctgtagtgcttgtcaaacttgcttcacggatggaagaaaacaaaaacatgagttgggctcccaggtggagagccagaacgtctgacatcctgggcagccagtgtagggacgttagagcaagtagtcaggcagatacaagcagggctggagaggggtccctccgaccagcaatgtccagtgaccatcaggtgattgtcaggcagttgctacactgtctctctaagataataactggtcacagctggtgccaagaaaaggcagtctccccatagatagaaaacacctgaagctggtgatcagcagcagcttcctcataagatctcaggagttaggcgagtgggcccacgcatgagctctcagaggcaaa

SEQ ID NO: 141346 - DNA, 396 bp, Homo Sapiens
ggtggaatgctagctcccattcatttcccacctgcactggacgttttctgaatctccttgaagtccgggagatcttcattccaaagctcttcacttttctgcagcattgtgaccccatctggctggggaactggaagtcccagcgtgacctcattttcagaattctgctgagttatttctaggtggttcttcagtccaggttctggatccctccatgcctcctgggagctgctcactatctcctggccacccctgctcttctctgcaggaattcccagagccacatcaggcagggcttggcatcccgttctttaacgtaatgtaatacatttcacacgtcttccgtctccatttggattatcaacatgacgtacataacccgttccattgaccgga

SEQ ID NO: 141347 - DNA, 716 bp, Homo Sapiens
ccgatagcaccattgctccaggctccacaggaagccatgttctcacagctgctgagccatgatccggacacctggtggtttcgatggcaggtgcggtgtttttcgtggatccaggcctctgagaattcccagaagaatcttggtttctttgtatccccagtgcactcctgccaccttctcatcctccagggcctgccactccagctcgctccaggtcttggcttttctccagattagcacctgtccagacttgactctcaccccagccactgagcagtctttcacactctctttttctccagaatttgaagatctagatgctgtgggttttcatcctactccacgtgggagttcactttgggcctatggattggaaaatccagcgtgacctcattttcagaattctgctgagttatttctaggtggttcttcagtccaggttctggatccctccatgcctcctgggagctgctcactatctcctggccacccctgctcttctctgcaggaattcccagagccacatcaggcagggttcggtttcaaggcgtatgtaatcttcccttgatgctcttcaacagagacaaggttcctgtcttggcatcccgttctttaacgtaatgtaatacatttcacacgtcttccgtctccatttggattatcaacatgacgtacataacccgttccattgaccggataacaagcagccatggctt

SEQ ID NO: 141348 - DNA, 843 bp, Homo Sapiens
  misc_feature (791)..(802): n is a, c, g, or t
tttacactttttaaagattttaaatttattaatttaagtaagcatactgcatctcctttatggataaatcatgtgccccagagagccccaaagcttgatgacattctgtaaagttacacaaatgtatctgaagaagttatctgttcttgtcctaattttgattctaaataaaaatccaatttcaaaatcaattaagattttaatctaggaaatcttgggattgttacacatgtaaaaaaccttatctctgagagccttttctattcttcttaccacaggtccactcacaaatcgcagctggtatggactggtactgccccaaataagaggaacctaagagcttggctccaagaccccccaccatcccggtgggtttgcttggcctttaggacgtgtgactacagcttttgggtaggtacagggcaatcaagattgaggaagaacacttcagcaaagcaaccattatttgtccacaaaaaacagtgaaaaacagtgatataaaattaacaaaccaaatataaatctaacgccattctgcatttccagaactttttttatatttgtgcagtgttcttggtcaaccactcaccaattttctgcgtctatctgaagtacttttaaagttattaaaactgctcttttgaccataagtcacatagaattgtgattaggaaatcaatttacttattactctgtgcagggcacttgctagggtggtgagtgtaaaggaactaaaaatggaagtctctcacttctaaactggacacaggagttctcaaattaaaataatnnnnnnnnnnnngggagagaggtgcttactggcaacattaatactagacaccc

SEQ ID NO: 141349 - DNA, 603 bp, Homo Sapiens
gcggccgcccccgcgcgggccagcgcgcgcactttgcgccctcgctggccccgcaagatctcggctcccagagggaagcacccgctcccaggagttgggggatcggtcttgagggtctgggcagccgagtgggagcagaaaccacactggtcctcccacccgcgcagcctctcagggccggggccgagcgcgccgcggcggggttttgctagcctttgctgtgtcctggcctcaacggcgccgcgccgggaagtttgcagggcaggcggcgggaagttatttaagcactggctcgaagtgaggacagagaactgggcagggggttacccaggccaattcttgggccattccgccccaaggaacatggagctgtccccaagctttcttgagccccgccgggcggacgcttctcggctaatctttctgcaacttttacaaagctgcctcctccccagtttgatctctgcaaacacatccttggcgtccgcggcagcttggaaactatttttaccgtctggggccgaggagttgcattgaaataaggaaggcgaggcgccttctctagcgtttcaccccggaccaggctgggtcacccagtggcct

SEQ ID NO: 141350 - DNA, 588 bp, Homo Sapiens
tttactagcaagatttattgcaaagagcgaaagaacaaagcttccacagtgtggaagtgggacccgagcgggttgcccaactaaattcttaattctgaattataaactaaaaaattaaatcaaagctatgtatatataaaaacacttacatataggtatatatgtaaacacatgctacttacacattgcttttttaatagttcttttgtgatcaacactcctataatctcatggtagcaccaccaagtgtagtttactatcagaggtcttacctggattgctattttgagaatttttagataccttttgttatattccaaaagttgttgatcaatgagattaaacccacaagcaacagcataacgttgcaatcattccacacgtatcttcagcacagatgtcaacattttgctgaagaaccatgccaactatctctgatgatccatggcatatggcaagcatgagggctgtgcttgttcatcacttcgatgtctgcaccttaggacagcaattttgccaccactgacaagttctcactataaacagcataatggacagctgggttgccatacacatctacaatatttg

SEQ ID NO: 141351 - DNA, 968 bp, Homo Sapiens
  misc_feature (231)..(244): n is a, c, g, or t
  misc_feature (344)..(396): n is a, c, g, or t
  misc_feature (436)..(448): n is a, c, g, or t
gtgccacaatagtggagcgaggattgttttggcgcgcgggtggtatattaacaccgggtgcaaaaatatatgtggtgtggcgacgaagggcgaaacgggtaataagagcagcaatcgggtgggggaggtgaaaaatagccgtgcgaaccgcgggggggaaaaggctatttccatgggcacggagaggagggttaaaagagaatttccacccacggtggtgcaaaaggaaannnnnnnnnnnnnnaattaaatggtgggataagagggctaaaactggggcatccccggtttggggagaaccagtaaaagggcccccaaaaaatggcgctatttaggatttgtcnnnnnnnnnnnnnnnnnnnnnnnnnnnnnnnnnnnnnnnnnnnnnnnnnnnnntgccaaacccataaggcgggggccaaattgttccttgggnnnnnnnnnnnnnccagggggcccttaacctggggggggccgcgcaccccaaggggaggggtttaaaacaattttggggggggacaaagccgcccgaccaattagggttttgatatggtattatgggggggaaaaataagacatcgggggggtataaggtatggggagtggtgcggtggggttgggattttcacatttttattgggagccgtgggaggggccgcctctgtcagtggaggtgctcacagtttcttcagccactccaggctggggccctgagggtcctgggggtggctgggcacgtcgggcatgttcccatcatcacggacgggcactgggtagttgtagggcgtggccttgttgatcatgacggagtacttgaagtaggggctcaatgggggcagaattacagcgaggcccccgacgacgaaggacacgaccagcactggctccttgtcccaggcattcttgaggaaggcgccgactctcgcagccatctttgtctccgcggcggcgacagcggcgaggacccc

SEQ ID NO: 141352 - DNA, 550 bp, Homo Sapiens
cagtcccatgatagcacctctaatccacactagtgacagtaacaactggagaataataatatatttgtttttgaggccctggaacatctctgaggactatcgccctacagagaacagcttttttgatgctccatgaagacagaattccagtggatccacaatgggtgggaggaagtctaacaagactcaaagccaagtacaaggggtgaccatagcacagacaatgacaggaagaatccttgcttctggaaacttcccgtaaaagtgcaacattacagaaggtacagagaggcacctctgtgcccaaggctggagctcaccttggagaagagagccatggaaatgctgggcttggtgacaacagcaaggacaacatcagcatcaagtagcaaagatgcacctgtttcccagcagggaaccagctttgctcctcacgggcaattagcaaggtttgacttaatttaaagcctacacaaccactgatctctgagaatatgagtgatgttattttttgtaataaaagtaacagtaaaacaccaataatgccaat

SEQ ID NO: 141353 - DNA, 760 bp, Homo Sapiens
tttttgcaagagattaagactttaatagatagcagtatcaaactttaatgctcttataatttgactcatattattcaaaccaaccatagacacttctaattttacacacgaagtaaatgctttacatttattttcagaaggtttcaaaagtatgcccacaagcttctttacagatacttttggccatgatacaaagccagtatatcactaaatgccaactgtggttatctttagataagaaatgcaggtagtccctactttttagctgcatccctttaaagaatggtatcaccccgaccctcaatccatagttttcatcaccatgaaggcaaaagtattttgtacagtagagtatgtgctttatgcagaatcattttaaatgaactcagagaaaaacatctcatctagaaaacaaagaccaccaaaaatagccagtcctggctttgtagtgtaataaagctcatactgtttgttggtggatttggcagttgtctataccaggagtccaaaaacttcggcctatgggccaattggagcacggcaacattcattcacttccttgttgtctacagctgctttcacaacttttagaaaagagccgcggcgccgagaaagtgggttggttcccttcctccttcggactgaagcggcagctgcggaaggctccggcgcggtactcctcttttcctcttcctgggtcttttcaggctgcggcttctgcccgtccagggccacttctcccgggacagtcaggtttggg

SEQ ID NO: 141354 - DNA, 381 bp, Homo Sapiens
gagttcatgctgacaccaacaccctccaggcaggctgaagcaccggccatatgctgttttacacatggaagtgcttctggaaatagtcctttcgattacatctcaaacaccccaaggaagctgatttttccaggcttgcagtggcttctggtttaaaatgacatctggcaaaaagcttctcaccaagagtttggacggcactaagcaggaagaaaattcatgctaccaccaagaactggatttgattatcaacattttctagaatctgggggcaagtttctctacttccaaagctaatgataatgggttggaaaaaatagtaaatatagtaaatcaactttgcagggtcactaaaaattaataaacaagtcttattatttg

SEQ ID NO: 141355 - DNA, 685 bp, Homo Sapiens
  misc_feature (485)..(498): n is a, c, g, or t
  misc_feature (635)..(635): n is a, c, g, or t
  misc_feature (670)..(670): n is a, c, g, or t
tttccttttaattgcgttttatttttccatcctttagatacacacagaatgtaaaagggagcatggggctgggggacgggaagcaagaagcagcagccaggcgcttggggaacacgcgagtggtaggttttggggctccctaaggccccttggtgccgctgctgggaaggcggaggctcaggagggcaggcaaccacagggttagtccagacccacagtccacaaagacagcattaaagagggcttacaaaactgcaagattttacaaagaccttacaatagcaacatagaaaaggggaggtaaattccagaaagctacagaacaggtagataatatccttttcatattgtacaaaaaaaccaaacctgacagactttcctataggtagtattttttcagtgttgaaaaaccaaaatttctcctttctccctccttaaaaaatgtttttaaactcctttcatttaaatagggtgtttgtattgannnnnnnnnnnnnnggtatgattgttacttccctattcgatttgagtttcctgatacagatcccagagctgggcttgtctgtctctacctgtctcatgtctcttgctctgacctatctgcatgcctcactctagctcgtacttctctgcancagaccctgctttggccgatgttccgcggcccgcngcttggtctgctttt

SEQ ID NO: 141356 - DNA, 672 bp, Homo Sapiens
catcatagcatgcagacaaactacgacaatgaccgagctataatcatacatctgatagtccacgagaagttctggtcctttgaagtactttgaggctacacgaacattgtactcctgagcaggatgatagaattctgccagaccccaatctatcagtcgcagctttttctgttggtgatctatcatgacattgtgaggtttcacatccctgtgcatgattcccttgctgtggcagtaatccagagctttaagtagttcatacatataaaaccggatatcaaagtctgtcaggatctggtagagttgcttaaaatctgtattattgatatattcaaataccaaagctggtgtctttgacacggggtcctttacagtgtcaatcagcttaatgatatttgttccaccacgaaggttctccagaatcttaacctctcgttttatcttctttttcttcactggcttcaggatttttacaaccactctctcattgttggtgatattaatggcctcaaatacttcactatattttccccgaccaagttttcgaaccagttggtaatcatcttgattaccccagctcgggacgtgagcctcgtagtcccagtactcgcggctcctcagactgttcacctcggcgtagacccgggccctgctgcccgcggccgggccggg

SEQ ID NO: 141357 - DNA, 753 bp, Homo Sapiens
  misc_feature (159)..(159): n is a, c, g, or t
  misc_feature (191)..(191): n is a, c, g, or t
  misc_feature (281)..(281): n is a, c, g, or t
agggcattctttcgcaagatgcggggtacacataggatgcacatcgcttctcccaggatcatcctgttcggtcataatgggtgagagtctccactaaatagtactagcatttgagctagttcgagggcgaaatgtactaaggttatcaaagtcatcatngctgtgagagccagggcttgcaggccatttgnaaaactgtgatccagggctgtccccagcaccctcctggccagactggagagatgctttcttcttggcagctcggcttcggctcttagcanatttactgttgttgtccatggatgcagctcttctcctaggagatttcccgctcttgccaccctctggattgagcatccaccaagaactttttccagttccttcattctgcacacgaatgaacttgctgtgtagggacagattatgacgaattgaattcttccagcccgccgagctgttgctgtcacccttatccttgaagtagggcacgctcttgaccatccactcgtagatctgcgacagcgtgagccgcttctccgccgagctctcgatggccttggtgatgaggtcggcgtaggacaggttgccccacgcgttgcggcgggacgagctgctcttgcgcggctgccccgcgagcggcccagcggcggcggggggcaccggcgggtgctgcgacagcggcccgggcggcgggggctgcggtggcgctgggtgcaggcagcccgcctccgggccctggaagtccccgctaag

SEQ ID NO: 141358 - DNA, 456 bp, Homo Sapiens
tttttcaagaacccaatttaatcagatttacgagttgacatgtacaaaaaacaccgaacaatgcagaattcatcgcaagactagggactgaatctggaaggtagagtccccgccccagggaggggcccagcgtgttggagatctcaaggttttttcccactgattctctaagtcttggccttatctaacacatgaaaccaaaccccacaactgaggctaagatttaagagctacccagagctaaattttcccctccccaagcctccctgctctagaagtggaagggaaagaaggggagagactatgaacctaaggagagtggagcctccagcaccaccggacagggactgcatagctgtccgacaactgagctcctcctgcctatctgtggccaaatgccctccatgtttgcaggcaggttggccaacaggggacagggagggtggggggaggcaa

SEQ ID NO: 141359 - DNA, 451 bp, Homo Sapiens
ttttttttggtggtactgaattcagagtttatgagatttccaagaagaattaaacatatttcccacagacttgtgaataaatttccagaaatacacagtacttcttagcaaacgttgggtagcttagcttcggcttgataaactgcacttatacggaaacaaacgcacaatcgctctggtgcaaaagtaaaaactgtgattggagtctgtatttaaacgtaagattcctctctagctctctctgaagaagttattttctctagcacgtggtagaattcattccattaacctttgtaaagtgcttaatcccgtgtcacgcactgtactagggtctagcgagtgacagatgtcacggtacagagatctcagtgggtcgctgccctccaggagcttataaagaaaattttccttctgcagttttcagccggctacacccagtcccctgcaagta

SEQ ID NO: 141360 - DNA, 621 bp, Homo Sapiens
ttttgagttcacatttagcaattttttattcacactcatgagcggaataaacttcacagaagatggtctctctctccaaactgccctttcttctcagctttctcttttatcctggattgcagaagctccagattcttttccctctaataaacagggaatgtccccctcctctgaagtcttggcaccatctgatacctagatattcccaacagagaatccagtctctcagataggcgtccaaaaactgtgatgattgtccaaactctccgaacatcttgagtctgcaaaatttcgctggcagtcttgtgggaagaagtttcttttctgcatgagccatagtgtctgcttcaagtcctggctcaaagtcagacttctgtaaggcttgtattaacttatattcctataagtagtcctctttctctgtgtccttgcctgagttcaccaggttttctcatacctcggcctctctactcctggtttctgattggaatcccatatggtatttctcaagtgggaggcaaatccctaagcatttgcttcaaaatcaatgaaatgagcaggtagggtgcttgagaaaaataaggattcccaagccccatcccaagtctgctaaatcagcat

SEQ ID NO: 141361 - DNA, 403 bp, Homo Sapiens
tgcatctcccatttcagtgaataggaacgccccccactcaggcccccaagccatgaaccgtgggcataagtccaagtgtggtcctgcttggcgagcccaatcaccgagcttcctgaacagcaactaaccacaccccactgcatgctcatgtcctttccgtggtctggttcatctcctctcacctaggctcatcatggcactgacagaggaagatgagtggtgacaagccaagaactcaggccaggctgcccagggtcaaaccccagctctaccactggggaaccttgggcaagtgactgcccctctatgccccagattcatctgttaaaggagacagaataaacctacctcatagaattaatgggcggaaatcaggtataattgtcataagtgctttatgtct

SEQ ID NO: 141362 - DNA, 547 bp, Homo Sapiens
ttttttttatgttccaagctttattgaagcatctgaagatggagcattcagccagtcgggagtgtcttgagatcctgagcagccaagaaatcctagggccttctcttgtatcttttccatggtgagtaacctattcattttgggagagaagatatctcgtggtatttctgatatagcgccttgaattctgccagtctatctcagatgccctgcggtcatagtggggtttgcgatcaacaagcctcttcagaatgccctggttttccatggtgattctcactagctcgcggttccttgtttctctgtttaagctcttggaaaaatattcattccagcaatccaccttggcagggccgcgatgggcatttgcgattttctgacacagttgcttgttttcatactcgattttgttgattttcttttgttcaccctgtagtttgctcaattttaaaatgtgatttgtgtgcgccactggaggtttggtatcaacagtaggcttcgctatttgtattctattcttgtgagatacgtagtggccaaagtccag

SEQ ID NO: 141363 - DNA, 638 bp, Homo Sapiens
tttaagatctaattattcatttattgaacagaaaacgtgctgaaatagctgaagttaggttaaaatctaggaaagagcagaaaggggaagatgaaggagttttcttctcagaatcccaagaattgagaggggttttttttaaaggtgctgatgttcaaaatggtaggatgggaagccagggccctgagttccttagcacagaaacccagagatgaaaatgctcaaggggctgaggctgcaggagacatctggggaggggaggggagtttcctcagcatcacatggaagagcttaggagcatgaaaggatgttggaatcataagaaggtcttagagtcataaacatcctgaaatgtactcctctgatcatgtctccaccctgcacaaagtctccatctgggccaaataaagaccagaccctgtagtcagacaataaaaagcctcctcgaatcccaagctgtcatcccaggctcggtttccactgctgccattaagggacactgtgctccagcgccaccgaagtctgtgctgtttctcaggtacacagggcacttccacctcgttgtgccagggcactgatggtcttcttcacctgaaatatcctgggccaagtgcagtggcttacgcctgtaatcccaa

SEQ ID NO: 141364 - DNA, 512 bp, Homo Sapiens
  misc_feature (501)..(501): n is a, c, g, or t
tttgagaacaaaataggcattttactgaaagatactgaaatgtactttcaacatgcttgtatttaattttacagtcatttgggaatcttcttaacccgtgattggagggatgcaagagattttcggaaggtagactgcacttctaactgaagcagcctgggaatatctgggtacccacccagctgggcccagagtgaatgcatagatgtcttctctgctattgggtagcttgaagtggacagatcaacattccagatggcctctgtctggtcctcttgttgcctaaatttcttgcatatgtcagaggttctgtcctcttccattagtaattttaagaatggcttttgaacaaatgtggtagaggcaggtatctgcttttcttcgatgattaaggggataggttgactaagattcaattcatgtatctttttgagctggttgaatacctgtatcattttcttcaggcactgattccgtttctgccctagagacttctgcttnctcagtccaga

SEQ ID NO: 141365 - DNA, 818 bp, Homo Sapiens
  misc_feature (600)..(600): n is a, c, g, or t
tttaaaatgaacacatgtcatagattttatttagttcattaattaatgagggaaccagtaagatgctacaaccagcccaaaggagaattaaaaatgccacgcatagctaggacaataggaatgctgacatagaatttacaaatagatgcaaaattgatgatagccactggacagtctgtccacatgtccatggacaaggatagttggcattccatgggtcttttacaactttgcaaaccgaggaaagtttaggtcctcctttttctttgctgacctttcatgggtcagccctcatttggacatcaacactcctgagacatgtggtcactgcaataattgactgaaatcagtaaagacacaatttctccctctgctgctccgtgttcctgtctagatagttgttttcctctccaagtaaaacttgttaaagagcttaaagacaatgaagggcagagagagccaggatgtgaatacttttctgctgtactgtctttcacagatccgtgttgcagctgggagcatggggaaatctggacacgcacttcaccaaaatgagacaactgtggcaggagacaggctaaggcgagtggggacaaatcnatgtgctggatgccctggtgtacctgtgacgaagaagcaggagctgaaagaagtctgaaatttggaagtccagggctgggtcagaggttcagagatgctggggttgaggcctagatggctttttggccttttccccaggaaaaaacagaatcaatcagaaggtggctgatgtaggtcaggtgggctggggctggaggggatgggaggctgtgagtctg

SEQ ID NO: 141366 - DNA, 667 bp, Homo Sapiens
aatttccacatttttagcaacaggtttttttctccaacaacagttttcatcataaaaggtgactaaaccagcaaatgagaagacaaataacattgaagaacatgagctattgaaacttactttttattattttttccagttacccagcatgccacaatctgattgctgacctggatggaacagagtgaaataaatgatttacaaagagatatttacattcatctggtttagacttaatatgccacaacgcaccacgaccttcccagggtgacaccgcctcagcctgcagtggggctggtcctcatcaacgcgggcgctgtccccgcacgcagtcgggctggagctggagtctgactctagctgagcagagctcctggtgtatgttttcagaaatggcttgaagttatgtgtttaaatctgctcattcgtatgctaggttatacatatgattttcaataaatgaactttttaaagacttgagttgtaatgtttcctttttatcttgtagtgatgaacaaaacacaccaaaaaggcacatattttaactaggccaaagtatattaaggaccaaactttttttcctgccattcatttttcttttcatgatctatatatcaatcatccttcacctttaatcaatgtcccatcagactccattttatttatt

SEQ ID NO: 141367 - DNA, 497 bp, Homo Sapiens
ttttcaaatttttaagaacagcaatcacacatttatttcacatataaaataaaaatctgaatgttacatttttccaatttaagtccgggtgggtcctcaataaacaaatgcatttctctgaatagcaaattatgtaagtagctttaggcagcataccaaagtcttatgtgaaaagtatgctctctaactctcacaattgttaaggtttatttgcaatgaaagtaattcagaattttcatcctctttatgtgaacctcagatcctcttagcagcatttgccagcctctctaaaacacagagacatacacagacatcatcctcttgttaaaatgagacatcagaagaaacacttctgctctaggacatcattagagctggacaacagccaagaacatttttatccagggcaaatgtttattccctctatcattcagcgcctcagtctctgcaagaaatcaatttccactctacctttccctcctatttcgatcgatcag

SEQ ID NO: 141368 - DNA, 562 bp, Homo Sapiens
cagtttagggcgttgaaacttgagctcgttctcatacatagaaaaatgacttttccagctatatccctaagtgtatcattgctatagtttcttacctatctcctagaataacttctgttccattattaataataatattgttactttaagtcacaggaatctgtgttgaaatgactgtccctttatctagttcccatcagaaagtatttactgagttctctttggtggcatattactctactagattaacagaataaaataatgaagaataatcaacatattttctcctctctaggcattaacggtttaatagttaagatagttatgtaaattcattcacgtaattttcaggatcctatgtgtactgagcttttcccacgatttgttatctactttcgtttcttctgctatcctgggcaagtttgtctttacagatttttacctttttgtcccacaaattcacaaatagcgtacattagttatgtgcagtttttttgtgtataaataagacctcattgaagctgggaacaatattaatatccgctccccctaacacccttat

SEQ ID NO: 141369 - DNA, 504 bp, Homo Sapiens
ttttttttaaaaatcatctctttaatggcatcagaaagctacagaagcaacaaagactaaaggggttaagcctcaaaagaggagggttccgtaggataagcagaccatctgcagcccgcagttcccaagtgcttgttcgtgctgggattaatgacacacgggagattcgaagggcagctaatcttggcaagaatgaagacgcgaaagctgatctcttcttcaagactgtggcaggactggaagctgcgtgaaaacgctggttgaagagctaatttgaaacttccggaaggcagagcagaattgtttacctcgctcagggctaaggaaggggagggctctagttgtccacagcaaactgtctgttaatttcctggaggattagttcctagaaacaagcaacacagagataggctcaccgaaagggcagcttgtcctcagctcagctcagtccctgattggagcgaggaggtcaccctccttaccgaggaaatgggggaccctctc

SEQ ID NO: 141370 - DNA, 583 bp, Homo Sapiens
ttccaccctgtgaccccaagtttagtattcttgtgtttcatatttgatgggttacaccaggcattattgagtgttggtgtgagcaagaggtctaatactgtggttgggaatgagaacgaggaaaggggtactccttatgctagcagattcaaagatatgcctaactttattgcccttgagaagtcatcagttctccgccactgctgtgaccttttgataggcgttgcggctggatcaagtgataagatttgcaccagcagtctccaagttcagagacgattcaaggcaatgatggcatctattggaagactttcacatggtgagagtgctgatctgctaatcagctgcaatgcagaatcagccataggttggatcagctcaagaccgtgggttggagaattaatgttcacatttctatttggagactttgaatcccctctacacaagctacgcaagtcaagttagttgccaagaaagcacagatgacaacctattaatgctgtgagaatgtttctagatcagtgcatggatggctccattgctctccgggccattgtgtctgagatcccagtctttgaggaga

SEQ ID NO: 141371 - DNA, 473 bp, Homo Sapiens
tttgatggatagcttgtttctagttttaatcatgggatattcagtctttttctgtagacttcaatggtctctgaaatgtcccattgtagattttacaaaaagagtgttgccagccagctgaatcaatacaaacgtttaactctgtgagataaatcttccatcacaaagcattttcacagatagcttgtttctggttttcaaggcgaaatcttcagtttttcactataggcctcaatggactccaaaatgtttctttgtagattttacaaaagagtgtttccaacctgctgttgaatcaaaagaaaagttcaacttgtgaaatgaaatcacacatcattaaagtattttcagagatagcttctttatagtttctatcactggatatttggtttttcactatagacctcaatgaacttcaaaatgtctctttgtagattctacaacaagagtgtatccaacttttttactatagg

SEQ ID NO: 141372 - DNA, 465 bp, Homo Sapiens
ttttttgatggatagcttgtttctagttttaatcatgggatattcagtctttttctgtagacttcaatggtctctgaaatgtcccattgtagattttacaaaaagagtgttgccagccagctgaatcaatacaaacgtttaactctgtgagataaatcttccatcacaaagcattttcacagatagcttgtttctggttttcaaggcgaaatattcagtttttcactataggcctcaatggactccaaaatgtttctttgtagattttacaaaagagtgtttccaacactctcgaaatgcctccttctccagcgggacccgaccttggagacggtccgagggggccctaaggtcgagacttttagggtcctgccgtggattatcgtaggcagcctttttcctgataccagaccagctctgactgtaccattttcctcggtttaagcaggctaaacgctctgacag

SEQ ID NO: 141373 - DNA, 1314 bp, Homo Sapiens
  misc_feature (961)..(1004): n is a, c, g, or t
  misc_feature (1077)..(1129): n is a, c, g, or t
tttttgactcagcaagtttttattatgcacctgtgggtttgtgacgatgccaagggatcagaggaacaaagagagaggatgttgctcagatgggggtctcaacctccagagcaaggtggacacaaagctccagccagctgcccagcccctggggtgggagggaaggatcgaggggtagctgttgtcagataaggccaaaggtatcagtggccaaaagggagacaaagatctcctgggtgcagcctcctccaccactgtggtgaagggtgttgggctggagggttggccgacctctcctgagagcacgttccccctgctgctcctgctgcatggcatcaacctgggtttcagttacattacccaggaggatttccaaatccagaggcaatgtggccttccatttcctgaggtgccttggttggctctggatcagtggtggggactcaagagacagcctccctgtggcttccagcccctcacattccctttgtcgctttctccttcatgatgtggttttacacagaaaaacactctggtaagtagaacagtgttcttctcttgagtcagacgtctgaagcaggaaggtgaataaccttcccaagaccttagagctacagagagaatcctcatcacaggtaggagcacacaggtaggtggggtaaacgtgtacagagagcctggcttctacttggaattttcccctcccttggccttaaaaatcggatttctcccttttccagctatgttgatacaagagacaaactatttagaaagtaaaagcctcaaccgtttattttgtgttcaaagtataaccaaatgattttattgcatttactgctcctgggcatgcagatgcatctacacagaaacagcagttgtggttataaaatcttttaacgagtttggggcagaggctttttaattatttttgagacagagtctcattctgtcacctagcttnnnnnnnnnnnnnnnnnnnnnnnnnnnnnnnnnnnnnnnnnnnnactcaagcaatcctcccacctcagcctccagagtagctgggaccgcaaacgtcaacaccacacccagctaatnnnnnnnnnnnnnnnnnnnnnnnnnnnnnnnnnnnnnnnnnnnnnnnnnnnnnactgagctaggcaatccacccaccttggtttcccaaagtgctaggattacaggtgtgagccactgcacccagcccagagttttcctgatgtgaaaattacgtgagtgacaaggagcaccaggagccttgcctgacttactgtctgttggtaggatgtgacatatgaataatacaaaatacccgtc

SEQ ID NO: 141374 - DNA, 610 bp, Homo Sapiens
ccacttctacaaaaaatgtgcctcctggagaggctcagcctttgcgaaatgcctgcagcccagatctggaggcttccacaggcatgtaccacattatactacaggtattttagccaaattgcttttgatttttgaaatgtgcagattgcctttgttgcaggaactgttggcatgaggatgcatatttgaggcttgttaaggacgctcgttacacaggagagagtgatggaattgttctagctgcgcagggaagcacagaggcgaatgtgactatcagctcccggagcttccgtatcatttcttacgtacggcacaggacctgaggactcagggtcccctccacctgcttctgaaagaaaagtcttcatttggctgtagttgaataacctcccctcgccgagactcttctgtatggcgaggctcgaagccgtttccaattaacctttcccaagaatgcataggggcccagccaagtgggccatttgtgattcttttctttagctgcttttactgtgaccatctcagataagagaaatgaattggagcaattctacagtgagtcttaggatggcttttctgttacgaataaaatttgctgtcaagctaaaaa

SEQ ID NO: 141375 - DNA, 329 bp, Homo Sapiens
ttttgacgggagggcacaggaaactctttattatggtgatgagatcgacaatctcccctactgttaaccttcgctcctgcacacttcagtgtcctcactctgtagggctcgctggcctgggcttctgcgacccgcgatcgtccaggagagggcactcggcgcccttcctggggctcttctggggcggaatttgctaggccgccgtagcagctgtgccaggtcagaagccgagccggcccgcttttcgttctttaattggactcttggctaagacgctaccgacaccccgtcagtggtggaggaagaaggacaacagggagaggtcgagg

SEQ ID NO: 141376 - DNA, 535 bp, Homo Sapiens
ttttactcattagcatcaaagagtttaattgagacacatcaacatctttagattattagatacttgacaataaaggtataaaaatgttcaattcattcattttgtaattattttcccattaagtgcttggcatctctgctttatctatggcaaatgaatatgcatatagacatagcaaataatcatgttttcagttatatgcctggcatctagctaaagtttttgatggcaggaaaaaaagcctctattattttttattaaaagactccacaagggacctggcacactgttctgacatgaataggtatcaaggaagctggagggattatagaattgtctgaatttccagagtgcttggattcccaccatcttcagccaaagcatcaggagaagctgcattaaatagggcatctcaggcactatcctggtcatagaagagataattggagaaaaagggacaaactagaaccagacattttctagaataatttttctgataggttccaggaagtataaaaccttgtctgggatatta

SEQ ID NO: 141377 - DNA, 573 bp, Homo Sapiens
ttctcttatctcccctttatttattttttattatttttgatttaggacatatcagatattaaactgaaaaaacagatactacacttgatcttagccaaaaggctgagaagtgatacagtaattcttcaggtagagaaatgattacaaagatttaagtatatttaattaaaacctaattaaacttcgagaaattatatagcttttggcaggaacttgtttgctggttttctggagactataggcagagtgctcccaaatctcctcctagtaaacactgctaacaatttggaatttattctttcagatttgtttcctcatatttatcatggctttccaggtcaatacatacagttctatcttatgcttgaagatctgtagtattctttctagagattatgttcatcagaacatactgctacagattattttagagttcacctacaccaacatatttagctcaaatgtatctgtaaacccaatactcaattttcacctcattgacaatcccttcaaaatatattatactccaccctctctaatttcaccatattcactctcttactctaccaaagc

SEQ ID NO: 141378 - DNA, 495 bp, Homo Sapiens
cagtgcggtttttgctatttttcattttgactagggtataaaacttaccattttctgtagctcaaccgtgcttattcgccccgcttctttcttcatctgatccacacattttgggctaaatttaaataagcttgcaggtgactacgcatcatggccaaccgcaaagcacacagcaggattattaaccagagtcgcagagtatcgaatgtggcttctgtcattctacagatcaaaaagttgatacggtgctctcaaagacaacaatatgctagcatgctcgttatatgttaatggtcaccatataagatataagaagtctatacttcgcaacagttagacacataaaagaatctgactctgccatagacttaactgtataatactttaacttgaataacagaactagataaatgtatcatgaaagcgtaagaagttaacaggtatctagaagaaaaaagtagagcaatacatgagatccttttctctatataccct

SEQ ID NO: 141379 - DNA, 576 bp, Homo Sapiens
catgattgtaattattttctttattctttctcagatcgtttatttatatatatcccctattattttcagcttattttttacagcttctatcccacaaggaaatacagttatactatacttgtaatcaaatgataaagcaggtgataaaactcgcagacccagggtaatcttgggtcaaagctggcaagaaaatctgaaagcagactctctggagccactacttaggcatgctcattcagttgttgattcaattacaacgaatctcaacgaaatccgcttcaagctatgtagtccactcttaacccgaccatgctggaagtaaagtgaatagaaaattgcacctgagctcaacattgtgactctggtgctttgaatactttcttacttttttagaagaattgaatggtttgtcttgactcctcattaagtatagccaactatgtgttctagttgcttgggatacaggcattttagaaacaaataagtggacttatttttccctccaggaatgtcatcatgttctaactgtgctgtttttataacaaacttgagagattttcagactttgttggcagc

SEQ ID NO: 141380 - DNA, 732 bp, Homo Sapiens
  misc_feature (33)..(34): n is a, c, g, or t
  misc_feature (65)..(128): n is a, c, g, or t
tcctccaataaagggcagagccattttattggnntgtcgtaataacaggggaaggggggttaccnnnnnnnnnnnnnnnnnnnnnnnnnnnnnnnnnnnnnnnnnnnnnnnnnnnnnnnnnnnnnnnnggaaacatttcttggaagagttatctgtacattgcttgatggggattagaattgtgatcagtactataatacacccccaaatcaaatgaaaacaacataaatacactaaaaatatcacaagtaatgcttctaattgtttagcttctcacagtagtcacaaagcagaaactgacaaacctatgatttcctctaaaaataaacatggaaaacaatatcctcaaggactgctgttgttcttctctctttggctgtttttactgtgatggttacacctggctagctgcccatgaagagctgcttccttccctcagcagtacctcttccccctggcccagcggctgtcctgggctgggatgtacctggcagcctcagcagattgttcatgtggttatttactcatacgcatacgttgtagcacacaaactgcttcttaggagacgaacttggtgagcacaggcactgatacatctgatacatttatatcaccaataaatataatttaaaaaaacagattaaaccataagaaaaatattcaaacttctatttactcataaaatagttaccataaatctgaatggaaaatatatcctttggttttttaaaa

SEQ ID NO: 141381 - DNA, 2369 bp, Homo Sapiens
ttttttccatgtattatagtttattaactttctttttcacgctcactggggttaaggtgcggaaagcatttcacagggagtcttaaaaccaaattaggattgccaggtaaaggctgcacaaggaaaatgccttatctctgaagcccatagctggcaggggagggcatgacccagggactccaccctcctgcaaagggaaagggcatgctggagaggcatggggacccactccagctcactctgggtgctgtctgtagttctggaagcttggtggaggatttcctgctcaacttagagggtgggccaatggggccaggccgggggaaggtgagggttggaaggcagaaaggaagtgacaaaggccacctcagcacagcagtgagaggagctgaggccaagggaggcagtcacacaccctagctctgcaagacctccaagatggcccggaggatggcagcagctgccaccgccccggggtctggctgctccagccgtgctgagctgatataactggctcttccggctccagcttccatattcttggtggcctcggctgcagcttcggcactcttgactgctttggtcaggacttgtaacagatcagctcctgggctcttccaggcttggagctcctgccccgctgcccacagagaatccagcatagtcctgtcccctggagcagccttgccatacttctgcatggcttccaggccggcatccatggcagcagaccaggctgggaggctggtcttggccttcaggggctgtgcagccgcagtcaggaacaggccatagagcgccccagatgagcctcccatcttctccaggagcagaacagacaacttggagagcagctgggcagggctggcagggggtgggccctccttcagccactcctggattgctctggccgcacggctgtgggtggtgccacagtcgccgtcaccagcagcccggtccagggcattcaggtgttcctccaggcccaggagagtgctgcacacccgttccagcaccagcgccatccgcttcgaggctgagcctcctgcagcagtggaatcaggggcctcctggggctcggcaggggctacccggctccgcttccgcccagtaatggagactgcagccacgttaggccaggctgctgcagtggtttcagcatctatcagtttcaggagaggctcatccaccagcaggagggtgagagaaatgccaggcatctccagtgctgacatgaaggtgcccaccagggcacgggcaatcttcaccccgcggccctccagggagcggacggtagcgtcggctatggtgcccagttccaggaatgacaggccacccaggttgttgaccatcatcacaactgaggagccgggctgcacaggcacatgggacgcgttggtggtgtttgtcatgtggtcgagcatgagtttcacaatctcatcggcggttgccatctttatccggcgcacaccagcttccccgtggatccccaggcccagctccacctcgtcggctgagagctcgaaggtgggtttggaaccagggacgctgcaggaggataagctcacccccagggtacccatggccttggtgaccacgttcacctgctttgcgatctcctccagccccacaccagcctcagccagagcacctgccaccttgtgtataagcacgtgccgcacagcccccgccggcctgccttcttcaggacagtgaaggcgctgtcgtccccattcaccaccatctccaccgggatgccttcagcccggcctggcctgctcccgggccaggccgaagttgagccgatccccaggtgtagttcttcacgataaaggagcgtccccactgtggccggcctgggccacggccctgatggctgcccaggatgctgcccactgccggggaggtgaacacagctcccgcgatgaccccagtcagcatccccttccctatgaaaccagcatgggcaggctcatggccagagcccccacccgacagcagtgccacccggcccttgaggctgtccaggtcagaacggagggccacgcggtggccctgcaggagctgcaggttggggttgcaggccaccaggccagcaagagcgtcatcagcacagccagccaccgagttcaccagcttcttggaggtcatggtgtggaggctctgaaacaggctgagttcacaccgttgcactgagctgctggaggatggacaatcctgtgctacctgggtctgagtacagtggaggcagcagcagcacctcccccgaccggctcacggccgcatccgccacatccgaaggcgccgctgacttcccgcctcgtgccgaattcacacacccaggcctcgctacctagccgtaagtgggt

SEQ ID NO: 141382 - DNA, 1264 bp, Homo Sapiens
aggctggaccggtccggattcccgggatccagtggtggaacaggtgtggagctgatgagtctgccctaccgcctggtgtttgctgtggcctcggaggattccgtgcttctgtatgacacccagcagtccttcccttttggttacgtgtctaatatacattaccacaccctcagtgacatttcatggtccagcgatggtgccttcctggccatttcttccacggacggttactgctcatttgtgacatttgagaaagatgaacttggaattcctttgaaagagaagccagttttgaacatgagaactcctgatacagcaaagaaaaccaagagtcagacacatcgagggtcttcgccaggacccagaccggtagagggaacccctgccagcagaacccaagaccccagcagccccggcacgactccccctcaggccagacaggccccagccccaacagtcatcagggaccctccctccatcactcctgctgtcaaaagccccttgccggggccttcggaggagaagaccctgcagcccagtagtcaaaacacaaaagcccacccatcccggagggtcactctgaacacactgcaagcctggagcaagacaacaccccggagaataaacttaacacccttaaagacggacactccaccaagttctgtaccaaccagtgtgatttccaccccttctacagaagaaattcagtcagagacgcctggagacgctcagggcagtcccccagagctaaagcggcccagactcgatgaaaacaaaggaggcacggaaagtctggacccttgatgggacctcggcttctgctcgaagcctaccaggctcccggtgtgtgcagggagacggtaaagctggaggtgcctgagaccagggcttccatggagcgggacacactgtaaatggatttctataacagaagtgacatgtgtactgatttttctccagaaatatggatgctgttgtattcagtatccatttttaacttgggacatgaacgttttaacgtagtaaatcctctttttgatgagtttctgaaactggagcggttcaacgttatccagtgtgaaaatcagtgagtcctccctggcatcctcgtgaaagtgcacacacttcatggagggactccttttcaataagaattaggaagatgagaaagtaatttgagattttactctgtcgaattttagagtatttgaagtgattgttaggtttcccttctaaggagttaaatgattcacctttggaaggt

SEQ ID NO: 141383 - DNA, 608 bp, Homo Sapiens
ttttttacagttttccagttaactttattctttgtggggtatttttaatatttaaatttaatgagcccataattatattcatatatacatatacatgtaaatgattactacagtaaagcaatttaacacatgcatgaactcatgtagttttcttttggtgtcaaaacacctaaagtttaccctattcaaaaattactagtatatcatataaaaatagtaactataacctttaaactgtacgttagtactccagtttcatttattttatgtaactgaggtgcatcctcagtgtactgggcacttctcagccttcctggaactgagcctggtgatgtggtcacttttggggagactgttgtcagggcccagccacacacccctgggcagcactgtcccatctcaggattggactttctcagctcccataggggatgctgcctgcagcccaggaagggcagcccccttgtgcaccctgagctcccatggatcctcagcagcccctgcctggccctgcgctccctctgctctcttgccccagcccctcctgagtgtcagccagtaaggaggccctgtctgtcctttcttccctatgcaggctcctgggctaa

SEQ ID NO: 141384 - DNA, 496 bp, Homo Sapiens
  misc_feature (40)..(40): n is a, c, g, or t
  misc_feature (49)..(229): n is a, c, g, or t
tttcaggtctactgtggtccatgagtttaggcataaatgncccaccttnnnnnnnnnnnnnnnnnnnnnnnnnnnnnnnnnnnnnnnnnnnnnnnnnnnnnnnnnnnnnnnnnnnnnnnnnnnnnnnnnnnnnnnnnnnnnnnnnnnnnnnnnnnnnnnnnnnnnnnnnnnnnnnnnnnnnnnnnnnnnnnnnnnnnnnnnnnnnnnnnnnnnnnnnnnnnnnnnnnnncatcctattgttcatcttttgtacatatactttactacttttgtattttttttctattggtctttttcttattgttgatttctatgacatctttatttcatcaagaatacaaacactagctcgctatcttcctttatacccccttactcctgctgtaatacaatactggagtaatcctggagccagtacccgaccccagcagcttcttgatcactgaagaaataggaagtagatctctggtgggccaggtctaaaacgttcttcttt

SEQ ID NO: 141385 - DNA, 996 bp, Homo Sapiens
tctctttgtgtttctttttaatcaccttttcccttgttatttgcaccctccggggtaaccttgcacaccgttttacccacctttctctcttaagctccgatttgtcgcccaaacatggaacttcgcaaaacaaaaagttcaaaggtttaaaccccagatccgcatgctcacgtggaaaaaattattttcttcttgcctttaaaggcctcagagttttcaccaatatttggttaatgacgtggccgacatcagaaagtatattccagaagaaattgcacaagctattacagtacataaaaaagtactttatcatctattcaaattatttcagtggctatcctactcccagaaatatatcttaagatccccccccaattaaaccaactcatgtttaactttttaattcattttcattttaaattgctcatgctaatgaacacagtagtatggctttacagatttcctagacacaatcctcaatttggctcagacttgaatatacgtcatccaagagaactttttcgttccttcttaaggtgtttaaaaaataaatggctataaagtatggggagaaaacatttaagaataaggtcagagcacacattcagatacactttggactcagatgtactcttagagaactgtagagataaaatgctaattatagtacatgtaaacatctgttcaaattgataaagagtgaacatcaaataataggatgatattattgtaacagtcgtctccagacaggaactggtcttgctcttgcagtcacaaagctaaattcaggcaatgatgatctctctctgctgtttggtgtaaagagaagaaacgtgagcctctgccaatttggcacctttcacgactacaaacagtgttttcctaaagtagtatctatagtacatttctttcggacgcgtgggtcgacgatatcccgggattccggaccgtaccagcctgctttttgtaacgactttgttcatagttactaatgcc

SEQ ID NO: 141386 - DNA, 721 bp, Homo Sapiens
  misc_feature (13)..(13): n is a, c, g, or t
ctttaacacaagnagataaattaaaagaataaaacaatggtcacaattactttttccatagactggcttctttcagataatgccaaagaaacagtattttctattaatatttgaaaatctagagcagaaatgataagttgcatctcaaaggacttcaaagatggttctttaaaacaatcattgtaagaagaaagatacataataagaacaggaaatttgaggcttggaggaaagatagtctgtatattatcctttgtcatgaaatatctgggtttaggcactgtaggctgagattttagttaatgggatagatgattatgattatattgctggtatttcttaggaaatttagctggtatttcttaggaattccttaggaatttcccatgaattatagatgtatactgtaccgttttgtgagaacctctctctcctacacagagatgtcgagtccttgggtctgaattttctggtttcaatttgaaaagaaaccctaaaatgtgttaacttagagtttaaggatcagtctgagtaagaaaagtctaagttgaaggctatatagaatttcaagatcctgagatattagaggtgccgtttcttccgtctcctctcccttgtatcattcccaaaagataaataatccaaaaaggatgaagaaaaatataattgggagtcaaagaataacaacataatgttaaaccagagacctttgttcacgtgt

SEQ ID NO: 141387 - DNA, 762 bp, Homo Sapiens
  misc_feature (261)..(271): n is a, c, g, or t
cattttttaaaatgtatttagagtttggtaagactggtctgtgttattttattaattgataaccttcatcaactaattattatctttgagtttcggcagttattcagagaagagattccaagttccaaatagttccaagaagttcagtaatacagagtgttaaatcagtacttgtgagttatttgggtgtgtttagaggtgccaggagggggatgaatgttcatataaggaataaagtagtatttttagcttcctaattgnnnnnnnnnnntcgtcaaaattaaccaaatagtaggtgttatatttaaaaggcagacatttcagggattgaacacatttttaattattagaaatacatacatgcatataattaacctttaatttatttttaaaaataaattatggtcatgaaaaacaatagtgcttaaaattgaaatttcatagacatgtaattttattccctaaaaatgaaataagatgaaccttatgggtaataatgggatttttaatacttattgaggttatagacagtcttttttatgtctcaatgcataccatgtgagtacttggcatatattaggccttcaaatgatgatggatggatagacagataaaaggcccaatgaatgattgtaaatgtgtcttctcctatgtatccatgatgatattgcctagtttttaatacaagcttaagaatcaataaaatgatagatctgaaatctgtagatgccagtctggctcagtattaatactgacagtagt

SEQ ID NO: 141388 - DNA, 408 bp, Homo Sapiens
  misc_feature (87)..(152): n is a, c, g, or t
tttcaagtaatttaatttagtttattatttgagatttagtatctgtctctgttatgagaatgtgtacattccttaaggatagtgacnnnnnnnnnnnnnnnnnnnnnnnnnnnnnnnnnnnnnnnnnnnnnnnnnnnnnnnnnnnnnnnnnngtggatagggagtaggaaagagggtgggagaaagggggaggaagaatacaggatgagagactttatcaaggaagagttagggtgccttacattggccctaaggtcatggatggctctgcttggcactgggctcaccctgaccaagggctcacaacaccctcgggtcaggcctcacctgaccgtgcacacattccatctgctgctgcttgacttctattcttccgcccttgctcttcccctctgcctctggtggcct

SEQ ID NO: 141389 - DNA, 512 bp, Homo Sapiens
  misc_feature (205)..(308): n is a, c, g, or t
taaaggcatgattgatagtttatttaatacatagaacatttaaaacttttgtaccacaaaggaaacaaacaaaacatagcaaaaggataaaacgtcccactagaaaaacgattcaacacttatatgatgacaaagatgtgtagaatcatgtcaactaccgctacaaatcagtaagcaaaaaggtaaaacaatgaaaatttaagannnnnnnnnnnnnnnnnnnnnnnnnnnnnnnnnnnnnnnnnnnnnnnnnnnnnnnnnnnnnnnnnnnnnnnnnnnnnnnnnnnnnnnnnnnnnnnnnnnnnnnnagatttgcaagtaaaactaaagttactaacaaaatcaaatgttagtgaaactgtgagaatatatgcctttgtacacattattggcaaaagtacgaatttggtgtctgaagggaaatttaaatatgtccacataatgtcaacatgttctataaggaaaaacaaactaaagcgctttttctattctctcactcaacaatcaacaca

SEQ ID NO: 141390 - DNA, 590 bp, Homo Sapiens
  misc_feature (579)..(579): n is a, c, g, or t
ggcaccccggcaactgcttcggatggggcctggacgggctcctctggcactagtgacccagtcacagaggggagaaaacgatgggaaaaagccacacccacccaaacccttttacatacactcacatcaataggtcctgggccgaccaaagattagaaaaccccaccgctcatttttcctcaactactgaaatgagccagtgagaccacacaggacaggacgcccggtccccctccctaggccacgtttctaataatcttggtctagcaccacccgtaaacaaagcggaactttcatatggacgtgcaaatcctgtgtgtccttggaatcctagtgttactgaagataggctgctgcttcctcctgtggatggcagagactgaggaggtggctggatgtcgttcaggtccatttccaggagaaagggagcattcctgaggttctatactcagcagtaaaagtagaggaccctccttcaccagtttctaaaaaggttgcaccttgaaataggtaaaaattcatggactgtgcccctttgagtggtttaacggtagcgaaaaattaggcaaccttttccanggaggtccaaa

SEQ ID NO: 141391 - DNA, 567 bp, Homo Sapiens
actctgccccagaagactcttttccattctgtttttcatagagggtacccacagacatcaggaaaacaataaccaggaatactggaattctccatgagccagccagggatgctaaatgaaaaagcaatataatccagacaggaattgaaactgctctcaagtagcgttcagtgcttgcattccacttgaatgaaacagtcaacacatagccaaccaccaacgtccagatccacaggctgctgaagtagtccagcccgcggcagatgagcgtggcagcgtgcaccagcagcacctgcacgcccaagtagctgccgaggcagtagaggccgtacaggagcgggccgccggcgccgagcagcaggagcaggcggcggcggcgcagcgcctgctcgcccagggcctcgacgccgtagtcgacgaagcagagcggcaggagcagcgcggccaggacgatgggcgtgtgcgcgcggtgcaggcgctgcagccagtggcggcccaggcgcgtcagcgagctcttgaaggggtgcagaaaagtgccgcatagcacggcccagagcagcggccgca

SEQ ID NO: 141392 - DNA, 456 bp, Homo Sapiens
tttttttgaggggaaagaagctctgtgtattttgtattgagccatcagtaaaaaaatgagacaatatcattactttcaaaatatagaaagccaatagttgaaatcatttagtagtaaaatttttttctacatataacctcatatgtgtaaagagtattagagcgacatttcagctatattggacttttgttaggtaaagggcttctcactcaggtaaggcttaggattaggagagtgtcgttcagggattgaggtattgaatcggcacactcattccccactctctattttgacgaaaagacagatactatatttggatgtgacaggtgttttttcttttgtacaagagtgcagaactgtttacagtacataaacatcagcgtggaaaatgctagtacatatataaaggtgaacatcagtaccagctgtttccacaaagcccactcttggtaagaa

SEQ ID NO: 141393 - DNA, 455 bp, Homo Sapiens
  misc_feature (209)..(251): n is a, c, g, or t
acaatgattaaattaataaaatacatctggatcagagaaaacctcacagaccaactttgattccataagcacaaagtaaaggacctgaaacggtgtggggatgcagtaaaggagaaggtaaggggagttaattagccggtgattaaatgtcattttccctgagtcaagtgattctcattttattcaagtgctctggaagtggtgaaggnnnnnnnnnnnnnnnnnnnnnnnnnnnnnnnnnnnnnnnnnnngtccaacaaataattctcagttgtctgcttttaaaagtactgtgtaatttctaaattactatttttcaaaatcaggctaacacttccaactccctctggttggggttttctgaatcatctacagaaagatggctgctctgctgagagcctgcctgggaaactggtttgtatatcctgtgacccaaagcatccacttcctcaaag

SEQ ID NO: 141394 - DNA, 601 bp, Homo Sapiens
  misc_feature (51)..(93): n is a, c, g, or t
  misc_feature (479)..(479): n is a, c, g, or t
ttttttcaagtgattctcattttattcaagtgctctggaagtggtgaaggnnnnnnnnnnnnnnnnnnnnnnnnnnnnnnnnnnnnnnnnnnngtccaacaaataattctcagttgtctgcttttaaaagtactgtgtaatttctaaattactatttttcaaaatcaggctaacacttccaactccctctggttggggttttctgaatcatctacagaaagatggctgctctgctgagagcctgcctgggaaactggtttgtatatcctgtgacccaaagcatccacttcctcaaaggtgtagccaggaggctcaggatatgaagctaggcacctgcccatttccttgggagtaaagctgatggtgtaggtggtctggctttccacagggacatttcctcgagggccagaccaatgaggcttacagcttttggtattgataggcaggtggggcacatagtgggcccgagtggtggtcangcagtccaggggctcggtgggcaagtccagctggggaacgggcttgactggctctgtgcgcatgctggaccactgcttgtagtcatccttggtggtggaagagccttcaaagcgaccgcact

SEQ ID NO: 141395 - DNA, 1145 bp, Homo Sapiens
atcgtgaaggacgccagcatcatacaccggctgttcgaggccttgactgacaggagaaacaaatcgacccagaaacattcaaagatttctacaactgctggaaggagacggaagcagaagcccaggaggtcaggctggcggggctggtgatggaacacctggataaaaacgaggtgtgtgtggtaagttgtccagctccgtcaagacaaacctaggcgttggcaagatcgccatgacccagaagcgcctgttcctcctaaccgaaggaaggccaggctacttggagatttccaccttcagaaatatagaggaggtcaggagaaccactactacatttctacttcggagaatacccactttaaaaatcagagtggcgtccaagaaagaagtcttcgaagccaacctgaaaaccgagtgtgacctttggcacctgatggtgaaggagatgtgggctgggaagaagctggccgatgaccacaaggaccctcactacgtccagcaggcgctgaccaacgtcttgcttgatggacgccgtcgtgggcacactgcagtcaccaggcgccatctacgctgcctccaagttatcctactttgataagatgagtaacgaaatgcccatgacgcttccggagacaaccctggaaacactgaagcataaaatcaacccctcggcgggggaggcgttcccacaagcggtggacgtgctgctctacactccagggcatcttgacccagccgaaaaagttgaagatgctcaccccaagttatggtgtgctctgagcgaaggcaaggtgaccgtgttcaatgcttcttcatggaccatccaccagcactcctttaaagtgggcactgcaaaagtgaactgcatggtgatggccgaccagaaccaggtgtgggttggctcggaagactccgtcatctacatcatcaacgtccacagcatgtcctgcaacaagcagctcacagcccactgctccagtgtcacggatttgattgtgcaggacggacaggaggcacccagcaacgtgtactcgtgcagcatggacggcatggtgctggtgtggaatgtgagcacactgcaggtgaccagccgcttccagctgccacgaggtggcctgacgtccatcagactgcacggcggccgc

SEQ ID NO: 141396 - DNA, 536 bp, Homo Sapiens
ttttttagatgtgtaaaagcttggctctaagactctttagaaagtcagtctcttgaatatcacatacaaggtagtgctgttctaaggatgtgtaaactacagagttcaagaactttgagtttgctaagaacattcatttttatttcaaaagggcataaatacaaaggaatttgcaatgtatattttaatactatgatatattgagcatcatgaatagtctccacttctcccccctcaaaacagggcaaatgcaaatttttggaggctatgagtttaatttcaaaagagaaaaaggaacatgaatctggactagcagactactggcacaagatacgagtacagaaagtgttataaatgtggtcagatgtgagtggcaacacctgccaggttcaactcactgtgagaaaatcatagtgctatccgcaggccacacgactgtcatcattttaacagttacataaccaaaactgtctcagcacactggaaaagcttttccccagtgaagaacaggatagaattacagttagtaacactgg

SEQ ID NO: 141397 - DNA, 303 bp, Homo Sapiens
  misc_feature (99)..(116): n is a, c, g, or t
tttttagatatcatagagaaaattttatttagttatgttttctgattcccatatgcccatagacttcactgtaggcttctgaaaaaaataaactacgannnnnnnnnnnnnnnnnngaaaaatgtttacagatccaccttaaactcaccagtcaatggtgattttatttatctaacattccattgaagtggaaagaatagattaaatattattcattttatggatggcttccattaaccaatgaaaaatatttataaaaatccataaaaatcaatccatgaaaatacccttctagatgttttt

SEQ ID NO: 141398 - DNA, 624 bp, Homo Sapiens
  misc_feature (594)..(594): n is a, c, g, or t
tttttttttattcaagatcaattttatttgttgtaaaaacaaacatgggttatgttccagacaaacagatataagtgagtagacttatgccctggtgcctccttggctcttcacaggatgcaaaaacaaatcctgccagcaggaggtggcaggttgcagaggtggctggttgctctttcagccagcttggccttgtctggcatgcacaggtcccagcacagcaaaacattcagggagttagagtgttgcacaaaggattttaccaacctctcacattaagcagcattcaaggatttgctgaccaccacttatgcaaattttgtgttatgctatagcaatgaacttacttgttctatttctaaacaaaacattgggttcacacacaggcctggacaaagcttcccacttctgaactatttactgatcttcttattctcaaagaatgcaagatgaatgatgtgcaataccatggctatggcatgtgacttttcttgacctggatggttagtgtcccaatatttaactgacttttgtgggggtgaaaatatgccataagttctttcttctatcatccccatcactaccatacatgtnatgacataatcatgtcacagtgtgccctca

SEQ ID NO: 141399 - DNA, 466 bp, Homo Sapiens
tttttgctttcaagctttctttgaactttactactgaatgatttatttgcaactcattatctggtgtagtggggaagagctacttatgtctctttaagccaagatatatttaagataacaataaagataaaatatatatttcactatccagatttgattttgacacaatgaaaagctgattggttcacaattaaatggacaaattttccacaagtaagagatgaaactcctggcttggaaatcctggggattgacaggttgaatgtccttggtctgtggtgagcatgttcacatttcaacacatgagatctggtgtgctttccgtatcagctcctcagattttgtgaaaaactgggtttccttccaatgagccacagatagaagtcacagataatggcaggggcctgctggctgatggcattccagtactgggttgtgaagttgcttgtggtgaatcagcatatgg

SEQ ID NO: 141400 - DNA, 447 bp, Homo Sapiens
ttttttttattcaagatcaattttatttgttgtaaaaacaaacatgggttatgttccagacaaacagatataagtgagtagacttatgccctggtgcctccttggctcttcacaggatgcaaaaacaaatcctgccagcaggaggtggcagattgcagaggtggctggttgctctttcagccagcttggccttgtctgggtttccttccaatgagccacagatagaagtcacagataatggcaggggcctgctggctgatggcattccagtactgggttgtgaagttgcttgtggtgaaatcagcatatggcctcctcaaagctctcgcaaatggagttggaatttcagaggttgccaagacctggaatcacattttgcctcggttgcagggattgaggttaccagatgtacagtagtagactaacattgacttaggttaacacagc

SEQ ID NO: 141401 - DNA, 687 bp, Homo Sapiens
  misc_feature (358)..(368): n is a, c, g, or t
ttttggaaggattaatgactttattcatcatgaatccctacgttatttctgcccaccttgcttcctttggattgtaatttgattttgtttattgatctgtctgtagggagagaatgaccccatggtagtgatgcagctatagtggcattacaattatattcctcataggaatttaaaagttagcattttggttttatttatagacaccagtgggctgtgattgcttcactgtagagcctagcacagtgcctgaaatgtccagcgaatgttccctgcttcagtctaggttgttgtttcatttggtcagggcatcagataaaacactctcatctttaaaaaccggataagtagtaatccnnnnnnnnnnnctgcacaccaataactccgtcaggcttgattccacatgcccctgtttcttgcggcagcatggcccagtaatgccagaagtctgaatcaatcacacttatttgccttatgtgaaagaggccttgtcttgcgtaattattaaaatacaatggaatgctttacatagagccatggaagttcagataatgctgtgtccattgtacacactaatgatgtagagtggtgaggagccacctgacacctattctggcaggtggggactagaatagatgccccaacccatctccctctggtcaggatcatattacctgagaagatgat

SEQ ID NO: 141402 - DNA, 511 bp, Homo Sapiens
  misc_feature (46)..(46): n is a, c, g, or t
cttttttctgctttgttggtaattctttatattaatcgctcccagnagtcggtggcttacatatttatctgaaagtctctgacaataacaatttcacttcccctgaaatcttccaaggtcttcctgctgtggagcaccatcccccacttaagatccttccttctgggatatagacaacctctctgagggctcttttctgatcgcccttctgatccttggagacagcctgtttagtatttctggatatggcttttaatttctgttttgtttttttgttaagctttacctgggaaaggcatctaagatcctataataattggtagagcaagactcctgtctgaatccctgaatcctgttgtgttcggagtcctggtgtttgccagccatctgggtggcagcaggccctggagtgagcaacgcacccttaagatctactaccctgcatctgtttcaggtttgcttgtgttcaaacttttttgttgtgaacttcttttcaatcctcttgccctga

SEQ ID NO: 141403 - DNA, 478 bp, Homo Sapiens
  misc_feature (372)..(416): n is a, c, g, or t
ttttttttacaattactaatttatttgtctttttatggttcagttaagagtatcttaggtagtctagcacatggcagcccgtcaaacttcacagggtagctgtcagaattttgactgatgtacaagagctccttgctcatgtttgcccttcctttcagtggagtgcacacaggtaagacagcttgttggtaatttttatttaatgctcccaggatctgtggctacacttttattgaaagttctgacaataaaatttcactccctgaaatttccaaggtttctgctgtgagcacatccccacttaagatcttcctctgggattagacaactcttgagggtcttttctgatgccttctgatcttggagacagcnnnnnnnnnnnnnnnnnnnnnnnnnnnnnnnnnnnnnnnnnnnnnagctttactggaaaggcatctaagatcctataataattggtagagcaagactcctgtctgaa

SEQ ID NO: 141404 - DNA, 608 bp, Homo Sapiens
tgtgagtataatgtatttattaaaacttttggtggcatgaggagacataagtgcagttcatgttgaaacaaaaataatttcaaatttaacttgactcatctttatttgtaaaatgtttctccactatcccatccttagcgaatagatacccttccctcatcctataaaatccccagcttcacaacagctcctcggtgcctctctccttcccctttttctcttctgctttctgtttctcccaatactcccatcctcttgttttcaagtgcagagaagcttaactatctctcttttcttttatgctaagattattgtggatgtacgtccgtccatgtcctcaggatctaaccttctattcccgatggctattgttccaagtcaaatactgttgcaatagttaagaaaacaaaaatgttgcctggttacaatggtaacaggagcaggaagcatacatttagtgcttactatgatccaaactccaagggctctttatgtcttgtctcgtgagattcctacaaaaattcagtgaagcctgcctggcattatgagtcccattttaacaatcttgaaattagatcatagaaagtaaaaaaaacacaaaagcaact

SEQ ID NO: 141405 - DNA, 1141 bp, Homo Sapiens
  misc_feature (487)..(496): n is a, c, g, or t
tctcccaaggatgaagaggtctcctaggcatgatgccacaccaactaaggctgaatacaatttaatttgagactcattacttattctttcctatacagaattgattcttcaactgattattcataccttactttctatcagcaatacacattaaccatctgttgtgtgccaaaagttgtgttaagagttagggttataaagatgctgtctcctgtactagcagttctcacagctattcattacttgtctaaagaattgatctcttaatcgttcaattatagtcaacaataacttactgaacaccaacaatgttctttgtgccattattacattttcaccttcattcttctcttgtttttcagggcattttgtcagtgatgctgatctttgccttcttccaggaacttgtaatagctggcatcgttgagaatgaatggaaaagaacgtgctccagacccaactctaacatagttctcctgtcagcagnnnnnnnnnngaacagactattgaaataaaagaagaagtggttgggctaactgaaacatcttcccaaccaaagaatgaagaagacattgaaattattccaatccaagaagaggaagaagaagaaacagagacgaactttccagaacctccccaagatcaggaatcctcaccaatagaaaatgacagctctccttaagtgatttcttctgttttctgtttccttttttaaacattagtgttcatagcttccaagagacatgctgactttcatttcttgaggtactctgcacatacgcaccacatctctatctggcctttgcatggagtgaccatagctccttctctcttacattgaatgtagagaatgtagccattgtagcagcttgtgttgtcacgcttcttcttttgagcaactttcttacactgaagaaaggcagaatgagtgcttcagaatgtgatttcctactaacctgttccttggataggctttttagtatagtaattttttttgtcattttctccatcagcaaccagggagactgcacctgatggaaaagatatatgactgcttcatgacattcctaaactatcttttttttattccacatctacgtttttggtggagtcccttttgcatcattgttttaaggatgat

SEQ ID NO: 141406 - DNA, 1611 bp, Homo Sapiens
caagggggagcaagctccagctgcactcgtgatttggggtggggggcccccggatctctgggtatgctgccagctccggcttcttggctgccccctcgcagcctgcagctcctgggccagagctgcagagcagggaacttcccaggagagtccaggagacaggaattacagacctcccaggccagaaggaagtggggacagagaccccaggacggggcccggggatggccattctgacctcgggcctgtcatttatccggcgggacccggtgggcaagtgggcgagtgtgctggcaagggtgggggcaggaggcgaacacatgggcaccatcagtctgaggtacacaccggagactccactctgttcccagcgctcacttctggctcatttcttccggtgtggtctggggtccaagaggtggtcagcggctgcctactccaggcctgcgagactgtcctgagaaggcctggataaagacaggctgggttcagaggggtcagaggctgaggcccatgtagagcacacagtggcccttggccatgttagggggttgcaaggtgaagacagtggatggcagtgtggccccaagaggtgctcccgttgctggccccagtgagcgcaggttcccctgcagtgcaagaccctgcggacaccttgggacccagccaccagagccccttcacaccctccacttggtggatccgagtacgcctccccgatgtgcagacagagaggctctgcgctccacacccacagcgtccactgcagcccaggagcagaggcggccggggagccaggctggaggcgggacggggcctcccactcaccgtgcatgtggttccgggacaggtacttgagggcctcatccagcaggatgacaggcagagatatctggagcaccaccacccactggcgcccgctcagtggggtcacctggaaaatgagaggcaggggcggcacgagcaggatgaggaagtgcagggccatggacatggccacagccaccacgcagaccaggggttcataccagggcggcatccgcagcagcgactggttctccgagacgctgttgagggcattgcacattgctcaataggtcacgagcacggacaaggccatgcgtggtggggaagcgtgactcagaacacctcacagtcgatgccggcaaagatgcgggcttgtcttcggagcacttcaggaagttcctcagctggtagaagttgatcgtgaggtccctcggcagtcatacacaaaccaccaggctggcggcagtccacagtggccaggcatacgtacactccgatagcacaggtatcggaagaagagccagaccactgatgagggcttgatcgggggactccggggcagcttctgccatgatgtaccaggtctgcactgggtatgaagctccagagccgtggcaggtacgcccgtcagtccaccaggttcacccagagcaactgcagcagggattcagggcttcgggcaggcccagaattgccgtgaggaagatgcacgacgacctcgccaacattggaagagatgaggtaacggatgaacttgcttcatgttgccgtagatggcctcggccctcctccaccgcaagccac

SEQ ID NO: 141407 - DNA, 1759 bp, Homo Sapiens
  misc_feature (577)..(590): n is a, c, g, or t
gcggccgcacactgggctgggtagaagggcgccacggtcaggaacctgaggatgtcggtggtctcaggtaccagggacgcgggtggcaagttggacctctgcgtggcagaccgggcggcagtgtgactctgaacatctcccgagctcaggacggggaaccctgagtccaggaggcgcgcggggctgaggcagtccagccaggctttcccgacttgtctcccgggaaaggacatcctcgctccgccctcctgccggctccttgtgtccgtctctctgacccttcacccgcccgggccctgcacatataaacagaagcagcctcgagctctcgggagccgactttgtggaagcagagtggagtggagggggctgcccaccctcgctgtacacagctgggcccagatggccccttctgatcccccagggctgacccagtcccagaccaggcacgaagagagaggtcagagccggtaagaaggacccccagagtcctccgtcagtgcagaggcaccagtcaccaagtgaacgtccagcttccgaacaagggggagcaagctccagctgcactcgtgatttnnnnnnnnnnnnnnccccggatcttctgggtatgctgccagctccggcttcttggctgccccctcccagcctgcagctcctgggccagagctgcagagcagggaacttcccaggagagtccaggagacaggaattacagacctcccaggccagaaggaagtggggacagagaccccaggacggggcccggggatggccattctgacctcgggcctgtcatttatccggcgggacccggtgggcaagtgggcgagtgtggtggcaagggtggggggcggaggcgaacacatgggcaccatcagtctgaggtacacaccggagactccactctgttcccagcgctcacttctggctcatttcttcgtgcatgtggttccgggacaggtacttgagggcctcatccagcaggatgacaggcagagatatctggagcaccaccacccactggcgcccgctcagtggggtcacctggaaaatgagaggcaggggcggcacgagcaggatgaggaagtgcagggccatggacatggccacagccaccagcagccaggggttcatccagggcggcatccgcagcagcgactggttctccgagacgctgttgagggcattgcacatttcaatggtcacgagcacggacaaggccatggtggtggggaagcgtgactcgaacacctcacagtcgatgccggcaaagagcgggttgtcttcggagcacttcaggaagttcctctgggggcaccgtggcaggtcagagagagcggcaggtcaggcgaggggctggtgggtgggaggagggaagcctcatcctgcccttggcccacgcctgggcacaaccagcacacaaaacactgccgtggggtgggctggggatcccgggaggggtgcggggtcggggcggcggtggggagagctgcaccgtgccagggagaagcaagggcacagcgtgggaaaggcagacgttctggagcaggagtgcagcggctcagaaggagaacagctggcattagcctggggaggctagcgggagcctggagatcactgaatagggaaatgcatgtgaaaatcaaccaacaaaaccatgcgggagtggaattcacctttgcggtatagaagatgaaggctacgcaggccctgttcactgttattaagattccatttacagctggatcccgggaattcc

SEQ ID NO: 141408 - DNA, 638 bp, Homo Sapiens
ttttccatatttcaaaaagttttattttgaaagaatgagagaaataaaacagagaggtatcaattaccaagaacaattacactgaagaaaacacaataataagtactcttcccacacaaccccccccatttccccatccctggcacaataatattaaaaccaccaaagcacacctaaaaagaaaaacaacagtacgtaatgaaaaaagcaaatgtccatactgctcagtccaactaacccttatgaaatgtccttcccccacctaaaccctacccactggaatgataaagaaatgtagagacaaccctaggggagacttggaactctgcttatactagcaaagctcagtgaagaatcagtaagagtagtgaatctgtttggcagtgaaacactggatatagcttctttttcaaattttggatgattgcagagaacaggtagagtttgaggctcacagacttctaacaggactgatccctgttccctcaaccgtaacagtggagcagctgccaaatcctggttggctgctgagaatagtggaagtgaggcaactttgggcttaagacaatctgaaaaagatgtctggaaacaagtttactgcttcagtttcaaactgtgagtaaaggttttaataggtg

SEQ ID NO: 141409 - DNA, 802 bp, Homo Sapiens
tttggtagggaagaggactttattgggatgttagtagggaaacatgagagggtgaattccagggaatagacactaggaccaaggtggcggtcaccttaaagagccataaataaacttaaaaaataaattaaggtgaggaggtgccacgtggggaggctgctgggactatctgggaattcttagggatggaattttggaattggaaaggggaaataagaatttccagccgtctcacaaaagggtgtgaaatgatcacttcaagactccctgctgccctaggctgggagttggggttctggggctccaggaagaggggaggtctgggctcggctgaaggggtgaagggggccgggtcagggtcgttcctccaggaagcggtaagtggggttctcatagccgtgccgctgcagttcgcggagctgctgctcctccagggtcagcatggggtccacctccaccacgccatggctgatagccccgtagggcttcttcctgcgcaggagcagcatggagaggacgatgagggagcctccgcccgctcccatgatcagcagacccgacacagcctcacgggacacccctgtcccagctggtgccagctcatccctctgaatctccgatgagtggaaagggaaaccccttggaacagacgcattcacctttcgctcatactgttccagcgggttcatcttctctttctcaggggatgcagcatcttgttctgtggacccttttggaagggtcatgggggtgtctgcatcctcgtgccgaattcgcaacccaggcctcgctaccttagccg

SEQ ID NO: 141410 - DNA, 444 bp, Homo Sapiens
tttcccagaaattattctttatttagaaacaaaacaagacagaagcaattgattttaatccaaaatgtatttttccttataaaagaggtccacatactcactgtgtctactctacagaatttgtccattttattacaccacgtgtcaattcaagtttatctggtcactgcaaaaactcgtggctaatatgtgtaatacaacacaggaggaggtattgctcagttcaactactcttatttacttaaaaaaattccggaaatgtttttgtccacttgacctgtagtccagccttaaaagttacatgaaagttttagaaaatggagttattttatttggttgccacagtaccccttgaagccagttacttaaaatgctgaagttgtacatatttccattggtcaggagcagcattggtgaaccttaaacttctctctcgaaagtaac

SEQ ID NO: 141411 - DNA, 517 bp, Homo Sapiens
  misc_feature (125)..(135): n is a, c, g, or t
aattgtgtaagagcaataagcctatagagatttatacctagtgtggtttagtatcatttgtgtgtatgttcatattatatgtaaaatgttgtaacttaacctggtacagtgtgacccctgagaannnnnnnnnnnaaatagtactaaagtttgagatatactactttgacttgatgttttctgtgattaagtaaaagattaccctgtgcccaaaactaaatataacttttcaaaacatgttcttccttttatagttcattttcctttcttttatcacaatttaaaaagctagagtcatcatctgtgtttttaaggtcacctgccactaaaagtcttaatggatttttgaaatctcttttctcatttccatttccaattcctgtgccttagttgctgtagtttgcgaaactggatttcattacctgtctattaaagctctctccaatccatctgaccaccctgtttttgttagaataatcttaaaatgtgagtctcgttgtaatgtttctttcttagt

SEQ ID NO: 141412 - DNA, 464 bp, Homo Sapiens
ctattgattatttagagggtagtgcatgatccaagggtgtcacaagattataataagaccccactcatgtacccagatctatgttgggaatgagatggaagagggaggtagagaatctaagaaagactgtgcattttcctataagagaccgtgtcatctataacaatgtcactcgaagtgtggtccaagggccagcgcaagtccacaaactgttcccttttcattttcagagtgtttcttggtttccaaagagcttccacatctaagctcccatttgatcttctccagagtcctacaaggattcacatgtgggttctgcagctaacttcttacaagagcagaggctaatagatgtgcccatctgaggaccagctggaaggaactgccattttgcctggtcacctaggggctccctcgaggctgagggtcctgtcttccgcgccaacccccgtgtgcgccccctg

SEQ ID NO: 141413 - DNA, 675 bp, Homo Sapiens
  misc_feature (66)..(66): n is a, c, g, or t
  misc_feature (149)..(149): n is a, c, g, or t
  misc_feature (172)..(172): n is a, c, g, or t
gggggaaccttcttttttgctttccttgttttgatcaccctcaatgtcaatgggattgttcccatntgcctcttccagttcatcctcgctctcctcccgctcccgtttttgtttccgggcatggcgatccatcacactagttttagtcntcgtcttcttccaagaatagtanaatttcaccagacttgctatagatttatctggaagcatttgttggattctatgaaaagttttcccatgaaaactaaaggcttgctcaaataagactttatcttccacggtcgactcatctgggaaaggggtaaagttgggcaaatcagccaatgacttttcgatattatgtttatgccagaagagcatcccaagagcctgttccatgttgtacccatgcttttctttggcaatggcaatgtattcatccaactttgcttctgacagattttgattgggtgaccagaccaacatgccaagattgtcccgttcttgactgcgtcttgccagtttggcggggtcgaagtcgggcaccaccgcctggtactggggtccgaccctcatgccaccgccaccgtgctcctcgtcgctggacgagcccgagctgccttcctcccaggagttgctgctgctgttgccattgggcgccgccgccgccaaacttttattctggccattattggg

SEQ ID NO: 141414 - DNA, 454 bp, Homo Sapiens
agcagtgtgttttaacaagcactccagacattttgatgcattctacagtttgagaacgtctacactgtaagagccccagccatcaccacctaccagaaggcttctatagctaatcatttgccccctctcccacctccacccacaacacacataccatacatgctcacacagctaggttgttggtgtccttccaaacttgcatccaccagagtgtgcaccacattttttgtgttattatttctttatgtatgtacctcttctataaccgtataaactcatccaaaacatcaatgatggggtaccctttttttccatttcttgaatttagcatagtgacaggcaaaaacaggtactcagtaaacaccaaatgaattagagatacattgacatttgtgtatctgatgtatttatttgccccctaccttcttcaaataaatgaagtattacataaaaa

SEQ ID NO: 141415 - DNA, 666 bp, Homo Sapiens
  misc_feature (80)..(80): n is a, c, g, or t
  misc_feature (95)..(95): n is a, c, g, or t
tgcatccatcttctgatggtcttgagcaatcagactgaagttatttatatcatttgatgaagaatgacaggcctatcgtncttacatttcattgnccttataatccactatctccgcagtatgagtcctcgcgatattcaccttgagcattttctcgttccaagcatggatgtcacactcttctcgcagagcatatttggtcatgatctccatccacgcagtatctactaacttctctaaggaggctgtgttatggtgaaccatttccagaacaagcttctcataccaggcaggaaactcctccttcaaaagctcagcaacttcctgttcttcctcccaggcttccttgtgtgttagctgactgcttccagtactcttgcacgtccaaatgcgctcactgtacctttccaagcgggcttcatactcttcccgggtgcggaaggcctcctgagtgtgcgggatggtgaagagcggctcctctccgggcaacggcttcaccagcgggaagggcttgcggcccaggagcggcgccatcgcggcggcggcggtggggactggcggctgctggggccggccccgcggcgcagcactaggccccgcggcccggagcgagcgccaggcgcccggggctggggtgggggaagggaggggtgagagggcggagcg

SEQ ID NO: 141416 - DNA, 873 bp, Homo Sapiens
  misc_feature (748)..(748): n is a, c, g, or t
atgttgatgatgttttaatttctagaatattgtatgacatggaactattcagaattcctttaaaaaggaatctgtcttgattaataacattattaaggtactttcaggctttcccttaactccatcgagaaggaagagggagtatgtgagtacatgtgcatgtaatgggtcaggaggaacagaagcaaagaaggaagcacgtgggaaagtgagatgtccataaactgaaaaaaccaatttacagaaaggcatctgatgtattttctaaataaggccttgatcagggtaaccaatcctctttgtagcacattctacactgcccataaataaaggagtctctttaaattaacatttccagtatcaatgaacagtccagaaatcctcatttcaagcgttcgatgagtccctgtgtgagtccaaggtgcagaagttgtgttcgggagaggtttgcaaggttagggaaggccgcaagcagcttctcccatgccagttccagcaggctaggtaccaccagccagatcttaaacaatgacccagtccgtttgttttcattgatgttcaccactcctccatgaatgacatgcaaccaagctgttgtaacagctgcacagtgaaaataaactggctctggcatggtagctgggagcttcacccattgggaagtctgcagattcaacttccagatatctcccaggatcacctctccattatagcccccacaaataaatacatcattttttatttgaanacaactgtgacaccttcgggctgcaggaaagcctattttttcatggggttttgttgcaatttcctcccaggcattcgtttcaaggttgtatgcatggatcttgtttaaggaatatgctgtccagg

SEQ ID NO: 141417 - DNA, 582 bp, Homo Sapiens
ttttacaggttgatgtgtttaatgcttttggtttgaaaacttcaaagggagtaaataaaaatctgaagcaagttttacttgttctaagtgatgcttcaagaagaatcaagggtgtaaaaacagacatcacatctaccgttccttccccttaggtggcattctcgggtacgcaaccatccaggctgatgggtttcagggaggcagtctggcttctaggagttaatcttttttagaagatttactaaatccttgtctgagttttgctccagaagcagggtccatagctaatcctgacttggttgggacttcattcgtggccaccaggaccctgttctgcagcaaagctcccacagcactggtaacagttggttctttttttggacccatctgagccctaccctgagctctggatgccaatttggctgctgtctgagctggattaaagactcggcgagaagactgatccttgcagaaattagtatgtcgctcagctgcgctttcattaaaccttctcatacaatattgacgttgaatataatctgcgttcaaggatggagggcgggctgagtcggcaggcccccc

SEQ ID NO: 141418 - DNA, 471 bp, Homo Sapiens
ttttcttgatataggtccatttcatttatataatcataaataataataagttagtatttattttgctgatttaaggtgttcatccaaaagttcagcaatggcttcttcatctgctgattgaagcagtctctgaattagctgatccaggcccttcccaccacataaaaattccttaatatcacgaacttcatatgctatcctgtggtcactgactctatcctgggtgaaattatatgtccgaattcgctctgactgggctcttgttcccacctgcagttttctagcactttgttgctgacgcttgtctttctcaataatctgctggtagagtctagctctcaacacacgaaaggctatttctttattttttatctgtgatctttcttgttggcattctactactagccctgtggggatgtggacaagtctgacggcactatcagttttattaacatgctgccctcctgctcc

SEQ ID NO: 141419 - DNA, 492 bp, Homo Sapiens
tttaatgagacaggtgtttattctcttctgtcacagtccaggaggtgagcaaggcaaggctggtgggtggctctgttatccatctcctgtgtccaagcgactgctccagttgtcaccatgtttccagtcaccaggtagagaaagaggaaatggagggcaagcgccctgctttttaaggatgtatccaggggttgctcaaatcatttctcctcatatgtgttggccagaatgtagtcctgtggccacacttcctggctctgccgggttccagatggctctcattttattctctttgggcagggctcacttggggtagcagtcactatggatattcatgaaacacccaaagttacctggtgaaggactttctttctacctgaagggaagcaatgttctcgtgtttgtgtgtatgctcaacattaaaaactattcagctcctaaagcagatacagtcttttggcctcctcatgtattatataggagatgttctac

SEQ ID NO: 141420 - DNA, 322 bp, Homo Sapiens
tttaatttaagctatttccttgaatgtttctcccttcattggctgtatcattttttggattttcttgcattggacttcacctttctctggcccctccctgattagcttaataactaacctgaattctttttcagataaatcagtgatttcttctttgtttggatccattggtgatgaactggtgtgatttttggggggggtgttgaaaagtcttgttttgtcagattaccagggctggttttctggttccttctcattttggtagactctgtcagaggaaaggtctagggctgaagactgttgttcagactcttttgtccca

SEQ ID NO: 141421 - DNA, 509 bp, Homo Sapiens
tttatgttaacttgctagatttagtcattgcactatgtacatacatttttaaacgcaggttgcatggtatacacatatacaactcttatttgtcagcattcaggttctagaaaccccatttcctagggaaccaagctgacactggagcagtagtgctgtggctgagctgctggcacagagatacacagccaagtccccctgctgtgtgcgctggaacttcagagtggagatggatccctcagacctctgtgcagagaaccgatcacggggaagccccgatttgtctgctgcatccttgccttggaagtaaattggaaactccaggccctgccccaggctctgtcggtaccaataaagggcattatgacctgaaattggatcatatctgagagctacatcctttcccttctttgctaccttgtgtctcagggactgggagactccagcacctgtgtgatctgcccccaggagacatatggctgcccagcagaggagccttgtgcccatgg

SEQ ID NO: 141422 - DNA, 524 bp, Homo Sapiens
ttttcttgtttgggtgaaatgagttactaaatgtagcatttatttataaggaatgcattgtgaatagtttctcagttttcattatggaaagatgatgatttcagcccacattcagtgtatgtttctaaataacacaatcgacaggactgtctgttcagtacaatggaggacagctttttcagggcaaatgggatttcttgataatgctaaatctgtcttgtcagctgaatttcttgggctttatgtggcagtgtggtaaaaatatatgatcagatttcactgttaagaaaattctttcagcaatacatgtagagtcaagtttcttgcatggataactgaacatgtgggttatgagattttaaaaaatgtctcgtgacaaactttacggaaatgcaacaatctggacatctagttttgtctgagagtggcgtggatatgaagaactgtgctgttggtgctgatgccacactaagttttggcagtcacactcttggttcttcatatttgaggagatgggatggtga

SEQ ID NO: 141423 - DNA, 481 bp, Homo Sapiens
ttttgatcttttttcctttttgctatttttattttgcactataaacaacaacaacaatggtcagtaacatagagcttttcttcacatttgcatggattgcaaaatctgcaaattccagaagtcagtggcttgaagacaaaacaactgtcacaagagacacaacacatagaaggacaggaagctgaagaagacagttttcaatattactgacccaggatacacagcaagtacccttttcctcctggcacctggtgccgccaccttgatggtatgattttttagtctatgatctgaaaaaatattttctcaaatgaagagctgctgagaagaggtgcaatgagataagttcaagtatgagtaacagtcatacttattcaagtgtagatttgtatcatacttataaaagtccaaggtcagtgaggaagccacagcaaaagagaaacccagaaaggccaacatcttgctacttcaaccaactgcc

SEQ ID NO: 141424 - DNA, 879 bp, Homo Sapiens
cttggtgcattaaagtttcattttaacatgatttaaagatgagaatttaggatttattgacctgtttagttatttgactttaaaaatcaactttgaggtataagctgcatacagtaaaaggtaactgttttaactgtatagtacaagtttcacacccgtgtaactatcactgctgtcgagtcataggacatgtctgtcaccccaaaaagttcttttctactgctctgaagttagtctttccctgcccaaggtcactactgatcggctttctgttcctacacattggtttttcctattctggggtttcataggagtggaatacatatagtccttgccctttgctgtttgtctcattttggtctttatactgtttctgagattcagccatattgttgcatgtatcagtagttcatttctttacgggagctgttttatgggagaccatctgaccatgtagatatgtctattcataatcttaattccaaagagttagcgaaaccctgggatggctttctatctttcatcttagttatctctcccccttttttctaattctaaaaatatatatgatataaaaagttgaaaccactttcactgttttatcatattattaatatagaagtatattttttatagataattataaatatgaatctgattttttcactttaaaaaaagacttctaagtaaggtggttgctatctgttttgacttaaacctcaactaataaatgtgtagtttaggaaattagcatgttgaatgaatagtggtagcccttgaaatctcattttgaatcatgtattctactagataaattagcaaattttagaaaatctgggccgttgtctttctgaatgaaaatattatttgtggaattgc

SEQ ID NO: 141425 - DNA, 409 bp, Homo Sapiens
cacagaggccagcgtttattgacacttgttcaagtctctcaggccccccaggcttcttggtcttaattcctggggaaggaggcccagccaagggagtacaagctgtagacagtgccgcccagacacagcgtcattgtcactcggtacaggatgttgtcaacgatgccgcccttcaggtacaacgggatgtcattgtcctcctggaagagcttctgtttctcgcgcactcggttctgaaagcggttccgggcggtggagctgaaggagcggatcagcgcctgggacacccgaagggcctgcattctgccttgtcctcttccgccggagtcacctcccttctccgcccaaggacacgcgtagtccttctctgtccaggaaccccaggccccacccgctgcgcgcagcgtga

SEQ ID NO: 141426 - DNA, 396 bp, Homo Sapiens
attgattttatttctccgagagttttcttacaaagtgaattgagctcgcacaattagcttgatgtaatcttaagaaaatatatgaagtatgctttagaaaaaatcatgctctaaccagccatctcatttggcaatcattttccacagctcttgccctttttggggtggggaggtggggttatttttacatgtgaatgattacatctgcgtacaagaagatcccaactcacgttgacctccctctgcaacaccagctggtgttgggagacagagcgctgaggcagccagggcttcagtcccccatgctctttggccatcagtcctcaaatgtcatctccagaagacctggctgaggtctgggcagtccacacacaaaaacctagcatttcctcccac

SEQ ID NO: 141427 - DNA, 443 bp, Homo Sapiens
ttttgctgtatatgtgaactcaattaaatggcgaaaggccattttactaacaccttctatctccaccaatggttcttgggtaaactcctgaaagaatttgtagaagaacttactacaagcagccaaaacagccttgtgagccttaaaatggtgtccgtcgaccattagggtgatgtcagtaaaccggtcctgctctcgctgttcattcaatcggtcgaggatcattttatgatgttcagggaactcctgaaggcattccatcgtctcttcagcctccatggccgtcgggctgctctacaaaagaagagcatgataatgtacacccatgagctcgacgccgatggaacaaaacccctaaaggcataaatacaacaacaaaataaaaccagcaaccgtgaaaagacaggggggagcggtgaacgcaagcaggagagaaaggcgag

SEQ ID NO: 141428 - DNA, 614 bp, Homo Sapiens
ttttttccacggaaaaaaatgatttccactttatccctttacaacagagtaaattaagcacacagcttgattgaaaagatactaagaactaaactgaacccggtactaaccattttcaaaggctcactacacaaatcacacggtctcctgcaagtctcctgttagcataagccttgacaggtcactggaggaattaccctaaagattcacattacaatccagatacagggggctgccgtggctcgctgaaccacctgcccttattgacccagctgagattgtccacaacagtataaagaaaggactttggaatctgaccatcagtgacatgtggccagcgcccctccctcagctgctctgccttcagcatctgctgtaaggctgggcagccttttggggaacctgctgaaccctgtggtcttagctgttctaggctaccaggtggccactcgaagagaagacgactcaagtaaggcaaagtggtgctggctttgataaggcacggtgcatccacgctcaggtgctggacatccagatgtgcatctgcttggccacctggtgcacgtatccgatgtcaggtctctggtgggggtcagggcagatgcacatgctga

SEQ ID NO: 141429 - DNA, 601 bp, Homo Sapiens
  misc_feature (493)..(493): n is a, c, g, or t
ttttaaatgcttaagagttttaatcagtccgccataaaaagctcctccccattctccatcttgggggctcagatcttggcttcgggttgagatgagggacagggatatcaggctgggagaggagagtaaatatgaatgcggctgagggaccagagctgggatcggaagaaaacacaggtgaaaaggagcagaaagagactgctaaccccagtccctgagccaagtcagaaatccaagtccttttatagcatccaggagccaaatgtagtgaaatccacacatcatatcgttcttatctgcaaagtgctgtcatctggcgctgaaagcaccaggactgggctgaattggggcccgaagtgcctgaagggtgtcactttaggtctggagagtcaagaggagacgccaccttggcctacagagttgagagcgagcatcatcttggcctggaggggtgtgcaggaaatgccaccttggtccagggagttgggagganagatcccctgccttgggttaagaggggccatcttttgggctgcagaagaagaaaccatggggagtccccagaccccaggatcaggagaagaaagtaggatggagacag

SEQ ID NO: 141430 - DNA, 379 bp, Homo Sapiens
  misc_feature (328)..(328): n is a, c, g, or t
tttaattttaagacaagttctcactctgtgcccaggctggattgcaagcatggctcactataacctcaaactctcgggctcaagcaattgtcctgcttcagcctcccaagtagctaggtctacagatgcaagccgccatgcccggccttccaggattcaaatttaaatccatctaactctagagctagtgttcttaaccactttactgtgttttttggtaatttgagttggaaaactatctatatccttttgcataagtggtatacagaccaaaaataataccacggagaactgccctctccttgaggaatttcgacactgccacaanccagctatacctctacagtgggtacactgccactcaggtcataaatgattg

SEQ ID NO: 141431 - DNA, 876 bp, Homo Sapiens
tcagagcaatcctgagcctgctcactgaagtccgtctcttgccactgtctcccttcttagctcctgaaactggggcgagtgaaggtgaaaggaagtcctgaaggtgaaatcagagcctgtagcctctgggggcacaatgttccggcctcgaggtcctgtccctccagcctagagaacgcaggaacgcctggcagggtcagtcgttggttggggcttctggcggggccacaatatgcagatggcccgaacacctggaccctttgggtggtgcctccttgacttcctcgaaccagtactcttttagccagacttgggctggcgccccaggtgacagctcttcacaccctcacctgccaggatggtggccagggctgcagggtcagccacacaactctatggtccctggagcctctgtctgggcagggggcccaggccccacattttgacccctagggctaggcctgagctcttccaaggggttccgaggctgactgatccccaccaatctttgtgatgtctctgcctggtgcctggctttcggcctggggcctgctgaatcaacgagggggcgttgaatattgagcggtggtttctgcacccatctccttggatcttggttctcctggtccacggcgcacgatgtaacagtggggaaaggcgtgcgtttctgagagcgtaccggaatcttgctaggggtaggagatacaccccggaggaggggatccttcgtggcttgccgggtggtcatgatggcttaccgaggcccctcagggcctacccagcttcctccgcttttctcctgaccctctcgggtgctgctggagctactttctcacctcgtgccgattcaacacccagcctcgtactagcctaatt

SEQ ID NO: 141432 - DNA, 658 bp, Homo Sapiens
ttttacattttggcatttattgagttgggttcaagaggtggtttccttcccaggaaggatcgtttgggagtcttctacaccttagattccccatgagatcttttcaaaggcaaatctgataacacatcttttcttcctggagaagccaaggtttgatccttgctcagagcagcttgaagcagcagtgagtgagtaaagctggcagccctccagctgagagaggaaacctgaacaaaaccatggaaggaagtatctagaaggctttatgcagtgctaggcacacttctaaggatgtgataacttagttcaacctcacacactcttacaagctggaactactatcatttccattttgcaggtgatgaaactggattcaaacccaagtcatctggccctggagtctgtgtcctgggcataacacactgccctggcataggaactttccgaggagataggaggctgagatcatggtggggaaatgagcagaaaggctggtgggagtgctgtgaacaccaggccaaccttcaatttaaaacaattccttcaaggaaacacagctccaactattccttgtcagcagagcagctgcacacagtcccttgtcctgtatgtcctgataatcgtccttttccacttcctctctccctggccgacttat

SEQ ID NO: 141433 - DNA, 546 bp, Homo Sapiens
tttgtttatttaatatgaattcgtaggtaaatttattatgttatgtaaccatgaatttacaactaacacccatatggggctggcctgcctgtgaatcaccattgccttcattgtcctcacacatcactacaggcggtcagtggctatcagtcctgcaatattcaccatcaacagatgcagaccgaactgagtacgtctcagggcctgggtgtccaatgctcggggcctcctgaacgacatgggccttcgttcgcccgtgtggtcatccacatcttcggcatctgccactgccaacccctgtccttggaagaagctcttcacccggaggtaactgacactgaggcgcaggacagaaagcttgtccagcttggagatgatgtcaggcgggaacggcagcaggctggccaggtggtccaactcggcgttgaggcggtcccggtgtcgcttggaggggttggacttctctgcccccacggcgggcctctgtttctgcaggggcctactccgcttccggcccgcgtacgttcactcccacggcaggatcat

SEQ ID NO: 141434 - DNA, 710 bp, Homo Sapiens
ccagatcttattaagaggtacacagcttagaaatactcagtgggtctttggcatagttgtttatactggacacgacaccaaactcatgcagaattcaaccaaagcgcctctcaagagatcaaatgttgagaaggtgactaacgtgcagatcctggtgttgtttggcatcctcttggtcatggccttggtgagctcggcgggggccctgtactggaacaggtctcatggtgaaaagaactggtacatcaagaagatgggtaagtgtcggggtgggttgcttgttccagtggaagaaaaccatttttgagatgttcttgcagccatggttgaagtgtggtgtccctgctgtccttctgttccctttggttactgtacataatgccagcctttcaaggagaattgagattaggatcatgtgatgaaatgaagatgggcacatttgggacttgtcttatactcaaatggttatttttaaactctgtgttaaagtattttcttagtggttgccctaggaattacaatgtatttcccaatttatccaaatctacttttgattaatactaacaattctagtcaaacacagaaatgtcactccagcgtacctccatttcctctcctgcttggtgctgtcattgttatattccatttatctgtgttgtcaactccaaaatagtgttacaataatttgtgtctcttaaagaagaaaaagg

SEQ ID NO: 141435 - DNA, 406 bp, Homo Sapiens
ttaaagttacaaatgcgccaaccaaaacatttaactctctgtgtggggtgatacacagaattgccttttgacattatcttaagtgaggtctgaggcagacacagaagacagatggcggcactggagaaagcagctgtttccacgcactgggtcaaaggagcaggtctggtgcttttaaaatcttggcaatccacatcttattggagaaggactccgacttcgagacatcgtgtttaaaccaatttggctacgggggcaaatgggacttaaactcctgcttcgacaacgacttacagatcgcaccgaattccaaaaagcccctctcctggtgacagcttctcccttcataatgacacagtcattctccatgagagcaggccacacgtgatagaggactaagggagca

SEQ ID NO: 141436 - DNA, 690 bp, Homo Sapiens
  misc_feature (289)..(301): n is a, c, g, or t
taaattttatattttttttccagccaactcaaggccaaaaaaaatttcttaatatagttattatgcgaggggaggggaagcaaaggagcacaggtagtccacagaataagacacaagaaacctcaagctgtgaggtcaatttgtaattaaaagaatactaagattagatgaacacaacactcagaaatactctaggagagctgaaaaagaaggaacagatgttaacaaaacaaattaaggctgctggggaacctgagtccatgttaagcttgggttgactgtaaagaannnnnnnnnnnnnaatgcaagttagacatggagttagagggtcagataaataacgaagagaattaagttagcgatagaaagatctaaggatactagctcctgggcacctagggtgcaaactgacttgtggcagcataagctgatgctgcacaggggacccaagccatgttgctacttgtcacttaaggcaggaagcgcacaaaggaagtgatgaaaggttattagcctgcaacattatttacagcatgagagcctctcctacggttctcaaccttcattaggcactactgtgatctagtgatggttgtaacccattctttaaaggcaaagatgtaagatttacagggaaaagcttcgggttttatcaattcactatcatcaaacacatattgagttggttaa

SEQ ID NO: 141437 - DNA, 559 bp, Homo Sapiens
atcctatagttcatactccatgattcttgcgggaggtctttgtagacagaagctttactaaaagataaaagcagtaggagatcgttaaaactcagcagttgatcaaactctttctgaaacctaggcttagaagccaagcagagatatgaacatgggaaagtaattaatctattacagtctttcatgataattttcactttctcaaactgttgaagtaaataattgttgggtacctatttactctaaccaaatattaacctttttattcttttcagcttttaagtactgcccattccacttctatattttgatccctcaatcagatagctaatttaattccagcattagttatgcagattttattccactggaccaaagcaatatactgtgttcctcttcccatttaattttattttaaaactttgcttgcagagctgaaagatttcttagagttttcatggggctggggttctggctgcttgcttctagattgtatcaaagcagctctgccttttttctgatttatttgttgggctgctccatgagattttgtctgaaa

SEQ ID NO: 141438 - DNA, 387 bp, Homo Sapiens
cattactttaaaaagtaatacccccaaaaaagttacacctgaagtttcatcttcatgcctttgtgtaatattactataatggtgaaatgatgatttaaaaaaaacacatcagaactgacacatcctcttggatgatgggtccttcagtcaccttgtgagcccatgtacttattccgttgatacagcctgtgctataaacatgtggggccctccttgtgtgagctgcttgaatggccagtacccccattcttttgaatattcccaatggcagtcaatcttggcctttaagaataaatttaaatatttggaaatagtccttaggatccaagtttgatcaatgaaaaggatgcttaagctgagtttggggtcacataagaagtgcagtta

SEQ ID NO: 141439 - DNA, 425 bp, Homo Sapiens
tttccattttcatttcaccactttgaaatcttggaaccactgatgtgatatcccacagagagggcaagacttcactgtgaagtcaccaaaggaactcctgcccttctaggtgccacttgagtaataactcccaactcactggtcctctaaacctgcagcagggagatggtgtgctaggtagctacatgggcaggagaagaaatggaaacaaattcccggaggatgtttttggccatctcgatgttgttctgggcaatgaccaaagctttctggatgtcctggtaggagtacccctgactcatgaggttctcgatctcactggagagctgaggtgaggcggtggcagcagaggcggcaggaccactaccttgctgacagctgccagctttccgttcagagttgattctccgcgggaatggttttgg

SEQ ID NO: 141440 - DNA, 424 bp, Homo Sapiens
  misc_feature (411)..(411): n is a, c, g, or t
tttgtagttcctaacacttcatgtttattaactcaatctgcacgatagctttctgaggaaggtgcattattattcaccctgctttacagacgaagaaactgaggcaccgaaaagtctggtaacttacccccaagttaaacgcaggagtaggttaacactgaggggaagtgtaacctgagcagcctggctcctggactcaagctcttaatctcgaggctgaaagtcagtacccaggctgaggtttggaaagtctgattctctacattcctcctcattctgcacaacgcattgagggaagcagagagttgctgtcggccgagtaagcctggggcactggtaagtcctatatgcctagtgcggtttcaggtgcagaagccgaggcactgctcttactgaaccaggcatagcttnctgtgggtgaggg

SEQ ID NO: 141441 - DNA, 1945 bp, Homo Sapiens
  misc_feature (996)..(996): n is a, c, g, or t
tgtctcgaatgcaggcggttttgacagtattctctcgcttagccgcctcagcccaaggtccgtgactcgtattcacaggttactcgttcaggtttcatccaattccagataggaatagttctctccagtgtgctcttcctgcaggccatgtcacacttttcctcgttcctgcctttccgggtcagttggttaggatctccaggactctccactggcttggcatccagagctcctggctccaaagaggctgtatccatgagctccgggacttcaacagggggaaccggggtgcctggacggtctgcgtccattgcctcagaaggtggtgctggttctggggaagaaggtttggctgtgcttggttctgtgctcgttttcccttcaaaggggcttggcttggcagccgtaggtgacagtactttttgttttcttcttaattttgatgcctggaacaggggctgaattaagagcatccagaaagcccaggccctccataggctgtggcgggatgatcttcactttgatctctttggtggcattaggtgttgtgttgagtggcttgtatttcttctctgcagggggagtggcatctcctggagcagctacgttgctctgacgtttgagggggatgggtttaaggttgtacttgtcagaaaccaccactgtgctggcattcttcttcacaggcaccaaggatggtgtctccagctctagtccagtggaacggaacttggcatgactgggtgctgtggtgcgaagagacttgggcttctccctcttcttctctggggcctcctcagcccgggtctcagccttcacctctgtcaaaggtcgctcaggaagggtagttcgactttttccttcatctttacgtttcttcttatctttctcagcaggctgggtactgctctgagagcggatgacagccatccagtcgctgacaaggactgaggccaatttccggagctcttcatcctcacttgacttgctcagctngcttcaccagtttagctgtgttgttctgcttgagatggtctacagtgagcggtagatgctgcagggtcagtagaatttgctggaggagggggaatgttgttggttgtctttgaatacgtcagcccaattgttaagaagtttgtagccgccaacgtcaataaatttgaccaatatttctggtgaacgggtctgcaggagaatgttcaagtaagtgcatcgactcaccatctttcgtgcttccttcatcaaactgaagatcttggaaatcccatccacacttttgacttccccatctcggttaaggaagctgtccaggcccttgagaagttctttggggtctatgggacccgaacccatgatggtggttttatccaatttttttgcgacgtcagcacctcgggctcaggggggagggggtaaaattttggaggaatagtgagtagtacaaccaaccaggacccaaaactcaattatttagggggcctcattggatcaaaaagtcttttaaaaaataaaggccaactcagtattcatttcccccccacccaactccatttagggaggggggtcgcagaaaaaagttctgagtggattcaaaaaagtaaacgctggatgagtgaatttgggtggtttgggaagggagggtggttgattatttttgaagttatgtagtgacggtccttcggccacagatttcaagtcccaagcagcgtgggctggtggggtgggcaagataggtgggaaggggcagaagacacaagtggttgggctggtggctgctgttttccctttcccccctctctcaggatcctttcaagggcttagatgttgctgcggcttgtttctgttttcctcgtggccggcctgtctttctccgagaaaattcaaacctctaaacgaaccccagaatccccggccgtaatgcactctgcgttgataccactcttcc

SEQ ID NO: 141442 - DNA, 742 bp, Homo Sapiens
ttttttccaaacattgacagactttattgtgggggggttcccacctgggaccccacctcttaaataaaaaagtgcatagaaaagaagggatttagaaacctttgtacaatatctacatcctgggcccccagggcagaaagggggcgattgctggatgggctggaggggtggaggcagggcccttgtcacctgcatgcccacatccaccctgaacatgagggtgggggtgagatgctctgggaggggctagggagcccccaggctaggggcaagatggcagcgacggcagcaggaggtgtgaggggtcgtggtgggcagccacggcctcagttaaggaaccgacggcagcgcttggcgccacagttgcagggcagcttgttgctggcatcctcgatggggaacttgtagtcgtaggtgagctcctcaccacgcaggatgcggcgcagggcgaagataacaatgtgtttctggccctccacgtggatgacccgagagaagcagatgggctcacaggagtgggtgatgaagcgggcggcattgccatgcatcgtggcgttcactacatcacagtcatccatgcggaacatatagcacctgatgccctttccatcgtagaacttctcccgcttgcattcaacaccgagcggatgacaatgccatagtactcgatgaccatctcccccctgtcgtgttgcgcttacagaacaggccttgcccgttgatggctgacctgtaaacacca

SEQ ID NO: 141443 - DNA, 826 bp, Homo Sapiens
  misc_feature (721)..(721): n is a, c, g, or t
tctgttttaaattcctacctcaaatacgaaataatttatttagggttatgttacatacggagtgaaacaatacagaaaagcaaagggctaataatgacaggatttgaggagtgggtgggaggaaatagaatcacagcgggacacagggaggactcgaaagtattggttatgttctatttcctagtgtgtaattcttttattgttctttgtatcttacatatttattatagactgtatataagaaatgttttagttttaaaaaatcccacctctttggagcccaatgagagacacagcttctggcaggcactgatgaaatggaagtcacacctgccccccggaggcaaagcctttcactagttgggcctcctgcagatgttcctcagttctgtgctggtctccccagagctgcaggacagctggctgcacccagccctgggcatccttaggcttcctggctcctggcagattgctcctgtacggactgccacagagctctgatgttgccctgaccaaagccagtggccccctgcctctgaatcagctccaggaagaaagtgtcctcagtaaaaagggacttggtgaagacctgaagcagaaacttgcctttatcaccatctagcaggatcccctgtcgagcaagcagatgaggctcgtgccctgcagctcggatctgcctctcctttcctggctgctggtagtatgccccaaggggagccangaactggccttcagcagttgccaccccctcagtggccttcacaatgttaggcgtatacagccccacgtgctgcaagcctggccccttgtgcccggccaagaactg

SEQ ID NO: 141444 - DNA, 226 bp, Homo Sapiens
ccttaaacataacttatatatgcactgggaaaccaaaaaccttgtgtgattcactttgttgcaatattcactttactgaagtggtctagaactgaacctgcaatatttccaaggtatgcctgtagttgtgagatgtcagtgttttacttgaagtgttaaaacattgattttaagttgactgttacccttaggtatgtgtattattatccctagatcaacagctaaa

SEQ ID NO: 141445 - DNA, 529 bp, Homo Sapiens
  misc_feature (126)..(134): n is a, c, g, or t
caggcttaagttgcttttaggttacacagactggagtgtaggccctctcaggccaaacatctttcctcttctgtggtgctaaaattctgtatgaccagacaagtatggtaataggtttttccttannnnnnnnnggtgcaaatgattttgtgtttagtaaaataatggctaaacacatggatccattcaaacgcacaaatgtggaaagtattgacacggaaggaaaggctttgaagaattactgcctcaggaagcagtgccatggatgcgaatttaacacagtctacttcttcctaaaggaatatcatcccaaggaatgtcaaaaattaaaatccccttttaatgtactggttgttgagtgtttctgctttacctcaagtcattctgaccactctacatcctgcttcaaagtgttctgacacttagatttggaatggctctaatgattctttgtacttgaatgtggtctgtcaggccatgggtgagtgccttgcccatagtaaacattccctccattcttaatgaaggg

SEQ ID NO: 141446 - DNA, 542 bp, Homo Sapiens
ctgatggagaaacaaaagctaaagaggttaaattcacctatgtagctaaaagttaaatagaaaagttgagattcgaacccaggtctctcttgtgcaaagtcaacactctttccaccacactatactgtctctcttgttttctgttccaaaaggaatatctctcagactaaggggaatgtcttagtcattttaggctgttagaacaaaataccataaagtgagtagcttaaacaatagacatttatttctcacagctctggaggttggaagtccaacatcagggtgctagtagggtcaggttcttggtgaggatccagttcctgatttacagatggctgtcttcctgctgttttctcacatggtggaaagggaactaactacatctctgagctcttcttataaggacactaatcccattcaggaagtatccactctcataacttaatcacctcccaaagactccacctccaaataccatcatgttgggattagagattcaacataaggatttgtgagggggcggtataaacgttcagtccttc

SEQ ID NO: 141447 - DNA, 2554 bp, Homo Sapiens
  misc_feature (329)..(329): n is a, c, g, or t
  misc_feature (1699)..(1707): n is a, c, g, or t
ctgtggggtacgacgtggggaaaagtggcaggtcttacgtcagggacgaggcggtggtgtagcgctgatattctcaaggatgttcagtccgatatgtcccccattaatagccccggtggtcaccgtgtggtaagagcgccccggagaacgccctgctcatgatcgtggaaagagcattgagagatattggtggccaagtgacgtttcaggcagcccccgtctcttgagagaaagattggggcgccacagttgccagcgtttggagaaaggtgccgcgtttgttccgctgtgccagggagaggagacgcagtggcgttaatcgaggactngtccggatacacagtgacttccaattgacgcgcccaagagttatattttttgtgtttcggacccaatcttggaaaatgtgagcatgctacaattgtgaaataaattgggtgtgcgcccagtcgaaatgtcagaagctgtgggtcccatcttttatttgaaaaccgcgtaagattgtgcttgcttggagggggatttgaccaggctatccagctggaaaataaggttttattgcaaaaagtggaagatgttggtgaatatctggtcgaatgctattcccgggtgctaattgtactcagaaattcaaaaatccaaaaggatgaaatactatgtcgagccgtatatacatcagagatggcagttcttataaaaaaccatactttagttgtaaatggtagcgttatgcaaaaataattttatttcaatttaattttaatgaatctcccccaactataatattaaaaacatcaaaagaacttaagttttaatggcaaaaagttcctattttcccccatctactaaaaaggttgttttcccttattaacatacaatgccctattgttaaggcacaactttttttagattaaaaatgaaaccatagattaggtttattttatacaacagttacaagacagaccttttgtaggcatataaatacatcttaaattcaatcaagatctaaaatgaaaaattattttttctttctaggatcaatcaacacatagccaataggtagttacagctagaataattccaacagttcctgttttaacctgtcagattgtctccaaaaggccatcttcaaagtgcgatctaagagaggaaagctgaatattttcctttctgcatcggcactccacctttctttacttatgctcagctatcagagatggctgtcaccttcaaagcctaagtgagatccaatttttgaattcaacatgaaacaaggacagatatcctgatcctggggtgaccagggtagatgtctgctttgcatcctccctgttacccttctcctgacctccctctagcttctttctgaccctcttcctagccaccacccctctccctctgacacagttcacaaaatattcaaagggagcacctaccaaacaggaggaatttgcacaactgttacttaaaacatacaaaccgaaaatgtttttgttacttcattatatagtataaacaatcaactgaataattactgatttaaaataaagaaagaaacactaaaattggggtagcacataccaagacaaacatgaccatcttgtaggtccttgtaaattcaactgaactggggatacaagtaggaaaacagtaaaagcaagtttcctcaagcatgcatatctacccaactctcttgtannnnnnnnnacatttacattcttgaacaatgggtagaaagaaatacttcgtaaaaacactcatattagacttgacaacataaagggttgtggttttgaaggtgattttcctttactttgtgaggagtctttgtaatctaatagtgaactaggcctcctccaggattgatctcttatactaggaactttaccagagtttcagatttcagcagccattatccagaaaaatgtatatctaaaagaatttgggagtgagagttgtgagggaagtatcctggctaagaaagaaaagcagagataaaggagaacatgaaccggtaagggaaatggtcacaaggtagaagagatgaagaagggcagaggagggggacagctgatgggtactgagatcactgatgtcactgcctctactaaatgtggtgcataaaagtcatattttaagaaaaattgcctcaaaataagggcaacagtgaagaaaagaccaggagctggtgaggtgtgggtcattaaaagcaaaaggtaatgactttgctactttttagaaataattttaatgtaattctgggagataacattactcattcatgaaggtgttttactaggatgctatggcacaatgtcttgtgtaaataaatataaatactgttcctaattctgcaacgtatattggcttttaaaaacaaacaattttaaccacatgaactttttataaaagtacttaaaaaaaatcattagtaactagactatacccaacatattataaaaataatgtatttaactctcaaccaataccttaagttttgcacacaacacacacccttcacaaagtcattatctagatgcagattaatacaatt

SEQ ID NO: 141448 - DNA, 495 bp, Homo Sapiens
tttttaaaggtgagctgagccctgagccaggctcagggggctgttatttttagttttatttcacatcccaatcagtaacagatcatgtgttgatttttacaaaggacaaagaaattccgttggttgaaatcattgacttctttttgtcctagctattttctctgccacacttccagtggccacagtggaagtggcaggggagaggtatgccccaggggcttcctgtcaggtgcaggagagggcctctgggtggtccaggccacccgctggcaccatccaggtgagggagacctgccggcttctctgtaggctcctccaggatgtgtggcgggagtccaatctcaaggatgaagggagaatttgtcctcatccccatggcaaggagagaatccttcctgccaggttcctctgagaccctcaaagcctcccagaaggtttgggagaaagtttacaggccagagacactggtccccagcccgacagcactgattccag

SEQ ID NO: 141449 - DNA, 481 bp, Homo Sapiens
ttttttaaaggtgagctgagccctgagccaggctcagtgtgctgttatttttagttttatttcacatcccaatcagtaacagatcatgtgttgatttttacaaaggacaaagaaattccgttggttgaaatcattgacttctttttgtcctagctattttctctgccacacttccagtggccacagtggaagtggcaggggagacgtatgccccaggggcttcctgtcaggtgcaggagagggcctctgggtggtccaggccacccgctggcaccatccaggtgagggagacctgccggcttctctgtaggctcctccaggatgtgtggcgggagtccaatctcaaggatgaagggagaatttgtcctcatccccatggcaaggagagaatcctgtcccctgggatcctgtcacccaggctgctaggctgtctgtgctgagcttggtgtcccgaggcggaaacctggcagatgatttgtct

SEQ ID NO: 141450 - DNA, 568 bp, Homo Sapiens
ttttaaaagatttagaaatgcctggatgcaacaaggacaagggcagagcctggaacatatgccctgggatcccaaagtaagaccagtagtgactggatgagcatccatagaccccattcatactagtcactgtgtgaagctggagaatgatcccaggaattcactacaagattcagtggcttctctagaaattcagaaatggaactactaaagcccattgatgctcagactcctgctgttgattgttgctgactcttggatccttatcaaacctatcactgcagttgataaactagtgtagtgaagatatgaaagttgtttggtatattcatttatgataatgagtagaatgaaagtggaacaagaaagatatacatctgaaatttactcattcatcaatgatgtgagaaaattgaataacagaataatactggaagaatacgtttttcggttttgcgtgttactgagagacatgacacacttttaagtttattctgcattattaatatcttctccatcagtttctccctctacacaatcaataaaataaaacaatcaaactctgaaa

SEQ ID NO: 141451 - DNA, 430 bp, Homo Sapiens
  misc_feature (275)..(275): n is a, c, g, or t
tttgcttgactcttctttaataagagcagtggctttcaaacacaatgtcatttgttcatcttggaactgctatccacaagccaaacagctcctgttagataggcaccgcctattaagcactgtagaatatgtagcagttcttcacatagttagagtcagtcctatgggaaaacagaggctctgcttatgagtattattctccttgcgttcctcaggtagcaagatgctatatcaaaagtatttgggtccccagcagggatttgggccaaaggacntcagggcgtttggttgatcttcaccttatttgtctcaacattgccccaggcaatattatcttcctcattataacttttgccttttgattaacaaacattttctatctggggcaaataatgaattaagtattcaaacatatctatgattcttctgg

SEQ ID NO: 141452 - DNA, 486 bp, Homo Sapiens
tttgcttgactcttctttaataagagcagtggctttcaaacacaatgtcatttgttcatcttggaactgctatccacaagccaaacagctcctgttagataggcaccgcctattaagcactgtagaatatgtagcagttcttcacatagttagagtcagtcccgaacaccgtcctggcaggcctgaggctgggatgccatgctgcttcccccggacttcgcctgtggtttcgtcatcctggtcggccctttgcgactcctggcagccggagatgttcctgtggaccccgtggagaggtcaggccggagcctcggagccccgacacccaagcactgccacggagggctcctactttgccaagcctcagggacgggtttctaagacaaccgtgggaatgactgtgactggagcatgcgccagggccttgcgcatgcgcattggaggggccgagtcgcactccgctcctggcagtcaggctgcgacccc

SEQ ID NO: 141453 - DNA, 538 bp, Homo Sapiens
gtcaccactcactttttctttggattgttgggatgtctttaagctctcacgagtccagtttctccagcattctccctttttcctgtattcgccaacgctggcccccacgggctctctcccaacccccaaatagagtgacaagacaactttggaaacaactttctttacgagaatcttgagttcctaatgagtctgacctggagtaggctagaccagtgcaaatactccaggcgtgcagagcggggaggccaagggcagtgtggggaagatgggggcatcgagggtggctgagtgagtgtcctaatgattcctagacctacagtcccttaggaactgcgtggctatcacactgaccgcctggacctgttgggatgaatactaaaaggtggctgttcgctgtctagtcaaggtcggtgaatgggagtctggccagcactggttgggcggggagggatggtatgacacctgcctgactctgcccggaaacaagggggggacaactggaaccaggtctactctggcttggggagtgattcag

SEQ ID NO: 141454 - DNA, 650 bp, Homo Sapiens
agcaaatctgagtcattgtctttcaagagtgaggtgagaaagaacaaggagtagaaagcttattcaaagaaatagtaacaaaaatctttctaaacctacagaatgatatacatatccaggtacaggcaggtcagagatcaccaaacagatgcaacccaaacaaaactaccccaggcatataattctatgtgatccagtttcttgaatatttcttacgatatgtcatgtaacctgttacttgggaaagttttccaagtgttacacatacatagtagtcagcaatgctatttaacaagtgtttctagatcttctcagttgtgatgaagcttatattgcctgtatcccttgtctctataacgactgtgacacaatgcttaattgcattggcatgtggcagtagcatgaaatatattttcactaacccagtgagagtttgggtgtttttgtaactgcaggattatcagccaatgctaatgtggtggatgtggggtaatattagagtcctagtggtgagaaaggtgacaatccatgttacacatgagcaacacttatgaagctgttatgtgctataacttgcttaaacatgtatctaataaacttgtagcactacaagaagtatttgaaaataaaaacaatattggcacataaaa

SEQ ID NO: 141455 - DNA, 728 bp, Homo Sapiens
tttttagtttgatgagttttgttttatgggtttatttgcttgctttgtttatccgtaaggtctttggaggatatgttgaagtatggctataagtagctgccattatcatatgggaacctagaaatcaacatttcattttttaaagttattctttcttatattatttaactcttaaatgttgacttttactgtatattttatatatttttagtatattactcatttctgaaccacatataggaaaagtaattggagaagtggttgtctacaattattttgaagagctcaaatatagaaatggaatgagatttgttcatatcctttagaatcaatggctggaaggttcagggaagcatatttaaaattagtacaaggaagacttattaatggttagcgctgcctaaagatcaggtaggttgcctctagggttatagaggccttcaggtttagactagaaaaaatttctataaaaaattcagttatccagtgagtaaatagataacctttagggttaacctttgccacctatgacaggctgcagatcatgagctggcctacaaattcagctgtaggatggtttattgtagactatgtacataaaatatggttttatattttattacaaaacattgaacatcctgtgctagatatggaaaaagttcaggaaacatcaagagctctccctcttctccagtggaattgaaaaaataaagtaaaaaacaaccaac

SEQ ID NO: 141456 - DNA, 473 bp, Homo Sapiens
  misc_feature (294)..(302): n is a, c, g, or t
tttacctaagaaagatgtatttttccctcaagtgaaagagagtttaaggtaggtatggtggcttcatatgtcagggacccaggctcttgtttcacagttctcagtaagtggcttccaccatatggttctagatagctgctgaagctctagccatgaagaatgcactgcctccctttaaggagattatattgaagtcttggtgtttttaatagagttgcagagttggcttgggtttcatccttttctctgtttttccttagtcagtgtccttccaaatgaaactccatttcaagnnnnnnnnnaagtgtggcctccttcacatcttgtgcttataagcttttgactaccagagaatgtttcggatacaggactaattcctgtggatgacagaatgcgaccgctgaatgggacattgggtgtcatctggtccaaatcttgaccccttttcattttccccgaaagaaagacttgcg

SEQ ID NO: 141457 - DNA, 518 bp, Homo Sapiens
ttttctggagatgtaactggagtttattctcaatgagatgagatgtggcctacccctgccccctcaaatgaccttctcgtggaaatcagagcaggtaagattctctaagatcattccagacaagttctattattattttgaacttatacacaagatttcagaggaaattaagttttcatcagtttcttcttatcttgtttgtttaagccctggaagcctggaacatgtcttctttctcttgtatcccctgagagcttggctggcagtagcagctccctcagcagctactgctttggttccggtcagtttcctgttccctggatcaccatccctcatcttgaggaaaataccgagatggcaaaaattctgtctgctttgggaggaggttctgcagggagctctggggtcatggtgagcaatcccctgagtaagaagacagctctcagctgcaaaatgcgtatatgcaaacacatcccaggaaatcccaaccagaccccaagcaggtagatattctgagg

SEQ ID NO: 141458 - DNA, 589 bp, Homo Sapiens
  misc_feature (564)..(564): n is a, c, g, or t
tttggcctttcctttctcttttctgtggtcttgggtgctcctggccccacgggcaggtagatggtcagttggccagcaccacgggctggaactgctggctgggatactgcatggtgttcaggttgtagctgaggccttccacaaagggtgtcttctccaggaagaggctgttggcaccacctccaaatacctgggccatgtcaaagctgctgctgttgcaggtgccagccccactgcctccaaacgggcctggggtgccgctgccctggccatcggccgcatcaaagaagaggctgggtgagccaccaccgttgtacacgaactccttggcattgggtgagagctgggactgaggggccgggttggccgtgatgaagttcagtgaatgcatagacagagagaggctcttgtgcttcagcaggctgttggtgggtgagcgggccatgcgaggctgctgtggtggctgctggccacccgccccactgctggctacacccccaccacttgctgccccgccccccttcttcatcttagtggaagccaaaatttttgggtggggccagnccgaaaaggaaaggggcggggtggg

SEQ ID NO: 141459 - DNA, 757 bp, Homo Sapiens
cttcttatcacctttgtatacacaagggccttcaacacatcatttacaagctgtatcaagtaaatgttcacatataaacatcatatgagatccaacaatactatcgcacatcctcttggcaaaatgggatggtccctccccactgcccacagagcagagattatttctctgttatttactgctatatcctcaacagtacctgacacatggcaggctctctctaaaaaatattaaatacatgaattaattaatgaaattcatgtgttttctttgtagttgagatctgatgaagagttacagtaaaaatgcttaagaggtatgaatactaaccatttaccttaacatcctctccaacttacctcctcctatttcctgatggcagccttttgttctggtgccctcccaactccccacagtccatatactttggaagaagatgaatctacccccacatccaggagtggactatggttagtttgagctaaccagcatggtccactcccctaagcaatcaaatcaagctcaattgaagggctccagcttggattgcagcagagtattctctttctttcaagaaagtcatgcatggatatggggcccagaactgaagttttaggccaccaacccatatataaagctggcaaacagagtaaactacaggaatttcagaaaaattcaaaatgactggattcaggcaatcctaacaggcttatagtttaagtcaatttgtgaaaatgctttgttagatggaggtgag

SEQ ID NO: 141460 - DNA, 472 bp, Homo Sapiens
ttttctcctgtttgtttggggttttattctttttgaatttttgttcccccaggccaactctaagagccagaactgttcgttatttatctcagcacaggttcggtgtaagcgttgcctccttacccgacgctcaggcccttcaggtccgggacccctgcttcttaattatgtttctattactcccagtgtctaacacaatctcttccacgaagtcggaacttgatacatatttgctgaataaacgaaaagttaaagatgaggcagaaagcacagctccttccaagggcagctctcaagagcccacgttttcagattcagcagtgaagcggacgcgtctggtacgagactacaagtcgcacaggcggagagggggcccccgggcctctggtttcacgtctccctcctggtccccggcggaccggcgtcttttctcccctgctcggagtagcctagcagcgctggaggctggctg

SEQ ID NO: 141461 - DNA, 500 bp, Homo Sapiens
tttatgattcaagatctattttttttaaaagaaattcacgactgaatttttacaataaagttcttggagttaaattatctcatgatgtatttttttcctggcccaactccagtgttggaggctgaaaaggggaatgtcgacttttcttccttaatggtgtattcgagcacctcggccgagctttcgttcagagaaggaaagtggacacagagcaccagctgcttcgagctgctgtcccggcgaaccaggaacatcgaggtctcacccagagccagcatgttgacggacactcgcttctccttctcacgctctaagcaatggttctgctccagtgagggtcccgaaggcaagcatggggagcgggattctgctgcctttcacaaactctgctgaaaactggtgatcagcatcttctcgattacatctcacaaactgtgcccgtgggctcaagcatgagcactaagaggcaaaatggcggagtgtaacttgtataggacctt

SEQ ID NO: 141462 - DNA, 708 bp, Homo Sapiens
  misc_feature (569)..(569): n is a, c, g, or t
tgggaacaacatacagtgacgcttcacagggctggtggatttggatttggaattgcaatatctggtggacgagataatcctcattttcagagtggggaaacgtcaatagtgatttcagatgtgctgaaaggaggaccagctgaaggacagctacaggaaaatgaccgagttgcaatggttaacggagtttcaatggataatgttgaacatgcttttgctgttcagcaactaaggaaaagtgggaaaaatgcaaaaattacaattagaaggaagaagaaagttcaaataccagtaagtcgtcctgatcctgaaccagtatctgataatgaagaagatagttatgatgaggaaatacatgatccaagaagtggccggagtggtgtggttaacagaaggagtgagaagatttggccgagggatagaagtgcaagtagagagaggagcttgtcctcgcggtcagacaggcggtcagtggcttccagccagcctgctaaacctactaaagtcacactggtgaaatcccggaaaaatgaagaatatggtcttcgattggcaagccatatattcgntaaggaaatttcacaagatagtttggcagcacgagatggcaatattcaagaaggtgatgctgtattgaagataaatggtactgtgacagaaaatatgtcatcgacagatgcaaagacattgatagaaagtctcaaggca

SEQ ID NO: 141463 - DNA, 576 bp, Homo Sapiens
catgatcttcataagcatgatgccgttcatgcggatggctctcttcagttccttcagggtggacttcccggccaggtgcacaaattcctttaggctgattacatgctcgtcgtactgaacacatttcacattgatgccgggacacccaaacttcctccagatgaggttggctctgctgtctccacaggtgatggggtacacaatctcagcttccaggttctccccctcttcagccatcttcactaacacggcttccttgagctgggaggaggctgtgaaggccgcggcagctgctgccgctgcattttctgtctccatgttatcttccgtcaggtcgcccccgtgaggggccaagttggtcgtcaccaacacggtcttcaccccctccacaccactgccgtccactgcagtgtccggagttgtcacaaccaccacctcctccatgtgcacactcacgtcgggagtcgccatggctcagcggaaggggacgcccaggccagcagcgtcagtcctccagggtcccaagtcctggggccgcgccgggcctgcttaggcacccggcgggggcggcggcgt

SEQ ID NO: 141464 - DNA, 484 bp, Homo Sapiens
ttttttttacctttatacaatttattgggtttaatattcataacaataactttttctactgaaatagcagtttgtgtttacctgtcgaaccccaatatgagaaatgtgtacaaaagcaacagactgtgatagaaaaaggtatgtgaaaaaattagcaaaccaaagcatgataaatggatgaagcactataaaattactttgctgtttacgtaactgtatctttaatctgtactgtgctaaacagcctatagccaagttttaaagagttacaggaacaactgctacacattcaaagaacaggcattcactgcagcctcctgatttgacctgatgggagggacaggagaatgagtcactctgccaccacttttcctgccttggatttgtagaggatttgttttgctctaatttgtttttcctatatctgccctactaaggtacctgcttataggccatgaaaataaaacgccattcaacttttttt

SEQ ID NO: 141465 - DNA, 299 bp, Homo Sapiens
tttaagaaaccaggatattttattttctgataaaaagaggatgcttttttggcaaatttctgcttcggagtgaagatgctgcacttgtttccttgttttgtgacatcattgcaatctcttgatttttttcatccctcggattccttagcatccttcaaaagtaatgttcctgcagtctcgcagaaggccgaaggatggagaatttctagtccaggccagggacacttatgtgttgggtagatctagggataaaatcagggttaaaaatacagtcgctggtctcacagcaaaaaaggcac

SEQ ID NO: 141466 - DNA, 445 bp, Homo Sapiens
acagaacccagcgcagtctccccacggtttaagcagcactagtgaagcccaggcaacccaaccgtgcctgtctcggaccccgcacccaaaccactggaggtcctgatcgatctgcccaccggagcctccgggcttcgacatgctggaggagccccggccgcggcctccgccctcgggcctcgcgggtctcctgttcctggcgttgtgcagtcgggctctaagcaatgagattctgggcctgaagttgcctggcgagccgccgctgacggccaacaccgtgtgcttgacgctgtccggcctgagcaagcggcagctaggcctgtgcctgcgcaaccccgacgtgacggcgtccgcgcttcagggtctgcacatcgcggtccacgagtgtcagcaccagctgcgcgaccagcgctggaactgctccgcgcttgagggcggcggccgc

SEQ ID NO: 141467 - DNA, 844 bp, Homo Sapiens
ggcccagtttccacttccctcactggggcccgccccccaaaaagaatggtttaggaaagtttcttgaagggccgaggcgggcccagccaggaagaatatcgcggagtataggtgggcggccataatgggtaaaaaataatgtttaagtaataaattgggtagaattaataagaaggagtaggtacccagaatggaggacccaaaacctaatgtgctcaaatatccctctcttgttgtttgaaaagttttctggaggagcagtgcaaagcctctttttcttcatgggcctgacttgtctgctgccgtgctgtcctcagcaggcgccgtggggtggtgactaattgccccccgtaaatcaccgagcagcactgtgttactccgtttatttttctgacagtaatttagtgcttgctctttcccacacttgtcattccgtgtttttcctcacattagaagcctggggcctggggcgctcccttggttgtttgcagttctgtagttcagagcctcagccaacatgagccccatagacgagctccgcaggtgtcttacactccagtgtggacagcaacattcctggcagagacttgtgggttagacagtaccccctggcatagcacaagagcacggagtatgaaacagtcccaactgtagtagtgacagcctcatcctcctcaaataaacgggcgctgccgcctccagggggaggacagcgggcggagaatactcacgctgggcccagccgcgcggggacttcgctgggaaccacgcgcgggctcccgccggggagcggagccccagcctgcagtcctgcgcccgccccagcaccgcctcctcggaaccc

SEQ ID NO: 141468 - DNA, 503 bp, Homo Sapiens
tttttttaactttagaaaaacagatgtttattaatgtatttcatttatatatgaggaacacccagagaatgagtagttctcaaagaagcgtctttgaattccagcttgtatagcatcttcaacaaagactaggaaatttttagagatgtgacaaaggaaaaggactctgagtctctacaggcagtaacttgggctaagcaaacaaatagcagacaaaagatggtttaaaaaaagctaatattaattcctctgatatcatttcaaggctaatgagggtctgacgctgtcttcagtggttaacctttgttctccctggtaaaggagtggggcaggataccttttctctttctaatctatgtcttgcttctgggtaaaaagagggcaggtggacagctctcctgcatctgctggttcttgtcttcagggcagcaatccttcatatttgagaaggtatattctggtctcccacacaggatagatggttttgtatgttttgctgaatt

SEQ ID NO: 141469 - DNA, 529 bp, Homo Sapiens
  misc_feature (359)..(359): n is a, c, g, or t
tttatcagttgttcaagtttatttatgttgttttgatacactgacagatcacaccacattttgtttgtaactttttctccttcaagagtcaccttagcttaagccagaagattctcttaaagaacacatacacacatgtgcacacacaagaggcaagtacaaaaatgtaaccccaccaaagtgcatgtgaatgaaagtgcaaaaaaggcttcatttgcaaactctgagatcattctctctgcttcagaaaataaacagaaaggtcctaactgccctaggcctgggctgatcaggggctgggcgaggctgccaggggccaaaatataagtggcatctgttgctaggagggccaggtttgngcagtgacctcagtggaagcctgggttccctatgtggactgaagaagtggggaagtcccagagccccagcagggacccagctggcagtgcaagacagatggagagcggcaaggagggcttcagggacccggagaattcagatagaaaagttcaccttcctaactcccaac

SEQ ID NO: 141470 - DNA, 564 bp, Homo Sapiens
  misc_feature (426)..(426): n is a, c, g, or t
  misc_feature (456)..(456): n is a, c, g, or t
ttttttttaaatttgcataatttgaattacaaaaactgtcatgtgggcctgctggacactagactgtgttctccatccctttaatgatcacttcacaaaagatcacttcacaaaaagaggactcctgcctattggccagaaaaagtccctttatgattttcaggtgcaatcagttgtccaattcctctaggtcggtctttccatattctaaactggaataccatttccattgtataattacatctaggttaaaattcattgtcttatactgcatcttgaagaagagtcgttagtgtttggagttctcattttaactcctcagtgctggcacattcagtgcatccattgccagcaatggatttggggctaggaaaatatacatcccagtacagaggaactcaggaagaatgggcattctcaacagtnggtggtccatctctgtgcatgatggggggntgtgtgctcccttttgtaagtttttgaggggagtttagggatatgttgaagaagtgcttttgtcgtggagggaacaggcggcccagcaatggatggaaaggtcacttc

SEQ ID NO: 141471 - DNA, 527 bp, Homo Sapiens
ctttcaaaataaaaatagtttaatttccatcaggtatagcgatatgcagtctataaattctcacaaacacagctttaaaaagtgcaagttgcaggaactatgataaatttgaaaataacaatctttttattagacatctgaccaagaggatgctgtaagatgcgcaatgtcaggttatatggagcttattcacatgcttcttgctatactaaatatacactaaatggcttttatttaaaatttcataaaaggaacatttcattaaaaccaatttaaattctacaactactaagaacaaataaaactagtagaggtgaacaaatctctcttctccagtcgactggacagcaggattactgagtagtaggtaggccgagtcttcttcacccccttattatttggtgaggaagtcaactgtgagaagtgactcgaactgtcagaagaaatgagaaaagtgcttgggtctatgggcagggtactaagatctacagcgcctgttgccttgaaagaaaacgaggtaaatgtgt

SEQ ID NO: 141472 - DNA, 825 bp, Homo Sapiens
acaggcgtttttaagttgtatggagtcttcagtataattcagtacagagaggtgcaaaatcatgtgattctgagggttcattgggtagcatacacgaatgaaggggactgggtgcagaaaatggaaaatagtgggaacttgagagcaatgtcttttccaaggctttcaaatgcaactaaagacaaactcaaaatactatgcagtaatcccgggctgtgtccagcctgtgagtggccagctgggacccacaatcttatctaatcctttttgtcaggtgaggaaacaggtaccaaacatcataaaacagtgtcagtgaatgaaaggtgtaaatgggtgcaaatgtatttttaaaaaaacaccacttttaatgaaagaaactaatatccacacatttgtacttatgtacaattggggtaatatataattttaagctgtttacaaataatatgtaatgcttcaaatattacataaggttgataatatatttctagcagaaataaatatattgcacttaaaaagaactgcattagatgttacttcatagtattaggcttataactttttttcataaaacatttcccatgcccttccccccacccccagcacacatatttcattacagtgactgttctcacgcaattcattaagcaaatgaacacagcaaacaacagaactgtgatagtgtctactaaagaggctatatccaattttatcctttaggaaataaaacaatttcttttatgtttctgaaaataaaggaggaaaaaatccaactaaacacaatattttaatgaaccagaagtaaaatacaacttgtattttttg

SEQ ID NO: 141473 - DNA, 456 bp, Homo Sapiens
tatttatatatttttaattaacaaatgaaaaattgtacaatctgatgctttgatatatgtttacactacagagtgattaagctaattaatgtgtcccatcattcacatcccattttttgtgattagtacatttaaaatctactcttagagattttcaagggtacattattattgactagtcatcatgctgtacaatagatcttctgaacttaattcatcctgcatagctgaaactttgtgccctttgaccaatgtctccccaattcctacccacccacagcctctggtaacctgcatcctactctctgtttctgtgacttggacattttcagattccacatgtaagttagaccgggcaatatttgtctttctgtgcctggcttatttcactgttataatgtcccccaggtttatctgtgttgttgcagatggcacatttccttctttttaaggctc

SEQ ID NO: 141474 - DNA, 971 bp, Homo Sapiens
ctcacatatggccccgattcgttcttcaaagaacgggggcctggttttttcttaggcgtaaaaaagggtcgccttttttggttcgggggtacagcctcctagccacattggccacgggaaggaaaatttctttttcccaagggtcgggtgacccaaggtttgtgataataaaaaacctccttcccccattcagccatggtaatgtgaaaaaatgggtggcctggaatttttgaaggggagatactgtataccaatccactggcctggccagggttttgctttttaggcttccccttttcttcatcaaaggtggaaaagtctttgtccatctttctttaaatgcagaatagagggggggcccttgcattatatttccagtaaatttctgtagaatgccttcaatatcttcttgtgttattttatcgtaaggtttttcttctgttaccttccccgtagaatctagtgtatcagtagctttccccagttctccaatggcagtatatctcttggaccctgacaacatactggtcaacatttttgttccgcttccaattccaacaaccagaactcctcgggctgcgctgtctagagtccctccatgcccaattttcaaagtctgctttttcctcttggtccattctggagaaggcattccagcttctgccagcagcttctccttcaaccgattcagcagctcggctgaagtgggccctttgggcttgtgcacggcgaacacgccgctcaaggacagcagcttggtagccaaagcggccttggagaccctggctttggatccggtcctggccgcggccgcaaccaccgcggctgcagcccttgctgacggggtcgcagccattgctgcgaccgttcctgcagtttcaaggacaggggatgtgtctgtttcaaagacggcgaagacaccgccgccgcctcagaagcggcctcgtcgtgaatcgccactcagcctcgct

SEQ ID NO: 141475 - DNA, 353 bp, Homo Sapiens
cctcattgctaatgaagatgtggtttaaggattttatgctcccagttcatttattaacaacttgtttaagctttattagctgggtctctactttataactgtgttctttaatttacaagacaataaaaattaaaatggtaaatgggaaacctatcttgcttttcaataaataatttattttaataacttcgtgggcatggtggccaaaacattttagctgtgaaaataatttcaattcatatttttttggaatcaatattaaaaggtgatatattctcaaatgaaaagtggacaaatgatcagttataggacatgattaagaaactaaccatgagccacgtgcagtggctcat

SEQ ID NO: 141476 - DNA, 593 bp, Homo Sapiens
ctgctgaatataggcaatgccacctaacgacaggatcgctcgcaggttaatgctccaataaaaccaattaaaaaatctcctagtggcttccggacctcgatctttaacctggtcggcgccgaagggcgtgatgttggccttgacggtggccacgcccaggcccaccagcaccagccccgcgaaggtggccggtgagcagcagcgggcggcggcgtcgggaccaggcgccgtgcagttgagcaggcgcgcggaaccgcagagcgcggctcgcgtggcgggcgcggccagcagcgggaaggccagcatgcccagcaggtagagcgccaggctcagcaggatggcgcgcgcccggcccagccgcgcgtcggccagccagcctccgaacggcgagcccaggtaggtgaggcccatgaagagcagcagcgcctcgctggcctgcgcgccctcccagcagaacggcgccccgttcaggaatagcaccaggttggacgtgatgccgtagaaagcggcgcgctccagcagctccgtcagcagcacggccccgcacgccgcaagcgccggcccgcgaacgccccagccgccgccgcggccgc

SEQ ID NO: 141477 - DNA, 624 bp, Homo Sapiens
ttttcatgtaattcagttgatatttaattacaaggaactcaggttcttacacaaggcaggagatggaagtcagccgctccccacaagccttttcagcctgggtgactgaggctgaggagatggggacacatggaacatatggggagggttctggcacagtgtgtcctgcccaaagctgagggtggtggccactggggatctgccctcgcgctggccaaggtctgccatcactccatgaggcagaactctgactcctgctgtcgcatgttgggtaacacatacagagccacagctgcaatagccaagaataccataggcttccacaacccaaacatgttctgtggggaccaaagagaaactgtgagtgcccagcctcctgaaccctgccctaagccagaagtcacctgcctatgggtgcccaagacacctcaggaacattgtggatcagtctctgttacctcctgggtaaccggtggaggtaagtgatctctcagtcctggcaccactagacatgtggcccaacactgtacgcaccaccttaggtgaccgcctgtattcaggcctccgtttctccccatgggctgagaatactagctcccatgtgaagaagcaggctcaggggcc

SEQ ID NO: 141478 - DNA, 481 bp, Homo Sapiens
ttttttgcaagttgaatatttatttaaaaataaatctcaaaaatatctattgacagtacagtaagaggggcatgtgcaaacaacagaaagggggaagtcagtcctgctgtgggaagcccacacatcagtgtgttggagcaaagttcacgaaggccatgggctgactgagctgtggtgtacgaaatgacattcagctaatactggactcggttcacctttgacacctggagaggtggggaagccagggggtggggagtccagctggggatccttgtgtttaggaagggggcggccaagggatgagcctttgggagaggccccgtgtggcaggagggctcatttcacaagccaacaggcctctagctcgccgctccaggtggatgtttggtgacctgaagggcccttcccagtccaagttggctttgcaattgggaggggtaggtgcagcgagggtcccagagacagaaatcctctttaaagg

SEQ ID NO: 141479 - DNA, 471 bp, Homo Sapiens
ttttttttaccaagcacgaataagtgtttccgttttatttaacacttaagcagaacatttttgactatacatctatataatgcacagtactaaaaaagtgcaaaatattcatcataaacatgaggaaagtgaataccacaatggttgcatcaactcaactaggcaattttgctcgttaacaaaaacacagctttttctgaaagttttttggacgttaacagctgttcaacatcatcttccatctaattccttctgaactgcttcaggttgcctagcacatatgcagctggtgttaagaaggtcgtaaaaaacaccacaagtccaacagccatttccgcggcagacaggggccgctggcgcgggggccccgagtgggcgaagcggggagcgggctgcaggccgagcagggccaagcggcggtagtggcggcgggcaggacagcgcccacgcaggagaggcatatcgcgtcag

SEQ ID NO: 141480 - DNA, 749 bp, Homo Sapiens
gtggtctttgtttggtgctttaatccaaaggcagactgggaagaagtggatatgtccctgagaagcctgtttcattttggaaataattcaacttagtttcagggaaaacctaaacttcatgaacagatttagaaatgaacaagacaacatttaaatggcagttgctgccctgaatccagagtaccattagacaacatgattatttcctaattcttccccatttggtacaggattatctatgacaattgaagaaataatttgaacacaagtccatttaggcaaatatacagcaatggaactagaaaaccatttactatccaattaccatgtttaggcatatactaagtatagctataggccccatccagcagggaaatttgcaaaaactctagtcccttctaataagttgtctatggatgttatcatgaagggaaaaggtttgttcttaggcccatgtcctgattaagtaaaccggaccacacctgtggggtcaaaatatagaaggatcaaagcaccaaggctaaagacaagttagttgtgacacctgctatataaacagagagcaatacagtgttgccttgtcataccatcctacatggcattagttccaatccacctcttgatcccagcccttgacttccccaaattcaatattccgattggtgtacccaggtcactattggatccagctttctgggtcctttaatttgctgtatatgcactctacactaaacgtaataacatgcaaa

SEQ ID NO: 141481 - DNA, 462 bp, Homo Sapiens
agtagtaactctttttggcactttattgttaatgaagcactttggtatccatcatcttattcgatccctagggtggccctgtgaggcatagtctatcccattgattttctgattcacagagaagtcaaaagatttacccaaagtgggtgggtccacagcatgcccttgcactgtttaactctgcggtctattcgtgcctgcttttcaggagtcccttgggccttcgtagggagacatctgctcagagagtggattggacagggctctggcacgaatgggatgtagattctggattttccactctgtggcctttcttgacttcaccagagtttgagacatgtcccaaggctacccttgctcagcctaagcccacagtccctaagggcctgaccaaacccagagacccaaagacctcagaccttaagaggaccaaacccccaattcctctagagcccttttccc

SEQ ID NO: 141482 - DNA, 539 bp, Homo Sapiens
agcttaaggtgaaagcttatatcactgatttaaacttttcttcttttctattataagcatttaagtatataaatttccttctaagctctaaaactaatgcatttcaaaattttgatgttttggcttttgtttagttgaaactatattttaatttctcctgtgattttcttctttgtcccatgggttatttagaaatatgtttagtttccaaatatatgaggcttttctagatattttactctctggggtggttagaaattgtactgtgtaatgttttaagcctttgaaatctgctgagactaccaatagtctatcttggtgaatgttccatatgcacttgataagaatatgtaatagttgttgggtgtagtgttctgtgaatatcaactcaagttggagcataatgttgttcagaacacgtattttttctttgactattctagtaatgttttaagtctccagctatgcttgtgggtttgtcagttttaagttgtgtatcttttatagatagcatatagtgggtgtattttttaaaaaaa

SEQ ID NO: 141483 - DNA, 541 bp, Homo Sapiens
tttttttagtggtttgaaacaacatttattagctcatattttctctgtgttaggaatgtaagcgtagcttaattgggttctctggcttagggtttctcataaggcttcaatcaaggtgtccactagggcggcagtcatctcaaagctcaactagaggggaggacaagcttccaagtttcttcacataattgtttgctggattcagttcctcagtgctattgaccagagacagccctcagttcttctccaaagggaagctttcaacccagggttattggcagggttcagttccttgcaggctgtttgactgagggcctgagttcctcactgggtgttggccagaagccaccctctgttccttgccacatgagcctctccatagggcagctttcagcatgtcagtttgctgaagggtcgtatcccctttgggccctgggccaagctttttctcctgcttgaagctatcttcttgtgtgctgctcttgccttttgaacccatcctttagagaccaaggcaggcaaccccattcctagggcactg

SEQ ID NO: 141484 - DNA, 396 bp, Homo Sapiens
ccaatacaaatctcacgacataaaaaagaaatttattttcatatttacagaagaaacatgctgatgtgtttcttatgattctctttggaattcctgggtgagattatttttaaagtcagggatcattttgaattgaagaaggtattttagaaacatctcacaatgcatttcatgtaataccactgaacagttctgcatcctcttctaaagatcatgtttttatcgcagggcttctggaacttccacccgctttagctgttttatgctgcttcccccgaattgcttcccatgagattctcatgagctgatctctgtggggtagaaggtcgggaactgtcttccattttcttctcttgcactgacctcatagaattttttatttcctttagaatactg

SEQ ID NO: 141485 - DNA, 178 bp, Homo Sapiens
aaatctttaagaagaactgtgattgttttagtgggtatttttctaattaaatgaaaacttgtataatggtattttagagaatgccagtaagtgcatgtttcaagttaatgtttttctcatcacttgtatgtttctaacacagcatgggactttaataaaaccatcctagaaacttaaa

SEQ ID NO: 141486 - DNA, 515 bp, Homo Sapiens
  misc_feature (22)..(22): n is a, c, g, or t
  misc_feature (41)..(41): n is a, c, g, or t
catcttctatagccttaagttntgcgaaggtaagtttctcnccgcttgaaagcgcccccagggacaagaattcatcttgaccaagcctaaggccgtggcatgcaaggtgttgagtcaccgggtacagcggtcttgcgacataaatattatttgatgacgaagggtactcgggggcccaggtgccaaggtaaaccacttggcaaagatgaccgtggttaaggcagtagaaagcaggctcgacactgagacgcggttccagccctagaaggattgcattttacgattcaggcaaacttcgagtctcctcatgtgacatgtgtgcactcctggaccgttttaattatgagaaacgtggtttgcagcatgattccttccagtcgataaatcggaatctctctcgctcccaccccttcttaacttcaggcttcctgcatcccggagcactcccggcagccccttccctcccccgccccggggatgctccgactcggcgcttagccattcatcaaccggaa

SEQ ID NO: 141487 - DNA, 531 bp, Homo Sapiens
tggaaggcaagtgagtgttgtcgcgatgtgagtgcccagcttaggatttgccctccaaagcccagtgtcttttctgtagatcaaagaaacaaatcctttaagtcctcctgttcacctgctttactggcagatgaagcctagtcatggttcaccagggggaataccaaactcgccctgcagatcggtagtaattgtgcggagatgataggaaacaggagaggcctctaccgctgaaaagcacgggtctgaaagggcaggtgcctgtcctggaaaccaccttctcttggggcatcccctggctgcccttctgcctgttgccaccaggtggggctctctcccagctcaccgttcttcctgcttaggacagcgccccacgtgacgttagtgaggcaatgcatgggaaactgcagcccaaacagactcctccctgggagaaaccccagccctgcccctgcagaccctgcaccctagacgccgttccaggccgggttcatggggatccaagaactgaggagaccaagataaacaaaa

SEQ ID NO: 141488 - DNA, 462 bp, Homo Sapiens
aaggcatggattgtaggcctggttataccacagttacttgtgggactttaggaaacatgcttcatctggtcctgcttctgtttctgctatcttacaatgaagataattttccccctactttttaaacttatttgcagtgaagactagataaaaaaggatatgactaacacattaaattctgaagtaccacataaatatgacttatttttgcaaaatttaagagcacagaatgttgggttatcaaagagtgtttaaaatgacctttctctgttttttgtaagtgttgtttgagagcacagtgatgaccacttaattcctttcctggagcaagacatgtttcttgtgggtttgatttgtacattatcactgaaaaacttcatcagtgacaacaacaaaaaagcccaaaaggaacctaatgaaaatagtagtgaagttttacacattacatagttacccccctgc

SEQ ID NO: 141489 - DNA, 1254 bp, Homo Sapiens
tttgagaggtctttccaaacaggtggtcactttagaaaggaagctgtggactggtggaaaaagcatcacctgcctgcaggtagctttcgcccagtagacataccgtaagtgagtgaggtcagaaagggacaaatgagaaaggcaggagtgagggaatgaatgaatgtgtaaatgaatgaaggaatgaaacagggaagggtggggcttccaggcttggccaccttcagggtggactgatcctccttgaagtctgcgcttcaggagtcccttcagtctgcggcagggagtcgtgccggaaggcagcctggatgggtgcgtggggaagcagccagggggctctgtccactcctcccttctgctcaggaagccactggagtctgtggggctggggtgaagtctcccgggagcaatgtctccagctcaagacaaaggcaatggcagcagtccggctaggatgccaggccagagtggtagagccaccccccaagttcagctgccacactcatgatcggtctcctcctgaggaatgtcctggggacgctgggcagggtgggctggtggctggagttctccttgaccttgtgtgacatccctacagaaccgggatccatttcttgtcctcgttgtagaggaaggactgctttcctggaagctctggcttgtacgtagctgggccaggcaggcctggctgaggcggcgccgctgtccaccggctggtattggacacgaatgatgcactagagatgaaatgcttgcgggggcctaagtagtccacgatctcatactgaccaggacctgggaaaggtggcttcggaggcagaggcgaaggctgagcagagaagttcaggatggggtttttcgggaaaagagtcttttttggaacttttgtgcaatcactggggttgtaataaccaggtcccgggcctgttgacgtcagttttaatccacggttggtttttgatttacaacaagacattaatgtatttggcgactgcttcacaagggattcgttgatatcataatgccctgggggaggtcctttatcagcaaagcgaaagatcctctttgggtgagtttgacataaacccggctcgagtacagacgttgtttatctgactgcagcaagagacacgaggcattgtaatagtttggtgcaggagtttcaaacttgagcgacgcgtggtcgacgatatcccgggatatccgaccgtaacagcctgttttttgaccactggtctatatgtcacaatatcg

SEQ ID NO: 141490 - DNA, 546 bp, Homo Sapiens
tgaggctttggacaagctatcaccgggaaccctccctgtccccttcccgaatcacacacataccctaccctcacctgatgataattttctcttcttgctgcaaaactggttggcttgcaacccagagagagcagcttcccttggctctggggccgtgttggccccagccacgtttacaggaaggtgtgccccagaggaggaggaatcagctccctcgctccagtggccttgggtccgggtctcactgagcagcccgagggccactccagcccggctggggaagagagtcctgaacggtttgatgtggggatggggtggtgggcagtggggaatagatggttgactttgtttctttatttgtgccattgtttggacaatattaaagctgcatgtaaaaggggaaattagtatatgatgtaggctaaaagtgaaatcatagtaacatatgttttagtattattaacttttttctgtacaaatattagcactaaatgtttaaatatgtatgaatgccagaaatttgtcagttcatgcagttagttaaaa

SEQ ID NO: 141491 - DNA, 513 bp, Homo Sapiens
  misc_feature (154)..(196): n is a, c, g, or t
ccattttaattttccatttaatttaaatgtattctctcatttgaccttcatactctgtggagaaatattcctatttcggcttgtattgacaagttgttttcacacagcccccacatcacccaaccaaccagcagagatcctccttcccaagaannnnnnnnnnnnnnnnnnnnnnnnnnnnnnnnnnnnnnnnnnnaggattattcacctttcaagccaagcaagcactggctgtgagagatggctgtgagagaagattaaaacaattacaactcacccagttcacagatgctgagtaactgatctcctgccccactaaccttaacgacagctttctctggacaagggactgatttcagtaactttctcctgataagagaccatcctccatggactggttctggccagttttagaggctgtgcctttacgaggctgagtaccttcatgtccctgcttcactttttgcatgtgtagggcctaattataatacatttaaatgtcaagtctccaaa

SEQ ID NO: 141492 - DNA, 488 bp, Homo Sapiens
attggtcttgggagtaaactggttcaaattccagttccagcactattttaatgaggattaggtttggctgtaaatgacaaaccccaaaacaatagcagcttaagcaagttagatgtttacttttctctttcatgtaacattttggaggtggccacctcaggattcccaagttagctccagcatgtcctcagggaccaaggctcctgctcccttgcggctctgctgttgatggccttggtcacatcatggcactggctggcaccctctggctcaagctgtcacgactgtaaacgaagccactgttcgatcccagaaaactcccaattaaatcacaaatctgatgtttttctgctgtctgcgaagaggatgtatcaccttccgcaagttcacctgctgcggcgtggacctcgagcagctagctgctggacatgtcctacgagcagctgatacaagctgtacagtgcgcaccagtggtcgcgcctcgtgcc

SEQ ID NO: 141493 - DNA, 564 bp, Homo Sapiens
gcggccgctgcgagccgcgcagtgggtcccgcagaggggcccctaggaacgccaggtgcagggtaggcctgctgggccgggaacgcagcgcttaggccgggggcatggccgctccttctgaagccttttctgtttcctgagtgatgaaggaaagggtgagggtcccggctgcggaggggtcagtatctactctgcctggagacatcccagagcgcccccctgcagctccaccgaccgcgcccgcgcgcaggacccccgggctgcccggcggcacgcaggacagaagccacccacccaggacggcaggagctcggagcctggccaccgccctcctcctttatgtggtgtgacaccagggatgagctctgagcatctgtcgcgatgggcgggggaagcaggggtggggacggggactatccccgcggaggcactcagggcaccttgtgttgaggggggcaggtggagacccttgggttggtcgggcacagtgatgtcttgccttctaggactatggctggatagctggactatgagagctgaagtgaccatcagactctacccaga

SEQ ID NO: 141494 - DNA, 418 bp, Homo Sapiens
tttttatttgtcaacagatatttatcattttttcttaaactgtgacagtgctagaactcacacaactcttcagggcagctcattccaacagtggatatttgtcatattttgaaaagtctcaattccttcaacaaatattcctcaggtgtccactatataccaagcatgttctagagcatgagaacaaagagatgactgaaaacagtgtttgtcctcataaagtccctagtccagcaacagaactcagtaccagggtggcccgtggctgtccgtccctctcagcccatttggaggtgactcttgcttctctcttgatggatcagctttcactgcccacccccagggacgtgaccaaggaggttcttcctctctacccctaagcggtgagtccataggctccctggagagttcagtcatc

SEQ ID NO: 141495 - DNA, 199 bp, Homo Sapiens
ttttttgattctgtctttatgaaactttgctttaacccaacattgtttaaatcccgacctggtttctcgtgagcttgaagccagggtgcccacactctgcaaaagaagaaaaatgccagtatgagtccttgaggctcagtgttgttgtgcagtccgtggacaggacaatgtcctcatttcaaggtttcatttttggagg

SEQ ID NO: 141496 - DNA, 559 bp, Homo Sapiens
tgtacaattctctatctggttcacttatttttcctttaatcctttgatcatagcacagtggctttgcagtctgcctgcaaaatccagcactgtacccacttagatgctcagagtcagtctctactgactgcttttcttcctgagtatgagttagactttccattttatttacatgtctagtaattgtagattgaaaacttggcattgtagataagatgttatagcaactctggattctactgtgttcttctgagaactttctctttttatattctagtaggcagttaacttgcctggattcaaactgcgaactgtctcttctgtcgtatgaagcagctgctatctctgctcagctcttacaacgtctagcctagctccctggggtctcccatgcttctgtgtaatctggcagacagccagggatttaggctgatcatactcagatttaggggctcacactctgtgacttttgtgttcttgtgatttcctcctaagttttcagctgcttgggcaatattagggtctttcctctgaaccccaagccagtaaggcttcagct

SEQ ID NO: 141497 - DNA, 1072 bp, Homo Sapiens
ctaaatttacattttcatcaacagtgtacgagggttctccgttttctgcactcttgccagcatccgttttttcctgtcttttgataaaaaccactttaactgggggccttctgctgaagggccacagaggaacaccaggctgggatggattcagggcaagcaagtcactgtgctgggaagccctgtgcctgtgaacgtgttcctcggagtccccttatgctgctcccccgctgggatccctgcgatttacgaacccgcagcctgcatcgccctgggataacttgcgagaagccacctcctaccctaatttgtgcctccagaactcagagtggctgctcttagatcaacacatgctcaaggtgcattacccgaaattcggcagtgtcagaagactgcctctacctgaacatctatgcgcctgcccacgccgatacaggctccaagctccccgtcttggtgtggttcccaggcggtgccttcgagactggctcagcctccatcttcgatgggtcctccctggctgcctatgaggacatgctggttgtgatcgtccagtaccggctgggaatatttggcttcttcaccacatgggatcagcacgctcccgggaactgggccttcaaggaccaggtggctgctctatcctgggtccagaagaacatcgagttcttcggtggggaccccagctctgtgaccatctttgatgctgtctcccatggccgaaggcttattccacaaagccgtcatggagagtggggtggccatcatcctttacctgaaggcccatgattatgagaagagtgaggacgtacgaatactgttaacaccttgccagcttcctctcctcagttaggggagaatgtgttcaggcaccttctcaccatgtgccatctatcccacgatatttgtcatctgtctcttaattatctactacagagtgaggccctagagaccaggatctctctgtccttcaggcccccagcataataagtggtatatatcaggcagctataaatgttctggatgaatgagctaatgaatgagctgtttcattcaatgcatattaattaaa

SEQ ID NO: 141498 - DNA, 736 bp, Homo Sapiens
  misc_feature (677)..(678): n is a, c, g, or t
  misc_feature (726)..(726): n is a, c, g, or t
gctatttctagttttaattgcattttttaaaaacaaaagataacagcatttttcagtgcatgaatatctgaagatccttccttgtgcaagtacattttttaagagaggaaaaaagagaaaaaagcaacaagaaccccaccctcacccttcccaactgtatttctcctggtgggtacaaatcaaattcacttttaaaagttgataatgggctcttcatgaatgcaagtttctccacaaaacagcatgctgtcaaagagtgtgcaacatgaagggaatgccatcatgctaactaatgtgattggcaaaatatagttgtttttgtaaggtaaggcagagattttaatatttatgtaatcaaagtccaaataaacctttctccagcacaaactttacaactttctgcccaagcactccaaaatttgggttctaaatattgtccatgatattcaaaattatgccatatatatgaaagtgttgatatcagattcatctcttctgatgtatttgtgctctattagccactctatttgctcttttatcattttcttttgtggcaagaacatgtttttcaaaatttctactaattcagtctgcagctgagcattactaattttctttctcattttcattatttgtatgatagcttccttggttcttagtattcgtagtggactatnncttcattctcttcttctctcatccctctctgagtgagcttgcaacgtncaatcaagtg

SEQ ID NO: 141499 - DNA, 451 bp, Homo Sapiens
agcttttgtatccaggttcttctaaggatgatgtgattgagaaagggtcaaagtacatgtcagaacgcagcaaagtcattcatttaacatcttttactgacatttctgaatgtctcaagccccagctggatagaagatacgcttatacagaagaacctagggttaaaaccgtgtcagatgttggtgccttgggaggatcttgacatggaaaatttgttgcaatctttgtatgtagaaaatagagctggattcttctttactaaattctgcgagcattcagggaacaagttgtggaagaacagtgtgtacttttggtttgacctgcaggcttatcatcagcttttctaccaagaaacacttcagccttttaaagtatgcaagcaagcgcaatatctttttgccacatacgttgctccttctgccactcttgacattggactccaacaggaaa

SEQ ID NO: 141500 - DNA, 712 bp, Homo Sapiens
ctcattctcagtgtgtttttatttctcgaaattttcatactgggagattccaattacaggaggagcaaagaaaaaaggaagcagcacatataaaagcaattaaagatcattctaaagatgaaccccaacttgcaacaaaaaatatcatttgtgatccctcagagactagctccacaacaaatcgcagcagtgttacattaagcttatcaacattaccatctgattcttattacagccaaagtatagaagcagctgatgactggttttctgatgattctctagtgaaaaggaactctccaatgccttctctcggggaacctctaatggaaaaagtattttcatacctgtcagccatttcattagaagagggtactgaaagtgtactgaatgacactttatgaccatcaaaaagatggctacattaagggaaaatgttcatgaagaaacacagaggttgaaattataaaaccttcgaccataatactgaatgacttttttcttttgaaaccttgtatacaatcagcttctgagtctcttaacatgtccatgctaatattgctttttttgttctttaccatagagcggctctacttcccttgctggttcttatttctagaaacaaaattaggaagaactagagtgatgtcatgaacattaagcttaacttattgtatatcatccccagacatattaaataaaatgagtgtaagtc

SEQ ID NO: 141501 - DNA, 580 bp, Homo Sapiens
tttttgcggcaaggagcttggattttattctgaggcaattggtagccattgaaggcttttaagcaggataatggctttatcaggtttgtatgggaaaatgatttttctggagagaggctggtgaggagtccaggcacagatgggaggacctaggaaaagtgagacagagaggattgatggattcaaaagatgtttaggagtcagaattggcaggacttggtctctcactggatatggggaaggaagacgggaaggagtcaaaggtggtgatcaggcttctgtatgggtgactaggaactggcagaactgagatgagaactcctaaggggcttggctttgccaggtgctaccctcaggatgctgactgctgtctccagggcttctccaggtactgacagcagcttggagtttctctgcttttgggctgtggtgcttcagaccacctacatgctctccctggagccagcctgaggggctttgccaattccttctgctccctctcagtggtgctaagatgctaaagtcatgcccagtttctggcccagatctgtccttgttctgacaggaaggcagacaaata

SEQ ID NO: 141502 - DNA, 451 bp, Homo Sapiens
tttagtagtatttttgttttaccatttggaaatacaaatttccttgatcaaatacatgaatatttgatagccactaacacaacacatttgcttgtgcatgggagccgatgcaggaaagcagagggattggatgctcttttcttcttaatgcctgaacgcgggtactatgatgataagtggtgagtttggaacaggaaggctttctgccagagccatcaaagcttggcttgccaaattgctgggagtgcaggtgtgagccaccatgtcctgcctcatatctgttttaaagctcagttgataagcaatattgtgttcctggaatgctttatgattatgaaaccactatagcactgttatttagccccttaattcagcactcagggtgtcttcgtcaagagactgtcaccttgctttggattgtgacctctgactccaccactttcttcctgtc

SEQ ID NO: 141503 - DNA, 493 bp, Homo Sapiens
tttttcttttttaaagaaaggctttattgctgcaattagacatcccagggtatagcacaaacccccctgtacagagaattattcaagtggtaatactgagaaacagtgaacacacacaaaagaatacaaaactagacatttagatcactagaaactttctaaggtaagaaaaatttcaaatgtgaagtgccttttagaaactacaccacacatgccagtgtaaatttggtttaacaatcaatttctataaacattgcatctaactgtgcactgatcaactgcacaacttcaacaattacttccaagacaaagataaatgcttttatttccctatgttttggtctttccttgggctagagacagaagctgcatgtttcaaaccagattcaaaagggaaagcacttcaaaacagaaagtacttccattgtgtatttgccttcagcgccattccgagaactgtgggtcatcacccgggtggtctccagcccttttt

SEQ ID NO: 141504 - DNA, 486 bp, Homo Sapiens
gtgttctagggtgttttaatgatttgttaagcatgggaaccactgcattccacctcagtttgaacaggcagcaagtaagcaaaagaggcagtgctgtccaatacaggttgagaatggtagagagaaaaagagagaatgaatgtgtgtttgtattgttatgattctttttcttctacaaaacacagtttataaacatatgagcatgtgaatggaaccttgtccactatggctaacatctcaggctctcaataatagaatgtggtagcctaagattttctttcggggtaccaggtagttctgctcaaacggacttcagagaagggacatgccattcatctttgtcccatctaactttggccaggtagaaacaaaaagaagctctctacaggtacccttcctcttgcacaccaagaagtatcgggaagctggtgcaaaggaaagaaaaaaggagcctcaactacgtactttagtgcaactcatttcact

SEQ ID NO: 141505 - DNA, 684 bp, Homo Sapiens
ttaaagttttattaaatttattaaaagaggagagagcaaggatctatcacagtgaaaattatgaaatgagagatttaactgactgccttgtagagcagaaatttggtaggaaaagacaccaaaacacatttttaagaaatgtggttgggtgataagtaaaagaattcattctttaccgtctcttctgaagagcttctttagagcctttgcttttcaaggatcggatttggatttgttttccattcatgggcttagataggttttaaagctgttgcattgcgtagcaataatctgcagtgggccagggttttagttgcaggttattcagaacggatttatgtagcatgattttaaaatcctggttggaagcataaacataaggtgtgtgcctatagtctgaacagaagactgcagtttgtgaagtgatgtttggagaatcagaagagagagtagtagagaggatatcgttcattttagaaatgctgaggcacaaaacacaggtgcttgtggtactttcatacatgaaatcccttctcctgtatgtgcatcattgtgtaaacgtacagtctgtatgctgctgactattcgtctctggtgtccaataagtatgactccccttcttctaatgtcatcactgctcattcttgaaatcaggtcaaatgttgtaaaccctgctgccacgaa

SEQ ID NO: 141506 - DNA, 521 bp, Homo Sapiens
  misc_feature (146)..(160): n is a, c, g, or t
tttaggaaaaatagaattttaatcttttttggcatcaaggatacctacagttttactgattaataaattatagatgataaaattttatacaaagcaagtatgatttttataagcaccaccttgttttaactctgggatttaaggannnnnnnnnnnnnnngctccatctacctcttgtccttccattaagtatcctgcctatagcaagcttcttaatcttcacatcagaattcctccaacagaatcaccaaaccaaacctccaaatcataaatcctttttcatattcaatcttttgtttgatctatattgacatttgcaagataagtctaacttgaccatgctttctaaacattcaagaagaaaaaagaagtactccacctaaaaaatggaaacaggtaacaacctgtgtcttcagtcatcaacatcagggagccaagatgccaggactttgttgggtgagaaaatgggaatgaacctaggatcagtcttgaggcagaaactcccattccttccaggctga

SEQ ID NO: 141507 - DNA, 569 bp, Homo Sapiens
  misc_feature (53)..(183): n is a, c, g, or t
aggattttgaaagttcccaattggatgcctctaaaggaagtgagggctatttnnnnnnnnnnnnnnnnnnnnnnnnnnnnnnnnnnnnnnnnnnnnnnnnnnnnnnnnnnnnnnnnnnnnnnnnnnnnnnnnnnnnnnnnnnnnnnnnnnnnnnnnnnnnnnnnnnnnnnnnnnnnnnnnnnnctgtctagctcaagagcccactgattttatgtcagacactccaatgggactaaaaaggaacaaatgccctcaaggcagctcaaggcactgatatccagtagggcacacagaaaagtgggcacacaattcaatcagcagaggcagaactttgtcatcgcctctgtgatcccactgccatctccccagtggactgtgagcctccagaagagagagcatcttcatgtcttcatctttatagtccacaggaacttggacatggtaagtgtggtctacagggtgtacaacttgtatttgtcacaattgttgcattaaggaatgaatgaattcccagcctctttaagtttggctctagcacagaaataaaaagaaatgaaacattaaaaaaa

SEQ ID NO: 141508 - DNA, 420 bp, Homo Sapiens
agactccataggtctgtccccacgcacagcatcccatgtttgcaagcttggcttggccattcatgtcccgttgcagaccgcagcactgtctccagaatcacattgctagatgtggccattgtgtctttagtcaatgtttaagcagagattaaacaagagccctatttctaggggcattacaggttacttttatcatgattcataattcttcaagcaaagtatacagccagtttgtcctatagcttcgatgttaagggctttgcgttcctcctcgtcttccacatgctttagacagggttcattcacgctactactcgcccccatcttatgaaaattgctgatcggtctcctccagaaaaattgaatgaaactgcatggatatattcagagcaggtagcacagtgaagactacgttcatct

SEQ ID NO: 141509 - DNA, 821 bp, Homo Sapiens
  misc_feature (645)..(653): n is a, c, g, or t
gttttttcagataatttattgttaaatgaagacatcacaaagcaaaatggagtggggcaggtgtcaaaggtaaactgaaaacgtcgtgtctgccaaacgctattctggtttcctaaggttagaaacaggaaaagtgtcaaatgaaaaggtactcgctcaaattaagtttttttaaaaggtctgtaatttgaaaggaaaacaatttttcactaaaaatatccttattacatgaaagccataatttaaaagacagagaaaaaagctttttaattaacaaataaacagcatctctcagagacacttgggaatgtttgtttttaatcagtgggtcctaaaaatcactgcttccacctgcaaacgaacacgaatccactgtggatggcgtcctctgacccaccctgaagggttctgtttctctccacacacttccttttctgcaactttcagcaaagcaggtttggaagaaagaggattacaaagaactacgactggctccctagtgaataacttaacacggtaaaacccggttttccatttacattacacattcacaatcgctcactgctacttacttcactgacgtatttcagactctctccacacccagcatgatttgtctgaacttaacacagtccccctaagacnnnnnnnnntatctcctaaggacctctgagaacacagcggtgtgcaaaggccacgtcctcgcacacaacacccagacctgccacgcagccggtactgtttcctgagctcatccgagcaagcgtctccacggggcagagcaaggccttgaggatcccgctaacataacttacaaatta

SEQ ID NO: 141510 - DNA, 422 bp, Homo Sapiens
  misc_feature (129)..(365): n is a, c, g, or t
gcgcggcatctcatttattgaagacgtacatgttaacatctctgaaactgggatgcatctttcagttggatggcacaacatagttggctgtgatgtttctttcttggtaggacatcttacactcaatgnnnnnnnnnnnnnnnnnnnnnnnnnnnnnnnnnnnnnnnnnnnnnnnnnnnnnnnnnnnnnnnnnnnnnnnnnnnnnnnnnnnnnnnnnnnnnnnnnnnnnnnnnnnnnnnnnnnnnnnnnnnnnnnnnnnnnnnnnnnnnnnnnnnnnnnnnnnnnnnnnnnnnnnnnnnnnnnnnnnnnnnnnnnnnnnnnnnnnnnnnnnnnnnnnnnnnnnnnnnnnnnnnnnnnnnnnnnnnctcactgataatagcccagtgcccacactgacagccactcctccctcctctttcact

SEQ ID NO: 141511 - DNA, 788 bp, Homo Sapiens
tcttgtgaaagctgtgttacttggtcctttcgatgttccagatcttttaaaatcagcgagttttgtttttctaattgaagcactcttcttgccaagtgaacactttgctttagtcgtcttttggctgttgtgggaacattagcaccatagccgtaggaaaaaagaaccctttcagcctcatcttcattttcaatttctgcagtttgcattattatttcatcaagctctttttccagtttctcataaatgtctagccttgcttgatgctctgagttctgtgcttgaagttcagtaatgcgtttttcagaagagggcttggagactataaaattctttggttaaaacctccaattttttctgatatttttcacattccaattgacactgtgtgagatttcttgctgtttcctcttgcagaagttgaacacgctcactttcaaaagattttaatttactttgatggagaaattctgttactttgctttctgtactaagttgtagttctctgtacctgtctaagagctgatcgtgtttttctaaagcatccttttcagccatcactgctcgttccttttcagccacagcattatcccttgcttctcggagatttctgttttctcgttcatacatttccctagaggcatttcgaagttgatcaatttcttggttggttttcaatctgatttgttctagtatcatcatgtagtttattttcatattctgttttataatggtctctggatgctacatatttttcatacatctcttctctagcctttttgctttct

SEQ ID NO: 141512 - DNA, 674 bp, Homo Sapiens
  misc_feature (650)..(650): n is a, c, g, or t
tttcattcaaaccaaaatgaatttatttttctgatatggcctctaaattaccaacatgtcctttgttttgatgctaaccttttctggtaattaaagtttgggtgttaaagaaaaaacaatgcctttaagtactagcaagacgtcaggaaaatgtcactgtgaaggcaaattattttcatctgcttagtaaactttttgattgatgaaaagtcaatacttcaccaattcttcttgcaggtgttgtttgtctgatatgtctcctgtgtcatctggatacaacagtttaaacagtattttaatgagaaaaattgcctgtggctgacctggaactgcctcaaatgaatttgtagctgataagatgtttgcttgaaatgttctttgagggacaaatccattattcgttgccactttttccaaggttcatggagaaattagcttaattattccttgccagaagaaagcaaatgctgcttttttgagaaagaagggcaaatgctattattcactgggtttcagcaattctttcataaatcagcatagtgaagttggtagactagaccattagacacctttctctgtttctgcttcctcttccctgttcttcccaccctttttccgtcacagccgcgggcaccggtgccagggcactnccgtggtcaccgtgccaggccatt

SEQ ID NO: 141513 - DNA, 465 bp, Homo Sapiens
gtttattctttgagatgtgaattataggcgtctgctgtactggggttcctgtgccgccggtaggggccccagtcctccggctcccgaatggttctctgctggtcactcccgctggaactgcaactgactagcgtctcattcgacgctcgcgtgatgatgatctgtggaacgaccactttcttcctgctggacttttgcttttacatcaggtttctcttccagcgaagctgccggcggcgggtgcttggctgtcccggcccccgggtggaggctgtccacaggcttctccgactccctgtctgcctgcctggcttcctgggaatgcttctccatcaacttctccttagattttggaactgaataggtggatcccttcttttgctcctcacctttcctgggtttctctttgcttttggaaaggcccatgggtgaccccaccgccccctccgacgcaagcccgggtcc

SEQ ID NO: 141514 - DNA, 477 bp, Homo Sapiens
tttaattaatcagtaatttgtggggagacaatctgagactacataaaccacttcttatcagtcttcctctaccatggatgatcttttaatgctactattccttcttatttattagttggcattcttctgcaaagaagacttttcactttctcctctgtttacttatttatactgcatggactcatgaatatttattcgatgggtgacaaactagtactatcatttattttgatgctcaaattgtcccagatttggccagtaagagcccttttccagttccatttttgacctctccccatggttctttgaccagttccttattttcttatgcaataaaatattcaaggctcatttttccaggcatctttccctgccctggttctgggatcaggcatttctccaaggaaccctgaataccagtggggaatgatatttagaaactaagatctgggcactaggtgtgaaagatcatcactt

SEQ ID NO: 141515 - DNA, 961 bp, Homo Sapiens
tttttagacaagccaagaaatatgtttctttattttcattcccatatagcagagatggaaccaggacagtgatgctggaaaagcctgcctcgatcaagtcatcacataagttaatgtcagaaaacctgtatttgaatttgactcctctatccttactctggaaaattggacatcttgacccagtggctgtgagggctaaattagatgatgcagaaagtgcttggcatgcagtagatatgcaaaacaataacttatgacactctccaagcagggaaaaaagtcttcatgccttctaactaataatacaaacgtatgcagtgtctttccaccctggcttgagtttaacaaatacaaattgaatagaaaaaattagtcaaactccataaacaagtttataacaaatacaaatctaatcgaaaaaactagtcaaactctataaatccaacttgattttaaaattctagtggctacaacactcaataatgttttcacatcgtttgtgaatccattccctagatgcatttaaagatgtaggagaaactgtttcagatcctctgggaggacgagtttggttatcttatgatgctgctggattccaaaacacttccgaattctaaggcggcataactgcatcaaagaagggggcccttctctctccaagaagagctgggccaaggggctctctggaggcaccagctccacaggacgtttgccttcagcattcttggcctgggtgtccgctccaaaatccatgagcaggcaggccagctcttcactggctgtcctggccactgcatgaagtggggaatcctgacctttcccttggttcacgtccgctcctgactccagaagcttcttgacacaggctctctgttggttttcacaagccaaatagagtggagtgcccaggtggctgatcttcggacgcgtgggtcgacgatatcccgagaattccggaccg

SEQ ID NO: 141516 - DNA, 421 bp, Homo Sapiens
aattttaaatgttttattacacatttcttttgaaattttcaatggcatagtgcatttttaatctgcataatattttacaatggtagtatctatgcacacaataatatacacagaaacatgttggaggtgtgtgttcacatttttggaaatggacagaacaaaggggaagaagcctgcacttcaatactcactcagggcagagataggcccctctagggctgcatttgaggtcagcaccaaccgtgtgcaaagctgatctggggcctgctgcagaaaagatgcatgtacaccacctgtcctcactttcctcctgtcctctgtgaaagggacaggagaataacagtcccttacctgccacttagcagctggagagagcctccaggtcttgggaaacactgcatttcgacacaggcagtttcac

SEQ ID NO: 141517 - DNA, 601 bp, Homo Sapiens
  misc_feature (239)..(248): n is a, c, g, or t
caattctacataaccctttattatatttatagcagtattatgaccaacattacacaagttttatttcttcctcataccgtagcaaatttattttcataatagagttcaactctgcaaatggtttaaatcaactttttgcaccttgaatttacaaaccattagatacgaagtttcctgaaaaacattttatttttaaattttacttaaagctataactaaacccaagtctcttgggagtnnnnnnnnnnaccaactaagctgtttaaacacaaacttataaaaaatattctgatgccagtgtttgaaagatagcctacagaagattataaaaggtcaacaatcatacaagagaattctatggcctaaccttgttagaaaatttgttttacaaataaacttctttcataatagaagaggaaatgaaaagatatttaatttccccctaaaagtaagtagttgctcagaacatgggttggatgtatggaaatcatattgcttctgtgaaaaaaatgttttagcggacgcgtgggtcgacgatatcccgggaattccggagcggtaccgccgctttttgtaaccactgttctatatgtcacaatgg

SEQ ID NO: 141518 - DNA, 522 bp, Homo Sapiens
ttttaacttaaaaaacaatcctatatttaatcattcaggttaacacagccatacaaactggtatttaagaaatctccccagttagcctatttttcatttttccatgtatttccaggagagatcaccacaagtaagtcagagtgcatgcattaaagtcaaaatgattggtgccttcaagaggaagatccctgaatcatgcaaggagcttcattcagaaagaagaccttcatctctaccttcagaatgttcttcactgcactggaatgaagatggtgatgataacgatggtcagggctcaagctcaggcccttccctgctgtgtgccataaatcagtgcccgaagggacaggaagcagaggagcccatgagggtggccgtctccagaacagatgctccccattcagccacacttggcctgtatgtgcataccaggtgtgaggctattgattcaaatctgggttaaggaacccggcttctccagggctccatgtgaggactagcagggtgctgccatcaggtcag

SEQ ID NO: 141519 - DNA, 803 bp, Homo Sapiens
  misc_feature (291)..(306): n is a, c, g, or t
tttcctggaaaatgacacttttattattcgttttaatttcccagtaacacatgaattcattctctttaaaatgttaaaaattggagatgtcaaagtctgttttgaacaatgcacagatcttggattttcataaatacacagaaacatgggttaccatagaaaatatatagcaggttcattttgctttgatgcatattttaagtctgccgtttaaataatgtaatgttcataacttaaaacaagaatgcagccttttcctaatggcaaaatatttttcagttggtagcctcnnnnnnnnnnnnnnnngaagcttttaagggtagaaatcaaaatagcctccctacctccaatacatttgtagaaacagggactatttgtagaagagtccagaaggaacagtggctgggaaattgagggcatgagggagacttttcactgtacactttaaaaagacacatttaaaaaatctcaccatgttcgtatattttaaaacatttaaaaaatatactgaagaaatgacacgtagggatcacaaaataggttgtggtaaaaatttaaaaagcctggctggtgatgcttttctccccacttcttttaccaaaatagaattgccctgtagaattacatttcatatttgacaccctaccctgcactgaaataaggctgggattctattcctgtcttttaaaatctccggtttaaatgggtccgattattgaatggatcctgcttacaataatcgtacccattgaaaccagagaaatttccatgcctccctgttggcatcaagtaggacctttcca

SEQ ID NO: 141520 - DNA, 471 bp, Homo Sapiens
cgcacatgtgtcccgcagctccaccgaaaaggatcaagaaagtcaggattctaaataccaacagcatcactctgtcaaaaccacccttgcaacctttctcagaaaaggaaatgtaatgacaagatgaaagttagccagaacggccacgtccagaaaagctctcagtagtacagccatctgtccgaaatactctaaccttcaaggtggccacggtctcttcagagggtcatggagctctgcaaagcttgtcttaaaactgattaaggttgttaaactgaaccatcttgactggccccagccaagtttcttacagtggaaatggcacattaactatgcagatgtcatgagagaagtcagtactcttagattctaacccaaaagaattcaaatatattggatttcctctcctgttcaattggaattcaaggacttaatccacttttaattacactgttcctgttgttgcatcaa

SEQ ID NO: 141521 - DNA, 1507 bp, Homo Sapiens
  misc_feature (66)..(213): n is a, c, g, or t
ccggaaggaccgctagagcctggagttcgaagccagcctgatctttacaaaagtaaaataactaannnnnnnnnnnnnnnnnnnnnnnnnnnnnnnnnnnnnnnnnnnnnnnnnnnnnnnnnnnnnnnnnnnnnnnnnnnnnnnnnnnnnnnnnnnnnnnnnnnnnnnnnnnnnnnnnnnnnnnnnnnnnnnnnnnnnnnnnnnnnnnnnnnntgaacctagtgtcagatatttactttctgtattacagaggactgaaagctagctaaataatacttttcagtgtacctgggttccagagataaaattggtaaactaacctttgctccttacttgggcttttagtttatacttcataagaccatggaagcaaaatttaggtatctgacccttctgcacaatttaggaccccgtgtgtgtttggcctacctattcgagttcaattgaatctttctgagcatctatggtgtgccaggcactctcctaaatgggaatacaatattaatccagatacataaagtctctatccaaaaggagcttcaagttggcttgggcaaagaatacatgtcataatggactgtttatataaatgatgggaaagggttgggtgttagggtgtgagattactttagaacgtgttcatttaaattacagtatgaatgaaggacattgtaagtcaggttttttattatatcatggtgcatatactcctgttcctgtcagtttttcctgcttcctttctttcaccaagatcactcctttccttctcagatcaccaagtcctcctagctatagagagggccttctattcctctccacctaaacttatataagctactgttttcctcatacagacatgttaatgaaaatgaatttctacaggatctccagtccattgaaatacattaatttttgagtctcttcacacatttttatttcctagatttaagtcttgattgcaatcacatacaactagtatttcttggaataaaacagcaatcacaaaaatcataaatatcacattgtttaaaaaaatttattatttgatgttgaggactccatcctgatttcaatgaattaattcatttgttcccttttaaaatgtcatctgtgttatttatgtgtataaattttcaataattgtttctcaatatagagtaaatgatacagctccatagaaggcctgtaagatttttgaaattaaaataagtttttaaataaaatatgctgttatgatcattgaagttgataataaaattattccattgattctgtttctcccaagaaccaccatttaatcatgaaagctagctaagtaatatttttcagagttcgtgagttccagaagtaaaattctttaagctaaacagcttgtaaagtaacttttgctttataattattataattttgggtgttatttatgcaaactcaaatcaatgtactcataatcaaaacattgacatgcaaacttatgtattaagcaaaataaaatatccaagtgagaaaa

SEQ ID NO: 141522 - DNA, 526 bp, Homo Sapiens
  misc_feature (342)..(342): n is a, c, g, or t
tttggtgattatttaattgcagaagctattatgatataattacttctggtggattaagtgctgcttaaatactaagactatccattctcttttgcctcacgcctctctactaaactgcagctcagttctgcctctcataatatgtatgttgagtaacattatgaccacacagtgctcatcaaaaactattgctccagctgtaattttaaatgttggaggtggttcaaaattctaaagagttatagaaataacacacatttgacaaatacatataaaaatagttataacatattgaaatcacattaaaatatgaaaaacccacaaagcataattgcatcatantatttgatgttgctagacactgtccatctatttttagaaaacgtcttaaatgtcactcaatggggcaactttcctgtgtttcctatagtcttaccttagaagcaagcagtgtgttagaatggtatttcccatgcacgttagaccccaagatacaacaagcttctctatacagaagccatccatg

SEQ ID NO: 141523 - DNA, 308 bp, Homo Sapiens
aaagttagataggggtcctttatttacaaagacaaaaatgatgagaagtcttccaatgtgattcttaatcagatgtttggcttatcaatgacctacagttagtctaggtcttagaggagccagataactctacttctagaagtttaggcatcatcactctgtctaagtgccacctctctagcagtagatcatggttaggtttattccaatcactgtttcaggtactcactctctcatccttttttgtagctataggtgaccatatgacccaatccagccaatgaggagcaaaatgaatttatctagca

SEQ ID NO: 141524 - DNA, 1151 bp, Homo Sapiens
  misc_feature (48)..(275): n is a, c, g, or t
  misc_feature (993)..(1027): n is a, c, g, or t
gattcatggaaaaacaagatagattgttttggagaagcaatttggtgnnnnnnnnnnnnnnnnnnnnnnnnnnnnnnnnnnnnnnnnnnnnnnnnnnnnnnnnnnnnnnnnnnnnnnnnnnnnnnnnnnnnnnnnnnnnnnnnnnnnnnnnnnnnnnnnnnnnnnnnnnnnnnnnnnnnnnnnnnnnnnnnnnnnnnnnnnnnnnnnnnnnnnnnnnnnnnnnnnnnnnnnnnnnnnnnnnnnnnnnnnnnnnnnnnnnnnnnnnnnnnnnnnnngctaccttttcagtattatttttactacttggaaagaataggtcatggatagtaagtgagagatgacagcaattggagatttaaagagacaagttaataaaaagaactttaaaggtcatgaagtttagtttccctattttgcagtgagaaatttacaacaaaatgtagtgttagcattttgtccaacatgtcgcctggttgtgttaactactcagaaggagcattttaggacagttaagtgtaatgtctttgttggcttaaccaaacagaaatcagttaagcgttattaatgatgtggcatgcatgcatgataaggatataaaatatcctgatttattgaaggaattaaaaagggaatttttgtgctattaaacatcatgatacatgaaaggccaaaagaggatataaattattgatctgaatgggattttagtgacagaaataggttgtgaggtggattttagtttcatagtgaaacaactagctattaacgttatcagtgaaatgttcagaagacgatgatacaggacccaagcggtttgggaatatattgtcaagacggttgtctcatgttaggcaagtagatatagagagaagagctgaagataaggacctgatttctgttagtaagatggaaaaagatagtaaaagtaagaatgataaaaggaaagggaactactgctgtccgcaaacaagctaaaggaaatttaattgctannnnnnnnnnnnnnnnnnnnnnnnnnnnnnnnnnngctactgctattgattttagtgaattttacatgtctcattattatggcagatgaaatagtttttgcaaaatgaatgaggaaaggaaggaaaacctaaaatttgttatttgtgactataagaggg

SEQ ID NO: 141525 - DNA, 447 bp, Homo Sapiens
ttttctgaggcttagagagtatttattttattgatttcctaaatgctttaagcccaagcacggagtccccagaggaacacacacgcccaccacaatgcatttctcaggaggtgattcaggaacttagggcaacaaatatccggcacatccgctcggaggcggaggcgagcgccagagcccccggctaagtccagagctgtgggttcgagttctggtccgcggggaggtgctgcctgggtcctcctccccgtccgcgttccttcccagcctcagcccacgggaggggtgcagccccatctttctgctgtaggctgggctacagggacgaaaggatcatggagaaaggtccttgtcttctcatacagagctggccgattggtgggttcagatccttccaccaacaatgactccactgggaccttgaacttgggcccgagaccatagcct

SEQ ID NO: 141526 - DNA, 796 bp, Homo Sapiens
cagccagaacagcacagatctccttgtgggcagccgagttggactcccagaagcgctgtactttgctgaaggtgacgtttgtgcagtcggaaaggccactcaggaaggtacccgaggacttctcggtgagaaccagctccgcctcttcttccatgggcgtctccggggcttcgcttttgcccaagcgcaaggaccctgactgcagctcattatgtaacttcacagcatcgactgtcaggtcactccttcctgacggccggctgaagaagcggctgcgggcggcctgacggtggcggcagatggcggggttgctgtcgctgctgtggcctttcttccagcgcttcaacttagctgagacaccagagggcaactttcccgagcgacccatgttgactaagccgtggcgaggaatgagcttaaatgaccggcttccagggacgtagaaacacgctcagaacccacgtggataccctgtagccttcacttcctcttcttctggcgtcacttccggattcgtgtgcattactatgaacctgagtcttgaggcatcatctgggctcatgccctctctgaaacataaatcctgtcctccacagacaccagctgagccgggagatctgaacatcaggcaatgagtttgcaagatggtttaacaactatgaacatgtggtgtcctcacaggaatcctgtgggctgaacagcagccgcccctccttccacccagcacaaaacttggtttgccccgctcactctaaatctgggccttcaatgaatgttcagtggagttcttctgtgg

SEQ ID NO: 141527 - DNA, 489 bp, Homo Sapiens
tttttttatgataattgcggagtttaatgaacaccttgcttcacttcggggtctcatctgggatttcggagtgaactgtgtccagaggctgccagtggcaattcatgagggagtcgtagagttcttcacttttcaccataaactcttggtttgattcctcaatattcaaatgaagatgtggatcttctagtgggtcttcatcttggttttcagctagaggtgtggtttccttaggcataaccagagttccagctgtgtgttcaggggtctcatgcgcagaaaaacagtcctttccatttccatccactgcacagccatagctgtagccagaaagaaggtaagagccgtgctgtcgcgcataccagttgccatagcggtaactctggctgggctggaactcctgcttcactctaatagcagaggggagactttgccagtagcagtaatagttattttgttgagctatgccaaaatctgcagaactctctg

SEQ ID NO: 141528 - DNA, 684 bp, Homo Sapiens
  misc_feature (410)..(505): n is a, c, g, or t
gattttccaagaagagaataagtaaagatgccacatgaggaggttctcactgcaaggagaaaaaaatcgggggcaagcaggcatatctcaggaagtctcccctctgctattagagtgaagcaggagttccagcccagccagagttaccgctatggcaactggtatgcgcgacagcacggctcttaccttctttctggctacagctatggctgtgcagtggatggaaatggaaaggactgtttttctgcgcatgagacccctgaacacacagctggaactctggttatgcctaagtgaccccctgtgccatctgcctgccatcctgctgggtgtcccctgttgggaagctgctgagtgaaattaaagatggaaaccacacctctagctgaaaaccaagatgaagacccacnnnnnnnnnnnnnnnnnnnnnnnnnnnnnnnnnnnnnnnnnnnnnnnnnnnnnnnnnnnnnnnnnnnnnnnnnnnnnnnnnnnnnnnnnnnnnnnnatccacatcttcatttgaatattgaggaatcaaaccaagagtttatggtgaaaagtgaagaactctacgactccctcatgaattgccactggcagcctctggacacagttcactccgaaatcccagatgagaccccgaagtgaagcaaggtgttcattaaactccgcaattatcataaa

SEQ ID NO: 141529 - DNA, 491 bp, Homo Sapiens
ttttttacctttctatagcgctttaatttttgaaccacacaaatgtattgcttatttgaaaaataatacaaaaacactgtgtactccagctactgggaagaaaacacatctacaggctacgaacagcctgcaggcttctgggttgcaccttcacattaagggctccaaaactggagaggcagaaaagttggcagcattggatccaagctttactaggtgtggagacaagtaggttgttcagtatctggtgtctggaactctctctggattgcctggcaatgagctagttgggcccagcagcctccgccacctccagggggaaagtgatgcactcccagcctctctggaagagactgctccaaaactcaactccccaggaaactgaggagctccagggtcaccaggtgctgggcagacagaatttcctgccattcctcgatagttaaggctgcctggaaccccagtggtgtgttccccccatcaaggctctg

SEQ ID NO: 141530 - DNA, 591 bp, Homo Sapiens
ttttagagatgggattctgacagtcacgttttatattaaccagagaaatagccaccaaattcaaccagagatgcaatttttttgttcttttcaacaaagttgaataaaagttgttgatcaaagagtgaagaaatttgaagatagaatttgccttaatttacagatgagccaccagaggctcagagggatgaagtgttttgttgaaattacacagtgggtgccattccaatgacttgtgactccacacattgccttctgatattcattaggaagtcatttgaaggaggaattctaaactttttggaaacatcactgctctctactcttcacccttattggaaatgcttttatttggagaaccttcaccaccttcatggaaaccaaaatgagggtcttcagagttcatgttccgtgtagcattaaccctaccatgtgcttcccttgcacagggaactcctcttctcattgtcaggagtggcatgatcttccagttgacatcctgggaggctgttaaaccttgagtttgaagcttccaagtgtagcgagtctcctggcatcaggtatggctggtatcatggaaacactcggctg

SEQ ID NO: 141531 - DNA, 748 bp, Homo Sapiens
ctcatttcagccatgatcatttattccagaagcacttgttaggacattatacttatttcctttaagtataaggtcctgtgttgactactgagaatgaaaaactgaacaagacagaaagtcccaccttgaagagcttccaagtgtagcgagtctcctggcatcaggtatggctggtatcatggaaacactcggctgactgtccaggagatgctggttaagaggtggaaggtgatggcgtgaaatcaagttcaggttcaggggacactcctgagagcattcctgccctgtccctgtggcctgagcggccttctcagttgcacaggtaggttttctctgctctgcactccctctgtcccaaggtaccctttagcaaagtgtaaatttgtaagagtggttagccctggactttatctcaagtctgtaataagggcacctacactaagactgaaactggaacatgctattggtgatcaaaccatcagtgttaataagtcacttaagttacatttatggactggagaaagaaatggaagaaaatcagagtacaaataataaatggttaccaggtccctagatctgaaagggcgaatacattcatgcagtaggtgtccaggatactcatgtggtcctccttcatgcttaggaacacagacgctcatcttcactatgcaaaccagagcctgcgtgcctttcgtggtccttcatatttgcagtgtgttggttggagttgctttcttagccatgacag

SEQ ID NO: 141532 - DNA, 1538 bp, Homo Sapiens
ttttttacatttaattaggttactttatatctttcactcttccccatggctgtaataatggagattgaatgagactaaggctaagcccaactccactcaaatccaagtcacacgtcaccttggctgcagtacagggaagctccgcacaccctggcttgggaaagtttcggccgatggagcccaagatgcagggcaaccatctactctttagggttctgatgattccactccagaaaggtgcatgaagaggtccccgagctctgtcatgtcgacatcttcattgttggggacatgccggctttctcggttctcgatgaaatcccagagccgcactgaattaaagaacctcacagtgccttgagaactgagctgtttccgaggtttctcaggctctgctagccgcccatcggggtaagcatggcgataaagacatttgcttccaaatgggcaggtccccttgccttgctcaaagtatttacaggctttttttccccatcccctgtttgaaagcttcaatcaactcgttctttttattctgatcttccacccaatacacacttggaattacaaactctgatatcacacggcattctggacaagacttaatgattgggttttcaaactgtttggcacaccgccactgccggatgcaggacaaacagtacgtgtgattgcaattggagagaatcccaaatctcctctcagaagcagaggccttctccaggatcacttccatgcagatactgcacactttgtcctggcttgcctggaaggcaaaggccttttccatctcgtgttcgaacgtcaacatgcagatcttttcgtgagccttcctctgctctgggtcgaatgggtgcaagacttgcagcctacagatttcacacacctccccgtgcaggtagacacaggcatccccaaaccggcactccccagcagctgcgtaggggcacagctgctgctcgttgctgtaggagctgctggcctccacgtcatcaaggccactcctgatggcatccaggtaggaatgcggcttcatctcggggctgggctgggggtcgctgcagctgcctggattactcaccatgctcggctgggtcttcctttcagccatgccagagagatttcggtctctaagaaccaatgttctcttttcacgctttccgggttcatgtgagttagttttcacaatggatgcagtgacctcggaaggagggtgaggactgtggaaagctggggagggcacactgtgggccatggtgcccacagcacctccagctgcagcagagggcctcgtgtggtcatatctgcaccgagttccataggcacagtagcccttctggtagtacttgcagatggtggacggtttgctgtttgccaagtcatgtgagaataggcactgacttccttcccgacacacaccatgcataaaatacctgcaagtgatctgcttggtgctcatggtggctgggctgagggaccgtcgtcgtgccgccgcctctcgcagccgctgccgatcccgggaattccggaccggtacc

SEQ ID NO: 141533 - DNA, 741 bp, Homo Sapiens
attaatttcagtgttcattttcagtcagatttttctttctagaaaaaggtttttattttcatcacactgctgtttaaagacctcagtggattacttctactaacaaaataaagtctaacatcttcagtctggtatttaaggtcatctagaacctaactatgcacacaaacatatccctttaataaactctcccttttgcttaagtattgtgaatctctatttgcaatcggaagagtcctaataagtgaattaatctattccccttccattttcttccttcctatagatataaataactttattgcttcttggtcctcctcacttatagtagagacttacatagaaaatgaagttgatcagaccacatttctcatatgttcttatctccaaacctgcaaatgaacttgaatctatacctatattttcactagttacaagagaatagtaactatttcctgtattttcacttctccaatatcttaactcctacattctgaattctagcccctccttcttcttcaggaacctgaaattctattggttttccttctttcttctgtgttttcaaactctgtctatgtaccttttgccaactttagagtatgtcactcacattgtaacttgactttattgtaacgatgcctcctagagagacatgcaggccagaatcatcaaatgacaagaatctgtctctctgtcattattacgtctttctatcaaccgccgccaaggatgaaatat

SEQ ID NO: 141534 - DNA, 707 bp, Homo Sapiens
tcttgatccctgtaacatttattggcgtttcgcgtaggtctctgataaatgtttgacgtctttgtgtgtcttcacactttgttatcctgaaactgtgtcatgtagacataaatggtcacagtttgtcttaaaagtctttaggaaaaggtgatactagcacttgggctagaaggtcgtgcagagcagaggaagaaaaaggcccactgctgtctacaaatgaatgggaagatttaagatctttcaaagcaagttgagtctagacccttgcccaagttttgtaacatgattttgtctctttccccccttttcatgcagattatccatggagttagcatgcagatagcatggagtttgtctgatagaagttgggctctggtggaagtacggaaattgaatggtcagggaaagatagaatgcaggtttcttagggagtctctattaggtttccagcctgcccttcctgggagtggaagagagatgaggttgtgcccttcaaggaggagctttacagagataaagaaactaagccctagaagaggaactctgccagtctatttacaaagcctgcactgaaagctagaccatatactctttggagagggatgatgtgaccagctcatagactagggcctataccatgtaataggtactcaaacttttttaaaataaatgaatcaataaatgaatgtctttatgtaatcggaaaa

SEQ ID NO: 141535 - DNA, 451 bp, Homo Sapiens
tttcctttgcatgttttaattgaaactcctaattcattacagagtaattttatgatagagatttaagatttagatttaattcacttcacataatgtgggtatcttcctttaatcattcatttcagacattacgttgtgacaatagagtctttctagtttagaaagatcctaaaatccaggtaaggtgatcacattgagagatagttaaagtaaaagtaaaaatacatggctccctatcttgctttctcatgtagaagcatctgcttctcttacaacatcaaaggagacactgaaatgtgagcgttagatatgaagctgccaaatgtttgatgagttgcatttctttaatttcaatggaaggaatacagtgggagtgtgagagttcatgctccaaagctggattgtagcaacacacagcagaatgagagtggggaaacgggttctgataaag

SEQ ID NO: 141536 - DNA, 547 bp, Homo Sapiens
gtttttgattttacaggcttataggtgaaagtgacttcccttgtctccaatgaggctttggactttggacttttgagttaatgccagaatgagttaagattttgggggcctattggaaaggcatgattgtagtttgcaatgtgagaaggacatgagatttggagaggccagaggtggaatggtatagttcagatatttgacccagcccaaatctcttgttgaattgtaatccccaatgctggaggtggggccttccttgtatgatgtgtttggaacatgcaggcaaattcctcatggcttggtgctgttttcatgatagtgagtgagttctcctgagatgtggtcatttaaaagtgtatggcacctccccccactctctatctctcttgctcctgctctgctatatgagacacctgttccccgtttgccttccaccatgattgaaagctttgtgagacctcctcagaagccaagcagatgccagtgccatgctgcctgtatagcctgcagaaccacaagccaagtaaacctcttttctttataaatt

SEQ ID NO: 141537 - DNA, 459 bp, Homo Sapiens
tttttgagtagggcagagtagaatttattgggaaaaaggaaagctctcagcaaagacaggggtcttgaaagcaggttgccagtaaggcgtctgtgttctgtgtcttttatgtggcagaagctgggaagtcttctgtgggttttgcccagatgagagaagtaacattttcttcttggggtactacagctgtgcatgcctaagttttgccaaagggactccatcttggttattacccatgagtgcctaagcaaaacccatgggggtgctaaaaccacaatgctaatgtcatgtttaatgacattataacgagctgggttaaattagggacatttaggctgatttattgtgcccgcaccaaagttgggatggtcacttctgagcaacatcctagcttaagggtaacttcttccgtttttcctattaactgtagaggcagtataggcactgtcttgccgttgt

SEQ ID NO: 141538 - DNA, 565 bp, Homo Sapiens
tggggctgaggcggcgccggcggagccctgagcggctgtgacaggctacgcaacaggttcgcgggcggcggcctgacgaccaagccagctgcagtggcggcgacggcggcagagcagggtctccccgcgcctgcccgcgcccaggctgccggtgctgagggacgcggagtcgcgctgtgacgtgcgggaggcgcggcgagggcgccagatggctgagagctagcaaggaaaactcaggaccatgatggctcagtttcccacagctatgaatggagggccaaacatgtgggctattacctctgaagaacgtactaagcatgacaggcagtttgataacctcaaaccttcaggaggttacataacaggtgatcaagcacgtaattttttcctacaatcaggtctgccggcccctgttttagctgaaatatgggctttatcagacctaaacaaggatgggaagatggatcagcaagagttctccatagctatgaaactcatcaaactgaagcttcaaggccaacagttgcctgtggttctccctcctattatgaagcaaccccctatg

SEQ ID NO: 141539 - DNA, 484 bp, Homo Sapiens
gttttgtccactccattatccaggtggtcctcatcatccgcttgcctttttgtggcccaaaccagctggacaacttcttctgtgatgtccgacaggtcatcaagctggcttgcaccgacatgtttgtggtggagcttctgatggtcttcaatagtggcctgatgacactcatgtgctttctgggacttctggcctcctatgcagtcattctttgtcgcatacgagcgtcttcttctgaggcaaaaaacaaggccatgtccacatgcaccacccatatcattgttatattcttcatgtttggacctggcatcttcatctacacgtgccccttctgggctttcccagccgacaaggtggtttctctcttccacacagtgattcttcctttgttgaatcctgtcatttatacccttcataaccaggaagtgaaagcttccatgcaaaaaggtgtttaataaacacatagcctgaaaaagggcaaaaa

SEQ ID NO: 141540 - DNA, 540 bp, Homo Sapiens
  misc_feature (485)..(495): n is a, c, g, or t
tgttaccaatctggttttggtaaagtcagcactcgaatttgacaggggcttaaatatgccgtcatcttttctgaagatgacggcatattttgaaaacaatgtataagttttaaattttttaagtcccattcttccaattcaggatatatgctgaatgctgaggcagttgttagaccttataagttactatgatattagaaattaataataaaaataaagctgacagaattttagcattaaacttggtttaactataccatctttcttatgaacagcgcttctctgtttaagaaaagctcatctctgaattatgcctactcacatgaaaaactgggaaccattggtatgtttccctcgatttgccattgataaaaggaacgctctgtcatgtttgagaataaagttttcatctgtttgaagaaaacacaaatttgtcagtctccaattataagtcactttaaagtaatgttcaagtaataaatagnnnnnnnnnnntgacattcctcttctggtcagtacagataacttgactgaacactc

SEQ ID NO: 141541 - DNA, 298 bp, Homo Sapiens
  misc_feature (106)..(138): n is a, c, g, or t
  misc_feature (172)..(221): n is a, c, g, or t
tcaggtaacccttgtttgcaggaagataaataagaaggcttccttaggatactgacccacttagagaggcacagaaggaagaagagttaaaagcagcaaagccggnnnnnnnnnnnnnnnnnnnnnnnnnnnnnnnnngagatggagtctcaaataataataataataacannnnnnnnnnnnnnnnnnnnnnnnnnnnnnnnnnnnnnnnnnnnnnnnnnggcttgaggttaccatgaggcttgcaaacactatattataacccattattttaaactgataacaacactatttgtat

SEQ ID NO: 141542 - DNA, 573 bp, Homo Sapiens
tatgcagggatggtgccattctggcccagacctttattggggaaaatgttgggggtcacttggtcttgctcttgcctttacccggaggtagctggaagggccgctctagtgcagtcaacttgctgctgagcctttcctcgctggccttgagccgctcctccaccagcccctggagctgctccagctctttgttcacttgggtcttgatgtaggctcggaggacgtggatgtggcttggctctggctctggtggggccactgtctctagttcctctttctgcggggtaactgcctgctcctccatctccttgctttcttctttctccgtctcactctctggccacagtttgggtggctgtagccccatgtaagtcaaagacagatccagccgcacctggggtgtgaagacgtatttatagagcttgaagtggcggaagtaagtgttgaccacgtagtcttccaaggccagcagctgttcctctttgaagaggtcgatgctgaaaggaggccgctgtggtggtgactcggaattagaaccctgactaccttccggagccctggctttgcctcccc

SEQ ID NO: 141543 - DNA, 579 bp, Homo Sapiens
  misc_feature (227)..(240): n is a, c, g, or t
tttagctaatagtttttctttaataatcagttacataatacaaataacacccaaaaggggaagatccaacaatttagagatccgcagtattcgcagagaaattctgcctatgagatctcaaggcacccagaactcaacaaggctgttcttcacctccaggtggagcatgtctttcaagtgagcttcattttcagcccagtaactaagctgcaaattatcttctcaannnnnnnnnnnnnntgagcaggatgccaatggaaaaccagacaaatgcctgctttctcacttggcttcagaagacacaaagcatggttactgtgggatgtaggataaatttctaagtctgccaaattaaattatatttttatactacatcctcaaggactcttccctggaaatgaatgtttcgcaaaatgtcgctggcctcaagagcagtttccgtggactacacagttaccataggttgagctaaatgcagagcatactttgttgtcacaccggatgtgccaggcagagacaggaagtattatgtgctccatgtcactgataagggatggtgaaggtctctaagtggtaaag

SEQ ID NO: 141544 - DNA, 320 bp, Homo Sapiens
tactaggagattcctaaagtcaagctgtctagtctttccttagtcacaccagagggaacagggatctgaatattcagccttccctaccccacactttggaaaatgatccacctccacagtcaggctttcatctctgatcctcttctaggcagtactttggatacaaaaaaagggtacagaaatgaaaggaatggtagagaagatgaggcttcgcatgatggatcagtggccgcccattcaagcaatggtccacacaggttcctaccacatgttaattgcttactgtggtgacatgcgcctgaggctttttggagatcacc

SEQ ID NO: 141545 - DNA, 540 bp, Homo Sapiens
ttaagagctaaatttttattgaaaaatttaaggagaacttctgagggcccctgttttatgaagcaaagctaacctcattacaacatctaagctatttgagaagactctaaagcatctccatggtcggcatttccagaaaaacaaaggccagtgtaattcttcaaacctctgatgacttccaacccatcaaccaagaaatggctgtcactacagtagatagctgcaaaggggaatggctgtcgtcacttgtctcctctccttgtccttatacctgaaaacagcttttgggatcagctggatgtgttcattggtactatcctatagctgaatttgaagtttccaaagctccttttagagaagtcatcaagtttgataaaatccaagttctgatgtcttggatgcataagtctgatgtattctctgtgcttcagttaggtctgtcagttaattatagactgccttttactacttcatagcagaagagctgatagcaaaaataccccatttctcaattcctctttctcctgcaaaccttgcctc

SEQ ID NO: 141546 - DNA, 524 bp, Homo Sapiens
tgtgcctctgcggcgccccggagatctccttccccgtccctcttcctttccgagaagccgcgttccgttgttgaactacgtttcccagcgtgccgcgcggccgagagcgtggactcgaccagcccttcctctttgcctatcagctcgtcgcagcatgatgatgcaaatgcgtcgggcgccgatgagtgacgacattctggctcgcgaccgcggcagccgccttagcaggggtaataggcgcaacggcggcggaggctgcagggacgacgacgacgacggcggcggggcgggcgctgtgcgcacaggggaggggtaggcgggcgtcgccagcggcttcaactgcggcagctacggctagggcgacggaagaactcccaccagtcggcggtcgagttaggcctcagcaccgcggggaactgttcgtgctgtcctctgcgggagatctccatagagaccgtgacacacacagaggcgggggtccgcagaggcggccggaccggagcctcctcggcctctgcggccgc

SEQ ID NO: 141547 - DNA, 537 bp, Homo Sapiens
ttttttacatgacataaaacttaccattttattcattttgattgtacagttcagtggcatcaagtacattcacactgctgtatagccatgtgattgatttttaatatcagctttactgaggtacaatttatataggctaaagttgaccaactttaggtatacgtctggtgagttttgatcaatgtatgtagctgtgcaatcaccacaacgaccaaggtataggatatttccatcaccccccaaagttcatttgtgccctttataggtaaccccttctttcctggctgtgagcatccacagacctgctttctctcactatacttacacgctttctagaatttcacataaaagaattatacagtacgtatcttttacgtctggcttctttcacttaacagaaatgaaatttatccatgttgttatgtgtatcagtattttgttctttttttgttactgaatagtattccattgtatggatttaccacagtttgtttatccatttatcttctataagacatttgagttgtttccagtttg

SEQ ID NO: 141548 - DNA, 477 bp, Homo Sapiens; identical to SEQ ID NO: 119694
  misc_feature (202)..(212): n is a, c, g, or t

SEQ ID NO: 141549 - DNA, 538 bp, Homo Sapiens
tgctggtcattttcaaatttatttttataatgcttaataggtgctaacactttataactactaactcgtttaattcattaatttatttaatcctcaaaacaccgggggtgggtgagggggactatatcgatggcagggtcctggtgcaatctggctctgccctgcatccggtcggccattttagaaataaggcatgtcaaccccccagaggaaggatcctcagatgatggaaacagacaaaaaggacaagacaagacacattcataagcagtatctacacagtaccaagccctgcacttagcctcgtgggggatgcaaagatgaaatggatgagaatgtggaatctttaataccagatgaacagtgacaaacgctctacaggtgacgaaatgctaaaggaggggttacaggtggcaggaaccacagagatttcagcgaggagactgcatttgtgctagtcttggcaggagggtaggaatccggcaggctgagatgcgagcatggacactgcagacagagaaaagccgggagcccccag

SEQ ID NO: 141550 - DNA, 861 bp, Homo Sapiens
tttctttgttaattttttattatttattgtttcggatgacacaccaggaagggaaataggaaaggctctacatcatttgtcgtatgtgctccacaatttgccctcaagtttgaatcctaggtcctaccacccacacaaaactgccattgccagcctgctcaattctacccaatctctagccattttcatactgcaaagttcctatgacctcctcccaaggagctcaattctgtactttacctcttcctgacctccctggaatccaccccgcctccaaccacactgtaattagaatctgaattctgcaactaccttgatgttagtctctgtaggggagcagcctgcagcctcctatggactcccattaagacaggatattccttccgtctagggggtgctgattgcaacttttttgctaagatgaaaagctggagtcgaaatgagaagagaggagttgtggcaggtattttgttttgcaatggctccagactgctcttctgtttgataaagtggctgtaactatgtgggtgggaacagtgcagttttttctttattctcccacccacaaaaccaggaggaaattggaagggcctcaaataccagggaatgttttggctagctgaagacggggtaaggtgggaaggagatattgaggcaaacatcttgggagagggtgagaattacaaggccaaaatggatttccttaccaggcaggcatatctctgcctttgtcctggcatggcctctacctaggatgccccagggaaaggatagtttggtttgcacaggagcagcagtgatgaaaatcggaaatgatgagtgtggttggagatatttgtggcagggtttgtaggtctcttt

SEQ ID NO: 141551 - DNA, 553 bp, Homo Sapiens
  misc_feature (440)..(512): n is a, c, g, or t
aaaggttgtagaatttatccttcttcatctatgtattggctaggctgggagggtgtgtggccatgagaatgtgcttctcagatctctgactgaggaaattgtaatttaccagcagtccagctgctgagttctgaaatccatcctgagctttgaaatccattgccctttactccgaggtctgtcttcccatacgctgctcatagccaataactgagcccaacggggattttaggacaggactgttcctgggataagtgatactcttccgatgggtgactttgactcaaggactcctcaatggccttgccaaactttccttagaacttcattgcagtctgagacacttccaccttgaacaccttccctctgtccttcactcagggtcaggcctgcgtcactgtgcgatggctctctcagtcttccccttccatttcctctcnnnnnnnnnnnnnnnnnnnnnnnnnnnnnnnnnnnnnnnnnnnnnnnnnnnnnnnnnnnnnnnnnnnnnnnnnctcaataaattatgtttttcataataaatttattgcatttt

SEQ ID NO: 141552 - DNA, 603 bp, Homo Sapiens
gtccaaagtgtattctgaggaaggagaaatgcagtgaacccttgacttagcaggtaaacaatgaatacgtagttatgataggtattgtttggaaacactgcacttcccactcagtttttcttatttgaaggatactgtgttctgagacagcccaaaggaaattagcatctttaggggaagatttctaagctgaccatgtggaaaggtaggtaactccatctggggaaaaatgaatatgaatgctgtttattaaatagcagaacccatcccattcggcaactcttacagctaattcaggtaagccaagtcatagcaaggaaagtcatttagctcttactagcctcagctgtgctccagatgagccgtgttcttcccacactcatggacattcaacctgtggacacatttgggggttccagacagttatatgggctcagagatggccctgtcagctctcatggacattaacacccaaatgttacctgtcataagaattttggctcaggctctggcattttcctcccaggaaaaaggtttgcttttttagaaaggttgctgtttctgctccagtcagtgcaaaccctgtaacagggcatcaggaga

SEQ ID NO: 141553 - DNA, 1273 bp, Homo Sapiens
  misc_feature (46)..(80): n is a, c, g, or t
acacccgaccgagcgcagcgaagtcagttagcgaggaagcggccgnnnnnnnnnnnnnnnnnnnnnnnnnnnnnnnnnnncagtcgacggtaccggacatatgcccgggaattcggccattacggccggggtgagagtgtgtttatttttaattttttaaaaggtatttaatttccaaccacacttcttatttttttgaaaagacaattttccatttcagtattacattttaccaagaagtcactgctttttaggtgtgttgcatcaatatttaaataaaatcccagaaatgtattttaaagaatttcaggtttgaaaactcaaaccaacaggaagatatcacacctttgtatgtgcttctttgttcttgaagtagtcattatggttcattggaatctactgtagcataagctcctaggttgctccatttcttaggaaaatagcaatgaatgaatgtatagtagttgcttgtgtgaactactgctgtaaagtttgctgacatttctgcaacaacatttctccatctgatttaccagaacctgtaactagaccagaacatgtatttatccagaaactcctgggctctgctttgttcaaagaggagcaaatccacatagaacattaaatgttatacattgtattttttttaaactaattttccaaagaatttagctgaagactcagagtcagcctacctcttgactctccacatctgcatctaagatcctgaaggccaaaggaatgcgcctgtgggatgccaaagccatcagtagctggaagaaagaatacctctttctagaggtttggtgtcctcttgctggcctgtcattatttggaaatacgcgcttttggaatttccttcattttcgctatttccaggttcagaaatcatacctaccacttgttctttctttgcccagtaaaactcagggtttctcttattcagagttaccatgttgcacacccccagtgctcagcctgcccagaagcccttctctgatctcagcaagatcttagtagtaaagctaacggatccattgaaattcatagctcagcatctgtgactactagacaaagcccattgtactgaaccataagtgtgcacttttaaactaaacttgttaactgaaagggaaaaaatagaaatgagggcattttgaagtttttagaaaagagaggaagagctgttggccagatcaaagagatacttataagcccggcacaatttttaacctcagtcattcctggctattaagtaaaatatttcatgaaa

SEQ ID NO: 141554 - DNA, 377 bp, Homo Sapiens
ttttattcttcggtttgcttactatttatttactttttttcccgggacgattttctaacagttcaattaaaaatgagaggtaaagcactagtgctgaacaagttaggaaaattaagcctgaaatagtctaaagataagacatagtctaaacataacagaattcttctaggcttctatagatgctctcactgtatacacttaggcacttattcatctttatctgcaagccccatttctaccaacggcatatgaactggatgctgttcatcgtcatataatgtcactatctgttctggtgctggagccatggacacagcatagagttgttttccttgaagacagtctatcatagcccacagtgcctccatgctccattt

SEQ ID NO: 141555 - DNA, 491 bp, Homo Sapiens
gtcttgggtgtcaattcttgaaaatgtgtatttgaagaaaaagtaaatttcgcctactgttgtcagatattagcagtccagatattcgctctagcttgtaaacttccctgtggtcagcctaagctcttaaccccctattctacagctttagactgaaggcaaaagctcaaagcatttaaggcctcctcaatttcggcccctgctgctctgtgctctgttccttggtgtagctttgttccagctcctgcagcattgcaccattcctaaccacaaccttaacagcatgtagggccccatactctaggccccatcttgctgtcttcctgtgttggaatcttgcctaccaaggcctgtcaagagggtcctcccccatactgtttgcccacaaggttcaagagtgattggctcccagtcttcctggactgaactacttggatctaggggttgcctgttatttagaagagatcccttaactggtagggccctttcag

SEQ ID NO: 141556 - DNA, 760 bp, Homo Sapiens
agtttactttgcatgtcttttattctgatgcattgcacgttcttccatgcattgatgaggcgtgtgctccttcctcagctggcagtttactgtcctggtctgaggatcttctggggactggtctctcttgctgactctttcgtgtcattttcacaaacaaccttttgaggaaaaaaagtcttaaggacaaacacatgctggcaattagcgccatcgacattccagatatcggggctgggaaggcagggtgagacctgctgggtgtcatcgttctgctctgaactaggaggactgactttcagagggttctcggtgtcctcttcttccacagcgctcctgttgacacaaacagcctcatgttcctccagatttttgatggggaccacgtggcaggcgttgtatttgcaggtggccatctttttggctttcttggggttctttctcctgcacgatgccaggtggtactggaatctgctgagtgggattcggtggtgaggatcataagggcaaatttcaaaggcttctggctccatgagaaattcttgaagcagggtatctcactgctagagtctaacggaaatgcttcttgtggagaagcccttttgtaagaaggatggagttgtcctctgcccagttttggcccttgggattctgtaggtgacggtcttaacttgtggtctgttctctaggactgtgagtggtggattagaagagagatgaggagctgccaaaagcagctacacagagaacagagttagca

SEQ ID NO: 141557 - DNA, 503 bp, Homo Sapiens
  misc_feature (262)..(292): n is a, c, g, or t
gggccctcaaaggatggggaaagacagagtgaaagggatgcgggagagaaagtcacagtcactttgttgtatggcccagagtgactcttcttgtttcccaagtctcggctcaaaaagtagcgatctccattcacctttacctccttctccattctcatgccctattttattgtaactttgtttcccaatttttaggtcatttgtgtcacttgcaattctcacaggagtggtgatgtcaaagaaacccaaagaagagatagtnnnnnnnnnnnnnnnnnnnnnnnnnnnnnnnttctgttcttctttggattgcttttcctacagtttttgttttccttaagttggggtctcattctgtcgcccgctggactttgataacagtaggaatgtacatctcagacaaaatgcagatgcctaaagtacatctgaaagatgatgtgaataattcctgtagtctatgcaaataaagaaataattgcccttattaagaatttactggaaag

SEQ ID NO: 141558 - DNA, 527 bp, Homo Sapiens
gattgcagaaaaaaatgagggcttgctttactcaacagaaaatatggcccttcctgaatgacactaggagagtcattttatctcatacattcccttcatttcgttggtggacatttgttgaaaccggcactcaatggtcaaaccgtctgtgccctccagttgctgacagtcctgcaggaagatggacaagaggcccagtgctgacagtcactcgactctcactacttgaatgaggggactgtgggtgcaactagaaaatatgttgatttttagccattccccccttgcctctccgttcagaaccccaggtgcgaggtgtttgtttccctgcctggaaatgatgttttaggcaggttccttaatttctcaggtctgtctcagataataaaaagctctttgtatgagcctcagaactgtcttttcagtgaatgaaattaccagtcattatacgaagggtctttaaaaaatttgtggaaatactgaagtaacccgccgataaggaaatttgagctttattattgagaggg

SEQ ID NO: 141559 - DNA, 456 bp, Homo Sapiens
aggtccacatgagtgaactttgaagcatatcctcccccagtttagcctttagatgaggaccacagccaaatagcttgactgtaagccagatagcttgactcatgagggaccttcagccagaggcatcttttgagccataggaattcctgacccatagaaactgcaagacaataaatgttgttttaagttgctaaattttagggtaatttgttacacagtaataggttaataaatcccctgggccagattaggaaggttctgccatccatcccagccatcccaaacaactaccagaataatggattaaaacgttaactgttttaagtcactaagttttgggcagcatgataacaacccagcaaaaagctaactgatacattgattatttagtggggttcttcctccattaatataatccaaccgatgaccaatgctgagaaagtgttatgtccgctt

SEQ ID NO: 141560 - DNA, 1122 bp, Homo Sapiens
  misc_feature (125)..(133): n is a, c, g, or t
gccgatcagtcacccagtcggctggagtcggaggcgatatttctaggggtgtacttgttggggtcagggtaagcaccagccacaaaaacctacaaaagaagggaaattactgtctttaaatattnnnnnnnnncaagatccatgagtgggcatcgatcaacaaggaaaagatgtggagattctcacccggagtccccagtgggcttcgggcatatgagtactacaggatgtgtattaaataaattgtttcagttaccaacaccaccattgtcaagacaccaactaaagcggctagaagaacacagatatcaaagtgctggacggtccctgcttgagcccttaatgcaagggtattgggaatggctcgttagaagagttccctcctggattgccccaaatctcatcaccatcattggactgtcaataaacatctgtacaactattttattagtcttctactgccctacagctacagagcaggcacctctgtgggcatatattgcttgtgcctgtggccttttcatttaccagtctttggatgctattgatgggaaacaggcaagaagaaccaatagtagttctcctctgggagaactttttgatcatggctgtgattcactatcaacagtttttgtggttcttggaacttgtattgcagtgcagctggggacaaaccctgattggatgtttttttgttgttttgcggggacatttatgttctattgtgcgcactggcaaacgtatgtttctggaacattgcgatttggaataattgatgtgactgaagtgcaaatcttcataataatcatgcatttgctggcagtgattggaggaccacctttttgggaatctatgattcccgtgctgaatatttaaatgaaaattttttcctgcactttggactggagaaaggaacaataattttccggtacaaaataatttcccggggtattccttccacggtggggtgttcggcaaacatggcaccaaccaataaggcggggacaaagggggccccttcccctcccttttctcccatattgggggcatcaggggaactacccttttacgccggccaacgtgatccccccaaagacaacatttccgaggttctcccatttc

SEQ ID NO: 141561 - DNA, 762 bp, Homo Sapiens
acagactacacttttaaggcctattttcacaatggagactatcctggagaaccctttattttacatcattcaacatcttataattctaaggcactgatagcatttctggcatttctgattattgtgacatcaatagccctgcttgttgttctctacaaaatctatgatctacataagaaaagatcctgcaatttagatgaacagcaggagcttgttgaaagggatgatgaaaaacaactgatgaatgtggagccaatccatgcagatattttgttggaaacttataagaggaagattgctgatgaaggaagactttttctggctgaatttcagagcatcccgcgggtgttcagcaagtttcctataaaggaagctcgaaagccctttaaccagaataaaaaccgttatgttgacattcttccttatgattataaccgtgttgaactctctgagataaacggagatgcagggtcaaactacataaatgccagctatattgatggtttcaaagaacccaggaaatacattgctgcacaaggtcccagggatgaaactgttgatgatttctggaggatgatttgggaacagaaagccacagttattgtcatggtcactcgatgtgaagaaggaaacaggaacaagtgtgcagaatactggccgtcaatggaagagggcactcgggcttttggagatgttgttgtaaagatcaaccagcacaaaagatgtccagattacatcattcagaaattgaacattgtaaat

SEQ ID NO: 141562 - DNA, 668 bp, Homo Sapiens
gcggccgccacccccttccccgctgccagcactcaccctctctccgctcctgctcgcaacctcgcggttcctggggtgcttgtgcccactgtgtggacagcgcgggcggacttttgggccggggccgggcggcgggggaggctctctaaggcctccgcctctgcctctcccgcccccttacccgccccggagcgggaagcggcggaggctccgccatggcctcgggagccggaggagtcggagggggcggtggcggcaagatccggacgcggcgttgccaccaggggccaattaagccttaccagcaggggcgacaacagcatcagggcattcttagcagggttacagaatctgttaagaatattgtgccagggtggttacaaagatacttcaacaagaatgaagatgtatgcagctgttcaacagacacaagcgaggttccacgctggccagaaaataaagaggaccatctggtatatgccgatgaggagagctctaatattactgatgggagaatcacacctgagccagcagtcagtaatacagaagaaccttcaacaactagtactgcttcaaattatccagatgtgttaacaaggccttctcttcatcggagccatctgaatttttccatgttgggatgccctgcattacacttgcagccatct

SEQ ID NO: 141563 - DNA, 451 bp, Homo Sapiens
tcactcgggcctttcctcaggccctcctgtctgctccacgtggggcgccggggcctcgaaccgcccgtcccctccagccgagtttccccacccgccaggccaccgcggcgtcggggtcccatacctgatgctgttgtcgcccctgctggtaaggcttaattggcccctggtggcaacgccgcgtccggatcttgccgccaccgccccctccgactcctccggctcccgaggccattgcggagcctccgccgcttcccgctccggggcgggtaagggggcgggagaggcagaggcggaggccttagagagcctcccccgccgcccggccccggcccaaaagtccgcccgcgctgtccacacagtgggcacaagcaccccaggaaccgcgaggttgcgagcaggagcggagagagggtgagtgctggcagcggggaagggggtggcggtcgca

SEQ ID NO: 141564 - DNA, 503 bp, Homo Sapiens
gctgcggtaggcgcccaccttctggggccggtgtttgatccactcgctcagtgtctcgatgggcgagccattgacgcaccactcggtcacgccgaactgccgcaggtgtgcccgtgcgtggctggccagggccttgcggttttcaaagtaaaggccacacagctcgcagcaggcctcggtggaggagtgggaggtcttctcatgaagggtctttgccttgaagggcagttcagtctggatgtaggtcttggccttgacctctgctgggaggaggcggtcctcctgcaggggccgcttggctgccactgagcccaggtagccagtggctgagggcttggccccagtgatgggcgtcaggctgagctcacgaggaacctgggccggccctgcacctggtttgcctggccggccagccaggggcgacagcggcagtggggactgcacgggcccaggggccacggtgggaggcccgtcctcagccagggcaggggccaggtctccag

SEQ ID NO: 141565 - DNA, 819 bp, Homo Sapiens
ccggagtgaatgggaaggtccgttaatggcctcgccaacccccaatagaagcccagcccttttttcccccctgtgggggggatatattttgtgaccccggggccctgaaaccactgtaggggaccttccggccgaaatatctcttgtacgcttttggtcacggatcaaagccgttaactgtttctttcagtggcagcatgtcgcaaaagaatctggttttggctatcggttcccatcggagacagatgcagcccattggcatctgacaggaacgcgaagctctcgatccagaagatattccactggacccacagaacccaaacccagtttatttacaaggggagtaaaaagtcagggctggccattgtgcaatggagactcgaatgccctggggaaggactgggtcctcacggggcgcccatacaagagacccttccagcagaagcacgataacttcctcagcatgaacttttacccaggagtgttgcttccagttacagccatcaaattctacaaagatcgctaggtcctggggcaccgccccgctcatggcccgcaccgtgccggcccgccaggctcgagtgcgcagcgcaggccccggatctccgctcgccgctgccgccgcgggagccgaggccgaggctgaggccgcagtgtccgcgaacagcagcagcagccgcttgcccaccggggaggccgccgcgtccgccatcgccggggccggcgtgacccgcgctcccgcccgccgcctcccaccacctccgctgccaagcgcccgatccgcccgcaaggcctccctccgcgccacccgcggccccc

SEQ ID NO: 141566 - DNA, 557 bp, Homo Sapiens
  misc_feature (355)..(363): n is a, c, g, or t
ttttcagtcatcaataacatttttatttcaggtacagctgcaactaagtagaacaatgaatttttttagactagtttcatttcaggatggcttctgttatataacaaagtactccatagcaatttttaacaaaatcatgaactcaaatctgtagcaacttttaaagatgtacttatttccaaatcagattacaacctaaggttacaacagtccagactgcatccatttttttccagtagtagaaagaatgtatgataaactcattctacaaacaccactcaggaactctgcatcactaaggtcactttaaattgcactgtttacaaattacaccctttaccaaaaacgcagcaannnnnnnnnacaggctttaatgtttctgattatatttcagttacgttttggattgggaggatgggttggggctatttccaacagcaacacacacaatatatccatttagcagacttctaaaaaaatcactaattttgcctgctcttttcttctcacccgtcaggtaacttggctaaatttatatctttgcaggtttttaaaaa

SEQ ID NO: 141567 - DNA, 522 bp, Homo Sapiens
ttttttttgttggtattaactgctttgtatttctgctaaatatcgcagaaaaaaatatgtggccccatcccccaccacactatcaaaaagcaaagtgggtagcctggatttctacccacagatggcattaatgaggcattcttccccctccccactggcattatgtccaaagaagccaatagagtcagggctttcacaaccacccagtgataacagacgtccacatcccccttccatggtgctattgtaggttacatggtgagcataatgaggcagtccttcttctctccatcagggagtgcctagattcccatccatgtcaagtggtaacaaagaatctctcttggacttctgtttccaccttgcagtaatgaggtggtgctttctcttcttccactggagctgtgtcataggaagcttactgtttggttttatctctgatacagctttctctgttgctcagcacaggccatttcttttacatttaatgtctttgtgcatatgccctcctgtgatggactt

SEQ ID NO: 141568 - DNA, 373 bp, Homo Sapiens
aaaggtcaaatgcctgggattttattgctggtcagggtggttttcagagggaaggtgagctgaaaagaggggggtgggacaggccggtatgtagtcttcccttgaagtccagctatctccagccagattcgtctcagaagttacgccttaagctgtccctctgaagacaagctgcttctctctgacatccagccatggtcgtcccctcatccagctggcttctcctctctgccagatgagtctggggtctttctaggcacaggatgaggcagggcagagccatgggtggcttaggaaaaggcaacattcaaccactctacagcccagatatagtcacttatttcccctttccagccagagacttccgttccct

SEQ ID NO: 141569 - DNA, 970 bp, Homo Sapiens
ggtccggaattcccgggatatcgtcgacccacgcgtccgcagcctagttccccctaagcagtgctttaccgggtttaactggtaggttctactaagagagtcaaaggcacagaagctgagtgagagaaatagggggccctgcccagagccttcggagctaggtgcacaggaggatgtgtgcaggcggctaccttgacttcagcatgaagcccaggtggaggggggatatcaggaggggttacagcacccctcagcccccacgcaggggtcagttcctcaccattgtcactcaagacacagcagtccggaaatgagcattttaatgcagaaagaaaaccatgataatttacaaatgaatcactttctgggccagagccaggaaggccccaggagctgtgagggtagaaagggaggtggaggctgttgagtgtccgggcaaccagtttagtcagcacctttctgatgggatcctgcccaggctctcccacgataggccctggggggccctggcccccaccccatcctcttggctccctctagtcattccagataggaagacctcgggtcagcttcaggacataaagtagagctggagagacatccctggaaggagggcctgagggccagggagggaacaaggcaggagactgctggttctggttttggccacctcacccttggccacgtcccctccggctaagccacagcacaaagcatagccaggctctggaggcccagggggcgtcacccactccctctcctgttccccccacgcagggggaaccaaacagaacgcccctggacaagcccctttgcgggaccctttttctcctcccggcctgagggttttaattggaatcccggcttggcaacaaaggggaggggcttcccccacgcatgtggtttctattggcgcacaaattgtctaggcccccactttgtagggcgccccgccgcctccgcccaggat

SEQ ID NO: 141570 - DNA, 497 bp, Homo Sapiens
ttttcggggcttcctgtttatttgtttttgctaaatctggcaactctctgccagaagaatatggaataacttaagacactcaaggaaatgtcagccaagaatcctgtaaccagcaaaaccatcaacgataaaaggcacaataaactatgatcagcaagcatgaggtcgaagatcatgttcccatgagctcttcccatggaacctacagagaaagagctttggacaacaagagtggcagagagccatgaacagaggatggggctgagggccacatgggcagtcgcccgcagaaccaacaccaagaaggcagagaagggagagcacgggatgtaacagccgtggtgactcaagcaacagacgcgggcgcggccgttagatcagcaggctgcggagcagcacgtgcagggcagtcctcatgtttcagtcgtgtgactgctgatggcaacatcagtgttattctggtgttagtgctgccaaagatgagacgatctgagctt

SEQ ID NO: 141571 - DNA, 1228 bp, Homo Sapiens
  misc_feature (412)..(412): n is a, c, g, or t
ttttttaactattagaaataattaagtttattttagaaagctttaaagaaatggtatcgatttttattcttatagtgtacatatacatttacacctaattttgagtagcacactaaatgattcacattcgctgggagaatgatggtcacatgtctcttttaaacagtattttgaattacattccttaaacattttaagggtatctggaaaattaatgcataggaagaactttttacacatttgttaaaatttcagcaccctctgtctactaagatattttactgatttcactttacatcctgtcctttttatgcaatcactactgttcttatcaggaaaatccccaagatacttccaacagtacctgtataatcccggatctgatacctgcaatcagcccacacaaaagtcnctagtgttcccaggcttctcactagccaataatacagccctacatctcggcaaagaaaagcatgggttggcttttttccctaatgtttaaataaatgtagtgcaaatactttttttcacaactttgctgtacaaagagggccaagtctccagctgcatggctgattatgacccagtagaaattacacttttataactagtaatccaaatgttagtatttttccaaaatatggtgacaagtgttttaaaaaaaacttttaaaacttaagtacctgggttgttgtaggtggcgtttctagttgactattaagtcacagaaacacaacacatattaactacaaaactagttttggtttgagtcaacatcctgtgctttagcaaatcacaaagtagggtttataccaagcccacagaaactgcttttgactaaaacatataattacctcaagttctacttagtaatacatatatactgacttataatttcagccttcattgagcaaataaacttcaacatgctcaaaagaaaagactattgccaaactaagtgatcttactggggaatttggttacattgggtatttcatccccagtatatggggacaatcacctattcctgaaggtctattattatttttaaatttcagttctctttgggatgcctttcttgacagctcccatggcatgaagcttccaatcctgctactgaggtcagactagtggttcgcttcaggatattttgtcatcgtgtgcccatggagagcaaactgctgatggagacactgcaattcggccttttcttgtcatcattcctccc

SEQ ID NO: 141572 - DNA, 262 bp, Homo Sapiens
gtcgtgcatattttatttctgtagtttctggttagctaccctaaagtgatttaaaaatttagaatgctttgtgtttcctatttggtaatcttcattgacttttctttagttaatgagtattaaatagtgcatattctgtagactatagggtttacattgtgttgcatcttataacttgtatagattgagctgattgaaataagattttgttccaagtattatctgatagaatccaagatgattcaaattattaaagatgttt

SEQ ID NO: 141573 - DNA, 749 bp, Homo Sapiens
ggaaattcaaaacttagggattatttctgaaattttccatttaaaattttctatttaaaattgacgaagggtaactgaaaccagagaaagcaagactgacgataagggaggggcctcctgtactccaagagcactgaatctggaaaaactcaacacatcgatggagtcatatatttaattttttcttaaaagccgcctgcggggtattgtagaaacgctgcgctgcctatcacagcttgtgatgtgacacgttcattctgcaagtttaaacttcgcctagatcggttcttggggaaaagctgtgcttcagagacaaggttgaagaacttcgcctgcatatgatggaagatgacaatgggaaccacaggtgtcattggtggctttgttttacaaagtcttcacctttctgctgagtcacgggactaagttcaacacaatttctactttccgccttcctttggaataatagttttggaagccaagtattagtatatgataccaggtgtgttttctaaagattcaggttcagtgggctgaatgcactttcatgacttcattagaccactgagcccaaggagaaaagtgccaatcttactagacatgaggaaaaagacacatcttttgctcttgctggaagtgatgtcctactttctacaagcagtcgtcatctggtttatacttgccttgttcagtttttgtgtgatattttattctctgcctaatagatattaaagtatcaagctgtcaaa

SEQ ID NO: 141574 - DNA, 793 bp, Homo Sapiens
tttttaaagtcaaaatgtttttatttacgctgaagtttagcaagtacgtttttaacaaagaaggtgtactttaacgttatgtatagtagaacagggaaaccatacatataactttctagtctctaacacactactgcattttttaaaaatttaaaagacaaaaagccaagttgaaatgagcatagaaaagcatcaaatatggtcaagttactttagccattaggatttagttcatatttttaaactggtcagtctaatgcaagaacaaagtttacatcattgcttttaaaatgtacacgcgtttcttttttaatgtaacatagattaaatagctccttcagtaaacaaagctttgctgataaacaaaactgaaataactccatgttgaatagtttcagagataaactggaatcacaagcatcttcatttatgtaaagccagcgaggacctttcaggctgaatacaactgttgtgccatttctaaacagtaatagttacctccttgcatagcagcactatcatgaggagtcccattgttttctatttcaatatctggaattccagtatcttttaacatcctcaggccactgtcactagtggtggcttgcttaagtgcctgctccacttgctcccggcgctttgattcaaattccaaggcttcctgcaattttctcttggtttttttctccttcttcaggcgcttttgcatagtagttctgctttgaagctcaactgcaagttgtctttcaaggttttctctaatttctctctctctatagagctccagtcgcag

SEQ ID NO: 141575 - DNA, 825 bp, Homo Sapiens
taaaacaaacaccacggccgtcatgccagagcgacgccgtcgcaagagtgtaagtatgagcttcctgtgacgcagcgactgcagggtactgtcagtaatgatcacgccattagatgcaatgtgaaatatggatgaattcgaggaaccacatagctaacatttccagaatcggtagatcgtgacagggccattcgtcattgtatcttctgaaatgcactctattcctagctttcttccattttccatataggctttccataggctcttattgggaagaacattgtaataatcatgtgctccacctttaatttccactgtgcaccatgaagccaaagctgcagctctgaagcaatcttctgcctttttggtcaaaacttgaagttctttcattgagggtgcacggaagtaatagattaattcagaataagagggaatgatattgggttttacaccaccattttttattataccatgaactctccaggttggtttcatttgctgtctgaacacagacagattgttataggccagcacagcagcatctaatgcatttaatccttcccagggataagaagcagaatgagatgcttttccatagtatttcacagtcacatcatgttcagccatatctggtagataagcagcattctcttgtgatgggtgggccataaaaacaacatcaagatttgtaaaagcccctgcttcaattaaatcaattttgccaccaccatcttcttctgcaggggttcccaggacaactaccttcacgggcggaggcggcctggggaggccctctaaggcccccctcacgcccagcgcggccgc

SEQ ID NO: 141576 - DNA, 323 bp, Homo Sapiens
ttttgtgtttgtaggattaactttattttgcaagtaaggaaagcaagttccaagagaaaaaactaattcttcaacatcccaggctccatggatggtgtaagcagattttgaatccaggtgccccatccttcctctgtgccatgtgtcctcctctcttcctgtggaagggccattccaggagatggttgttcccatgctcttgtcctggaaacattaaaaccctggatccagccagccagccatcttctctgtacgcacatcgagagtgtggtgcattccaaacaccaccttactatgaagctgtaataattggatcagtctgg

SEQ ID NO: 141577 - DNA, 600 bp, Homo Sapiens
  misc_feature (490)..(490): n is a, c, g, or t
ttttttcactgcatccaaaggtccaaagttttattgttttgaatacattctccagcggcccctctactccccccaccctcagtccccaatacagaataaggcttgaccacagccccccaccccaccccagaggccccagctgggaggcagagggggcttccagtttggtttcagggcacccccttcccatccccccacccgcctgcccatgggccagtcctaggagcagctggggatgaaggggttggaccggtgctggggtggggagtgggagagggatagcaggcacttgtagagatttgtggcccatgggcggcacccctcaccctcctccggcccccaccccccaacacatggaatttttggttcattataaaattgtccctccctcccctgctgtgaccttgtggggtatgagaaacctaggcactcatggccccctggaggggcagggcaggcagggctggggctgaggagggctgggagtggngcaaagcgggtgggtcagaggggtacaagaggcagagaacagggagggagacaaggcttacttcctaagcgattgtatagaaagtcctggctcgtccgaattctgggcct

SEQ ID NO: 141578 - DNA, 475 bp, Homo Sapiens
  misc_feature (159)..(186): n is a, c, g, or t
atatcttttcatttggtgactctagcctacctttctccattctttctccttactttatccactcagtgtctcctccctccattcaggagcccagctcttctttttcttttcgctccctcaaacctgttgcaagcagcccgagtctgtgcacaagtcttnnnnnnnnnnnnnnnnnnnnnnnnnnnnatatgttttgggggagaggtaaggaaaagaaaaaagagcttttgctccatgcaagtaggaaaaaaaagataattaataatgaactgaacatcataattggcttctccatcacaagctaatgggctgcatctcttctgactctctttgtgtattcattggaggagctctaaattcacaggacaatgaagacaaacaaggaaataatagactatagacagtgacaaggaaaccagggaacctgtctcaatgtggtcatgctgaactattttcagagcttaaacggactgac

SEQ ID NO: 141579 - DNA, 730 bp, Homo Sapiens
ttccttcttattttggcatttgatatcagcagcctctccccaaagaacttgaagtcagttttagatgctttattttatttttctagtcaaaaacgtgtttcccccagtgtttgaaaactcgtccgaatcttttcagtattttccatgagtattgtggtacttctagacttgtttaagcccagaactcattccttcaaaacagagagccttaatctttatgttgggacacagaccacatatttggacggcagccatgcatccatcgctgaagggctgtggacatgaatgtgtatttcccatggtctccgctgcccacaccaacagtgtggcatttcataagttagctgctaccctaaggtaatctaagattaaaatgtagacatttatttttgttatgtaagtttataagatgttttatgttcaatgcctaatttctcgaaagtgccagaaaaaaatgtatattagctattttgattttatgtacaatgatttatactctccttttgaaaagataccataaagcacataagctagatcactacaaggagctgttatcttttttctaatcaagtgtttaaaacactgatggtttttaaagactcccctttttaaatggtacttggagctcctgattcaaattacctagaccccctagagaaataaatggaatatacgggaataatcatttttagaggtttatcgtcggcaatattgcaatatttgaaatggt

SEQ ID NO: 141580 - DNA, 248 bp, Homo Sapiens
tttagaggaagaggagggcttagagtcaggaggaggctgggagggggtgggttttgcagggaagtgggtgtgacctgtgaatgtgctgggcccatctagggcccaactcttggtgttgctaaggtattgttggacagttctgggaagcagcagcaaatgctctctttgggtggtgtcttgggagatggatctgtgcaggtgtcggagggctggagtctgtggaggttctctgggtgtggagggcagca

SEQ ID NO: 141581 - DNA, 444 bp, Homo Sapiens
tttggaagtaatgtctgtttattgatagaaaacaggccacgtccagagaggcccagggccaaaacctccttctggaaggccgaagtcccacagtgccggggagcgcaggagtcagctcggctccgtcttgccagggctggggggaccctcatcctcacccgcttccggagctgcagtggatgtgggggcccctgcagcctccagaaccagttccagggccccctcgcccgccacacggtgcacctgctcgcctctggccgtcaggatctcttcgatatttctcttcccattcaggtccgagaaccagcccaggttgtcagcgatgatatggtggttctggcagccggggcaggtcacaatgaccacgccttggtgataggccagcttggagatgcgcttggaggacctagtcccgcagaccttgcaggtgtagacgagctggta

SEQ ID NO: 141582 - DNA, 884 bp, Homo Sapiens
  misc_feature (167)..(243): n is a, c, g, or t
agggcgagagagtatgaagtcgacggcgcgccgaattcggcacgaggagccatcggagaccagagccgccccctctgctcgagaaaggggctcagcggcggcggaagcggagggggaccaccgtggagagcgcggtcccagcccggccactgcggatccctgaaacnnnnnnnnnnnnnnnnnnnnnnnnnnnnnnnnnnnnnnnnnnnnnnnnnnnnnnnnnnnnnnnnnnnnnnnnnnnnngttcaagcgattctcctgcctcaagcctcctgagtaactgggactacagaaagctcctgctgcttctgtaccccgcctgtccctcccagctgcgcagggccccttcgtgggatcatcagcccgaagacagggatggagaggcctctgtgctcccacctctgcagctgcctggctatgctggccctcctgtcccccctgagcctggcacagtatgacagctggccccattaccccgagtacttccagcaaccggctcctgagtatcaccagccccaggcccccgccaacgtggccaagattcagctgcgcctggctgggcagaagaggaagcacagcgagggccgggtggaggtgtactatgatggccagtggggcaccgtgtgcgatgacgacttctccatccacgctgcccacgtcgtctgccgggagctgggctacgtggaggccaagtccgggagtgccaaagaggcagtctctggctcccgactggggcaagggatcggacccatccacctcaacgagatgcagtgcacaggcaatgagaagtccattatagactgcaagttcaatgccgagtctcagggctgcaaccacgaggaggatgctggtgtgagatgcaacacccctgccatgggcttgca

SEQ ID NO: 141583 - DNA, 1658 bp, Homo Sapiens
ggacccgtttctctccaccagcacctccactcggccctcgtagggattgcggccgccgttcaggcgcagcttcttctgcaagcccatggcaggggtgttgcatctcacaccagcatcctcctcgtggttgcagccctgagactcggcattgaacttgcagtctataatggacttctcattgcctgtgcactggatctcgttgaggtggatgggtccgatcccttgccccagtcgggagccagtgactgcctctttggcactcccaaagcccagctctctgcagaccacactggccgacaccaggtcccacttgtcgtcgcagacggtcccccactctccatttttgagcacctccacgcggccctccccgatgtaggcaccgcctctcagtcgcaccaggggttgctctggcttgtacgctttccggaatcttgagggtccgtcagggctgaagacctgcccaggcacacaactcaccacggccggtagcccattctcgcaggtgacattcttcatggggtccagtgacacctgggggcccagcttgcagctggagatgtgggcctctgtgccggtgcagtccatggagaatggccagtagcgctgcttcctccgtgaggcaaacattttgtacactttggtattgtatgtcctctccccagggaagccaaacatgccgcagaccacgcgggaattcttggccgtccagtgcttgtcacagatctgcttccaggtcttgccctccttcacctccacgtagccctccatcactggggtgcgcttgcggtaggttgagaggatggctcgaatccgaatgtcctccacctggatattcaggttctctatctggttgatcaacgaattgtcaaatttgaacccaggaatccttttgtcgctgcacaccacaccgacatcctccgtgtgcttgcagtcagtgacgccccagccattggaggtgcatgctgcaagggtcgcctcgttgccagtacagtggagattgtctaaccagatgggcccttctcccttgccgtaggaggagctggcagtccaggacttggcctccacgtagcccagctcccggcagacgacgtgggcagcgtggatggagaagtcgtcatcgcacacggtgccccactggccatcatagtacacctccacccggccctcgctgtgcttcctcttctgcccagccaggcgcagctgaatcttggccacgttggcgggggcctggggctggtgatactcaggagccggttgctggaagtactcggggtaatggggccagctgtcatactgtgccaggctcaggggggacaggagggccagcatagccaggcagctgcagaggtgggagcacagaggcctctccatccctgtcttcgggctgatgatcccacgaaggggccctgcgcagctgggagggacaggcggggtacagaagcagcaggagctttttggtttcagggatccgcagtggccgggctgggaccgcgctctccacggtggtccccctccgcttccgccgccgctgagcccctttctcgagcagagggggcggctctggtctccgatggctggagaaagcaagcaccaagcgtaggtagccgcgcgcctcgtgccgaattcggcgcgccgtgacttcatactctctcccccct

SEQ ID NO: 141584 - DNA, 909 bp, Homo Sapiens
  misc_feature (49)..(49): n is a, c, g, or t
  misc_feature (143)..(143): n is a, c, g, or t
  misc_feature (155)..(155): n is a, c, g, or t
tgttctccagagcaactccagcagcgatctgcgtcagtgtacaattgtncagtcgcctctcactcagtagcctctcatgggtgcgctgcgtagtgagagatgctcgatcggatgtctccactgatattcagttctctatctgntgatcaacgaantgtcaaattgaacccaggatccttttgtcgctgcacaccacaccgacatcctccgtgtgcttgcagtcagtgacgccccagccattggaggtgcatgctgcaagggtcgcctcgttgccagtacagtggagattgtctaaccagatgggcccttctcccttgccgtaggaggagctggcagtccaggacttggcctccacgtagcccagctcccggcagacgacgtgggcagcgtggatggagaagtcgtcatcgcacacggtgccccactggccatcatagtacacctccacccggccctcgctgtgcttcctcttctgcccagccaggcgcagctgaatcttggccacgttggcgggggcctggggctggtgatactcaggagccggttgctggaagtactcggggtaatggggccagctgtcatactgtgccaggctcaggggggacaggagggccagcatagccaggcagctgcagaggtgggagcacagaggcctctccatccctgtcttcgggctgatgatcccacgaaggggccctgcgcagctgggagggacaggcggggtacagaagcagcaggagctttttggtttcagggatccgcagtggccgggctgggaccgcgctctccacggtggtccccctccgcttccgccgccgctgagcccctttctcgagcagagggggcggctctggtctccgatggccctcgtgccgaattcggcgcgccgtcgacttcatactctctccc

SEQ ID NO: 141585 - DNA, 474 bp, Homo Sapiens
tctttttttacacaccaaaaatatgtgtatttattattattaataaaaaaagtaatacaacatggaagaaatcggaaaatagaagatctatcacttgggaagattttctcaaacacagatgcatgggattaggaaaaggaaagctcaaatgagatgagctgggatcttggaatgtcctcattcagtgagcccagtgaagacggagaagatgaccttctcagcagatgacctgtgagccaaccttatgaagaatgagcagatggagtcctgggtcctgcatcactgggtttggggcattccctggaatccaggacagccactgcctaagcatccgccaggacccctaacagccccattgactgtttctcatcaaaaccagctgaatttttcaaggtacctgaagcatcagtttcttcaagtcattgagttctttcttccccaagggggaagtgatgtcttcttaaaaaatgctga

SEQ ID NO: 141586 - DNA, 426 bp, Homo Sapiens
ttttttcctcatttttttattcagtccgatataagtatttgtgttgcaccggatcttgagttagcaatctcatgagcccgtatgctcttgaaatgaaaatagttctgtaaatcctgacccagcccactggtatggtctgagagtgtctcagaatgcatcagaagcctgaacccaagctctgttctttgaggtgtcaatagtttgaagtatacggtacagtccttttctgtggggcttttgaggtggttctttgtcggagacacaaacccagacctgtagctgatagcagaatcaggagaagccaagtggggtggtattccaggggcttgagagcagcgaccaatgtgtggtgttgtccctcttataggtggatgactcagatccagcaggccgatccttcaccaagagccagggcaagaattcaag

SEQ ID NO: 141587 - DNA, 509 bp, Homo Sapiens
tttaaagtatttcaatgtgtattttatttttgtaataatgaatctaatattctgtaatatcctttggtttgttatatatcattcaaacatcattcattccattcacttaaagcatcatcttcaccaggcatttctgttggtaattggtcaagagaagttgaatctttgtatctcacagaactctgctcggattgtacctcaggtgtagaggcttttgccccccagaaagccttgactgctgcccgtgtaaaattgtaaaagttgcatttaaaagctctctcatagttggagaagcaagtcatgagattgttttaaaaagcatctacataaagagacggggcagcctgaactagggcagtcacaggagtaatgaaaggcgatggacagtttcaaggcaacatgtaggagacatcacggacagggctttgcaattcacactgctcgtatagactgtgaatttaatagttgctactatttcattattatccagtgtgtcacactcgaaagcc

SEQ ID NO: 141588 - DNA, 640 bp, Homo Sapiens
tttttcatgtggctgccactaaggggtaagtttatagatgattttaattttctttttaatattttccatagtttttaaaaacaggcctaattacatttatttaaacacaaagaacgtgaagtaacctgttatttaagaacatggacaaattccagtcaagaatatcctctagaagcttgagaggtgggaaaagtagtttgggggatttatttgctctctcaaggtgatgaaaagaaaaatatctgaatcaaagagtctgagttatggaattctctgcttctggggttctagtgcagccccgttggtctggaattcaggaaaaaagatacaaggcataaaatcccacagaaagttacacagttgcaacagaacatttagcatttattgcttgttcttctaattaaacctctaattcaactcactaggcccttgcctgctagctttagtgagtaaagttgagaccatgtgactggacttagcttgatttaatgtcatgttcattgaggagaatggttggacttttttttaaaaaacatgagcataggaaatatctgaagtcacttttaacactagtctgaacatgtaggataaaggaatgtgtgttactgaattgggatttccaatagatatttaacccaat

SEQ ID NO: 141589 - DNA, 509 bp, Homo Sapiens
  misc_feature (494)..(494): n is a, c, g, or t
tttagtgcatgaacaaaactttatttggtaaacctttaagtcttttccccaaagagcagcacaccattgggaaatactagatgtattctgcagttgattagctggtttaattcacctgtggtaactagaggtacaaactgcatgatgtttcaaatgatgcctggtgtagttcagagtcctctggatcttcaccttttgctattaaaaaaaattaagatttgacgctcaatatgatgcagcttaattgactacctgatatcaaaacaacttgccaaaaaaacaggtgtttcctaaagcagatgcaaggggagacaaaaacatagctgttgtgatcctatattgaagcactgttggcttctcacatggaggcagaagagacaagaagtgccatttcatcttatttcagatttaaatgtcaacaatttcacatctactattcttgcaaaagccttgaactccacttcttaatacctaaagccaagaccaatgacttnctcagtaggctaggc

SEQ ID NO: 141590 - DNA, 533 bp, Homo Sapiens
tttttgtgtagcacagaatgcagtatgtattgaaacgtataaaccttgtctgactggggagatgggtgagcaaagagctgccgggacccaggtcctctagtcggttgcaggctctgccgatgtctcatccttaagctcctcaaaacctgggactggcttctgtagaaagtatgtagtggcctggatcaccttgtctggtccaatgttgtacactgggtgagtgggctgcagagcgttttcgggcacacccaggaccacatcatgcaacatggctccgctgccgaagtgctgggctatggacaggccgctcaggcagtagcaggtgtggtagaaatcacgcgacttgccaggtttatccagaagcccccccgcagggcactggcagcacatcaggatgtactcctgcagggcctgctgatggaacatccagtggctcatgctaagggcagggtcacctgttgaagggcaaagggtcagtaagggcccggcagatccagccaagtatcaatgacctaattccactttctcacctg

SEQ ID NO: 141591 - DNA, 1933 bp, Homo Sapiens
gcgccctgacacgtcgccgccgaactctcgggagcccagggtccccggttccaagcggcgaggggcccggcacccccggtcaggacctggggccaaccgactgcgacaatgacccccacgggcaccagtcgggacgaagggcgtccagtggaacaacaggctctgagccgtataccagaggcatcatctcggggatcgtcctgctgggagactgtgaggagggacgctcctcctgcatgcactgtccaccaaccacacccacgtggctgatagattttgttttgacagtgtggaaaggatttttaaaaccagccactgtgttctccaaacccagagccattggttttgtttgacaaggaagtaccacagagaaccacagctccactgaggttaaggcttgtgtagcacagaatgcagtatgtattgaaacgtataaaccttgtctgactggggagatgggtgatgcaaagagctgccgggacccaggtcctctagtcggttgcaggctctgccgatgtctcatccttaagctcctcaaaacctgggactggcttctgtagaaagtatgtagtggcctggatcaccttgtctggtccaatgttgtacactgggtgagtgggctgcagagcgttttcgggcacacccaggaccacatcatgcaacatggctccgctgccgaagtgctgggctatggacaggccgctcaggcagtagcaggtgtggtagaaatcacgcgacttgccaggtttatccagaagcccccccgcagggcactggcagcacatcaggatgtactcctgcagggcctgctgatggaacatccagtggctcatgctaagggcagggtcaccttgggcgtgcagtgcgcggtggagcaggggcaggagccccgcctgccagaaggagtagcagccatccaccagcttgttgcagcggccctgaaatcctccttcaaatcgcatctgccggcttgtcacccattgtaataagctcttcaagttcaaggaacgttccctcttgaggattaccagcgcggccaggccacagaaggtatagccaccatgggcttccatccctggtaccccgccaatgccaccttcccagttctgacaccttgctatccattcagcagtgccctcaaagaggtctggagtgatgatgttggtcagcgaggctacggaggcagcacagtatgcgcttctcacatccacctcacttccgacatgcatgagaaaggagccgtcaggttgcttcagggagtacaaatactgaagaagcttctctctgttaatgatgtcataggcctcctcggtgccaatgatgcacaatgcattgactgctgcatatgtgggtgcaaggtgtggatactgaccgggtcctcctccaaagccaccttctgggctctgacacagctccaggaactgacacacatctgtagccactatctgggggatgggttcatctagcagttccaagctgtgcaggatccaatagcagagccatgggcggctggcatccagacactcataggcatctgtcagttgtcgaaggcctcttttcagataatggaagtgcttctccctctgcaaaacaagccttggtacaaggtggttgaacttgtaagaactgaagacctcttggatcttttcttctacttttgcctgttctatggacgtgactgtttccaccgagtcgtcctgcaaccgctctcgcgcgtgctcgggcctcagactgtacagcggctctgaccagacgggggaggaagatggagggcaatagtaggtgaaagaactcggagaagccatgatcaggagagcagcagacagtgtgtaggactctgcttccggacgcgtgggtcgacgatatcccgggaattccggaccggtaccatcttgcttaggaggcgtggggccgcgggaagggaggggcgggg

SEQ ID NO: 141592 - DNA, 438 bp, Homo Sapiens
gaatctgtagtactgtcactgcaaccatacgctctagaaatatattgctttagagaaaaagcagcaaggccaaataaattgatacagaagaaatgtttagatatgtttttgcaagtttctgcatatctgaaatagaaccaatacatcacatggaaagccaatggctgtgttttgagtttatggagagccatatgtggcaaggaactgagggtggcatccaggcaacagacttcaagaaactgaggctgtcagtccaacaacccacaagaactgaatttgaccaacaatcacaggaacaaacttagaagtatactctttcccagacaaaccttcagatgagaccacagccccagccataagcttgaaaacaatctcatgagggaccttgaaccacaggcatgtagtaaagctatgccaggaatcctgcctgccccacag

SEQ ID NO: 141593 - DNA, 585 bp, Homo Sapiens
tttttggcttaaaacaataaaaatttattttttttacattttctgtggggcaggcaggattcctggcatagctttactacatgcctgtggctcaaggtccctcatgagattgttttcaagcttatggctggggctgtggtctcatctgaaggtttgtctgggaaagagtatacttctaagtttgttcctgtgattgttggtcagattcagttcttgtgggttgttggactgacagcctcagtttcttgaagtctgttgcctggatgccaccctcagttccttgccacatatggctctccataaactcaaaacacagccattggctttccaagttgatttcctattttgttaggtattgctagatgtacaacctttttaaaatgcctgtgacttccttttatacctctttgaaccatactgtgccaccgaactgcaggaaatgctgcccttgttgtttttcactggtcatattgccacacctagcaaattagacttaccaggactcaggtgcttttattcagtgtggaaataacacattaggcaggacaaagcctctggcctcctgacgttatattcttgtttcag

SEQ ID NO: 141594 - DNA, 564 bp, Homo Sapiens
tttgtgtttggaatcagtctgatttcagctagtcatggctgctggtgggtgcctccttcttcttgccttctttccattgtctagagggagccatttccacttgcagaagcgagcccttgcagaggcatcttttgaagcaactctgtgtgagttgtttgtcatagaaactgctagcaagggaactctgctaataataactattaggcacctagtaacctatattatagtaatatttaagtgccatatgcttaaaaatgaaatgaattcaagtataaaacctcatttccagtgatacatattttttatccagaagaattgaacttgataaacttgtctaaagtggaaggacaatctaactggacattgtttttaaggtcatagtctttaaggtcaaattaagtatgagactcaagttcagtgatttcttccttcctcactgcttccttctccctttcccatcttgacttctggaatagcccttgccaaataccagggatcatactgcataaactagattttcagtgtctgcatgttttctagataacatctcctttaaagcattgg

SEQ ID NO: 141595 - DNA, 512 bp, Homo Sapiens
ttttccatggttcaaagttaagcttttattcgcttttaaattaaaaaaataaatttcattattaaatagtgagatggatctaactaatgttcagatagtagcttactcagaaatataccatcgggggtacaattaaggggtggatcacctaaactcaaattatttatgttgtagtgtttgttaaaagttcagcagtggcataattcaaaagaaactgaaatacaaagtttcaaatgtttacaatggatgggagaagtaaaccacttatttctactgcaatcgcaaactactttctttctttctcaatgacagtcagtttggacactataccacagtgctaatatcatcaggttcatctgctttcttctgcctgcttggcagggatttcaagtattcgaggtgtctccgggcatcctcctgattttgcctcacataatataccacatatgagatcaccatagtgaaccagccaaacatggtgaccagcatggcataatcggtagtttttttag

SEQ ID NO: 141596 - DNA, 455 bp, Homo Sapiens
tttttggattctctctatttatagtaaattatttttattttcttatgcatatcgtttttcatagtcccaccttgaacactcaaactttcacaggaatctggacgctgctcagccggctgttgactgggaggaacgattggtgggctcaacatatttaaccagtcccggggattagaaggagaaggtgggttcatttctttctgatagtggcgaccctggttgacagggggtggcaggcaggagttccaggtggttgtgtcgtcactgctggtacttatgctgacattacagttgtccacctgggaggcactcaggccatgggaggtcccagcatcctccagttcttcattttgttgccaccgtagcgttgctagcatctgtaactcggattcactcatctggcttggctgatagtttcgccagtcatattcagatgcttcggggatcgagctcag

SEQ ID NO: 141597 - DNA, 776 bp, Homo Sapiens
tacgcaacaaaaatatgtttaatgtggagaacagtgagatgcatatttgataattcactgcagtctgcatcatcatctctatattccaaaatttcgtcttaagccgtttagtatttaacttacagaagaaagggggttatcttagataacttttaatatcctaaggtattttccaattcacgatacagggagaaaagaaatgtgtccaggcccttagaagaaaatactttgaatttaaatgtgacacatacattaaacccgcgtgacacgccaggcaggcggtggaagtcaagtgcatttgtttttgtttcatccaccagggcgatctctttcacaattctgggagaggcctgtttgttcctccactcccacagctgaagtttgggacaaagtttgagaaaatcccaggcacctgcggctcctatcgaagccggcgaggagcacagggtagagcgtctcttcccagttttcagtcttcagatcgcaggcctctcggacccgcagagcgagcttcacgctgcagcgcttgagaaataagagctattccaaggaggggccctgggtcctcactgacgcttcgcaaaggtgtacgtccgcccagggaaggccggcggcgcagcgacggcgaggagtccccatccatcttctcttcaagcagcagtagctgggttcgggtacccaaccgacgagccgagacgccagaggccagagtacgaagttggaagcctgcgccccaagccaaccgggattccacttagctccgcgcggtccgcccc

SEQ ID NO: 141598 - DNA, 461 bp, Homo Sapiens
tcgtaccatactgatgacttaatattcttaagagaattggtgactattgatagcagaaaagatcccttgtttttaattttttgagaatttgaaaatgtatttgaattaactgcctgtcgtagtgaataatggaaccatgaatgcatgcttcatgtgtatggaatagttgttgatagccagagctggaaatgccacccagtgtgaataacagtcacattcacacttccctgcccccttgtttaatgtttccctctttgtagttttcctggaattttttagtcaacctcatgaatgatgtataaagtgctgtgtgacctttcaagatattttaatattcatgtgaggtatgcaacttccatttgagtaaccagagagctatctctagtcatgtgatagaaacctggccttggtgcttcctttccagactttgtgccactcctggtcctctcccacgggagcgg

SEQ ID NO: 141599 - DNA, 500 bp, Homo Sapiens
ttctcaagaattaagtattgttttatcctagatgtctttattgtaggttccctttggtacctgcatttactcttattgacttggtaagaaaatgcttgtttgggaggattccaaatctgttaaatccatatgctggctcactttcatttcaacagccaggtgcttcggcagtatggcattaatatacataaaaagagggaggcaaacttatgtctcacagattgaatcttttttactaactttggaagactctcttggccagcttggtttgttcctttgaatcatgaatacgataaactgcagagggaaaaatatgatcaatatgtatcaatagggctgctcggccttgtagatttcacgtatattttgtgacctccccataacacatcatcattggaggctgcatatctgcaaggtacacacaaaataggctgcatctcatctgctttcagtcaccacagcaccgtgtatgtttagtacagccacaatttttataaacg

SEQ ID NO: 141600 - DNA, 867 bp, Homo Sapiens
  misc_feature (793)..(827): n is a, c, g, or t
ttttaaatgttggttaaataagtaaatttattgcatgtttccttattcaagcaccactcagcaatgtaataaatgacaaatgaattcagtaagctttacagagtttgcagaaattcttgccattgggccttttctcgtgctgacccttgctaacaccaagtgtttaacaataaaatggaaaacatctttagggggtttagttaacgaaacccaagtaaacacctttttagtgattaaccttaatacaagaaaatctcaactactcatgaagtgtacagaaaacatgtaccattgaatgtctttctcaaatattaagtttttcacaggagctggacaatggtccattcaaggctggaggatttatgctcctgaagaatacttgtgctgtggctatcaaatgcacaggtgacaacactgacattgttttgaaggttaagaaattgaaagcaatttcttctggtggaaaaaaatattttcttcaggatacaagttttaggctcgtccaagagcttaaataacccccagctgactattataaagtaatatagaaattattttagaccagacaaatgctaaacatggtttattaccagtttgaaccttcaccatagaaaaaccttgaaatcactcttgtggatttttagtggcattgtcagatggtgagtagtgagtttcaagagataaagctggggccagaacgtagaaggctgtgaatgccatctaagggattcgaactttatttcccggccgtaatggccgaattcccgggcatatgtccggtaccgtcgactgnnnnnnnnnnnnnnnnnnnnnnnnnnnnnnnnnnncgccgcttcctcgctcacaactcgcgcgctcgtcgttcgc

SEQ ID NO: 141601 - DNA, 1761 bp, Homo Sapiens
  misc_feature (51)..(60): n is a, c, g, or t
  misc_feature (839)..(839): n is a, c, g, or t
tttgtcagtcgtcccacggacggctttattttatagtcaagttacttattnnnnnnnnnncacattttggccattttttttacagtgaacaattctatatacacattataaacattgtttgatataaaacagtatctacaatctacttacatttaattaacctgtgacttctagttcatctgcgattaactttagtcaggtcagtttctctgcttgaattgggaggtactatccccttaacaccttggtcaaacaggtactaagtgatagtgcaaaacaagcatttaagattctcatcaaccatatctctgacaaaaagaacacacatctctgagacaagagctctgaaatgtttttggatttgagacagcagtataagaatgtcatataaaagtaaagaatgttttccttttaaaatactccaaggctgcctgaaatgtaggcacctctggatttggggtacccctttgcctttccattaagtgggagataaacagattacagaaaagtcgttcaagaaggtcctattaaaacctttaaagctataacttaaaaatttaacaaaaagttcaaaattaattttttataaatagtgaaaaccactaactgtttttttaaagggggaagaatttaatcactataatgtcactttatcaaaacaacctaagagcagtacataaactatttgttaagtcaaaattaaggtctccatgtaggtttgttaattgagcagtgcaccaaatatttttaggtttccagaataccagagaattgattccctttcttatatagccttccagttcttctatgaaagattttctgtagcaaaacattattcnctaaatccagttttctgaacatgccaatgccaggggtcatcatccagcattaaaatagcttttatcgccctcaatgtccacttcctgatcagaatcctctgaaatctctgattcaaggtcttcctgggaggcaggggagggcgaacattgagagctatccaaagaagcacctttattctgttcactgggcaaatcttgcctctgatcacaggaactgtccaaactttccagttcttcttttttattgctttgagggttctcctgttttagtctcctccatttagcgcgtcgattctgaaaccaggttttgacctgtctctcgctgagctgcagcatcttggccagacgcttcctctcgggcggagagagatatttctgcgtctcgaatttcttctccagctcgatggtctggtcgttggagaatctcacctggccgcctttccttttatgcagaggcctctgcaagaaggggctccagagtagaggtttgcccagggggtcgtggcggagcagggcgtgcgtgtagtcgttcaccgtccgcgggaaggggtacagagggcccccgaagccgccgggtccgtaggcagcggccagcgcggcggcggagtggtgcgagaaggctggatggatcggcgtgtggctcgtacatccggggtccggtaggggtatcacgaggtctgttgaaggaggagttgcggggacggcagcgtgggggcgtggcgtgggcgcggcgggcccgcggcccaggatgtcctcgatgtaaaagggcgtcgggtgtgcgggttgcagcagcggcgtgggcgcgtacagcggcacccccacggcgcccgccgccggcccggggtgcgggtactgcatggctccgccgcgctccggcccctcgcagagctgctggcccgcgccatcccgggaattccggacc

SEQ ID NO: 141602 - DNA, 822 bp, Homo Sapiens
ctttataattctttaacttctctggagaatccacaatttttgttttcaaactctcttgtatttctttcaaagaaaccaccgacaattttagttcattcaaacgcttggttttctctgaaatatttgacttcttttgggaatttccctcttgcagcactatcgttttttgatgaaaatcctgatttagtgattgttgtagctcctgaataccatctgaaagctgcttgaactcttcttgctcttcaactggaacagaatcaagtctctccagtttcattaatgcctcctggtgtgcggcgtttaactgttgcattttgtccgcagaggatttatattgccaaagaaattccatatacgtttcacggcatgcttctctgaagtgaataaagttgataatgccacttaaaaaccgacttgtccgttttgcttttggacatagaatatcagcagtctcaaagtcattcacccggcagataggcaaaaatgagtccagatgagtaactaaattgctgaatggtaagaagccttccattaaatgtggatacatgacttcagagttcactggcatcatgtaaaaatgttccagtcgaattccatatactatttgtaaggctctcatgtagatcatgtgcaagacttcaggctttggatttggataaagatcattcttggtgaggtttttaccatcagctcctgttaagatcttattgcgaatatgaatcacaatctcagctacattatatctggggaaagacaaagtttccatcttggaagtttcctgttaatctcccaggctctggtttcttccgcctcctccccccc

SEQ ID NO: 141603 - DNA, 571 bp, Homo Sapiens
tttagggaacgacccacggagtttttattctcaaaaataccaaacaaaacttgcagggtcctttgtgtggtggagggaggcagctgctgtggatgagtcatggaaaggccatgtgcaagggaaaaaccttgaggttatctccggagaggggttggttgtaaacatcctcaatggcacctttgttttatcccactagttgccaaatacctgtgattctgcacagcgctcctggaatgctcaaaaattatgactggttactctgtcaaagaaagtctttgttgtaaaaacttcctcatttgttcaggcctttgggttctaagccctgagccatagtctcccccggttgtttgcctgtgtgggctagggagggtgactgatgttcaccgtggggtgaccaccttgtcctggtttggcagctgccttcctgcctttagcagtgacagtaaagcaaacccaggcggttggtcatctcggtgcactgagctgtacacaccagggacagtgctggatcctcacgcaggttcaatgagctgggcgatttgaggtggtagatgccgtcttcaccctcgtg

SEQ ID NO: 141604 - DNA, 1389 bp, Homo Sapiens
  misc_feature (134)..(192): n is a, c, g, or t
  misc_feature (751)..(751): n is a, c, g, or t
  misc_feature (1016)..(1016): n is a, c, g, or t
  misc_feature (1026)..(1026): n is a, c, g, or t
  misc_feature (1060)..(1061): n is a, c, g, or t
  misc_feature (1074)..(1074): n is a, c, g, or t
  misc_feature (1140)..(1141): n is a, c, g, or t
  misc_feature (1146)..(1146): n is a, c, g, or t
  misc_feature (1153)..(1153): n is a, c, g, or t
ttttcatggagaaaatatttattagatttcaaattatcgcagaatacagatattacacaattagtcattctagaaaaaaatagtttatattaatattcataaacactgaaaaatataggacttcattttgtgannnnnnnnnnnnnnnnnnnnnnnnnnnnnnnnnnnnnnnnnnnnnnnnnnnnnnnnnnntcagttcacaataatatacaaaaagtttcacttttaaataaatagcttgtagtggcatgaggtgactagaaatgcacttacatttccttttgcatattttaaggaacagagctaaaattcaatcaaagcatgagattaagagattaaatcacttttcatcttcaaagctgaaacaaaaagcttataatctcacaggccacacaaagcggtttctactgtggttcaaagagttcaactaacttaatttccaagcaaatatcatttttagttccttcagttcttcctaaaacgatggacagttgttttttttaatttatatgtgtttgtacattacttgtcttattaacatttactaaaaacaagtcgggagtaaaagctgtaatcacttatgggaattcaaagctctctggggaaatttcagttcaaattgaacctttaaacttacttttaaatactatacttaacaaaaatttatttataattaatgagaaaaaaatacagatagccaagaaagactaagtgcaggttatgctttagcaaatgtggcttctaaaacttnttgagatttcctaaaacattttagctgcttccatattaataactctagaatgtctattcttaaaatgtataccaaatttaacaaactggcaacattaggtgactttaaaaacattctttaatagcttttgactgaccagttaatagataccaaagaaagaaacagaaacattttgataactacttcaatcaattaattgacagcttggataaataactattttgcaacacttattccttcacacctacaggcttattctgaatanctttaaaagnttgccgtttgcttgcttcctgtttaaactactgnnttttgtgacagtngaccaaactgttagaaaatgccgtgtcacgtaattgataatatagaagttaaccgctgcaagtttnnaagcnaggtatngtattactttagaagacagaccaagctacttacatctcaaaagatatttcttctacttctctattagaaactttgttgatttgacaattataataagcctcaagaccagcgaagatgagctaaaagagtatatcctaatattaaaagcagttttcgaataattaagaagttcaccctttatttactcccggccgtaatggccgaattcccgggcatatgtccggtaccgtcgactg

SEQ ID NO: 141605 - DNA, 429 bp, Homo Sapiens
atatgaacgaccctaaaaagctaaagaatgtttccatttttggaaaaagttcttttcgagagctgtttatttttctttatcagccaaaaagtatgattactatgttaatgcaggttttgcttcatcaagagattttccagttattgaacttaaataacattgttctaaaccccaaatcctctaaattcctgttgtcagtgaaagaggtaccttctaatttggaaagaatatctagttcagttctgatttcaaaccagcagagaaaaataagaaaaatgttgctcctgccatatggagaatgaccatcatttaaggaaagaaaagttggttgagagtttttgggaagtaactgttttgtacttcctttaatgtactcagtgtccagagcaggaactgggtggttagaacagctgcaatatgattccactg

SEQ ID NO: 141606 - DNA, 1082 bp, Homo Sapiens
tttgactttcaccaatgggtttatttaaaaggaagcaaatttaacaaaactatggtgataacagcagatgtctagttataattcatttctctaatgctgattaatatattcatgaacaaatcaaatgtattgccaaaagaagaatgctaccattaacaccccagcggctactggtttcagttgtgcttctcaatcaggcaaaatgttctttcttaagctcctatttattttacttcctgacagtctcaaaaataattcatcttgggtgttgtttcctcataaacacttcctggtgcttgattgctttgcctatgtgacatttgacttcaaactgccattttacctttataaacatttggaactttctaagcatgaggagaatgcccaaaaggcatacaaaaataaggctgtaattagatcggcagagtatgttttaaggcatatctagctttctgtgaataccagaaacctctcttttcatccaatattgcattcccaattggggtgcagaaagtaaattaacatctggagactccagcaaagaggctctggtaacagcatgtttaatttattattattgcaaaagaacagtttttctcatgattagtgaaatagaaaactcacaatatacttaagagtctgcccccaaaccattacaaaggggttgagagaagagagaagcagaaaccaaaagagaaacagaagtaataatcagttatcacatgatttttatagtaaacaatagaatatgatgtgcaatagtgcaattttcctttgctagtccagcaatgcaagtaagtcttaataggaagtccactgtgttactttttgtatttcgggatttagttgcgtgcttgccgggggttcgagttcctgccagacttctgactctgagtggaatcactattgctagaatcacttttactgagtccaagatgacgaagcttcatatcccagcgcttaacttttttaccgagtcgatccttccacttctcagctatagagccttccaccaagagtaatctggaacgttcctcatcttcatagcccatgatgatatattcctcattaacattaagtgg

SEQ ID NO: 141607 - DNA, 452 bp, Homo Sapiens
ttttttcacatttttgctaatctggtttaatttagaagtggattattctatttggaggaacactctcagccaaaattttgctagatagatgtttcttggccagtttaaatgtcttagtagatagttgaacagggggaatgaataatgtgtggtaacacaaatgaagtagattcaaaaatgagctcagacaccaaatatactctcatcctacttggcttagaggtgaactagactcctcagcgatgggaggcagggtcaagacaagcaacaaggagcttcttccaatacagagaggttgacatctttactaaatttcctctattcatttggtggagtggtgttaactgtttttctttgttttgtaactcctaaaatgtagggatgcacagttatgtttagtgctttatagttcacaaaccttgtcacatttcttagttgacctttatgaaaat

SEQ ID NO: 141608 - DNA, 459 bp, Homo Sapiens
tttggcagaggaataactgatgttcacaataccccgacgcctgacccagtacctttccctcaggcccaggctccggtggaggtgtcctgggcaggccactgcccccaaggcccactcggcccgctcagggctttgcagacagtgcccaggcccacccaagggcccccgttgtaggctgcaggggaggcctgggctgaggccgtcccctccggcgggtactttgactcccctgtcgccccactcccagatcctgggcgctgggggccatcgcgctgctgttcctgctgggcctcacctgggctttcggcctcctcttcatcaacaaggagtcggtggtcatggcctatctcttcaccaccttcaacgccttccagggggtcttcatcttcgtctttcactgcgccttacagaagaaggtgaggtcgaggcggggtcctgggtcacagcctcccttggaga

SEQ ID NO: 141609 - DNA, 312 bp, Homo Sapiens
tttctagaaatctaaataatttaatgttctttacaaatattggcagatttgcacctatgattttaaagttagagatggtcttcaagcactacacattttgaagccttgagattaatcactgattgttggaggtgggatcccaagacctgtctcttctttgctttgataggccttggagatgacttagttgttgagttcagtacctgtgtctgttctaccgtgcactgaatgttactgacttgtacagaaatcatgctcaaggtttggtgtccacactgattgtctctttgcgttgagacgttataccttgac

SEQ ID NO: 141610 - DNA, 711 bp, Homo Sapiens
tttgactttttaaacagctttattaagatataattgacataccatgcagttgatagggtggtgcaatcgccaccacaatctaattttaaactatgtttatggtgctacgagaaagcctatacccatgagcagtcattttctattccccacccccaaacccactccttagccctaggcaaccacttatctactttctcagaccgttaactttagcataggtataagtcgatcacagagcctcaaaatccacccgatatctgggccatgatgtgaaatttggtaggtaatcgtcccacgttttcaatttgtaacatagaaatggaggggggagggactcacaaccgctagtagcgtttgtgaaaagtacctggtaacaggctgtgctggaggggaattcagcccccataaaagatcacggattaggaattacgtaagcataggtctcgggcccttttatcttggacgcgatccttccacgggatcgcctccggatggatgtggcgctgggagccacgcggaaaacctcaagagtcagaaacaggcgttaaaggcaggcggcattttccaaaccagttgggtctcgggcgctgccgggcggtagcgtctcccggagtcgcgcgcgcatgacgtagagggcgcgcgatgacgcgacgcgcggcgcggtgcacgctgggatatttaagtctcctccgcggcgcggagccgcgatgt

SEQ ID NO: 141611 - DNA, 497 bp, Homo Sapiens
  misc_feature (467)..(467): n is a, c, g, or t
  misc_feature (475)..(475): n is a, c, g, or t
gaagttcctataacttcagttcctttatttaagtttgaggttgtacatgtcttagtatgcttatttgattacagttagtctccccgctagactgtgagtgccctaaaggcaggaaccttgcccatcccctttaccactagcaccgatcaaaatgcctggcacagggaggcgcaatgaacagctgttgaacgagtgacttccaaatcgacagcaaagggggcggctggatagcgagtcgcccgctcaggagagattctgggtcggaaataaagatctgggagtcatttataattccaaccagacgagtagatgggctggcccaagcggtgtgtagactgaagagattctaactcatgcaagataagcagctacgtggctcacggtcacgtcgcaaaaatcctgggggctctcctccgcctgcttgtggtcccgtacaaggcgccctcgtgccgcctcgtgccgaattncttggccncgagggccaaattccctatagt

SEQ ID NO: 141612 - DNA, 490 bp, Homo Sapiens
ctttgtccagagtaaggataaaattctttctactaaagcactggttctcaaactttttggtctcagaccccactcttagaaattgaggatctcaaagagctttgcttatattttgttcttttgatacttcccatactagaaattaaagcgaatacatttttaaaataaatacacatgcacacagtacattagccatgggagcaataatgtccccccacacacttcatgaagcctctggaaaactttacagtatacttgtgagagaatgagagtgaaaggggccaaataacatctgtgtagcagtattatgaaaatagcttgacctcgtggacttcctcaaagggttggtccctggatcaccctttgagaaccatacttgtcctgaagtattggagttcatgtctaacttcttcccagggcattatgtacagtgctttttattactgtggggagagggcagtgctaaataacttaatccctactgatagtc

SEQ ID NO: 141613 - DNA, 492 bp, Homo Sapiens
  misc_feature (50)..(50): n is a, c, g, or t
  misc_feature (342)..(371): n is a, c, g, or t
tttgtccagagtaaggataaaattctttctactaaagcactggttctcanactttttggtctcagaccccactcttagaaattgaggatctcaaagagctttgcttatattttgttcttttgatacttaccatactagaaattaaagcgaatacatttttataataaatacacatgcacacattacattagccatgggagcaataatgtcaccacacacacttcatgaagcctctggaaaactctacagtatacttgtgagagaatgagagtgaaagggacaaataacatctgtgtagcagtattatgaaaatagcttgacctcgtggacttcctcagaggnnnnnnnnnnnnnnnnnnnnnnnnnnnnnntacttgtcctgaagtattggagttcatgtctaacttcttcccagggcattatgtacagtgctttttattactgtggggagagggcagtgctaaataaattaatcactactgatagtcaaaa

SEQ ID NO: 141614 - DNA, 560 bp, Homo Sapiens
ttttttccaatgactcctcttttattgctgatctggggcagactcacaaaggcctgtgccagttgctgacagtgtctgtcccgcgaggccttcctcctcgttgccgggtcttctgggtgtcaaagaaagtctcgtgttcctcccagcgccggtcacaggccgcacagaggaaattagactcaaaacagccgcagcaacagccatgatgcctgcagggatggggcccagtggctgcatgttcttcgtggctgtgtttgcagcgacattgggccctccaggccttggggtcaaaggtggcccgtctcttgagccagaactcacccacctcctctgggcgtgatgggataaagcagaacatgaagcagcggcactggcttaccttgcagggcaccgatatgtctgagatgatccggtgctctctcaacaagtgtccacaaaagcatctggactcatccccaatccggaaacagtcccataggtaatgggggcagcgccagccaatgtagagacccatagtctgtcaggatctaaagcctgtctagatgtggcttttggctttg

SEQ ID NO: 141615 - DNA, 461 bp, Homo Sapiens
  misc_feature (430)..(430): n is a, c, g, or t
gtgttttacgttagtgcatgtgtaatttattgatagcagggtttgcatgcatttattctgtgaatcagctcgggctggacttcctgggaatcccaggcgaagatctcagggtctctttctgctgatggctctcccttccacgaccggtcccttcccttccctgggcttcaatttccacgttggtaaatgaaagggttaagctatttctacaatcccttccttcttgggcattgttgattcctgggaagccctgttcttccaaacagcgttgtccatgtttctctaaaccacacaccaagacagagcagagagagaacgcaccagataagatctgagctgagaaaggaatgtttcatccgtgggttttgttgtccctgttcttcttgttgatactgttgttcttggtgatgatggggggtggtaattgctngatatatttcatccctgtcttctttccaaaa

SEQ ID NO: 141616 - DNA, 1031 bp, Homo Sapiens
  misc_feature (80)..(114): n is a, c, g, or t
aagctactgacctcatataggggcctagcttagatagcgaacgacgagcgcagcgagttgagtgagcgaggaagcggcgnnnnnnnnnnnnnnnnnnnnnnnnnnnnnnnnnnncagtcgacggtaccggacatatgcccgggaattcggccattacggtccggggagcgggtgagagttcagagttcaggagcagcagcccgagccatgattcccatatgccctgtggttctttcacctatgtgcccagccggttgggggaagatgccaaaatggcgaccggcaacttctttggattcacccacagcggggcggcggcgggggcggttgcggcccaatatagccagcagccagcttcgggtgtagcctattttcatccaactacagttgctagctaccctgtccatcaggctccagtagctgctcacacagttactgctgcctatgccccagcagccgccccagttgcagttgccaggcctgctccagtagctgttgcagctgctgcaacagctgctgcttatgggggctacccccctgcacacccagcaactgactatggttatactcagaggcaccaagaagcacaacaacaacaccccagctactacacaaaatacaggattcatactcatatgtaaggtccacagctcctgctgtagcttatgatagtaagcaatactaccaacaacaacgtgcaactgctgctgtgtagcttgcgtggcccaagctcagtcttctgtgtgctgaaacttactatcagacagcccccaaagcgtggttacaggcaaggtgagttcagtatactcaagcccagcaaaatcggcaagtgaccagcataaaagcaggccaccaagtcagtaccataattctcatctatctggttctccacgtacaggcgtagccgtgggtctgggtggcctcatatccaggggggttcacgcccagcgtaattcggaagtttcgggtaacgggggttcccggttctctaagggaatagggcggggttgtttttaatggggccttaatgt

SEQ ID NO: 141617 - DNA, 713 bp, Homo Sapiens
ttttaaacattcaatatacttcattttaaactaaaaaattaacatataaaatgccatgcacagcagacaccattcttttttttacatatttacaattttacatatttacttatcaatataatttctatctttacaattataaaattattccaaactgtggaagagtggtaccatttaattttcttgaacatacactttgtagcattcatttgtttaatcctttaaaaggcaattatttaccaaaaccacagtgaatgccagaggaagcacataggaaaatcatggagggaaaaaagattgagacaaaatttgcacacaagccttaaatgaatctgtatcagtaactcaaataagtagtattttattattaactaaggttcccctgctaggaaaaacgaaacaatccccatatactgtacctttaaaaaatgctctgacatttataagcaatttagttacattctagatcccaatcagttgagtgtagtaagggctacctacaatttaggctcaaataaatactctccactaaattgtgatcatcctgcataaacttgaggttgcagtggtggaggaagtttatcattttcaacgttttcagagtcaatagctgctaacggttgattcggaggcttaatttccagtgggtatttctcaacgatgtctttgacttctcttgcaattccatctgtccaatctatgaggtctttttc

SEQ ID NO: 141618 - DNA, 568 bp, Homo Sapiens
actcctcactttattctttatttacaaaagctttcatgggtgttaaaagtgtttagtattcaccagttttactgttagcgtttctaatgaggattttctaaaactgaggcatggatttgaaaaagtgttctgatcaatcagtaacagatttggaatggaatctccagcccccagtctttgcgcccaccctctggcaatatgccgcctcacgtgagcatctttaagacggagttccctttttattccagataaaagaattaggagccttctggtagaaaagaaagcagatcttcaggatcaagtcgcagaggctggccaatcagcccagcttctcatttgaacttgacccagacagtaaaacaaactttaccataaggcgagactaacttttgttatgtcttttctattcatttcctatttctgaatcaaatctgaactactttgtggccaatatacgacaccagcttccgagtgtgggaatcacaggatttcaggattcagcggcttccggcaggatcccctaggttatgtttagcaatcttcagttgcctttccttttttctttcct

SEQ ID NO: 141619 - DNA, 1166 bp, Homo Sapiens
tttacaggtcaaaaatttattatccttagaatttgggtgaggaaggcgctgcttacaaaattcatctcctggtgatcccacaggagcaataacaagaatcacataatgataagcagtgtacatacagtagaagtccccaaagtataagttagtattggggttaaaaagtttttctgcggcaatctcaaacctgtatcttccataaggtgaatcctggggtggctttccagtattgaattcagtgctgcagctgaagaagatgccttctaattttccactgataggagagccatggctaccactgttatccttgacagatggctgcatagcattcccatgatgttctcgaacatagtcaaaatattctttgtgctgattacgataaaaaacagaaaacttaagcatgcgtcctgcaatcacttcagccttctccaacaattgtgttagatgaacttttgaatagtctgcggtgcagaattctataatttcactccattcagacacaacataatcaccatcaacttgttttgaggcagtctgcactgctactgtatattcagttcttgggcttaaaaaccagtgtccacggacagtcataggcaagggaacagcttttgccaccaattttgtgggaacatccttgtgtttaaatttattggagttcttgttctctttcttgttgaggtcaataaaatagtgtgtaatgcgatcctttgattttgaatccatttcccatgaaatcttgaatgagtcacacgttatattgcttattttgatgttatgtggtacaggaagttcttccatctctgctatgccactgtcttgtgatttgttcccgtcccggtcgcacagctgaatggcctccaggctgaggtttttgatcacctcctcacaggggctggtggggctgttgagggcatgatccaggcgcaggcacctccatttttccaacccactctgaagcccgcctgcttcgtatccaggctctctctgccggccgggtgggcaagaagagcgggaaagggagggggagtggcagagggagggaaggaggccatgggacgcggtgatgcggcgccgaggctgaggcgcggggctggagagccgccgcgaaggcgacggctgtggcaggagctccgcggagtgtgcggctctgagagaccgag

SEQ ID NO: 141620 - DNA, 573 bp, Homo Sapiens
ttttgctttttctttaaggcaattaaatacagctctttataagttaattttaggatagtctctagaggtagaaaaatattacacatacatgcatacacagacatacataaaatacagacagaagcagatttcacagttttcatttgaaaactgtagccatgtgcccaggtacaaataatacaaaaaacaggttcataaagaatttctgaatcccaaattgtgtttctggcagatgggaacaagttaagattatctaaaggatggctaaagcttttcactgtttctgggagaaaaaacaagatttttttatttgctcaatttccaattagctctatttcttcttcttcttctggtgagtaatctccctggcatttgcatatcaaagagataaccctcaggtcctagaggagacagggtggaaaatgtagatcttaatggcagagagccagaaaaagcaccttaaacaaaggtaaggtttgttacttaaactccttctccattggttaagagtgtctggtgatttagtccttcttttcttcctgatgcagagagacaagcttataaatggagact

SEQ ID NO: 141621 - DNA, 895 bp, Homo Sapiens
  misc_feature (30)..(30): n is a, c, g, or t
  misc_feature (34)..(34): n is a, c, g, or t
ggcggcgcctgcgagctgggcccggcggcngagncggcgccatgagcctcgctatccacagcaccacgggcacccgctacgacctggccgtgccgcccgacgagacggtggaggggctgcgcaagcggttgtcccagcgcctcaaagtgcccaaggagcgcctggctcttctccacaaagacacccggctcagttcggggaagctgcaggagttcggcgtgggtgatggcagcaagctgaccttggtacccaccgtggaagcgggcctcatgtctcaggcctcaaggccggaacagtccgtgatgcaagctctcgagagtctcacggagacgcaggtcagtgacttcctgtcgggccgttcgccactgacactggccttgcgtgtgggcgaccacatgatgttcgtgcagctgcagctcgcggcccagcacgctccactgcaacaccgccatgtgctggccgctgcggccgccgccgctgctgcgcggggggaccccagcatagcctcccccgtgtcctcgccctgccggccggtgtccagtgccgcccgagtccccccggtgcccaccagcccgtcccctgcatctccctgccatcaaaccggcttctcggtcacaccatctccaacacggcctgaataaggactgttcctcacggatcaacatggaattctggtgcatatcaattttccaagggccaccttgccctgtttcgtaaccagcccctattaaagttttgtaattctccgggggtttataggaatttttggaggatacacatattcaaataaatggggggttagttagattttattttgcatatttagaatcttattcaccagaatattaagagtatctttgaggaactcatgtaatagatttctgaacatgttgaa

SEQ ID NO: 141622 - DNA, 543 bp, Homo Sapiens
tttccatatttaaagccaatttttattactcgttttgtgcgacgtaagctgccacatgtctctgtgtgaatagtccgagcacaaacctggctagccgcccctgcctgcctctttcttgcttccggtgctccaggggtcttcctgctcccctggcccagctggacgccagccatgtacgggccccgggctgaggcacgtgcatcatatccacccctctgttttgcccttgacacattatgggcaaagacctagacagtgggtgacgctggcagataggctgtggccagtgtgggagagttctctgaagacggtggttgagccggcctcgaagtggacattcacctgggaggaagggggacttaaagctcttaacacagtgggtccttggcagagggaactcccagaattcatttcccaagaagcttccctgagctgtcctccatgcccagctctatggtgggaactgggacccagatggagacgaggcccctggcagcttggagctcagtctggtagggaggcagacgtgggaacagcgggacc

SEQ ID NO: 141623 - DNA, 612 bp, Homo Sapiens
aacatagctcaaagtgaacactgcttctcttagtttcctggatttcttctggacatttcctcaagatgaaacttcagacactttggagttttttttgaagaccaccataaagaaagtgcatttcaattgaaaaatttggatgggatcaaaaatgaatctcattgaacattcccatttacctaccacagatgaattttctttttctgaaaatttatttgatttcctgggttggttccaatctctgccatctactaccctgtggtcttggacaaattccttaactttgcacaagttacttgccttatttaaataaggtgataagaagaatgcctggcacatcacaagtactctatttgccactaaaattcactctcacaacacacctataagggcttctcagactcccctggagtccatccatgtgttctcatttaagaactcgtccctaaacttccatggagaaccgtcacaaaggaatcctaattctcatactctttgataggctaattccaaaataaagattcctaaatctaaattttaatatgtattttcccttttaaattgtatcaaaatagaaataaatttaccttttcagaaagcatactctaaatt

SEQ ID NO: 141624 - DNA, 739 bp, Homo Sapiens
ttttagatacagcctttagttttttgttccacgggaagttaaaaatccatcataagactccataagactttactagtcttgcatgtagactctaggagtttgtgatctgataaaagagtaacatgaaaatttactgtattgccctaatttcatacttccttgtacacaatgaatcactctgagaatctattccaagggttatatacacaaaagtgtcaagaataaaatgttctccactctcgcataaaaatgtgtacagtgtatcaggaatggaaaacttctaattttcctgggcccgggcttcatggatttctgctgccagaagatgaaagactccttctgctttattgctccattgttctgaggattaatcatccaaccctggcgtttctccttgttggattctagacgctattctgatggcttcttccagagatggctgttctccaagctgaactgcaatctgggtgccattggatgttgctactaaggtcagaggtctggtttctgtggttactaagtgatggctatgctgctggtgccccatttctgatgaggcagtatggaatgctgccaagtcttgagctacaattgcaacctgttgcccttctgtacccctcagcagtaaccatagcaacagagtgcggtcccgctgaggagaagaacgcaataatgggcggggactgttaatggccgtgcaaaccggcgttaaccatggtagatggggttggcaagggcc

SEQ ID NO: 141625 - DNA, 659 bp, Homo Sapiens
ttttcagagaaaagaaaagcttttcattgcaaattgaccaacacggagacaggagtccagctcaaatctgtctcgctgtgctgcctttaaggaaataattttattagaaaagggttagagggtgggttccgggattagcaggagatcggtggaaggaaagaggaggtctggcaagtcctcagacatgcgcagttatctcttcatgcttcctcatgggtgctgtgtgcaaatcaaattccggggcagttaatacgaaacatgcgtggaaattcaggctgtgatatcagcaagctctttctgcagaaactccagttggccatattgggtccaactgatttctgccagttttgttatcacttgtcacagtttcagtatctaccccaggaggtcacgattgcccattgtgtctgtcccaggagaggttgcgagaggttcccacccaccccccttccactcacagaccctgaagcagagcttgtctggtttcaggcaaaacagagtcagcatcctgaagcggggagggtcaagtctcctgggatgcgttcagaagaaatttcacaagcatttggctgaacttgtgtactgacatctaaatgttgagtaacgtagagtaaagaattaaaaggcaatcaaataaccctttggctcatctttaagtt

SEQ ID NO: 141626 - DNA, 411 bp, Homo Sapiens
aaaggctttccacttgttttcctttgggttctcatttttccagggacagaaactatgacaaattatccaattccataaaaccaaagctagtccaccattctctattcaatcgaagacacaattcatctataaagtgttctcattgtatgtttcatgtggagaaagaaacgaatgtcataaacgtgctgcagttattttccatttcttcttgttttggcaatgtcattttgaacttcaaagcaatgtcagttttcatctcttagggagcaaatggtcagtcatgcaggtcttgtcagcagtaacaagacatttcaaactggggacccttgggttatgtagcttcctggcttttcattcttcgtctagaataagatcagaattttttcccatgtgacttattttagaggattc

SEQ ID NO: 141627 - DNA, 462 bp, Homo Sapiens
  misc_feature (40)..(40): n is a, c, g, or t
tttttttggcatcacaattttttattttcaacccaaacanagggagagttaatggagcaatttaataatgttcctccagatcctgaagagttcacacatcaccattgggaaccattgatttcctgtttttttaatgtgtgtacagaaacgcagtcttaggcacaatgaggacatgagaaataaaggatttactccatgctctctggtaacttgcaagtgagttagctcatcataaatagcttgccttatttaatatatactcggcattctatctgttttatttccattttgggatatgatattttaattttttaatttgttaccttgggttatgtagcttcctggcttttcattcttcgtctagaataagatcagaattttttcccatgtgacttattttagaggattccagcttgacttatagacgtgccatgcatgagtcacaagataggatcacttcag

SEQ ID NO: 141628 - DNA, 1185 bp, Homo Sapiens
ttttaccaaaaacgcaggggatttatttgaggtttgggtgaaaaataatcttgtgggtggtggtaggccgacagatggggacaggaagctgtggacgaaagccccaggtcccgtgggagaggtgacagcagcaggggcacgcagccacgtgggtccccaggggaatgtgaaggcggagggctccaggcgaactggggattaaacaaatatttacaggcagcagggaagtgcccagcgcacgtgacgggggcggggcgggactttggggagggcggggcctaacggtatcgagcgagccggttgtagacgtggtccaggtttctgcacaggaatatcgagagcgtcatgaacccgagctcgagtaggccgacgcccaggcaaatgcccactatggaaataaggttgttgtgcagccacttctggaggccctgcgcgcagccctcgcggtagatgtggctctctgcagggacagcgcagatgtctgcactgtgtctggaccgcgccaggtgtccaagcctgctgagctggggcaagatcaccttatctaggattgtggagtcgttggtcgccgacaagttgtagcaggagcagggcacgcggtgcgcctccgacccgttacctctcaggatgaggacttggaaccagtcctgcgggtagtgccagccgcagcagcgcagctggaactgcacatagtcccagctctcctcggccgcggtctcctcggggttggtgccgtacttttggatggttttctctacgacgtcccgcaagcttcgctccagctgggcccgctgagtggagatgaggattcccagggtgatctgtgtggcaaacaggagcagcagcatcccaaaatacaggcccaggaggcagcggagctccttgagggcccccacacaacccaggagggcgatgcccatggtgaagattcctgagatggccaggactttggaccagatctgcagaggcacgaaggccaagcccacaaaggacacgaagctggtcttgtcgatgaggatccagatgccgaagcagaagatcaggctgccgaggacttgatgaggctgaggcagctctcctgggctgacatcttcacctagtggggtaagcggtccactcaccacacagaagaggtgctgacagtgggggagacagggagaaagaaagaggctgagagagaaagag

SEQ ID NO: 141629 - DNA, 1196 bp, Homo Sapiens
  misc_feature (76)..(171): n is a, c, g, or t
  misc_feature (293)..(293): n is a, c, g, or t
  misc_feature (344)..(344): n is a, c, g, or t
  misc_feature (567)..(567): n is a, c, g, or t
  misc_feature (636)..(636): n is a, c, g, or t
cccgggggggaattgtaaaagggcgggaggggtctccccaggggggaaatgtggggattaaaaccaaatatttttnnnnnnnnnnnnnnnnnnnnnnnnnnnnnnnnnnnnnnnnnnnnnnnnnnnnnnnnnnnnnnnnnnnnnnnnnnnnnnnnnnnnnnnnnnnnnnnntttgaagcggaacccggttgtaaaacgtggtccccaggttttctgccccagggaatttggaggaggcttcatggaacccggagcttggagtaggcccgaccgccccagggcaaatgccccanctatggaaaataaagtttgttgtggcagccactttctggaaggccctgcgngccagcccctcgcggttagatgtgggctctctgcaggggacagcgccagatgtctgccactgtgtctggaccgcgcccagggtgtcccaagcctgctgagctggggcaaagatcccctttatctaggcatttgtggagtcgttggtccgccgacaagttgtagcaggagcagggcatcgcggtgcgcctgcgacccgttccctttcaggatgaggacttgganaccagtcctgcgggtagtgccagccgcagcagcgcagctggaactgcacatagtcgcagctctcttcgngccgcggtctcctcggggttggtgccgtacttttggatggttttctctacgacgtcccgcaagcttcgctccagctgggcccgctgagtggagatgaggattcccagggtgatctgtgtggcaaacaggagcagcagcatcccaaaatacaggcccaggaggcagcggagctccttgagggcccccacacaacccaggagggcgatgcccatggtgaagattcctgagatggccaggactttggaccagatctgcagaggcacgaaggccaagcccacaaaggacacgaagctggtcttgtcgatgaggatccagatgccgaagcagaagatcaggctgccgaggacgaagaagaagaggttgaaaacgaagaggaagtacttgatgaggctgaggcagctctcctgggctgacatcttcacctagtggggtaagcggtccactcaccacacagaagaggtgctgacagtgggggagacagggagaaagaaagaggctgagagagaaagccccggccgtaatggccgaattcccgggcatatgtccggtaccgtcgactg

SEQ ID NO: 141630 - DNA, 843 bp, Homo Sapiens
cccactgtcagcacctcttctgtgtggtgagtggaccgcttaccccactaggtgaagatgtcagcccaggagagctgcctcagcctcatcaagtacttcctcttcgttttcaacctcttcttcttcgtcctcggcagcctgatcttctgcttcggcatctggatcctcatcgacaagaccagcttcgtgtcctttgtgggcttggccttcgtgcctctgcagatctggtccaaagtcctggccatctcaggaatcttcaccatgggcatcgccctcctgggttgtgtgggggccctcaaggagctccgctgcctcctgggcctgtattttgggatgctgctgctcctgtttgccacacagatcaccctgggaatcctcatctccactcagcgggcccagctggagcgaagcttgcgggacgtcgtagagaaaaccatccaaaagtacggcaccaaccccgaggagaccgcggccgaggagagctgggactatgtgcagttccagctgcgctgctgcggctggcactacccgcaggactggttccaagtcctcatcctgagaggtaacgggtcggaggcgcaccgcgtgccctgctcctgctacaacttgtcggcgaccaacgactccacaatcctagataaggtgatcttgccccagctcagcaggcttggaccacctggcgcggtccagacacagtgcagacatctgcgctgtccctgcagagagccacatctaccgcgaggggctgcgcgcaagggcctcccagaagtgggtgcacaagaacctttatttccataggtggggcatttgcctgggcgttggcttactcgaggtgatcttgga

SEQ ID NO: 141631 - DNA, 463 bp, Homo Sapiens
aaattttattaatattttaaaaaatacataaaaatagagcgtccaatgtctgaataaatatatttaacaagttgcaagataataccttattttacacaaaaatttcagctttagaaatcttgttaaataacttcattgttgttatatatttcatttttgtctttttgtaacaaaataaaaactctgaaattacatagaaaaaagacaaaatatttttgtcaagggataagatagtccactgaaaacttattcacaattccactgtaaacattaataaacattaaaatatttgcataattgtgtgctcaaaaatcctataaaaagtggaagacttattacaactgtagttttcagtcaactacacttcctttcacaatttattttgtcccatttacaccttcaatcctgggcacactgctgaacatatacctttggcagtttccaaatagcaggtgccttccac

SEQ ID NO: 141632 - DNA, 841 bp, Homo Sapiens
ttttttacactaacaagaagcatttattacctccgaagtagtgctggctctgtagtgctgaatggagaggtgaggtattgcagctgttatcttttgaactaactgctattgcgtgtcccatgaccagccgtggcagggtttttgttcccatgaatgaatgggctataaatctgtcggagctgacagtagcagcagtactgaaatagggtcagggttcctcacaattcatcttcgcccccacccagcctgtctccagcgaagtcttcaggaaagaaaaggatcagagaaaatgctcccgctgtcccctcgcccctcctccgtgacactgtgtgcagattaggtgttgattcaataagatgcttcaccttctaaaagtgatagtgtgagtcacgtgtggaagcagaggggacataatggaacgatcactgcacggcatccctgcctcgtttaatttgttttgaggctgctagccgtgtcaggctaactgcagtcgaggccaatcaacagcctgaccctgttggtggagaaagttgaaagatagtggcattgtgtcagaagctgctgggatgaagtcaacatccgttcctgtctccccttgggagagccatgttccagggtgagcctcctttgcaaaaaaagacttgttgggactggaggtctgagagctggggctggccttggggaagaggatcactgcaagtcactttacactgtgcaggggactggctatcctttggttgtttgatgggcaggctttgctcagatggggatggtgagatgtcatcttcctgcaaatgccatctgtgttccttcaggcctagagcaggccatggatgggaac

SEQ ID NO: 141633 - DNA, 459 bp, Homo Sapiens
ttacaatgcataatgatatgtctttatttcatcaagagaaatggtgtctagacaaaattcagttaacactagcaattcaattgagtgaaaactttttttgcacaatagtgtatttacaatgagtaaatgaagtttcaattcattagttcatagcaatgcttttttcccccaaaaggtaaaaattcttagttacagagaataagcatcaacagcctttcattttttacaataaaaaccacgagaaaaaccaccatcacttagaaaaaaataaggacaagcctaagaactagtacaataaaatgatgcattgaattaaattacattaatcgcatagaatctgtgtaaaaagtatgtagaaaaacacctgatgtaacctgttacagtcgttgaccagttatgagaggtacagagggttatacaggtagatatgtgtgaaaactgtccgtattgttcaacctg

SEQ ID NO: 141634 - DNA, 574 bp, Homo Sapiens
gcagtaccaatgcagccagcccatgtgtcccctctatgtggaatgttaacgatattcccactgtttctggtgtcctttctgtaatcagagctgccgtgaccattccagttcaggcatcctggtggcctggcttctctgggcatagagctgggagtgggcagttgggtcaggccgggtatgcccagctcctccagcccctgcaagactgtcctctgaaggacacggggacgttctcaccagcacatggtattaccggtctcgtcggtgtggtctgtctgatgggcgcaggggtgcgtcgctgctgatccctgctgcaggtgtttcccgagtgtccaccgtcgggagttgctgttcttagggctgggaaagctgtgccctcctggagcctgcaccccactcaggatgacggggctggggccggctctgcagagggcgccttcggggtggtggggaggccgctggtgccagctcgctgccttcctcccaggctggccgatcctgctggggctgaccggggtccccgcggcgctgcagctccttctgctgcccttcttccccgagagccccaggtacc

SEQ ID NO: 141635 - DNA, 522 bp, Homo Sapiens
tttttttcttgtttaaaaaaattgttttcattttaatgatctgagttagtaacaaacaaatgtacaaaattgtctttcacatttccatacattgtgttatggaccaaatgaaaacgctggactacaaatgcaggtttctttatatccttaacttcaattattgtcacttataaataaaggtgatttgctaacacatgcatttgtgaacacagatgccaaaaattatacatgtaagttaatgcacaaccaagagtatacactgttcatttgtgcagttatgcgtcaaatgcgactgacacagaagcagttatcctgggatatttcactctatatgaaaagcatcttggagaaatagattgaaatacagtttaaaacaaaaattgtattctacaaatacaataaaatttgcaacttgcacatctgaagcaacatttgagaaagctgcttcaataaccctgctgttatattggttttataggtatatctccaaagtcatgggttgggatatagctgctttaaaga

SEQ ID NO: 141636 - DNA, 909 bp, Homo Sapiens
aaaaaggggggtggactttattcttttaaaattcccaatttctctttccaaaggcgcgaatagcctattttacccaatttccgggtgtaaaaataagaattttcaagaaaaattttaattttcaaaatcccccagtttaaaatgaaaggggagggaaaaaatttttaaagaccagggtcttgccagtttcacaaatttattcttttttcagggtggtaaaataaaaattagccttttggttttcattaaagattagagttttcaaataaagtaaggtatattcggaaaaacccaaaggtacccggggagtttgatttttggataggttgagccccaaaattcctgggcaaatcataccacttgcagctttcatcttttttccaccggttttcctcttttgtctctttccctacatctattgagtcttcaattactgagtctggctctagttctatcaattccttttcatttggcttttctggacaaagataggctgggcgggtgagagaggtctcatctcatatatttctgctttggcttgacctgaagatgttttttcaagtaaaggagatgctactggttctggcttgggtcttacttgctggttgtggcttctgttcagctgtgtgacatacatgcgtttgaggaagctaaagtgctgaaatgtaatccactgcttattgacattcctgagaagatgtaagaacttgtgaggggagtcctgtatagttcttctttcaagataccagacagagcctcctacgcaacctgtcaggaggcgtgaggagagagtgtgcggagatgcggccataatttacgagtctggggccgctccccgggatccctgtgtcctctctcctcacgggacgctgggcgccgccatcttccttccccgcccccctgtgtccc

SEQ ID NO: 141637 - DNA, 469 bp, Homo Sapiens
tttcaaacccggatagagtttatttggaagctggttcgttatgatttcctggtggactgactgtggggtgtgtgaggaaatgaggatggcgactggaagttcctggaaggatgggttgttgcaggttagataggaaactgtctgcagatgcagttttgggaagatgatgtttgtttcggctgggtatcatgcaaacaagcggagtgtcaagtctggagagacaggtctggccagggacttagatgtacagccctcagcatgtagatgccacttaactctgtgaggtggccggggagtgagtgcagagtgactgggaggagcaagactggcatgggcgagatggggcgattgcggcccgtgaggcctgagcagtgcctaggagggagagggagaagcagtgtgagcctgcaggcacgcaggagtccagttgtacacggaggcgaaacactgttcagatcccgctgcagtg

SEQ ID NO: 141638 - DNA, 284 bp, Homo Sapiens
ttttcttggttttaaaaaaatgaattcttttattgcatattacctttgatgtgccatacattcttttaagtattatgcaaagtgtttcacaaatttctccgaccagggaacactttttcacagagcatcttcctggaccagtgttctttgggaaatcctgggtctgatgacttgccattgctgccatgtgtctccattctctggtttcttcttggcttcctaggttctgccactgtggccatcacattagccctttctggctagagcttcatgtctcacccact

SEQ ID NO: 141639 - DNA, 429 bp, Homo Sapiens
tttgtggacagtgaaaaagtcgtttattagcaggacgtcctgatagtcctcgctgatactggaggtccttgccggccctcttccccctttcccttcacagagacgcggtttacacccgggagaacacaggttaccttgttcttggtaagtggctaagtcttcctcggtggtttcagaggcatgctaagggctgaatttggcttggtgataggatttttaagccactgcatccttgttagctctctctggtgtaagaggagtagaagggcaggaggggggactccgtgtgccccagaactgtctgctgcttcctccagccactgctcaacgcttcctccctgggagtggggcccccagacacgagctctttccacttttggtttaatccttccgtggtcctcagttcactctgcttcagtttacggcaag

SEQ ID NO: 141640 - DNA, 491 bp, Homo Sapiens
ttttagattttttaattttcaacaaattgaacatttacaacattgttacaactgagaacattgacaacacagggattttcaacagagtacatttagcaaggatttttttcagaagaaaacaaaatgtcagtacattttgtattccatagcattgctctgtggaaaattagctggcatccattttaaatgaaccctgctgaccttcttccattccgtggcctgaataaaaaatatcctcgactttgacttgcaaagggactttggaattcttcgtccactctgaatctcttcattcttctctcatgcaggtgaggaacgagctgcagcaacggatgcacaactgacgacacaacatttgacttgcccaacttctgtgtcttcgaataatgaaataagaaccttttagtattatctttttcatcttgttcctgaggctttggtagcattcccataatcataaagcaaagctcctccagtgcgttggatgcctg

SEQ ID NO: 141641 - DNA, 560 bp, Homo Sapiens
  misc_feature (303)..(303): n is a, c, g, or t
  misc_feature (305)..(335): n is a, c, g, or t
tactgtacaaggtcaacaaagtaatgcctgtggtatcctcatctctcacttttttactctgtgattttagcacagtaaggtactgcaaagaccttccttccaaatgttctccttgactttatttcttgggccaattcagtatcctcaacatcctaagattttgttgttttatcactgacctgtggttggcctgttttattctaatttccagaaaagtcaattcccagtatttgcaatatcaaataactctaaaaccgatgtgtgattctaccttccttactatttttactgggcaaatgcccntnnnnnnnnnnnnnnnnnnnnnnnnnnnnnnngggacacacaaaaatcagcaattctcatgaagcgtttgttagtgtggcagacttgtctaattcctgaaactcattcatccccttgagccagccaatggggaggaataggataatgcaaacacatgttttgttttctcattttcaaataatttaccatgttaaaataaacttttctttgttttttctttgtagagtcagctaagtacccatatttaaatgactcta

SEQ ID NO: 141642 - DNA, 906 bp, Homo Sapiens
  misc_feature (11)..(11): n is a, c, g, or t
  misc_feature (311)..(321): n is a, c, g, or t
agttcaactangatatttacttggctaacaactttggaactatagtttaacaagtaattttctccatgcctaaggtcagtgtacagaatgacaagccagaaaatgtccattttccccatgcgtccttagcaagcactttaaaggtgacagctcaaaagaggcgggggagagggcaatggttaaatcatttatcaaaagtcattttattgacaaaatagaatacttatatctgttcttacaggggtaagcctctaaactttttacaaaaaaatgtacacactatatctttggatatatacatattttacacnnnnnnnnnnnacaatttaacaaataattatataaatacatcctctaatgtaagaaacccgtatttacgtggggtgtataattaagacatttcttgtttgtttacttaaggcatttgcctggtcattaagaatacccaaaccgtgcaatcccatcaggtggcggtcacccctcctccagggtaagtcaggggtgggagtttacgtaggaagagtcgagggagaaaaagaggttctcccaggtgaaatctgtgtatctgactgcaaacccagccaagtgcagccagggagggctccaaatctcgggttctggaaacgccgcagagtccaccctcctcagccaacagaaattaacgcgtggcgggaggagctccccgcacatcaatggaggaaaaggggctgggtctgggaggcttcaatgccaggtactttgttctaagtgagtcatttaagtcccagctaatggataccattaagagttcattatcatgctaatagcaatcaacactgtgaaggggtgggaacctcagcccatcaagtgtcccttcgctgcacttgggtctcctcgccccaatccccacccctcctgggcggccgc

SEQ ID NO: 141643 - DNA, 792 bp, Homo Sapiens
  misc_feature (496)..(496): n is a, c, g, or t
gcggccgccggcgggtaaggggcggggcgccgcggccaccgggtcctcagccgcgcgcatgcgccggaactgctctgccgtggggaagacgggccggcccaggcgccgccactcgccgtcggggctgcagagcccgttgtccaggtagcgcgtgacgtagaccaggcccgggccggggggcaccccgcgcagccgcagggtcaccgcgacgctgcggttggggtgggcgcgggtgtcgtcgctcgcgtagatcagcaccgcggcgcgccaggcgtcggccgggccctgggggcggtgggcgctggccaggacgcccaccgtgtggttgctgtccaggacggtcccggcctgcgacacttcggcccagagctgctcctcatccagcagcgccagcagccccatggccgtgagcaccggcttgcgcaacagctgcacgtgcggcgggccggtgttgttgacctgtaagcgcgcggtgagcgtgcgctgggcgaagggngtgcgggtggtagctcaggaaggcattgtcgttgctcaggagcgcgtaggggaaggcggaggtggtgttggccagtagcaggttctgatgctgcgcgatgaccttcacaccatggccgcgtaggtcacgtcgccctccacggctgtggcagggaccaggccaccagcgggtccgcctcgtcgttgtaaatgggggtgtccgcgaacttggggaagagctgcggatctgctgcgcgacgaccttctcctgctccaggatggagatggagctggcggcacccttctgtggagggagat

SEQ ID NO: 141644 - DNA, 509 bp, Homo Sapiens
tttttttcaatttgcaacacattcattttattatcttcagaatggcaagcaccccgctggtgagatctctgaggtctggcggctgggcctgaacttagtcggtgctctcggagacaggggaaaagctggccatccacacagtcagtggttcttccacctcgctctcctgactcagtggttcttccacctcgctctcctgactcagggggtcgtgctgggtcccctcgctcactggctcctccggcggcagctcgtgctgagggagctcctggctgggctggtcgctggggccgggtgccgctggcgcgctctccgcctcaggtgccgtcacggccgccatctttgtcgcagcccctttcttcccgcgtctccctctacgaactgcttttcccttcttggccaccttggtagtcttcttcttcgggtcactggggctcggctgagaggaggacttcctctttcctgcctccgtggccttggccggaggtcccgaggctctcggctttgga

SEQ ID NO: 141645 - DNA, 551 bp, Homo Sapiens
ttttttttcggtttgcaacacattcattttattgtcatcaacatgggaagcaccctgctggtgagatctctgaggtctggcagctgggcctaaacttagttgctgctcagggagataggggagtagatgggcgccccttactcagtggttcctccagctcgctctcctgactcagggggtcgtgctgggtcccctcgctcactggctcctccggcggcagctcgtgctgagggagctcctggctgggctggtcgctggggccgggtgccgctggcccgctctccgcctcaggtgccgtcacggccgccatctttgtcgcagcccctttcttcccgcgtctccctccacgaactgcttctcccttctcggccaccttggtagtcttcttcttcgggccactggggctcggctgagaggaggacttcctctttcctgtctccttggccttggccggaggtcccgaggctctcggctttggactcatctgccgcagctcaacgtctcgcaacggtcgactaactccaggctgcctggcctccctgtgtatcccc

SEQ ID NO: 141646 - DNA, 556 bp, Homo Sapiens
  misc_feature (535)..(535): n is a, c, g, or t
ttataagatgggagattttattaaaatgtttacaacacatatcacatttataaaacttctttccttcagtacctattaaactttcagaaatagctgaaccgaaagtcaagctgtctcctaattccttccacttttggccttgtttctctggtggagtccttttcttcttgtctcgttcacaaagggaaactttcttcactgtatctgccctttcatctgtttcatttccccactgacttgccaaaacttgccattcacactcttcttcaaaatcaaggacctggggaacacttccttgaagtctttttgatgttcctttatgagagtctgctctttgagaactacttggctttgatgtcacctcctcattctcggtcatggtctcccattctagggaggtcacatttccataattctccagcatcacatcccagtacaaggccctctggattgggcccagacatgcccattcctctgaagtgaagcatactgacacctcctcgaacatcaccaactcctggggctgggctgttangagcataagtgccattaattg

SEQ ID NO: 141647 - DNA, 813 bp, Homo Sapiens
tgagttgagaaaaaaatcagttgaagccatttaaacaataaaatagcttactggagactggaaaattcaaaggtagtatagcttcaggattgatttaatgtaaaaattcactgttgttagatctgtggttttgtttctctggaattttcctgtctgcgctctcctccacgtgttcttgttattctcagactggcttcacttgggtagccagacaattttctgaagcgcctaggcttgcatacctatttccccatatgcaggggaagagagccagtgactcctttctcagtcaatgaacaaaatttttgagctttgggtcacaataatggttattcttggagtgaagatactgatggggaggaagcatgaagcatctggagtgctatagatatgttccatatcttgatctgcatggtggttacaccagtatatacagatgtaaaaattcaacaaaatgtacacttaaaatttgggcattaactgcaggtaagtcaacctccactcctctaaagatatcctgaccgccactctgattgcaccaagaagttaggtcatatgcttacgtctgaacaaattgttgaggtaaggtggtggatgtgatgaaatccctaattaaggctttctcctgaactggaggtaaggtcagtaacacccaaccttacgtaagggctgctacccaagtggggaagagatggaagggggcaatagggtggtaattataaagtcctcccctaagagtatgtctggcaaaaaggccaagatggggaaaaggcaaatgaattgaatgtccagaataaacaaatctatgaagac

SEQ ID NO: 141648 - DNA, 189 bp, Homo Sapiens
tttttttatatgaataaaattttattgaattttagataattagaaagaataaagaaatgcaagataaatgctttctaaacagcatctgatagcatcatcttttcagtgtcatggtattttcacttttctttataaaaagtatagacattcatttatttaaatttttacaaagtaagaaccatcaaatgg

SEQ ID NO: 141649 - DNA, 167 bp, Homo Sapiens
atgtactgtattttcagtgttttaaccaaacagttgtggctactcatggtgaggaatgaccgctaagagtttgggttctttcagtgcatttggaggtcactgctacacgttgatgtttaggaggttgagaggtttgcctttagtgtccacaggatgaaatgtctgag

SEQ ID NO: 141650 - DNA, 386 bp, Homo Sapiens
gcggccgcttctcgaagctctccccgagcctcaggcaatgttcctcgcggtccagcagcgggtttgcggtgggattcatggccccgcacctgcctcgcacccagatcggcgctctcccggtgcagccgcgatccgagcttctggcgctggcgtctgggaggactgtgcttccgggccaccgctctggaagacaaggagagccgagccggcacccacccgggtccagaagcaagttctctcctctgcgtgggggtgagagaggaatctgaggaggcaaggccgtgggacttccggcgtcgggtaggaacttccgggttcctagcggaagtggcgggggcggtgccatggcaaaagaactcccggagaatccgaattcgtggtcctca

SEQ ID NO: 141651 - DNA, 532 bp, Homo Sapiens
gggggctgcacgtagatggggtggcagtgaccctcacttcctgctgtatccccagacccaaaggtgagccccttcctcccctggaatgagtggctgatctgggaccctggctttctatgtctgtgacagctcctgtgtgggtggcaagtggcagaaactgcaggtcaaggtgggttagggaagaaaaggtgatttgttggctcaggaagttagagatatataacctttaggtctggcttgatctaggcacagctagatgtgagccatgtcatctgcacctagtctctctccagctctcagctcttcctctgggtgaatttcactcctggacaaacccctctgatgggacaattctgagatgtgagttcttctgagtctcccagaatccctggtagaaccgatccctggttgtccacagtgccacttgctcattaaagccccctgcagggctccttccttccttgtcgctcatcccaaatccctatgggggctttttggatctccccccaaataaaccatgtgccagccaggc

SEQ ID NO: 141652 - DNA, 501 bp, Homo Sapiens
aaaagcttgatgcagttttttgacatagcagactgagtctggcatagctcagtccaaagtttggggaacagtgcaagatgaagtggcaaaccttcataggcaactaggacacctaatatttgaaaagaaatcagaataggttataattataaattatactagtgagatactcaactctgcaggtacaatattacagctatttctagtcataactgcatattttctatattttaaagtacataaaggggaaaaattcattccaatgtttagtgaaatatcttagaatgtggtactttgaatttatttatatcctatacctcattcctgaaggatatgggacttaaatcaactcttcttttttgagtattagaactttatctgggaaaagaaaaagttactgcaagtggctccaaatctttcttggattaaggtaccactctgcctattagataattttcatagggtggctagactgcaggagggaggaggggaaaggtaaaa

SEQ ID NO: 141653 - DNA, 652 bp, Homo Sapiens
attcctatagtcctccagaacttagaaatgcctgtatagatgtcctcaaggaacttgtacttttgagtccccatgattttcttcatactctggttccctttctacaacacaaccattgtacttaccatcacagtaatataccaatgtctcttggaccttatttcccttgtcgagaaaatatcaagctaataggagggaaaagcaatattcggcctccgcgccctgaactcaatatgtgcctcttgcccacaatggtggaaaccagtaagggcaaagatgacgtttatgatcgtatgctgctagactacttcttttcttatcatcagttcatccatctattatgccgagttgcaatcaactgtgaaaaatttactgaaacattagttaagctgagtgtcctagttgcctatgaaggtttgccacttcatcttgcactgttccccaaactttggactgagctatgccagactcagtctgctatgtcaaaaaactgcatcaagcttttgtgtgaagatcctgttttcgcagaatatattaaatgtatcctaatggatgaaagaacttttttaaacaacaacattgtctacacgttcatgacacatttccttctaaaggttcaaagtcaagtgttttctgatgttggagcggccgc

SEQ ID NO: 141654 - DNA, 453 bp, Homo Sapiens
tttttttgctttgggagaaaagagtgtgtttatttgcagggcaccaagcaaggagaattgggcagctcatgattaataaatacacggcctccctgagggattacaagcaagggtttttaaaggcaggggtaaatctcaggaaagcagaagttacagtcgaaagtgtaaatcgacacttggaggttatacattggtttggcctaaaaaaggtggaatatcttgaagcaggagctcacaggtcataggtggaatcaaaaattctctgatttgtgactggttaggaaagtgaagcttcgtctgaaatcctggggtaagccgaaaggaatgttaaggtctggcccgtggcatgacttcttccaggtcatttttaatacacctcagagctgcaaagtggagctggtggaagtcatccctgctgtattcgttttctcctgcggcgtacctgtactggtc

SEQ ID NO: 141655 - DNA, 559 bp, Homo Sapiens
  misc_feature (35)..(35): n is a, c, g, or t
cagaagagcatcttcgctgatcactggtggatgtntggtgtgattgttagaaccgggatggggggtgggtggagttcgaatttggaagtgttaatgcagtgtttttaaaaactgcaaaaaatcctggagtaagtacgaagtaacttgttttacgattgcacaaatgggatcatgctgtgaaatctttgaagactttttctcatattaacatgtacaaacatagcaaattactttggaagttaggtaacattccatatggctgtgttatttatttaatcaggtcatggcaatgaactggattatttccagcgccttttggttgtttctgttttttggcttttgctttgtcgatgagaacaaggactttgttcacaccatattttccagctaaatttagaaaagtgcttgacacatagcggtgctcctttattgcatcagtgttggcagcagacgcgttcatacttttacttgtgtactagggataaattcttcgaggtaggattgctgggtcgacacccatgtgcttaaaatggccagttactgccaaattgctctaaag

SEQ ID NO: 141656 - DNA, 537 bp, Homo Sapiens
  misc_feature (206)..(276): n is a, c, g, or t
ttttttggtggattggttttgttttagacaagttgaagctgccaaaatttcacctgccccagtggttggagcatacaattaaatggctgatttgatatgcatacacttcattcaatggaataaatctgtcggttttgattttgcctcagtctctagtgatatgtaagtacatgttgattcatttcaaattagttggccttccccannnnnnnnnnnnnnnnnnnnnnnnnnnnnnnnnnnnnnnnnnnnnnnnnnnnnnnnnnnnnnnnnnnnnnnaaaaaacaccattgcttttgtttgtggcagtttaattatgggattgacagccattttaatctcttcaaagctccgcaactgccgcttttcagctaatccaattatatctactccacaagttacagcctcatctaaagatgattaattattgattaagccagtcaaaaagcattaggaaagatttatttaatcttttcataggctcttatttattacatggagattatggtgaatgtacctgttgagttgctaactccagtc

SEQ ID NO: 141657 - DNA, 451 bp, Homo Sapiens
ttttttttggaaactaattgcgaaatttattccagggctgtgggggctggggtgatccttaagggcacttctcgtttcagggctgtgggtttgcagcaagggacccaacgggttggagccacagagaggggatcaacagcgctatccctgatctacaggcccgtgccccctcccaagttcacttgcattcccacccacagagacctgaagcccccaacagggcatcctgctgttcacctagtgggtggagggcgggcaacagcgcttctctggattggggctggggctcagaagtaatgacccagcaccaccccaagggtacttagtaggcgagtgtccggggagaaaccgtcagctgtacttagtggcaatccccaagccccagcttcagtcctcaaatctgtccccttccctccatcacacacacatttcaaggagtgtctagaagctt

SEQ ID NO: 141658 - DNA, 489 bp, Homo Sapiens
  misc_feature (322)..(322): n is a, c, g, or t
tttttggaaactaattgcgaaatttattccagggctgtgggggctggggtgatccttaagggcacttctcgtttcagggctgtgggtctccggccttggcaggggcacatgtttcagggggcggggaggggaggtactgagacagggtggcgggaggcgggaggcaggaggcaggggtgcccagtctcctccaactgggcaggctcagcacaagctgcaacagtaacatgaaagcgggacggacagcaggcaccccgccggggacaggagacagccgaggcctctccctggtgcttcacccagagtgtccttcatgacctangacagggggtcagggagctgagggccagcttcatgggtttgcagcaagggacccaacgggttggagccacagagaggggatcaacagcgctatccctgatctacaggcccgtgcccccctccaagttcacttgcattcccacccacagagacctgaagcccccaaca

SEQ ID NO: 141659 - DNA, 854 bp, Homo Sapiens
  misc_feature (543)..(560): n is a, c, g, or t
tttcagcttttacatttcatttatttctctatataatgcaataaagtagatggattaaccgtgacgtttacagatggagcaggggagaatgaagaggcgtcagtttgggcatcaggctggatcttcacactctgacctcactctgctctatcctgcccagtgttgcttcacctgatatcaggggtgcaaggcaaccagatctgacaccagtttcagtttagatcctgcctttacctgggtgtgacccgggtccatctcttcagctcggcctctgctttctcttcataaacttttggggttagtcctcggatgatctctaaaacatggcccaggtgctccttgccagtagagtgtagccggatttggagggactggacactcagtgtgaacaagacgaaggcctcaggaggcagtaaaagctgacaagaggagagaaaatgaagcgcctacgggtgcatactggactagcgggcgaaaggccatgactccttagtttggagaaagaactggggccgagattggggaagtttcccagtgcaattnnnnnnnnnnnnnnnnnngaactagaagaattacccaggtctggcttctttcgtgtagcctggggctgagtcgcaggctgagaaatccagtctggccagtagggggctccaccaagcgcagtctcagaatgcccaagagctccaccgtcgcccggggtctccaccaagcgcagtctcagaatgcccaagagccccaccgtcgcccggggtctccaagaggagtgggtcgtggtgggcgttgcacggcccgtaaaagacgagcagcccgcgtccgcgtccgtcctcccgggtctccagtccgcaggcggccgc

SEQ ID NO: 141660 - DNA, 451 bp, Homo Sapiens
  misc_feature (299)..(307): n is a, c, g, or t
aacggtcacaatatgcatttattaatgaatgtatttatacacaatacaaacgtgcggggacaccgtccctttcacagcccagaacccagggtcagaagatgagggatccagcctcagaggggagatatgcgacttcccaagagcagtttttggcctggaggggccatgagagtgcaagacacggggccgtggcgggggcggggctacgggagcggggcgtggccggcccctgaggttactataggggaatgggccccggccaggtcccctctccttggggcagtgggaagacagccacnnnnnnnnngctcggagcgttccttctacccaccatgcccggtcaacagatcctcaaccactagacaccagaggtgtctacaccgcaggctcggcgaggctcggggacggtcccctcctctacgcggcctcccgtcccttcggctcctaggag

SEQ ID NO: 141661 - DNA, 455 bp, Homo Sapiens
tttttttgcattttcaataaatatttctttttatctacttcatgtgctggggaaatgggtgaaacagggaattctatgatcgcagcaagtccctttcttctacaggttcattttgtagccatcatgttcattgcagctatcccaagtggggttgagaaccaggacctggctccaggtctccgagcagttgaaatgtacctggcaaagtccatgccttaggcaggagagctgctcagcctcgcttccagcctgtttactctgggttctgaatcgccgtgggctttgttatctggtttcccagcctcgcctaccagttctctgtctaccagtgttgtaccagggctctttttattctttcttcgactggagatccagactctcaaacatctgtaatacttgtccctatctctttgttcatgtgttccggcaccttgtggatatttataggtcaccag

SEQ ID NO: 141662 - DNA, 490 bp, Homo Sapiens
ttttttaagtgtaagaggtatttttatatctattttatattggtcacaatatagtgtgctcgacctcaactttgctcgaagattggagcaggtgctgacagcgaggagaacccagacagtgggggcaggcacttccgagcctgtgtggtcacgggggccttcccaggccccaagagtgcagaggtgcctgggtctgcagctgttcctgacaacactgcccatgcggcccaagcgctactggcatgatggcaactgccactccagatggccagccgctcccatcaatagtgtccatatccctacaacgactagacaggcctgaggcatccttcagatccttttggatccctagggatttcgcggtttactcctggggctctgcctgacgtttcttcaggctcgctcacatctgccctctcctaggatcctcggactatcctgtggatcccacggagaagacaggcgagagtccaccgcctttgcacctcca

SEQ ID NO: 141663 - DNA, 533 bp, Homo Sapiens
  misc_feature (434)..(434): n is a, c, g, or t
ttgtattcattgcatttttattagaaaacactgaaagttttatataatttcttttcaggtaaacccagatgtttcgatggatgcagaaatgatggtagataagcagtacattcttctctcaggagcatgaggagagataaaacttgttctttgtgggagacagtgagatttaaataagtcagtatatcctgccactctcctgctctcagccttgaatcattttctatcatattgagaataaaaccccaagccctcgtcccaggctttcacaagtcctgctgcttctccattaatacaccatgtctccattttgaggcattgcactggctcttccctccatctggagcctcttccatcaaatattcatttgttgaatgaatgaattgatctatgcgggggtgcttcaggaagttgatgtcggccgggcgcactangcggtagctgcacgtcgcgcaatcctggctgcattcggcccgcactgtcgtcaggagcactgtgccgagcaacagcagtcaagtgcaatgtgtcatgta

SEQ ID NO: 141664 - DNA, 427 bp, Homo Sapiens
tttaacgtttttgtaactttttttaatttgtactattttgtgagtacgtgaaatttaaatttgtaaagagtaaacgattacagcatgttgtggtattacacactgttgaagggcgccatctgtggcgtggtggctgcgctttggtgggaagaggttctcttggggttcccgtttttctcccagctttgggtgggcaatactgaccactctccgacctaaaggggcttctccgtttgcctttgacgacctgagcttaggagaatggagacacgtgggagttcagaggggggcgttcagggtgactgcgaacacgagctgccggcgctgtccacatctcccctaggcagggcccactggccccagcccgggaagggagcaagggcgggagggcagttggcagtggcacggtctgggtccaaatctttag

SEQ ID NO: 141665 - DNA, 388 bp, Homo Sapiens
ctgagtgactgtaatgggccttccatttattttagacaaaaaagacagaattggcattttaggctcagatgatagttattagaaagtttgagatgggccaaagtgcagggcaacagacggcaagggaaaagaggagcatagctggtgcatttgatgctggtaggttggagggagggaggaggtcagagttatgaaggcggccagggaaggcttcctcggaacctgaagaaagggagacagcaactgcagggaaggatctgtgggccctaatggccacgtcacactacaaaggcccggactttgtccaactcgcttctgtgctccatgagtgcacctgtgtctgaggcacatcagctctaagccagtgttctctagtgatggagtgaat

SEQ ID NO: 141666 - DNA, 717 bp, Homo Sapiens
tgctccacgcctttgcatctagctgtaatccaacatagaatcgctctctaagcaaggccattcttcataagtgggttcaaactcaacgttgcgtttcacaaaggtctttgtcactctcagcatgtgagtgtactctatcagttccagcaagtttttcctcagtttctccttgttcttagtgacttctctcagttcaacctcgagcttctgcaactgctcctgcatttctagaacctgtttcaggggtggcgcaggagggctggcctctccttcaggaaggggaatatcagctctattaatttcctgtaccaaatacaccaatattcgctctagctcttcacacctcttcacctcaccaacaaattttctttggaaagaacttacgttctggttgaggtctcggaactggaccaggcctttctcgcccagggcgctgaggcactcgtaggccgtgcccgactgcaggaagagctgcgccaggcacatggtctcgctccggaacagggaccccatggcgggccgacccacgcccggaggggctcgatgggcggcggcggctccgagccgcgcgggcccgcacactcagccggtgcggcccgggcctcgagctcttcctgtggcctggccgcggccccgcactatggggctccagactgcagcggccgcccccggttctgccaccgcggccgccgctccagctgccgccacagcagtccc

SEQ ID NO: 141667 - DNA, 482 bp, Homo Sapiens
  misc_feature (41)..(41): n is a, c, g, or t
gccgccgaccacacagacggccggcgaccctggagtcagcnccgcgctccgggaagctttggccgctgagctggggtgtcatcttcaccgtctggacaatggggacggggcgcgcccttcctcggtgctccccgcgggagggccccagcgatgcgcgggattgggggcgccaggagagcaggtgcggcccgcgtctcccgggcgacactcacgtctcggaactggaccaggcctttctcgcccagggcgctgaggcactcgtaggccgtgcccgactgcaggaagagctgcgccaggcacatggtctcgctccggaacagggaccccatggcgggccgacccgcgcccggaggggctcgatgggcggcggcggctccgagccgcgcgggcccgcacactcagccggtgcggcccgggcctcgagctcttcctgtggcctggacgcggccccgcactatggggctccagactgcagcggccgc

SEQ ID NO: 141668 - DNA, 401 bp, Homo Sapiens
tcttcacagtctttctcagaaactcatttcatcactctccccatgggcttttgtttttcagttctttttagaattccttctgcttttcaaaacttgggactttttatcttcacgggaaatctaacgtgtaggtgaactatcttctttaaccctgaatgcatctcaggaaaagggtatcatgccactattgcagaatgggaagctgccctgtcccaggtacatgtatacccctgttgggctgacaacagctctcacatggaggaaaagattcagttccctcggtcagatccaactgtggccactccgtgcttttaacattataaaatcacctgcacaactattaggcttccaccacctgctgtgcctagaatcagcccctcttcatcaatatttaggttctg

SEQ ID NO: 141669 - DNA, 504 bp, Homo Sapiens
  misc_feature (461)..(461): n is a, c, g, or t
  misc_feature (464)..(464): n is a, c, g, or t
gcggccgcccgatgcagcagcgccgctgtccgggcgcggtgggtgcgggacgccgtcgtcgtcgtccagcggctggtctccacccgcgcccccggtgcgctgctcgtcatcgtagtcctcatcgtagtagtcgtccaggcccccgtccgagccgctgctgccggggccgttgcccagctcggcgccgaagcacaggcgggccatgttctccttgaccgactcgcagatgggccgctcgaggccgtcgcacacgcagtcgttgagcagcgccgccttgggcatagccagcatgtcctcaatgacggtgcggcattcgtccgtgcagcgcagcccgttgaagactttgccgcagtaggtcaggtagcggctcagcgccaggttgcagcggctgtcgcggtcgcagcgccgccgggcctcggtgcagcccatgaccccgcccgcgccggggccgcccgcgccgncgncgctcgtccggggcaggcacggctcaatggcgcgcttggc

SEQ ID NO: 141670 - DNA, 1058 bp, Homo Sapiens
ccagctatgggcttcgagcgcatggtggtgatagtcttggactcaaggtccacaggatgatctgcacggaggtcccatgcatttcatctgctccatcagataatataacctgaatcctccatacgacgagtctatgaatcagaagggcaggattccacgatagcagcatcagaacagcaagtggcagcgagaattcttgattccaatgatcaggcaacagtaaaccctgtggaatttaatactgaggttgcaacaccaccattttcccttctggagacttctaatgaaacagatttcctgattggcattaatgaagagtcagtggaaggcacggcaatctatttaccagtttaaaggagtacatttggaacgtgtttttggaaaaagcatgttaatgtacgcagaagagacttcagtgcacactttcgaagaaaaacagtttctgagcattaagtggacctgatcgctgcaaaatgaacccgtgccttaacggaggcacctgttatcctactgaaacttcctacgtatgcacctgtgtgccaggatacagcggagaccagtgtgaacttgattttgatgaatgtcactctaatccctgtcgtaatggagccacttgtgttgatggttttaacacattcaggtgcctctgccttccaagttatgttggtgcactttgtgagcaagataccgagacatgtgactattgctggcacaaattccaagggcagtgctacaaattactttgcccatcgacgcacatgggatgcagctgaacgggaatgccgtctgcagggtgcccatctcacaagcatcctgtctcacgaagaacaaatgtttgttaatcgtgtgggccatgattatcagtggataggcctcaatgacaagatgtttgagcatgacttccgttggactgatggcagcacactgcaatacgagaattggagacccaaccagccagacagcttcttttctgctggagaagactgtgttgtaatcatttggcatgagaatggccaggccaacgatgttccctgcaattaccatctcacctatacgtg

SEQ ID NO: 141671 - DNA, 423 bp, Homo Sapiens
  misc_feature (313)..(313): n is a, c, g, or t
  misc_feature (348)..(348): n is a, c, g, or t
  misc_feature (354)..(354): n is a, c, g, or t
ctgaaactcaagcagctttaatcagagggcaggattccacgatagcagcatcagaacagcaagtggcagcgagaattcttgattccaatgatcaggcaacagtaaaccctgtggaatttaatactgaggttgcaacaccaccattttcccttctggagacttctaatgaaacagatttcctgattggcattaatgaagagtcagtggaaggcacggcaatctatttaccagggacctgatcgctgcaaaatgaacccgtgccttaacggaggcacctgttatcctactgaaacttcctacgtatgcacctgtntgccaggatacagcggagaccagtgtgaaacttgnattttnatgaatgtcactctaatccctgtcgtaatggagccacttgtgttgatgggttttaacacatttcaggtg

SEQ ID NO: 141672 - DNA, 682 bp, Homo Sapiens
  misc_feature (92)..(121): n is a, c, g, or t
gcgaacttataaatcatgtcatttttttgatttgaaaaaaaagaacatggcgctatgccagaataagaaaggaaaatccagcctagcctggnnnnnnnnnnnnnnnnnnnnnnnnnnnnnnggctgggagtcagctgaaatgattccaggatatctcaggcatcagaaatttctcccatgagctccgcgtggaccttggacaccccatagatggtcctgggtctctgaatacagagatcgggggttgggttccggggagaggtgggtccaaaagccccaatcgtgctaggcacaaacaattgcagattgtgttccgcagcgacatccaggatgttatgcaggccactgtgaaagacatgatcggggggtttccttctgtcagacaaaatcacactgtcctttccaaatcgtttcctcaaaagattagcaagccccactcccagctggccaagagcccctgtaattaagactcgtggatggtctgtgtcagagaaagacgcagagtggaagttagcatctgctggaatttgccgaggggagatgcccagaaagcggaccggcaggacaggcgtccaacagccacaggctgggctctgccccgctcgcctcagcatcctaatgaacagcattttcttttcaaataccttgagtgggattgaggtaggaggcggggctcagacac

SEQ ID NO: 141673 - DNA, 333 bp, Homo Sapiens
ttttttgaatgaaaatgacactgttttttatttttactctactggattgaaagaacagaaaaagaactacagttggtatagagaactattaggccatctatacagacacctgagaaccaattcttctctacgtttaccatcttctgcagccacttgcttctgctttgtcattcactgacatttcaactctttcagttactgtatcttcagatgctgactggacatggctttctgactgtcctccagtgtaggtgggggtgctgtactttaaaaggatagatttaaactgcatcagaggtgcatctgtgcgtacacccattgggtcaaaatgag

SEQ ID NO: 141674 - DNA, 650 bp, Homo Sapiens
  misc_feature (37)..(37): n is a, c, g, or t
ttttagtttctcttctgtaatttattggactctaggnatgctcacgatggtgctaagtggaggtgtgggggtttctttttgctgtggacagtaaatagtgagaaagtggtgaaattattccttcctgcggcagggattggaacttgctgcagagagtgcttccttgtcagcctcagagccagttgacagcttcagaggcgtggcttttgtcctcctctctgctgcacccccaacccccacgctggccttcttagcctgggtctggcgcatcagggcctattagtactgatgctgggctgtgatgttcctctcctcggggagcacggcagcagaactgaacaaagtcactggtaatctgtgcttacagcctcccccctggggagaaagcctagccagctggcactctcacgctgagcacattcacttcccctggctggtcggcagcctggcaggggcccagaggctggccggctgcagggctaacctgcaccagcaccccaggcagcccagctcaggatcacacacgcattgttctctgccttccagactggacactggctgaactcacagcttggacggtgtggctcatctgcttaggccttcccagggtagctctctagaaataaaaattacgaacgctggatgaagaa

SEQ ID NO: 141675 - DNA, 751 bp, Homo Sapiens
  misc_feature (183)..(222): n is a, c, g, or t
tttgttgttaaattaattttaataacatatttgtattgggcccaacataaaaggttatttcaataatcaatatacaaaaatatcaagacatttcacctttttttgtactaagtctatgagatctgatagcattttaatgcctacgggatatttccattcagaccagcctgtttcaggggctcnnnnnnnnnnnnnnnnnnnnnnnnnnnnnnnnnnnnnnnntgggtctggatcctcagcatgatactgtaggccgccaccagtctcagagacagagctccagtttgtacctgttaacacctctttccaccccaagatactgccctgggtctccttaacctctttccaggctcaggccctatctctgagatgagaatggaaaataaatcgagggccctgggcgggagaagcatattcttgatgcagaggtggtccccggccatgggcattgggaccgcctggctgagacggcataaggaagtgattcaggctttggagttgtacagatcagcgttcaagacccagctcctctgtgttttagctctgtcactttggtgggtttaccttacctctctgagcctcagttttcttatttataaaatggagaccatattactggtatcttctggtcaccatgaagattcacaattactgcaaagtgctggcacagtgcctggcacacagtaaatgcacagacatggtgttactagagatgtcgtaggaaccttccctttatgtgcagggggatttg

SEQ ID NO: 141676 - DNA, 669 bp, Homo Sapiens
ttttttggagaatcgggggatgtttaattttaatatgggggtttggtccttcataactggctcctcttcagggtgtgtacttcaactcagacaaggtgcacacaggtctcttgaagatgccattatagatgtctgaagcctctacaatagggtctgggacacattaagcactagaaacagcgttcctcttctccacctcctcttccttctccttgcaaccatttgagttggaaagactctgtgccagccgctgttctaggagatagaagtgaatacaacaggcaaggtccccgacctcatggagctgacatccttgcttttgaccttgagcttctctgcattcagtcttctcatcttgctggcatgaagaagccttcttgagccaagatttaattaattttaggaatgcagccagaggaaaggaaatttgtgtttgtaccaggaaaccatgcagaggtgaccacagcctctcttcactgagccaatccgtggtagctgggggacatgacagcccgttcatttcactgtcttctggctctctgtgtttccttgtgagtgttcaaacatgtggcatctgtctcttctgggtctcagtttccccagcaagtgaccgttgggctagtgagtgttaaaatactgcatatcctccaactgtggcacccaagatct

SEQ ID NO: 141677 - DNA, 658 bp, Homo Sapiens
gaaggtttatagaatatttatttcttttttggttgcagctatctccttcccaacctaccactgctaagactgtttcataagatgcacttctctacactcagctaatgaggtgtttcaatcagcagttgttctttggatgaggagccgatattgttttaaagcctattattttcttgggtgggtattctggagcatggggagctgaaagtgttgcaaggaaactgctgtgtgaaatttgatcaggtccttggtattcatttttatgtttcaataactgatttattttttcccccttgtacttaagatttaacatgtgttgtatttccagcagttcaaatctaattgtgtcgaatttccaggattggaggaaaagttgctccctttcagccctcctactagaagcactggagctaggctggcgggcattggaccctagtaggtatagcaggctgtgaagagcgactgggtggaagcagccccagaagaacccgtgtgaacatactgtcctttggccgcctggcagttagccatggcccgcttcataaaagcctccttggttgcctccttgtttgcaaccttgccaccccaggcagccagtgcactggcctgcagggcccgtccataagagaaacttgtttccagggctttgtagagggca

SEQ ID NO: 141678 - DNA, 517 bp, Homo Sapiens
tttgtcttcccacagtgtaagacttttattgatgctatttcgatcacaaaagccacaagcggcatggagttcccaaagaggtgagtctccttagtatttcctgttcagtcgtgagtcagagctgtgggcacgcaggctcaagccatttcacaagtcagtcaacattgcagactgtacataatagtacacttaatcaatatataaatgaatagattaaacattccacaaagtattttttaaaatcaagagaaaagaagtaggagaactaggactggaaaagaactaggactggttaacaaactactccagggagtgctaggaagttgcaaagaatctcctggtttgggttgggtggttcgtaggactttcaaggaagaatctttcatgtggcagaggcttcagtggcagattctgagttcttatgagtgacagcaagacagtgtcagttaagatggctgtttgaagctgctgaaggcctgctctttttatgaccagagtcctctagtgacgactgata

SEQ ID NO: 141679 - DNA, 503 bp, Homo Sapiens
gacatgagagtgctattatgggaatgctgtttatagctaatctgtaaaaaatgcataagatggtttagagcagggaaaactgacaaatcagttggaaagtcaagagtttagacaactgataagggcttgacaaaagagatggaaacaaatggatattttcattttcaagaggccctacaagagtagacagaattcagtaacagatacagggttggcagaggtagcagtggatacaaggtggatgagttaaaaagtaaggagtagtaaacaaatacatttgttaatgatggcagaaaaaatatctcctattaattgctacatctctcttgcctttaacttacagccttcttacatatatgcctataaccactgtctacattttcttaccacaaaggttccttcttaagttctgttataatggcttccattacccatgttgatgctgaaacttcttactctagaaggccacttcttcagtggggacactgaccttgcggataccg

SEQ ID NO: 141680 - DNA, 776 bp, Homo Sapiens
  misc_feature (687)..(696): n is a, c, g, or t
ttttttgacggttcatatctttattttgttacttgattcccagtcttacaatagctcttctcagattattctcaactttacaagataatttggagttactgcttttcaaaatcctttggtaattgcttgtgcctaaatcatgccaccttattccatgggatccattaatatttgggtaactagacaagggtatttagcaatccagggatgcagatgctgtgaaatgggttttcacagatacggagctgcagcttaacgttatcttcagagagacagaaagcggagtctcattatcattttctaaattttttgccaaagggaagttcagttccatatctcttgcttttctttttgcttatcttgtttttctacacacctcactggctgctccttctcagcctcctttgataattcctctgcacctcccagatctttaaacacgggtatgtttcaggactcagttctctcacacaggtgatctctttgtattctgcagctttaaatgtgaccactaactttaaaattcctaaatttatatttccagtgtgaatttctctctggaactggaaatgcatatcttcatttcttgatatctctatttagatatccaatatgcatcttgtcaaagtctaagttcaacaatgtctttattcttctcccttgagttggtttctgttgaactcatcnnnnnnnnnngttgtgcaggtcaagaagcgattttgtactggctatgtagcctcagacgttctctccacttctgagtttctccccatgaa

SEQ ID NO: 141681 - DNA, 582 bp, Homo Sapiens
ttttacaatataataataactattatttattaggggctttctcaacgccaggtcccttttcaggcactatgccatccttatagcaattgaatgcagtagctatttttagtagccccattgtacaagtgaggaagctgaggctcagaaaggtgggatgacttgcccttggctgcaccctagggtgctctgatgcttacctgctccacaggaggcctctttcagagtcctcctcctccccttcagccactagctctacccctacctagggacagcctttatgtagagtcactgtgggtccagcagcaccattcaggccacggatgtctttctctggctgagaatgggaaggttctctgtctctgcagtggggtgagtggttgcatctaggtcaaatatgggagggaaaagaaggggatggagtgagggacctggagggaagagggagaacatgcagaaaacaccagatgctctttatagcttcttcaaaaaacaaaggcattagggaacacaggtttttatcagtctgttaggaggaaggagggagaagggggagtagaggttgtgaaggatgtctattcagat

SEQ ID NO: 141682 - DNA, 1261 bp, Homo Sapiens
  misc_feature (33)..(33): n is a, c, g, or t
  misc_feature (1149)..(1183): n is a, c, g, or t
ccaggtgatcaaccagcaagggttcagagcgancgggattgtaaccatctcctccatggggaaccaggcgttatcaatattcagagggggtcgtctccactgggaactgcccaagcagggggcctctgcagaaaagcatttccctttcagagacctgcccaggggcagtgaccaccatggaggagacgagaggagatgcagacccagcatgctctctacagaagcctttactggggaggggtcagagttcatggatcaccgggaggtgcgagtagagtgttctgaggacactgctggggcgggggcggtggcgggaggccatggcttgggcagactgcccaaaagtccagcttcttaggtcagagctctgctgcccatcctgcggtggtcttgccagggaatgcccaggcatcctggcttcacagagcctccctctgggggcccccatgggcttgctgctgtccatctgtctatgtggaccccagaggccagcagaggggccagtcctccttggcaggtccctctggcttggctgcttttcctgggactccccaaaaagccagtccagggggtccacagtatcagccatgggcagtgtgggctgctggccactgaaacgtgcggtgatgtctcgcagggacacagcagggcggcccttccggcaggcctgggctggcctgtggggtggcctgggttggccctgggccgtggccttgtccagcacagaggtgggctgtgccagtcgagatatagacctcacgtagtcatccaggctaggagagggtgggggctcctgtccaggacccccaagcagcatctcctccgtggtctcccgaattgtgggcagatgggccacggagagcagaagccgggacctcatcactctggcgagaggaggtggcaacctggagctgaggaggtctgggggtggcaggagaatggatgagcagggacagtccagtccaaaggaagcccctgggaagcttgggggccgaagggtggagggtccggcagggggtccagcgtggggtcgctgggaggaggacagtgcactgagtctcacagtccaccgtagcaggctcttccctgagcagtgtccccggccgtaatggccgaattcccgggcatatgtccggtaccgtcgactgnnnnnnnnnnnnnnnnnnnnnnnnnnnnnnnnnnncgccgcttcctcgctcaaaacgtcgctgcgctcgtcgttcgtctgtaagacgttgagcgccctatatgatcgtataca

SEQ ID NO: 141683 - DNA, 668 bp, Homo Sapiens
  misc_feature (614)..(622): n is a, c, g, or t
acaggacattatgatctaggggaaagaaaattagcacaaaccttttcaccgtcaatagatattctcaaatcttcaaacctagaacgacatttacacttgatggctaataaagatggacagctaatgacagaattatttaatcgattagaaagtcagcatcatttccagatagaaaaggctctagttgagaaacttcagcaggattttgtagctgactggtgctctgagggagagtgcctagcagctattaactccacctataatacttcagggtatattttggatccacacactgctgttgcaaaagtggttgcagatagggtgcaagacaaaacttgccctgtgattatctcatctacagcccattactcaaagtttgcacctgctatcatgcaggctttaaagattaaagaaatcaatgagacttcatcaagtcagctctatttgctgggttcatacaatgcattacctccactgcatgaggctttattagagagaacaaaacagcaagagaagatggagtaccaggtctgtgcagctgatatgaatgtcttgaagagtcatgtggaacaacttgtccaaaatcaattcatatgaaagctttcagagtaaannnnnnnnnctagctataagcatgcaataataaatctcaaacactgatttggaaa

SEQ ID NO: 141684 - DNA, 389 bp, Homo Sapiens
aagttggtaaattttatttaatatgtattttacaactcattttttaaaaacgagaaacagctccaaatttcatgatcttacacccccttggctatggaaactcaatacaggatgcttttatactattttagtcctctggtcacttggtcatggcctagaatgcaaatgaattaaaactccacaactataaactcaagtaggttacaatgtaagtcttgaaagggaattttctttggagttgctgcctcactgccttatttatactacagagcactacagcctaaaagctgttttatagtctaaaacttcaaggccacgatctttaagttcctttggtgtacaatgttagtgatcacacatgaaatgaattaagagatctaaagaatatt

SEQ ID NO: 141685 - DNA, 366 bp, Homo Sapiens
tttgaaggcaatagagagagactctgtttcaaagaaataaaatgtaaagacaaatttctccttcctcttcaaatatgagaatcatcatagccctccctaactcctatattttttagattaatcaaactcagatttctcaaacattctagaacacaacttgatcttgcctcccaagattaacccttccagaactttttaactttgttaaagtgcctgtctttccatctttttaaaatagagcttatcaaagaatttctgtgaaagtttccctttgcttcctcaccggaatgatctgtgatcacattaggattccatctttgaaaactactatctaagccatctttccattttaagatttctgaatac

SEQ ID NO: 141686 - DNA, 646 bp, Homo Sapiens
  misc_feature (105)..(105): n is a, c, g, or t
gagaccattagcttcatcaagcaaaaagtcccttctaatgaattttttacaaccccagtccttcccttgcacaaatcgatatgctctttggctttccattgcttntgtttcttcccttttagcattcagaagggaaaatttgaattttgctcgaacttcacttttggggcagctgactaaaagcaaatataaggacaagtagtctttactttcatcatctaatccctttgggtttaccctcaggcaccatttcattttgtcacttgggccagatgaaaatgttgaactttttaacacttcacccatttcctctcgacaaaaactgaagttattaatggtccacatataggaaaattttactactttaacctgtgtgtaacaccagctttctgctatgggaccagtagacatatctccaggtagaggtggggtgggttcccgagacatcaccactttattgtagtctttcaggatttatgtagtaccccacacagttgagtaccttacctggacgtgctgggcggcagcggtcagtcctggtggagactcctctcccgctgaggcggtggccgtgtccgccctgggagcccgaggctgcggtggtggcagcaggggtgatggcggcaagtccctgtggcggccgcaa

SEQ ID NO: 141687 - DNA, 393 bp, Homo Sapiens
ttttacagcgataggaaaaagataatttattctcaggcccagggagaagttgtctttaacacttttcagagagagtatacctaagatcctatgaagataaccagaagaaaagtaatacaattacaaagtgcaatgggcccagggtcctgtaggtgatattggattcagttaatgcattcttcatgatttctcatttgagttcttatgctaaaagtctggatgactctggaggctaggcatgtagcttaaataggtggatccagatggatgtgtttcacagtacatggagaaagcactcttcttgacagctgtgattctgtttttacagacgttgttaatgttgaaccctctctgatgcagagtatgttcttactgtagccaatgttctgcaaa

SEQ ID NO: 141688 - DNA, 514 bp, Homo Sapiens
agaagagcgtgtatttatcaagcactcgacacaatgtcagatgcggagtcagcgctccataaatgttggctgtcatttttgttctaacgtaagagaaagctggatgatcccatctgggtttcagccccgttttccctcttcacttctccggtgggtcagtgggagctctgccgaccgcctggctgcggccactcactgctgggactgcgcagcctgcccgctcccagcagctggcggagccgcaggacccccgcgccgcccgggccgccgccgttagggttggctcaagcgtctcggcccagtccgccagttttacagcccgaactcaaagagggcttttaacttttcattcagcagcagcgtagctccgacttttaataacacacctcgtgcacgacaaaaatttgctcctggcaatcatggtttcgaccacaaaaccacagcggggaggcgttcctgattaactctttcagcgctccaggcagtactggagccggcgctcctggagatcaga

SEQ ID NO: 141689 - DNA, 465 bp, Homo Sapiens
ttttttcatgtcataaagcagtaatttattgtgatcatagattctgcagatcagggtttctagaagggcttggctgtacatttcccactcgaaggcttaggtgattgatgccagatgtgggggctgcagtcatctgaaggcctggctgagctgggagctatactttcaaagtggctcattcacatggctggcaagttgataccagttgttgactgagaacctcagtttttccatgtgtagctgtccacagggctacttccatgtcgtcatgagagggcttaaggcttcccccagtctaggtaatccaagggagccaggcagagtctgcaacactgtagccttgaaacccataaaccatcactagcactctagtgtttgtcacacaggcacagctgtgattacaggtgggaaggaagcaatgaggccatgaaattcaagagatgagaatgactgatggctctctcc

SEQ ID NO: 141690 - DNA, 579 bp, Homo Sapiens
taccgtattgactaaaatgtaagttttttttcctttaactgtgtggttgtgtgctatggtatgctcacatacactcttccttgtggaactgtaaagtctcatctttaaataattcatctttttaatcattcaagacacagagcaaagctcgtaagggagaagccaatccttgctattgctttggtctcccacagcacacggaggaagatgcagggcgcatcacttacttctgcactttagggtactgcatctccaagatggcatttgttgattcagtctggctttccttcaagtgccttggccacatgttgtctacccagtcaatgaaatccaccgtggagggcctctgcaccatattctccagcctggtgtggctaaactcgaggctgatgacattatagagtttctctcgctcctcctctggggtctcatagtagcgtgtccactgagccatggtcatttcaatgcctttctgtgtgttcacgtccatgacatccaccatgcgacgactccccacacacattttgacatcattcacagtgaagtctggatccggcattctatgaaacaaacaccagt

SEQ ID NO: 141691 - DNA, 458 bp, Homo Sapiens
tttttttattcagcatgcatttattgatctctgatgatacaaagataaaggtaatccctccataccattaagtaacattctgggggtgggggtgagacaaacaaatgaaccaataattaattacaattatacatttcaaggagacttttaatctaggttaatgtgaaacgcagccatcaatggtttgtcaggaaaagggagatgaagtcttgctctggggcaacgtttggcctcattgcagtcagacttggctgggatccccttgtctttcctgtcccaggacactgggctttcacaagccatcactggctttggtggcatctacttggcattcgttggcttccaaaaagaaagtggctttctttctcccaggaaatcaccctcccactccatgcttgtgggtgagagcctctccatcaacatgctggtctgtggcaaagttgggtttcaaagctagc

SEQ ID NO: 141692 - DNA, 505 bp, Homo Sapiens
tttttaaaagaaaaatgttaagactttattcaagatgtgtatcaggcattataacaaaacagcagaacttcaacctttggaatactgtaattttacatccctttgatgcacagtccagtatactattttattacagatcattctatagggactacagacatgaactagaggaaatgtgcacagtcaaaatccagaatatcagctctgggagtgtacactgttagaggatgaagcacatcctttgccatttcaaatactgtgccaggtggaggactaggaaggctcaaagatggtcatggttgacaagcactcttatcacaaacacatggatagcttatcacggagaacacatttcaaaggccagcaaagtgagcaagctattcacacaaagccaggagggattatgactaaactctccagtttataagcacaagtccacatctcacctcctcagaacaggtgctcaatggcaattaactaaaagttatgacatgaacattacaga

SEQ ID NO: 141693 - DNA, 578 bp, Homo Sapiens
attatctaaaataaaaacaactgccactaaattttattttaatttgaaattattaccatcacataatttcacatcagatgtcactacaagtgtatctgaccttaattgtatcttctgactaaagctgagaaccaaatgagaattgcataagctccttcagaaggagacaatcatatgtgaggtgaatctcaacatgtccacagattaggtaaagatcaaacaattgagtagctttgatttcacttaaaagaatctcagaactggaacaaaacaagagtgccctctctcaccatcctactcaacatagtactggaaatatgagccagagcaatcagccttttgaagtaaaaggcatccaaataggaaaagaagaaatcaaattaactctttttgtagatgatattattctacacttaagaaaccctaaagattctttcaaagcctcctggacctgatagacaactttagtaaagattcaggatgcaaaatcaatgtacaagatcagtagcctttctatataccaataatattcaacccgagagccaagtcaagaatgcaatcccatttacaatagccac

SEQ ID NO: 141694 - DNA, 526 bp, Homo Sapiens
tttggtcttgaagattggctataaaacatgtaacagtagtaacaaggatatactatctttgaacttaaaataagggtcaattcctctagacttgttttccatccagtgaaaaattgcagtcattattctgaatcagattgttttctaaaagaaaacctcctgacatcgaggattgaaaggcaccctccaggatcagcttctgtaagacagcaggctcctcagtgcccatcatctgcacccgtggctggttctgggaggacagcgttccttgtctatcagctggcccagctgcctttgctgcttctaagacaagtacaagttaagtttcacacttgattgcctaactccacattctagctggtgtttagtctaagatgcttggggcagtgagccgtgtggtgcccgctctcaatgatggatggagccgcttggcaggcagctatcagagggagagcagctcttcatgtacaagacataaacatctctccacagtgaccactactgcacaccacaccatcttcccaca

SEQ ID NO: 141695 - DNA, 593 bp, Homo Sapiens
  misc_feature (79)..(79): n is a, c, g, or t
  misc_feature (369)..(377): n is a, c, g, or t
  misc_feature (408)..(434): n is a, c, g, or t
  misc_feature (443)..(488): n is a, c, g, or t
caccacatgtaccatttaattactgaaattgcaaatgcataaacaccaaagacacttattttgacttaattagtaattntctgcttttataaatctggacccaggagaacaaagtcatgacctatgcaaaaagagcaaaccaaaagccaccaaaggaaaataaataagaacagccttttattattttctttatactcaagctgttttgttgaaatgtgaccacgaactaggtcttaacctagcaaattcacaaatttattcagatagccaaattatcaaggaagtggaaaacttccatttttaattaatgctgtgtaattcttttggtcatttcattacatttttttcccccaaaacagcaccttaagnnnnnnnnnggaggaaaggccatctccttatagttaaccnnnnnnnnnnnnnnnnnnnnnnnnnnnatcagaggnnnnnnnnnnnnnnnnnnnnnnnnnnnnnnnnnnnnnnnnnnnnnngtcacttgataaacaactaattaatgtctttttatctcttcccacctggaggaaaagtctccttagagcactctcaatcccccctcccaccttgaggaggacaaa

SEQ ID NO: 141696 - DNA, 467 bp, Homo Sapiens
tttctgggtgcaagaggtttatttgggagccatcccaggaagcccaaggcgggggagtggggaagagagggaagggagagcccccgcaggaagtacatgaatgagtgggttactgctgcgggcaactgggactccatcctgctgggcatcctctgagagtttatgtagaatacacttcagaattgtcctgctcaaggacaatgaagctgaggtcctgctccttattgactcagggttgctgctcctggggacattaaccccccaacacttctagcttgcccagtgcactgactgagcacacagctgtggccaccagagaacctctttgggctgtgatacaggaaaccatcggtgtgcatggtaactctctagcagtgtccttcatgccgggacatggggacacgggcaggcactgctggcatctgctaaccccggaggcccatacttcagaaccggtcagctgggcc

SEQ ID NO: 141697 - DNA, 342 bp, Homo Sapiens
tttgctcataaatatcatttatttcataaaacaaggttcctttccttagcaagctcagcagttagcaggagagatagacacgcacatacacagaacaaaacataatgcaaggtgggactgaagtcttcaggaagaaggaccaggtgctttaacagagcaggctgtcctgagactagagcagtggacactcgccacctcccaggttctcgtttccttctgaccatctcggactttgctcacaacccccatctgggctgatggtgctgtcgctgaattgttgggcatatgtatgcagctcttctggttcctggagatccatactcctcctacatttgaattaag

SEQ ID NO: 141698 - DNA, 914 bp, Homo Sapiens
tttgagattaaataatttattaccattgctaagatgaacacatatacttaatactcaattttatgcagaactttaaaaaaatagttttaatacagtatcgaaatttacacaagtttattttgtcaaaagaccagtgtcccttgtattagcttctgcaggctctgctgcaggcacaaaagcttattttaaatgtcttcagagggtaggaatacaacaatttaaggatgaaagctttcctaggaaagaaggtgtaaatatagcaagcaattttcttttatagagtaataacattttaaaatataacatttaaaaggggagcttaaattgtaacccaattatgataattagagagataattctatagtaaattaattcataaatattttctgaaaatagatgatttttcatcacagtaacatttttgaaagtataacaaaattccttcacagtctcctactagtgacaattaactcgttatgtaatgagcccatctaaaacaacaacaacagagaatatctgccatgaatcaaatctcagaaatttagaacctatccaaaaactgggaattgttgcatttctacttttataatcttaaactaccataaaaacgtagcattcggtcacaggcctcttgcacattcatacaagagactatcattgcatttggattaacacgaaatacctatcatagcatttgcagtacacacattctaatgttatatatgtgtatatgtataccaaaaataagaaataaactaagcaaagctagcacacctctttttcaaacctcaagcatctgaacaagagcttttagcctcaataatgaaggacatgcgtcagtttcataaaatgttagatagctgccccggccgtaatggccgaattcccgggcatatgtccggtaccgtcgactg

SEQ ID NO: 141699 - DNA, 990 bp, Homo Sapiens
  misc_feature (285)..(285): n is a, c, g, or t
tttccctaataagttatatttaattactaaaaataccttcatatttaacaatcaggcagaaaaaaatagtacggtctgcatataaactaaaatggcacgtttctgttgataatttcagagattctggaagtttctaccatataaatttgaaatacgtatttgagcattaacttataactaagctgtcaacataaatgtaaatacgctgtttttgaaataaaaatttaaagcacctaagagatgggagtaaaaatgcactaacgtgtttttccaaatattaaactntctagtaaccccttctcagaatatccctgaatattgtctttttatggcttagagagtttttttcttccttttaattgtgatagtgatggtgaattcaggacatatgggtatttacacagtgtataaacagtgctcagaagaatgcagttccaagatgatctgtattgtataacataagtgttctgttttccagttatttactgataaacttgcacataacattcttggttgtgacagcagcgtctgtaaactgtcagtctgattctcagcctcgggttcatctttgcataggtgttctgtctaatcacaattatggatgtttagggtcttgctttggtccgttaagtgatgcaagtttaagtgataaagtttacaggctctaatctggagcatgtgggtcccgtcagcaccgagcacacgccctctgtggtggaagaggacacagtgcgcagccgtgactttcagtgcactgggcttaagtctttgaaaatagttcgagacagttcctcatgtggactgggatgtttagaaatctgctggtcggatcatcatggttgtggccttgagcgaatagcctgagcctttccagtagtaccatttaatgccgttgaacttatttgtgttctgcctctgtggatagtacattccgttcaagttggaaggaccacatgcatcaaaccaccagcctcctggtagcatttgtga

SEQ ID NO: 141700 - DNA, 338 bp, Homo Sapiens
ccaaatgttcatggaagcattttatttggtgcccatgaccactgatacaaaaaagccaaagcaaaatgaatgtgcaactccagcttcaataatatcaggccttttcaattctacatccttattatcttgcaaatttatccccccaagccccgcctcatgcagttggttcctaagtctgagagattctacctcttaaatacttaatctatttctctgatgaccagagtaatctaaaacaaaaatttgatagttacttttttacttaagtgcttcaatgcctcccatttcctacaggcttaaatattgatatctaatgtagtatgtaagactacttatga

SEQ ID NO: 141701 - DNA, 377 bp, Homo Sapiens
ttttttttgcttatatctacacatgtttattggtggaaaactcatacagaaagatgattctgtattaatctatatagctagaggcagtttataagtattgccacatatggttttctggtcccgctggagacagatccatacatcaagcacatcctaggcacagggaacaagaatagtctctctctgtttgctgagcataatatgatcacagaattttttaaaaagctataaaacaccgtgttgaggagggaacacagaaggctgtgagagatcatggacgtcctgaacgaggcgggcttctcataggaaatgacatctaacctgaggtgtgaaggctgagtacaatttcaccaggctttctcagcataccacaggtt

SEQ ID NO: 141702 - DNA, 541 bp, Homo Sapiens
  misc_feature (441)..(441): n is a, c, g, or t
  misc_feature (461)..(461): n is a, c, g, or t
  misc_feature (465)..(465): n is a, c, g, or t
  misc_feature (473)..(473): n is a, c, g, or t
ttttatcagttcagacgaatcatctcatttaatcctcacagcaggcttttgaagtcagcaataagatggtctcattttacagataaggaaaccaaggcgaagtgagattgggcctcttgttcaagatcacactggtggtcatgtgtgttgaatgaatggagccctgcttcaagctgcttctcctcacctagggatcggggtggtgggtgaaaaggaacagtgtacattgtctcggggtttctctttgaccccagaaaaaagtcacagaaattcctacagagcaacttggatcagcgctttgttatcttggcattaaacaggtgaccttgagcgccagctttgtcctcaggtgggacaagtccttggctaacatctgggccttggacagggtcttgggggatggctccgttctgttccatgtcaggcggggctgctggccanctgtgggggcttctgctcantcangggcacangagataggctagaatagtcagttcctcttcatggtttccctgatccactccaagtagtggcagacttt

SEQ ID NO: 141703 - DNA, 530 bp, Homo Sapiens
tttggattctggaaaagtcgtgacttgtatttagcttggagtttgttcttcttgttcataatttcctcaggaaggaaggaaagccagatatccactttcccactatacaatggaggatgctccaaatgctgcttagaagaggagggctctcaagctcaggggaggctctggcagcatcattgtgatctcagtaggaataactgtgactttgctattgcatgatgagaaatccaaatgaagctcatgaagtcgactgtaattttctaggctggtgactttcatggctctccttttttgagtagttgtttaagagacaagaatggggagaatgagatgctggcttgacagtaggtggagcaagctggctttcatttggtaagatttgaaggaccctggaaggctaagcaggcttgctttatatgggtatctcgcttctcttcttgggacctccccactgctaagtgaggctttgctagagcatggagccagctacccaaagcctgggtcccaccgtgagaggcctcacagtg

SEQ ID NO: 141704 - DNA, 469 bp, Homo Sapiens
ttttgacattaaaaaactcaactttattgagatgtggtttacataaaataaaatgtataaatcttaagtatacaggtcaatgaattttgacaaatacatacccatgtaaccacctccaaaatcgagataaagaaaattttccttatgccccttctttctttcttagtataaatccacaggcatttgacagcatatcccctgcttctttctgctgaagtctcctcaaaatttcagataatttatctaacgagatcaagaaacgctaacgacatggcccatatccggtctatgggtagcactcatgcatcccttgcttataaatgggaagtaattgtcactaaattatacctttttaaatggttgattttattttatgtgatgcctcgatgggaatatgtttgtgtagggccctgggaaggtttatgcttgctctgagtataggagatagggcccaaagtaaaattcttag

SEQ ID NO: 141705 - DNA, 736 bp, Homo Sapiens
  misc_feature (61)..(70): n is a, c, g, or t
ttttcttgtctactaggagatttagttggctctgccatatactgcatgtttccaggtttcnnnnnnnnnnaacatgtcatagtcagggaagaaatgaatacactgagaaacaaggaacaggaacctcaaatttttcaaaggtatttgggggtaggggggtgtgaaagattccaaagcagcgtggcgaagtcctgtgaaaaccacctcagagcttgcccctctctggcctggagcccactgcctgccacccccgccccacgccatcaatcctctgtccctctcgggtcacgaacactcacgcaggtgcgcaggcaggcggatcgagtcttcctccatcctgagcgctcgaggcactggaacatgaagtggcgtcgaggaagcgtaactcggcactgggctctctggaggtgtatatgaaattcgttcctgcatgtgaaagaaaaatcacataattttagagctggaaaggaaaagagtgatgctcttgtttgagtcccttatttcagagatagagaaatgcagatgtctaaggcagtccagctgcagctctgaataatgagtcttccaaagcatccttggagcattgcttaatgctacactgagccggagtctcagacatgtctcacagcgagagagatcaggaagttctcaggttttttccactttcctttcctctccccaacccagaaaggctccacggccagccagacgcggtcatttaagaagtttcttccag

SEQ ID NO: 141706 - DNA, 452 bp, Homo Sapiens
tttccattcacaaaggtttattgggtccctgcctggtgctggtttgggttagtcactgtagaggatccatctgggccagcctgggaggggcaggtctggagtccgaggcagacacgaaaccgggggtgacacccaggggctgtggaggctgccatgctgaggacagctctgggaggaccgctgaagaggatgactagcgggtggggagtggggttcagccatctcccgggagctgggagggcccaggtggaggtgagggcagcagaggaggaggaggaatgggggtctccaggtagaaaaagggagcagggaatagcatgagtggaagcccagaggaaggaaagtactcggagggtctctgtgcttcaagaggccagtggaggggacagatacaaacgggcagtgttgaagcagggctgacaccctggcagcaaggacactgaggcacacac

SEQ ID NO: 141707 - DNA, 611 bp, Homo Sapiens
gtccaattgcagatggatgctctgcagctggtctcagggcagtctcttgcttgcagctcataccaaacagtcccaaatgcatagacatcagcagctttggagaatggcagctgatcctcgtccttcccgggggtcatctcgcgtacaatctcaggggccagatagcacagccagtcgtgggacagctttagctggttctcacgccgtccctctcggaccacgcctgagatcccaaacagcccgaagtctgtgatgaccacccttgccgttgtcatagaagacgttcttagatttgagatctttgtgtacgatgcccttggcatgaagatatcccatgcccttgatgatctcctgagcgatttgcctcgtcttgttgatgtccagagacgtcttggggtccctcacaaacgagtgcaacgtccgccccttgcagaagctggtgataatggccaggtggggcgggttcatgcaggcccccatgaagagcaccacgttctcatgccgcgtctgccggtagttcatcacctctttcttgaagagcttcaggtggtcctggttgtggccgtccatctccagcaggcgaatggccacctcgccatgccagcggccgc

SEQ ID NO: 141708 - DNA, 860 bp, Homo Sapiens
tcatgtaattgtattcgcctggcttaatcttggagtagtttcccatatgtcaccccccagtatgtaaggtccttcaccagtatcccagcgtacagttgtgcccagctcacgtactttgtataaacgacgccccatgccctactcttataattcgcgccgcgactattatgggacccccgttgttagccaagatatctgggggtacgcataaagcttgggcccccctgcagagggaatacttcttggaggtcggccgccccatgtgttggtttgttcgtacttgctggactgtccaaaacttcaatcttgccttttccaccttcagaattgggaagcttaatgttatctatggtgacttcagatgggatgctgtcatcttcgtcttctgattctgaactgttctctgaactgtcttgtgaactctcttctgaactgtccacttcttttgaatccgactgattcatctcaaacaaagccacatccatttgtataactttactatgaggcccatcaatgttttcaatattgaaacgaccaggtggtgcagctgccatttcttttcttagcttttcatttgcccgtgccatctgtgggagaaatgtctgtacctggtccaataagggactcctctctatccgaactgtttgaagagtggaggtctttctggacttaggttgggagttgatgagcaacctgtcccatatacctccgcggccgtcgcttcccgccgtcagcagctccttggacactgggactcctgaggaatcccgggtgggcgacgaacaactcgggctagccttgggcttgccatggacctccacctcgtgccgaattcaacacccagcctcgcacctagccta

SEQ ID NO: 141709 - DNA, 413 bp, Homo Sapiens
gcggccgcacgccctgctcgcccaggtacttgaagacgcgctgcatgtactcgttgtagaagccctcgcggtaggtggctcgcaggctctccgggagccgctggcccggcgcggcgcgcacgatcgaatcgtcgctgttttcgtccacgatagtctcgtcgaagtcgaaggtcaggaggaagcgcggcgcgccctgcgcggccatcctgccgtccctagataggcagcggaggccagaaactggaaaacagccactcattgtcggtgcattaccgtgagcaccacctgtagggactctgttggcctccagccgtcgtcacacgttcgggaattggaggggacgcggtgtcttatccacccccggatttctgggctccggctcacgagtccctccagtcccgagggactgagga

SEQ ID NO: 141710 - DNA, 473 bp, Homo Sapiens; identical to SEQ ID NO: 119698

SEQ ID NO: 141711 - DNA, 506 bp, Homo Sapiens
ttttttgttttcggattccttagataagcagtcacctttattattgttaaacgtcacccagaaaacccttaactcttagacagcggctctcattaagcaaaaggggaggcacatgaagctccaggcagggccgggagggaaccgtgaagccaaaggtcgtgggagcccccaggcacctgcgtttgcattttcatcctggaggagaccaggcctctggggctgctccccggggtgcagagaggaggggtctttcttggtgtgtaacatactcattgattcagtcacctgacctttgactccatgtattttgttgagtctggatgtgtggtgtgctctgcccagcagctgggatccacatgagcacagacatggtccccccgcgtccttggtgagtgcagaacctctgccgtgagcctcgattctgggaggttctgggaggttctgagcccagggtggatcagatgctgagatcatgtgactccaagttgcaagacacgtaatagaga

SEQ ID NO: 141712 - DNA, 440 bp, Homo Sapiens
  misc_feature (426)..(426): n is a, c, g, or t
tttcacttaggcaccaggaagaatttatttaaatattgacgtggatgacaaccccttcatctgaaatacacatgaactcactgacctgcctgaaactcctctcctgtgcctgtaatcatctcccggcagcatcttggccacagattgtcaccatcttttgcaaagaagttctgatttcctcagcaatgcgtccaggcttcctgtaccagttgctcagacagcatcatgttttcttgttttcttgtgacttgctgagagcctgaggtatcttgaattttatttatctcctaaatcatagaaggaagtagagaagtctgtaattactagtacctcatattcaccggaatcctcgtgaggggacccccaccatgcctattcatcggccacagcattccctgcttagatgttttccagccttttcttttncctgtgacaatagg

SEQ ID NO: 141713 - DNA, 469 bp, Homo Sapiens
agagaccaggtctaagcatcacacctcaccaggaaaccacaaccttccttccactccctcactccaccctactccacagcttagttttcttctctatcaggtgggggattaaagctgccctcttctcacatcaaagaacgaagacccagggaaaggtgaccaggggcctgaggagaggcaaaggtcttggagaacagaggaggtggtcatgggcatcgtcgacatcatttctggccacgctctgggttccaggcttgcttgccctcctcccagcagccccaagttgctatgaaactgttcacagatggggaaattagggcccaataaggaggggaaaggatttgtcccacatggcacagcaaggcactggccaaagaggccacagcgcaggtctccagtggcagtgccctctctcctactgcccacagcccacaaaagctgtgacatgttgaggctccttggtcataag

SEQ ID NO: 141714 - DNA, 470 bp, Homo Sapiens
acagttcctcccacgcatattatcgttgttgccgtcgttttctctccccgcgtggctccttgacctgcgagggagagagaggacaccgaagccgggagctcgcagggaccatgtatcagagctttgccatggccgccataccacgggccgccccccggtgcctacgaggcgggcggccccggcgccttcatgcacggcgcgggcgccgcgtcctcgccagtctacgtgcccacaccgcgggtgccctcctccgtgctgggcctgtcctacctccagggcggaggcgcgggctctgcgtccggaggcgcctcgggcggcagctccggtggggccgcgtctggtgcggggcccgggacccagcagggcagcccgggatggagccaggcgggagccgacggagccgcttacaccccgccgccggtgtcgccgcgcttctccttcccggggaccaccgggtccctggcggccgc

SEQ ID NO: 141715 - DNA, 497 bp, Homo Sapiens
tttctgggtgacttgacgttttaataaacatgtgattcccacacatgggaatgctcgggcctggaactgacccacagggatgcgtcctcacagcctgggggagccacggggatttggctctgattctcatcttccccctcttcatcccttgccctcccactcctccatgacgtggtggccacagctcctgccgggcagtgaggccgactgcagctgaccggtgaccggcgtggctggctcaaggctttggctctggttacaaataaactggccgtgaagttcttccattttcctgtgtgctcctctgtctccatgtgtgcgtttatagctggttcccacagggctgcttatcaaccccagcttcttccaatctcacggctgacgcgcaggctgtggaccccgatggggacgatatggagccttttgctggcatcccggcagtttggtggtaggaagtacttatgtgggtatttctcagttttctcaggtttggaaat

SEQ ID NO: 141716 - DNA, 679 bp, Homo Sapiens
agggcagtaattttattacaaaaggtttagggttggatcctggggttagcaggtgattggtggaagcaaagggaacatctgggaagtcttcaggcatgcatggctctcttttcatgcttcctggggggtctcatgtgcaaatttggagggagttcgtatgaaacatgcagtaaaaattcaggctgtgacatcagcaagcttgctgtgcgcaaactgcatttggccatattgattccggctgatttcagtcagttttgttataagcagagggagtttcagcaaattgtttcttttcttatctgcccaaacactatggttggtgccaggaacgtggcctggtgaggaggacagtgtcacatcctccctgcccactcctgtttccacgcgtgcatttcctcttctgcccctctcctaagccaggatgacccttctgaccgcgtggaactatcacagaaactgcttccatttataccagatgacttgggattcagtcttcttgcttggtttttattgactgcaaaaatccatgacaactttgcgcacatttgcttaagctgaaagcaaatggatgaaagtttgtagttgaaaatctactttctcttcaatctcttcctttttgcttttcttaggaaacatacaagacagtggtccggaaagctcactgcaagaactgtacaaa

SEQ ID NO: 141717 - DNA, 569 bp, Homo Sapiens
tttacatgatattttgctgtaaataacagctcatttttattaaggttatctgctaataatagaatgaagataaaatacatttaacctttgtattttacaagttttaagtttttcttgatgcttggtaaccagtttttgcatttttgtgtttgagatatattaaatatttacttttgttaatatattgtataatttctaaatagttcctcttgttcttaaaaaccaatgtactttttcaaattgcatttttcataacaccctaaatacttattacttagtaaaaatactaaatatttttaagggctacaagatttggactcagcagttgattccaggcggctgctgcttgagggaatcttcatttgtgatgaacacaattgtttgtttaaaaccaaaaatctcaagagttgaatctgaaagatgtgtgtccatgtacatatccttgaagatcagaaggcaggttccttatttcaggttaaagcacagataattggcccttagaaatggaaccaatcaaaatgtctacaaatgcagaagaccatgagagggaatcctaccaggagaacatc

SEQ ID NO: 141718 - DNA, 521 bp, Homo Sapiens
tttgagtgagcaaagctgggagttttattgagtgatgaaacagttttcaacagagaggagacgtgggggtggtccccctacccaaaggcaggaaagtccccttaatatgggggagtctgggtctttttatgggctcagaatggggggaggggcaggctgtaggtattactggaaaaggcaacattcgattggttaaggcgttattcagaaagaacaattgggaaagggtgggcaaacaggaacagaagttcccactctgcgtggtgggtttcatccaggaccagcaatctggtcttttagccttcaggctgatctttgcttgaacgtggggtttcatttgggaccctcccctctctgcctaggcatttggctgcctcatgtcactatcaggagcaagcctggggtcaggagtaattgggagcctggctttgggcctgtgaaatctgagatgtccattagagacctaagtggagatgtcagtagcaaactgaatataggggtctgcagttcagggaagaggc

SEQ ID NO: 141719 - DNA, 574 bp, Homo Sapiens
atccaatatcaaattttaccagtcaagatggttattatagaagacaaaacaaaacaaagataccaaatgctgggggagtatgtagagaatgtggaacccttatacactgtgggcagaaatgtcaaatggtatagccactgtagaaaacagaatggaagtttttccaaaaactaagaatagaacaactaccaaatgattcagtaatcccactgttgagtatatatccaaaagaaatgaaagcaggatctgaaagagctatgtaaactgcagcatttactacagcattattcacaatggccaatatttggaaataacccaaatgtccatcatcaggggaatggatagagaaaatgtgggataagacacaacataatattagtcagcctttaaaaagaaggaaatactaccatttgtaacaaaatggatgagacctggaagatctgctaagatgaataaattctagagatctgctgtacaatgtagcgcctatagttaacaatatggtattgtacacttaaaaacttgttaagtggatagatcatatgctaagtattcttaccccaatacaaaaaaa

SEQ ID NO: 141720 - DNA, 451 bp, Homo Sapiens
tttgcagtagagaaagagtttaataattgtagggcagtcaaatgagacagaggaaccttcaaatcctcctccctccagggtttggggatggagcttgtaaagggtctgaacaggtagggctaaaatgtggggattgctgattggtcaagaagcaagggggaattcctgggacagggagatgaagaaaccgcattcctgtgcagagttggttggttccttggttgaggtcttgagactggttggcttcagccattctgctggaattcaggaccgttttcctgtaatagggagtccctcggggctcttggttgatcttggttaagctggctgcttcctttcttctctttctatgcctctggtgtttgctgtgaattcacccttggactctagtgttctcttctatttgaggtatttttattcctaattttggctcttctttctggagagggtg

SEQ ID NO: 141721 - DNA, 689 bp, Homo Sapiens
ttttttaaactagtacacacttaggtgcaaacctggtttattacgttctttggttaaatattgtttctacatcctttcagagcattaggagaacaaagataatatttgatagaaagactgaaaacacatcctttgcttttcagagaaaagactgaatttacactggtactgttagaaattcttataattaggctagacgtataagaagttagggcttttgctgttgcttgtatgttttgaaaaatacattcccctgggctagccaacatcactgtcctgagacccagaccttcaggagtctcttgataaaggctgctccgcacatggtcagaaaagtcgggtcagctcatcatgtcgagactgcatggttcagtgttgccatcactgcgcaacgcctctgccacatctcttctgaatacagacagattttgggtgaacctgtctctgttcttgacggacaggttctgctccactccttccattaggtttctgaagcactgggcaaggacctcctgcttggggaggggctggctgtttatcaaacttgctctcagttcactgaaatacttctcattgagcaggatgagccccaggagaggcctggatactgaccactggttccgacagtcttcaaagaccaatggggtcatgaggacagacatcatctgctgcagggacatctggttttg

SEQ ID NO: 141722 - DNA, 496 bp, Homo Sapiens
tttagaaaacctttgttttattgtcctcgtttttgcttaagcaatttcttcgctttgttatagtttggccaggacagtgatataagacttggtctaaatgttagcttctggcaggtgacatttcctaataaaccataggttcttctgtgccatgtaatgactgtaaacgtcggtgggtttttgttaactatgctactttggcttttattcctaactctaattttgatttaatagcagagaacaattagtttacctggctggttagccactgaaacaaaagagaaaatgtagattctgcttggatttgaacaaatgcattgcgttgcaaagtaaacaaatataaaaacaaccagtacttcttttttgaacactagatcatggagaggaataatattgaggcaaactctcctgataagtatcaggggacgagtttcatgtttgttgtttttctaatattgatatttatttttttacttcaggaatgcaaaaatccaag

SEQ ID NO: 141723 - DNA, 505 bp, Homo Sapiens
ggtggaggtggtggtgagggtaatttttaatttatattgagacaaaataagctggctgacttatgcctgaggctctttttttcacagctactttggggaaaaaaagtctcattcagaaattaacatttctcaaaatgtgttccttattctgaaatataaatgaccccaaattgcttaagagtttgagatgagtggggaaaagatctagaaaagcatttattgtgtgccaaccaagtttgaggcctcctggtttgctcctttgggattctagatccttggcagtcacagttttaccgcgaagagctgttgaatgccattccgagttcattccatttttctccgtgtgtgcatccagttcgtattttacagctcccgtatgggagccggtaacataatgaattgccttgactctcgcttcaatccactttcctcgcttaatatgcagcccaaagttttgcagctcgctgtcagatgtagtgctagactttcacaccgatcccaaagc

SEQ ID NO: 141724 - DNA, 515 bp, Homo Sapiens
tttaatttatttagaacagaaatatattgctcatagttctggaggctgagaagtccaagatcaaggaggtggcaggtttgttgtaaggattcagtctctgcttccaagatggcaccttgaatactgtgtcctcttttgtgagggcctaatctcagtcatgatgaggggagaagccctcataatttagtcacttcttgaagaccccacctcttaataccatcacattggccattaagtttcaacatctaaattttggaggggatacatctgaaccatagctctcttcatcgacattgccttgcccctcaattaaacccagagaaagagagcagaatatgtccatgtcacaactatataggaaggtgagaatttcccaaatggcaaagtgtcttctctgttagaatttcccttaggcacatcagttcttgagtcacagagattcctaaaagacctcttgaaggtctcttctaggctagggagtctgagacttgaggaataagttgtatttctatgca

SEQ ID NO: 141725 - DNA, 511 bp, Homo Sapiens
tttaattttcaaaatacctttatttttttctctttgggtggtcattccatcacactgttaacagtgcacctgctgtaccatttcatttggataattctgacaatctccacttcttcatgcgtctcagtcagtcctcagtttcttcggcttctgttattgtccctgttacatcatccttatcctcgtcactcttcatcgagggcccagcacttggaggcccaggactcgcaggcttcagccctaacttgctgctggatgaggccaactccgccttttcgctggacttctgtggcagcgcgacatccacagggatggccttttctttcctgctctcctgaatgactctgtagatgatggtgatgacgaaggccccagcgatgatcacaatcaaggcagagaacacgtggatgtaaatgggaaccgctttcttgtagcagacgccttcgtagaagcagcacccgagctcctggcatcggtccctggagacgttgtagtcacaaatgtcatacag

SEQ ID NO: 141726 - DNA, 712 bp, Homo Sapiens
ttttttttgaagcggaggcattactttattcaggcagggactagccaggcagggccacagcgtggcagggatggggggagtcagcacatgggagtgccgtcacctccattagccacaggccagacggcccaggagggcgtgctactgcagtgagatggtgcactactgcagtgaggtggcgcagggctggtgagcttgggcacaaaagccagcatgtcaccctccctttggagaagcctctgggccacaggccttttccagctgacgggatgcggagggaaggggacctagtactatcgggattcagctgacttagcctatgagatggagcaggcaagagattccctttgcagggtgggaggttatattcctacagcctccattcttggagtaggctcctttgccacaccccttttcaccttagcgggccaggcctctcagccagaaaccgtatgtcaagagatcgtaagttaagagtgctgctcctgagcagggagcgggcttggaggcgtccttcctctccccgcacccctaagtccccagtgccgggcagatggtcttttcctagtcctcccctgaggaccaggactctctatctccttccctctgagtgaacttcaggaactgacgctggcccaggtgaacaggagcctctgcccaagaggtcttcagagcacttccctcctccctctgaaaggtgcttcctccgtct

SEQ ID NO: 141727 - DNA, 287 bp, Homo Sapiens
  misc_feature (31)..(31): n is a, c, g, or t
ttcgcacacaatcaccttttcattcatcaangccgccctgctggcatagggggatgttgtagccaagggtaggagttgtccccccatccccgtgcacaggtcaggacatgctgggggctcctggagggagaggaggatggggtcagcctagcccctcccaccccagatttgtgcgagggcccccggatggagggtgttggggggatggggtcagaccttttattccagggtagggaagctggagattattaggttagggacccacatcagaagcaagttacaaagtt

SEQ ID NO: 141728 - DNA, 408 bp, Homo Sapiens
tttaaattatagatttttattatgttatttatatttcatcagtttttccacttagtgttctttttttctgttccaggatccaaaccagggttccaccaccatgatctcagccatgatgtctctttggcttcctccaatctgtgagtttctcagtcttgtgctgtcttttgtgaccttgtcacttttgtaaagtactggttaagtatcttgtagacttgcttcctttcaaattgggtttgtctatattttctcataattgttgtaagattatagattttgaggataaatatcaccgagatgatgggtcttttcatcatactgtattgggggcacatgatatcaacaagagttattaccagtgattctgtgatcacttggttaagttgctttcaggtttctctcctgtaa

SEQ ID NO: 141729 - DNA, 425 bp, Homo Sapiens
ttttgcagggcacgcctagcagagggattttattttgcatacatggatgtcctcggagactgggccatcctgggcgatgcaggggacgtggagagagcccagccctgtgtgatcatgagtggagtcgaaggtggaactcaagctggagggctgggggtggactgtggagcctcttccagggcacgaggggcggtgtccctgcagtttccacggactcctgagctttcttctcccgctgtctggggctgggccagagacagcctgtgatgcatctggagtcacacagcatggtggatgtggttgagccagctggagctgggggtctcctctccgggcacaacatacctcactttacagaggagaaactgaaatccaggaccccagtgggccctaccttgaggctgctgcatgggttctgtggcatc

SEQ ID NO: 141730 - DNA, 545 bp, Homo Sapiens
agcaacagggagctgagatgttgccgcagacgcatgccaccgccgtagctgcggggcgagcctggcctagcctgggttagtgtcttcaatattcaccatgaggtaaggactgggctgccacatgtctcagcctcttgtcatgctccttcccggggacttatcacaactgtaatcagacaacaggttatggggtcgccccgcgttggactccagggggacgcagccctcctgaggacaaggagcgtgccggggacgtctgtcctggggaggtctgtctgtctgtgggccctggccccgggctcatgggagttaccagtcgcgcctgcaggaggagcagggaggctcttggtgctgagggggtcgtcagtaccggcgctggtgagacctgtcaggttcacgctgcggaggagggacccgggcccacggcaggccccctctgtgcgctcagccctccccccagcccaccttgcccctctgctctgggccactggtgaggtcacagccaggccagctgaccacacacagaggcgcgggccagagggagc

SEQ ID NO: 141731 - DNA, 605 bp, Homo Sapiens
tttatatttactaaaatgtatttggttgtttttaattccgaaagcttacaaccatcttttcatctaatctgtgaggtatttagtatacagcagtgattttctctctttccttttttataaagtgaagaggttcaactatccagagagtcccatctaactcaaaaaatgtaatggctttggttggattgcatcttcagtcagtacctgccatggcttaatcagtattttaagtgaatgaatcatgtttccccactagatcattacgagtaagcagtaagtaataaatagagaatattaagtattgaacattattagatgcagctttttgttctgcatagaagaaagatgaggataaaggagggcattgaggccacgaagagcttcccagacacccacggccatcagatcatcttcttcctgcaggcagtgccttctggtggaaggagctcagtctatcagagaataatcagctgtcacttattctctccccaagaaagggaaataggtctcagcagtttctgccatccatcatgaatcaatgaaatcatttcattaaaaatttttttgtatgaatgtgcaaaattgccaactaggagttcaatggg

SEQ ID NO: 141732 - DNA, 500 bp, Homo Sapiens
aatcctaagtgtgtacgcaatagagcttcgaaataaaggagcggaaactgaaaaaaatacatccataatcagagttgaagacttcaataatccactctcagtaattaatgggacacataaatagaaaatcaggaagaacataaaagacccgcaaaacactatcaagacttaatagacatttatagaaatgttccactcaacagcagaacatactttttatataagggtatgtggaacattcaccagtacataccatattctgagctacaaaataaacctcaactatttaaaatcagtagaaaccatacagagtgtgtttttacatgaaaacagaattaaaccagaaatcaattaattggaggatatctgaaaaaccatcaaattattgcagaattaaagaacacatgcatgatactggtacaagaacagacacatagatcaacggaacaaaatagagaactcagaaataagactgcacaccagcaaccatctgatcttca

SEQ ID NO: 141733 - DNA, 806 bp, Homo Sapiens
cttgtgacaaaacaagttttattttgcaaaacataatgtgatatgaactccactacaaaatacgggaacacattatttttaaattatataatccagcagaagagaaacagagtgaatggaggtctagggactgaaaggatctcttgtggcaaaggggaagaagacaaaaatacatcacccaagatgtggtaaaggggaccaagaaccactgaaaaagtagtgcaatatgtctaggaatagaagaaacagactgtgtatatatatatatttgccttgtcaataacatgcatcattcaaacaatctctaataaaatcttagtgaattaatctaatgaaaatattcacacagtattatgtaggcaaatatgtttaaaaaaatattttaataagcatattcagaatggcagacaaggaatgggagaagggaattattttacagtgcaaaattactatgcataaatttaacatctaatttgaaattttaaatgcctatttaaatattacttcaaatacattttaaagctcaacaaacttgtgttgaactgaattgcagatcctgaactctatttgaaaatacatcatgaaacagaaaatacccattccaaatgaaaatgatagtgctttgttgggggtgggaatgaggcggggagactaaatcactattaacagacttcttttcccaatgcaatttgtcaaaagttcaaaagttctgaaatgtactaaatcttaagcaaattaaattcatgatattactaaaactttttaaatagtgcaatgacttatcaagttatagtggctgcattaag

SEQ ID NO: 141734 - DNA, 744 bp, Homo Sapiens
tttgttatgcttgtatatgaaaggatgtgtgttgtgggttatgaggaaaattacattttttacctgggatgaaattttaaaacttgaaagctactgaccagaagcaacctgcacttgtggacaaaagaaatgcctaagaatgttcccagcaaaacgcagtcctcagggccccaacctggccaaacactcatccacgggaagatgaagacatttcccatgctcccctcagacaacgagagaccatgcagcaatgaaaatggaccatgtcagtgtgggtgggtctcagggagagaatggagacaggagatcacgcagcaatgaaaatgaaccatgtcagtgtgggtgggtctcaaggagagaatggaggacagaaatagacatagagcagatgctcagagccatgcagtgcaggagcagccacgcaggagaatttcctcacatcaaagttcaaaactacagccaaggcaacagagcaagaccctgcctcaaaaagaaaacaaagttcaaaaactaaatggcttattgtttagggatgtacacatacgcggtgaaagaaacgtactatgaagaaaagtgtgggaataataaagactaaagcaggaagtggttccctctgtaggagaagagaagagactgggactcaggcagggcctccagggagcatccaaagttatgtctcttcagattctattccctaaacctggtggaggtcctctgtgtccaatgtgtcaatattctttatac

SEQ ID NO: 141735 - DNA, 669 bp, Homo Sapiens
  misc_feature (49)..(49): n is a, c, g, or t
gaagaaggccagatgggcatacataaatgacaacattgattgtaggatntctgatctcctttatgattgaagagcattaatctgaagcacataatcgagggctatgtgtcggaaacatcttcttgttgctgtcagaatgttggtggcttcttcaacttcatgttgtttgtttctttgtcacttgggcattttttactaacgccattttctttttcttcactgactttttcgaattgcttcttggcatctttgaattttctaagatcttctttaacaaagttctgaagctgtgccttaattgatctctgagtttggtcaaacaggattgtgtgaaaatttatcatttcttgaagactgtcagaaaacttggtcaaacttgtctcaacgacagcatcattactagaatactgagccaggtctcgaatcccattcatgaactgtttatttgcaacacaaaaggcttttccagtatcaatcattgcaatacaaagtttcacaagcttatcaagttttagttccaattctgccacatcaccttctacttcttccaaagctgccctgaagcggggcgagtccttcagacactcctcgaaatccacagtcatcttcatcctgcctccgcctcgcaggcggcgctggcaaagccgagggggccgcgggagcggccgc

SEQ ID NO: 141736 - DNA, 471 bp, Homo Sapiens
tttttcagggttgccacgcactctttattgggcggggtccgggccaagcgtttaaagctgcgggcgagggcagcggcaccgtttgcgcggctgctcctcggcggggccggcttcgcggggagccttccccggggaccggaagcgcgagagcagccgcggccagctcagagctgccctggccccgccctcttccggccgccgcgcctcttgccgccgcagcagcagcagtaccggcatcctcggctcgcgctcgctaccttcgcccgctccgcgcaatctgggtgccgccggggagcccagcccagcgccggacgcgtagtcaatccgttgcccagcgttggccagcggctgccgcttgtccagggggagaatcagcacgatcctggtagccggcttcttccgagtgaggtggttgaggaacgatttccaccaggccttgtccatgtcagccggcctctccttgcgggcctg

SEQ ID NO: 141737 - DNA, 1150 bp, Homo Sapiens
ggggtttcctttccccgggcccttgtgccttctattggcctggaaggcatatttcgcgttcgaacccatttgtcccacctcgttctcctgtagactccgggagtccaagccattccattttctggaagtgggactccccctcatttcccggttccaagcccttgggcggtttccggggactggtggccgcgggtagctcactggccctttggttctcctaggccgggggagaataatcctccatctgcgaatggccgcctcaacttcaggggtcctccctgttttgcgaagggacatgcggagtagaatcttcgggtggtacttcccatttgtgtgccttcatagccctctgaagaatggtggcttccttgaatgttatatggataataatcaggatcttctgattcttcctttactgtcacagctgccatttccagggaaatgccagaatcttctgtgggttcagttttccacttagatggggccacaacttccacgtggagatagtattgacctgtcagcatctgttaccatcacacgaccacctacatgcttctttggctctaaaaaaggtctagtaatgatgaatgaaatccctgctttgttctccaaaatccatttcagggttgcaagatcatagttctcggggtgtttaaaggcaacaccttccggaagcccctgcactaccacagccgactggtctcgcagcatcttctcatatggtacaggtaccactgtggatttgcctaaagctttcccatagcaaaagcagaaatagtcctcaactgtttttctgagtgtttcaatttctacagcatctacactcatccgatttgcctgggttgtagatttcattttatgcatctctgcagctttttcttcttcttcaacacaatattttacaaaatctttttgaaaatcctttctggtattgacaaaagcacgtcctctttcagttccgacgacaaacacgtctgtttcatacactgcaatgcaggccacttcggctttggacttggccagttctttacacatggactcgagagctgacatgaggaatgtcaccaccatcctgctctccgaggactcctcatcttcaacggggagggtggacattgcaacttgggccatgatccccgagtgcggccgc

SEQ ID NO: 141738 - DNA, 786 bp, Homo Sapiens
  misc_feature (575)..(575): n is a, c, g, or t
  misc_feature (591)..(591): n is a, c, g, or t
  misc_feature (643)..(643): n is a, c, g, or t
  misc_feature (653)..(653): n is a, c, g, or t
  misc_feature (671)..(671): n is a, c, g, or t
  misc_feature (722)..(723): n is a, c, g, or t
  misc_feature (728)..(728): n is a, c, g, or t
ttttctctctaaattctttaatggttcatgaccaaattcttggttctaagactttgaatttttaaataatagatgtgcagcttgacttgggtaaaaactagaaacctgttctcccacccaggcctttgctttagtaattatcaagctgacggtctggccgggcgggcaccaggagtaccgaaggctcacttgagtcattagtgaacatgtctgactgagtctgggctgagggacctggctctgcattttgtaaaatagatactagcagattgtcccaagatgtgtacagctcattctcacagcccagcgagggcacttactccacaaatgcgtggccacaggtcatcacctgtcctgtggccctggcgagcctgatccctcacgccgggcacccacacggcctgcgtgccttctagacttgagttcgcagctctttaaggagctctcgggccagtttttctgatctagggctttcaatgccaagacgattccatctgtacaaggtcttgtcaagaaagccaatgatctcgtgagttatctcagcagtgtgagccatcagggtgatgacatcccangcgatcgtgtggcctncaggagcccagagcaggaaagtgaggagaaggtgctgatcagctgtttgcangagctctgangtctggtctgtccctgtnctgctaccggctgcagtcctgggctgagaggctgctgcttctggacattgnncagangtggcccagcacggcctttcacctggaccatagtctgtgctctctgctgccttccatc

SEQ ID NO: 141739 - DNA, 586 bp, Homo Sapiens
ttttaatttacttccatatttttttattagtaaaatgcatttactttttacaggcaagtatgaaccactttgaggttttcttcccactcccaattctcaattcctatgggtgcggtatcatctaagagaataagcattcttgaatattctggacatgtggcatggccttctgtaccaactcttctagatgtgcttgcctggtgtgccatggaccctgaatcgatataaacaagtatacttcgggtgtccccagttgctaaagatattaagtttcacacataataaatattcagaaactgcatgctggagttcaaatgtttgaacggtggttcctgttttgttatatataaactgacctaggaaaatttcttctccttcacatttttttgtgatgccatagacagaaaattccttgggtgcactggagatgtttcctgacggagacaccttctctgagatgtgctccatggtaacagccagtgggatgatctttgagcaagcttgattagggatgacccctggaaccctgaaagcccagccctttccaggtagaccatccgctgagaataatatctggagcatttct

SEQ ID NO: 141740 - DNA, 402 bp, Homo Sapiens
acagcagaagcctcccctgcacctgcaaatagaccagtgcaggcattgaacatctggggcaagactagcgtctcccagcagccccaggctttaaatctgattctcctccttcaattactgcttatcttcagaaaagccatgcacctcacgaacgtcacctgtcagtggccaccctaccttcatcttgctggtgggtgaggatgagagagttcagaacgtatgacctgaaactggtcccgaggaaacatcagatggaccacgttgagcatcacactgcagaatgtagggctgcattcttccaaactgttgggacgatgaaagtcagggaaagactgaggaaatgctccaaactggggcagactgcaaagatgtgacaattaaatgcaatgtgtaactcggaaa

SEQ ID NO: 141741 - DNA, 609 bp, Homo Sapiens
ttttcacattgcttctctttattttcaacagtttctttacaacagtctacacagggattaactcctacatgtacttcccaagccagaatctccctttagaaattcagattctatttctaactctataagatgtatctccccaaagatcacattaactcctcaagtcaacatctgcctatccccaacttcccctttttttcctcactgaacatttgtctgaatgttttttcctcactgaacatgttttcctcactcacactgaacatttgtctgaaactgtggctgctttgttgcttcaagatgcatgcacatcctggctttagtgtccaagtatgcagaatgaagcatttgatatgtgcacccagctagttaggcatgaaacaggggcacaggatgggctccgggtcatagaaggttctgtccccacagtgaggacaggggttggcactaagccagaccatgctgggccgccccaactcacacagcaactccctgagcctggcatgcagataggcaagcctctccaggtggagggtaccatggatgtcctcataactctccagggggacaggatacagcacgtgggtcagattgctcagcccgatgacc

SEQ ID NO: 141742 - DNA, 589 bp, Homo Sapiens
tttgttaattacagtatatttgtaagagtgaaaacctggaaatgaactaaatattcaacaaaaatgttggttaaataataacactgagagattattctaagtgcctcacatacataaagtcatttgctcctccaaacaaccctgtgaaggaattgcttttatccacattttaccggtgaggaaaccaaagcacagaaacgtttactcacttgcccatgtttcacagccagttgatgttgaaagacctgggatttgaaccctagcagtcttcagagcctacgctcttaaccaccgcatagatgaactagagtgcattcatacagttaaattctgtgcagtgtttccagcccaaatgcattgcattgtcctcattgcaatccaagctgcctggttgaagtgtcagccactctgtgttggtcgtagagagctaggagcaccaagatgatgggtaaatcttaacagtgaccttttgggaagatgtttcatccttaatttctaatccacataattgcctgtatataagggtgggcatttcaaaccaggtaaagttgattagcaagccagagtaggaagagtggagtcagaaagc

SEQ ID NO: 141743 - DNA, 773 bp, Homo Sapiens
  misc_feature (692)..(692): n is a, c, g, or t
  misc_feature (753)..(753): n is a, c, g, or t
gatatgtagacaaaagtttatttacaccatacaacattttaaatattttatacacagctgcagcagagaaagcttctcagagctttctagagaaaactgcaataataaagatgtgaaatatattattcatataaaagtgagattattactttattgcatttaaagcaatgaagaatgtagctcaacaaacattcatttaatgacaaaaactttgcttttatattataaagtaaaaagtgtagtaatggccaaacagactgttataaactttaaaaactgcataaatatatacattgtgcttcatggtgaagttttttgaaaactaaaccatatgaagcggttacaacatgaatcgttgcttgaggtttatctataaagattaccttacaaatccattccacgggtacttacaacacaggatggtcagaactgtacacctggtcatctctccactagcctgactagtgagaagttaccatatgaaaacaccactgacgtttggcacatgaaggtcctgacataagatagtcacactgtccagatagaaatgtcaggcttcccaagtcttaagtgtcagtgcaataaagttttgtctctaccttagtccatcttgatttttttaaacttctgtttgaaagtcaccctcttgcacattcagaggcaaattcagacacttctcccactctgctggnctcagtttccaagcatcctttgcctctgtgtctagacattgattgtgtgtaatgcggtatncaactggggttttgaagtgc

SEQ ID NO: 141744 - DNA, 640 bp, Homo Sapiens
ttctttaacatttcaaatcgtcttttaatttttataaaattatcaaatcttgctcacaggtctctggcccttagttctccaagaactcactcttctggctccacaattcattttttcatgtgacttgttagggatcatctgtattccaactgagggtggaattctaaatctaaggcacaaacttctttgcacagaatgctcaattaataaccatctaataaaccatgtggctccctcttattgcaaacagagtacatctttccagagaatatggagacaaatcttcagagtcctgttttcttccaggttgtctcataaaagaatgagggctgtttctctcaagggtttgatgatttcagatgtccatcttttctacagatgacatatcttcaggccttcagttcttttcttctccatttagttctcaatgataactcagagcaaatgaagccttctaacgcgagcggggaggcggttgccttccgtgcaggacttccgttgagggctcacaataagcggtctcaagcgggggcacattccccgccacttccgcggtccctcaaacaaacaaagaagccaaagtcggctgtcccaagaccaatgtaagcgcttaggaagctttgaggcgcttgagggcgag

SEQ ID NO: 141745 - DNA, 892 bp, Homo Sapiens
ggcacgagggattaattgagtacttccattttgattatgatgaatcttcgtgatttgtaggttttaataaggaaaggttgatttaacacctggatgatcagattcatgagtggcagctgcaattaggctcagcaagatatcccagggagttacagaattgcaagctttaggttccttacggtaacagtgcatgccctgagtacatcccgcagcgtggactgcgttatggtagggattttgactgtggtaatcttcttgaatcataactgaaaatctacgaagtttcatcatatctaaatggaagtactcaattaatccatgaagactagataaatgaaaggttaagcttactagactatttccatttgttagtctatcaaatagaaagatatcaaaattccaatttccaactttttccagcatacacttggcttgtccattataatcatcatctaaaatgtttagggaatttgaaaccgcagtaccacgaaaaaagcgtgaagatctaagatatcgctggaaacttagtagccttctgatattccttgcagagacagacacttcaatttcagattgagagtggaaaatacgaaaatcaatatatgggtgagaacctcttctttctgattcaaatcctgctcggctccttacacgtacatctcctagcatacgaatgtataatgcagtctgatcagaactgtcataggaaatagctccacgcctctgagagagctgccggggattggggcagccgaagagagcggagctggagctgaagctgatggctcctcggcggctgaggacgtgctgggggaccggcctgtccaggggcagtaccggcagctggtaacacacttccattgaatacgcccgccctgcctccgcgcggcgc

SEQ ID NO: 141746 - DNA, 426 bp, Homo Sapiens
caatggatgccagcaccatttttactcccctttcccaagcaaatcgtgcatttttgtctaacgagagacatcagtttctcaggatgatcctcaagaacgttatggagtccatgttgcaataggttctctttgggacctaatgactcattttccaaaaatccgcttctacttttggtacccggttgctacggtgaaatgaaggtgccccgcatccagaaagacgcactcctggaccacaaccggcggctacctcagccccacggctctgcaggatcagggctcgggcaggccccgcggagatgaagaatttgcagggagcctccctgacttccgtcggctgtgaatccttgtctgtcaggggcgtatccacaaaatcaccgaattcatacagatcgtttaaataaatgaacatcattaaagtcaaaa

SEQ ID NO: 141747 - DNA, 672 bp, Homo Sapiens
tttggcagcaaagaggattatttttaatagtgtacatttattcaaaagtatataaaacaacactgtaaattatataatctcacataaaaacactagaacttgatttgaataacaaaacaatctactaagaagtattgctcatgaagatttttgtgcccacctttcctaactcagaggccctcatttatgtcgcaacagcaaggtggcagggaatcaaaactggcacacattctatatccttcacagcactgcagggcaggacaagactccgtggcaatggttttggcctggctgttcttggcccaccacaccttgtctgggttgtgattttttacagccacagcttcaggttcctttgcagcttttagcgcgttgtgtattttgaagtaaagacagagcacgacaactatcagcaggagcaaggccgccaggataccaccagcgatgacaggcataatcactgcataaataatggctcctctgctccaggaagggcaagaaacatttcaaaaagagctccaatcatgtgtcagacatccccttgtcaggcatcctccagggtcttccaactgcagcttcccatctcaccacttctaaggcaactgaccatagacgctccccatccgcccagcaaccgtggtccatgctgcctgcgtccaccgccagcgtccc

SEQ ID NO: 141748 - DNA, 367 bp, Homo Sapiens
tgagaaaaaactgaaaacaaacggagtaaagcaaaacacatataaactaaaataaatatctaaaatgctgaattgccaagacctgcaggtacctcaatgttagagcgcttccaaaagtcaaaatactgtgaattttaaggaattttacaaatactgacatttaagtagttgactggcatttttgtccacctttatttctaccctgagtgggggttattttcaaagggaagtgtctttcaataagcctttctttgtattgtcagtcttaggcaaatgagagccctttagataaaaattatgtaaaatatgtgccatataaaggaataaaatggcccctctccagggaaagtgtcagtgaaacctcaaa

SEQ ID NO: 141749 - DNA, 1022 bp, Homo Sapiens
gtagcgaggcctgggtggcgcgcgtgtggaagtctgtgaggcgcagaggtggggcaggccgtctggctagctaggcggctgggagcgttttcgtggcggggaacggaggttgaattgccctgcctgggctcatagggaaggaggatgtgaaggagcttgtgaaggcagaggaagattattgaataataaaatacagttttgaaaaaaatggatgaagaacctgaaagaactaagcgatgggaaggaggctatgaaagaacatgggagattcttaaagaagatgaatctggatcacttaaagctacaatagaagacattctattcaaggcaaagagaaaaagagtatttgagcaccatggacaagttcgacttggaatgatgcgccacctttatgtggtagtagatggatcaagaacaatggaagaccaagatttaaagcctaatagactgacgtgtactttaaagttgttggaatactttgtagaggaatattttgatcaaaatcctattagtcagattggaataattgtaactaagagtaaaagagctgaaaaattgactgaactttcaggaaacccaagaaaacatataacgtctttgaaggaagctgtggatatgacctgccatggagagccatctctttataattccctaagcatggctatgcagactctaaaacacatgcctggacatacaagtcgagaagtactaatcatctttagcagccttaccacttgcgatccatctaatatttatgatttaatcaagacccctaaggcagctaaaattagagtatctgttaattggattgtctgcagaaagttcgccgtttgcactgtacttgcctcgtggaaactggtgggcacgtacccatgtttattttaagaatgaaaagcccattaccaaagaggttggctccacacaatccatactttaaatcccctcccctcccctgcgctaaccttccaaggtattccttaaaaaaggccctccccctttattttccgaaattgggggcaatc

SEQ ID NO: 141750 - DNA, 548 bp, Homo Sapiens
gcggccgctggcccgagagcctgcaggcagaccagagaagaaacgtgtgaagtaaattgcccatctccgcgcgagggacagaagcaaggcaatgaacctccatccggctacaggaaagaatgagaaaacaccatgtctccacgataaggaggcacacaggccagagcgtgagctgtggaatcacacagcccgggttcacagcctggctgggccactgccacctgaatgacctggagaagagtctcaggcccaaatgttgttttagcaatatccagtacaaaacgaaggagtgttttagcaaatttgtaaaaggaagtgagcacaactcgctcgagatgggcaatttacatgtattttctctgggtactttgcacggtggcatatgtgtaataagcacatgcactcctaggatgaggcctttacctcaactcataagttgaccatggcccacagtgggctccagtcctctaagaaaatgtagggcagggaccagcaattgtcccacagggtcatgccacatttctcttctaatggagccttgcagctca

SEQ ID NO: 141751 - DNA, 836 bp, Homo Sapiens
ttttaccgtaatgtagtttaatagcctggaatagcagtaggatgccaagaatttactttccaccgccgataaccacagtgtccttgctggccatcctacaattgctaaagagaatgtagttgtcagtgtagcatcgggactttccaggaaagtcagccaggatgcacccacctgggagtggcttccgcctggcctccagcagctaccgaaggagccgtgtcctttggagttaatggagggactggctgtgtattcaatcacatatgctacatggtctacacatcctgcccacaggtgagttaacaggtcatcttttcatctttcactctaagtcttggggcaggaggtagaagtcagtgacatcaggcccagggtaaatgagtcagtgttcccaatgacatatacggtggcttacagttaccccggcccagacttttttctctctgtccctccgtccctttgtacctgcgtgttatgtggatggcgtgcatgtgtctgcacagctgcgtgatgttcccctgtggactcaacctccccctcccctggccgccccacatcatggacagctgggctccaatcttctgcttttataaatagtgctgcagatgccttgtgagtacatcagctatatttctgcgaggacagctttgggatcgctttggagaagggagatttctgagaaggggggtacgtttgcggtttgctctgtcagtgccgtaggaggatgcctgttctccacctacctcgccagcagcctgcgctgcccggcttgccagcttctgggcctgcctaccgctgctggatgagatgccacgtcctgttgtggttttatcttg

SEQ ID NO: 141752 - DNA, 626 bp, Homo Sapiens
tttcaaagtttaattcaattttattttccacttttagtatttttcaaattatacaacatgcagtctgccagagtacccatacatcttcattttagaacctagaagattaccaaaattttccgtgggccagaggagggtgacttccagatcttttgttacatggactatagtacagcatcgttattgatataaaccaccattctcccctcaaaccccccggacaagtttgtccacaatttttttaatgtgaaagctactgtacagatacataaagcccagagaacacacatctgcagtacacaggacacactttacaaactagacatgtataattctacagaatgccctattccccttatatctgcacacaatgaacagtatttaaaactgatacacaatttttaaataagtaagcagacttcatggagcggcgcttacttcggcagttatccagccattattcaatgcttggtttaaaaagtctaaattgttagtgttaaatgaagcaattttagattatgatggtttctttagcttgctcaagattctgggctagacaatgaagtgaaatcttccctccaccctctgcctttcccagtatgtcatatagctagagtccaaatgtc

SEQ ID NO: 141753 - DNA, 207 bp, Homo Sapiens
tttcaacctaaaagactgagtgtattgttattatctgctatgaagtatcctactgaggtaggataaaatgatgttggtacaaagaatgtgatttgtttatagttataagaaaacgttgaattttttttggcaaaacattatgtctgtgacacattcttaataaaactgtagcaaaatgtaattccagcaattagtgtgaattctact

SEQ ID NO: 141754 - DNA, 491 bp, Homo Sapiens
attgggtcaatacggttactcactttgggattgtgatgatcgaagctatagctactacgttgaggtttttaccaaccagcaacagtggaccatggttgctgacagaactaaagtctcctgcaagtcctggcagtcagtaacttttgaaaggcagcctgcctccttcatccgtatcgttgggacacacaacacagcaaatgaggtgttccactgtgtccactttgagtgtccagagcagcagagcagccagaaggaggaaaatagtgaggaatcggggacaggggacaccagcctggccggtcagcagctcgactcccatgcgctgcgggcgcctagtggcagctcactaccctccagcccaggctccaactcacgctcccccaaccggcagcaccaataaaggaggcagcgggcctggtgtgacttggtgggctcgggcaacggcaggaaacggtctcctccctgagcaggggtctctgttgactgccccc

SEQ ID NO: 141755 - DNA, 754 bp, Homo Sapiens
ttttataatcttatcgtttttatatacagagtaaagaggagaagtagggtaaaaaaatagatggaaggttggaatcccacttcgtccactgtcccagggtgttggatattgacagatgggaagaagcaaactactcacagagccaggaagaaatgaatgcgttggtattgccacgagaagaggccggcacggctaaaatacgctatgaccatagccaggagatacttgtctgacaccctcaggtctttgtcccaggccaggaatttttgaacgacaggatccccaaggagcctgttgaaggcctcgtggtgctcagggagcacggaggatgctcgctttcgcttcagcttcatcttgagcccacacagcgtctccaccacccaggtgtcctcgggctcaggggcgcgctccaactccagctcctcctccagctcctcctcggattcgtctgaccattcgctcttccttttcaggccaagggattgaggctgggggctgggatctatccaaggggctgatggtcctggcacttcatcatccaccaccacctcgggggaccgtaccgttgtgctaggctgggggctctcctcctcaaacggggggcgcgcttgaccactggccataatctctcccaaacactttgtttctgtccacaaaacctagtccctgttctgtccaaagccttcttccagactccgttaggacccagaagagtgcgtttctcttctagaggctcgggagaagttaggagtga

SEQ ID NO: 141756 - DNA, 474 bp, Homo Sapiens
acaagttgttctgttgtttaatagtagtttgctattatttatattcttatgtgctttgatcagatacaaattttagtagggaaataagcaaacatttctagaaacgaattagaaacaattgtgttttagaatactaaaaggatttttaaaactttcaattcagcaaagttaatattttcccccaattgaaataatggaaaaacaaaagcgtagacactttcatggcttggaggacatgatcttcatgtgcccaaggtcatgttccttagcagccactgttgggatctgcttccactacagtcctgcattgtaggcaccattttgtcttcttcagaaggttcatggagacattggttactgttaacatgtcgcaacgtgagtctctaagaagtaaacaaaaccaaagtagctggatagattccatcttttgaggcttcatgaactgtttccatttttctctggatattccaacaa

SEQ ID NO: 141757 - DNA, 515 bp, Homo Sapiens
cgcccaggtcacagtttatttggcccgcgctaccagtgggcggcctggctggccggttaggcgccctgcatgcgcagcccgcgtatgagttcgtgcaccgttttgttgaggatgcccccatgtacgccgggtcggcccattagcaccaggagcgcgcgcggggcacgtgcccacgcacacggggcgcgcgtccagccccttggtgcgtgcgtccagcacggtgtcaccctcggccagcaggtggtcgcggatgacgcagcagcggcggccccccacgctcaggcccgcctgcaggaaggtgtgcctgtccggccccgtgagcacgcccacctcctgcggactggccggatctgctgtcagtcagcgggaacagacttctccctctccatctggtcaacatgtatgctgttctttattggcggtcgcggaatggagagtaaacggagaagggtttcccgggaggtcgaaggggagacgtcggtttccgttcccccgccccccgagtcggcgcttgg

SEQ ID NO: 141758 - DNA, 971 bp, Homo Sapiens
tgttttcataccaccactctgactttattacatttatttttaaggccattcccaaggaatcaaacattttaacagattcatttggatattaaaggattattttatataaaataagaagtgcaatatcagaatttaatattctatatgcctaaattaacagaaaaaaactttacagttattaagtggaaaattatttgagattatttggagttggtaatggcatagcattgaactggggaaaatgtgataaggtttctttcagttttagagtcgattatttttaaatgcactagatgattttctgagggccattcacattcaatgtttagattcattttattagtggcatatacaaagcaccatataatatatgaaacgtagaacaatcatgactatgtaattaactgtagaaataactgctaagaaaatatagcaatatttaacacaggatttctaaaaccattatattttcattacttttcccaaagctaatgtcccatgttttattttatagactttgtttatcaagatttatatgcatttggcacctttttgggctgaaaatagttgatgtactctgtacagtaatgttacagttttatacaaaattcagaaatattgcatttggaatagtctttatggtcctcttccaagtattcagtttcacacaacagcaaacactctgaatgcctttcctcctggaggattctgtaaactttctgagaagattccattctgaaaagaagcaatgtaggtctttcttttgtccacaggcattacatcaacataaccaccgtgatttcgaaccactccagcatgtactgctgctctgcagatactggacagatcagaataaactcgagttccaattacacgagcataatgtggatttgcttgcatacagttacgaggacagtatactcttgggcaatgtgaagcaggcttatgaaatggacagagctgttccacag

SEQ ID NO: 141759 - DNA, 773 bp, Homo Sapiens
ttttttttcagatcccagtgacattcatttccaagctgataggttaccaaggaaggggccttacccgggccttctgttccatttctagcattaatctttcatgttgctcagctatggccagtgtcgcagaatgaaccttctgatagatcatttctccttcccttgtttgaaaagtgaatagtccttctcctgtgtcacacattcttcctgactcaaacgtgaaccacgttgagtcccgaccgtatcttctcagtgagctgagaggccacatcaccagtttgaccttggcattgtggatatcccagagatagatattttcatgagtgatctgcattgtgcattcaccataaatatccaggtttggtgtaggcataagatacacgttgaatctctcattctgttcccgctgcacttctgcggccagaaggtcgggcttcccaaggctgatatcattgagcctggtccccagacactccatgcagaggtgcttgcaccactcctcggcctccagctcttgtttagcctgatgaaatccatttactttcagatctcttggctgtttgtttgcatcttcatggacttaaggggtcacctactggaagtgacgtgctttcaactagcagtttagaatttgcaagctgtgggacttccagggtccttaagaatcagcaattagccccttgagcatttatcttggataaatgaaaacatgtccacataaatcctgcacatgaatatctatagcagttttatttctaaaggctcccaaatgg

SEQ ID NO: 141760 - DNA, 840 bp, Homo Sapiens
  misc_feature (530)..(565): n is a, c, g, or t
gtccacaggcaccaaggagggtttattgtaagaactgtacaaaggagcccgcctgctggcctggcgtgggacctgttccccactggaccaggcaggaatgggcatccgtctgcaggggaggggccacaggcagggagaggccggacccggctcatctactcttcctctgcaacctgcacacagtccgaggagaatatccaatcaaacagatttctgaggctccaggggctgtgccagcccagggcccaggagggcaaggcagaggggcaatgtgccaggaaggggagactgcccccattagacgaaacttctgaaggaagagatggaaggagtggaggcctccttccatagaggagacataggcaggaggcagggagcagggctgaggccatgggtgtgacaacgagaaacaggaaggggaggagaggggagtgagagagagggctgttcaggcaggactgggagcaggtgagatagcatggtggacaataaagacaactctggcccataggcatggcatgtagatgtgnnnnnnnnnnnnnnnnnnnnnnnnnnnnnnnnnnnntacatgtcttgttttgaaggttttgctgcttcctgaattttaatcaaacttttcatgagaaacaagaagaaaaagaagaggcacttaggccaacagaatgccctgagtacacaccttaccacatgcgttcacacgcatccacacactcacagcacaggtccactctcccaggcacgggaacactcccagggacaggcctgcacagtatgacacaccagccgtactccatggaccttgaaacagtccagggcacacatatatacacatatatacaa

SEQ ID NO: 141761 - DNA, 582 bp, Homo Sapiens
ttttttttaataaaagccgttcctttattctgccccaggcaggctgcagtcacagacacacggggaatccactgatggcgtcggtgctctgcatgatcatgtctgccagcagaaagcagaagcccgcgagaattgagaagggtaaggccagccacccagaaaaataggaccaagagaagaagacgttgttcttccacgcattcttcacggtgtagcctatcaaggcggtcagcagcagcagtccgccgaggaagaggaaggcgctcgtggtctggccccgcagcgactcgccctcgtcgcaccgaatccgcagtcccatcaccatgcccaccacgccgacacccaccgccagcaccatgcacgccacagtcaccgccagcgtggtctggcaggggatgctggagcagatgccgtggttgcattcctgccacaggccactgtggccctcttgttggcgggtccagtagttggtggccgtggagagcaccatgaggacgttggccacgaggctgagcagaatgcccccactctggaggctccgcttcacccccatgccactgaggacccagtgccctagggctc

SEQ ID NO: 141762 - DNA, 493 bp, Homo Sapiens
ataatgttgagtgggtagaaaataatggctgttaatgtgtttgtaaagacactcatggcttagtaaagtgtgtttttcatttcagcaactgttaattctgttggtaccaagcctcccgacagcctattgagtacacagtcgatatttgttactgaatgaacatgggtgcatttggagttcagctccgtaataactggtgtttgccatcacaggacttgctgcacgtgaagagcgtgaaggatattttagctctcatcttggcttttggaaattatatgaatggaggaaataggactcggggacaagccgatggatatagcttagaaattctgcccaaactcaaggatgtcaaaagtcgggtatttatttttcataataagttcccatgatctgccattattttctttctttacctttaattttaaaaaacgtattccagattgttccatttatctctatcctccccttaacaacatttatattagagcatgca

SEQ ID NO: 141763 - DNA, 439 bp, Homo Sapiens
ttttacagggacagaatttttattaaaaagcatgggcacactgctattttcagaagaggtagatgaaacaattttctcagataaatgtgacacaggtatgttttcatcagaactatgcacagataagtcagtggcagtttctggaagtttacttgggttaagagactgctgtagtacagtggtggtctcccggaggtgggcagacttgttgctaggagatctacagtttggattgacaataatgacaccagtcgaaccttccatttttgtttcaggggtagaagagacttctaagtttggaggcccttcctttgagctgagcggaggaggcaaccgggtctctttagaggtctggaagagatgggctcgagcttgatgctttgcaaagagcttagcctttgtctgctctttgatgtgtgccagagttctcgtctttcca

SEQ ID NO: 141764 - DNA, 490 bp, Homo Sapiens
cagaagaggccacagtcttttaggttctcctttatgatgatgtcggtgacagcgtcgaagaaaaatttgacgttctgcgtgtcggtggggcacgtcatgtgggaatagatctccttcacgtcgcgccgcatgttgagctcgaggaactgcaccttgatgtagtttccggcgtcctcgtaggtgttgggtccatcgtagtccgggaaacagatgctgaggtgcgccttcttgatcttctcgaagaagacgtccttcttgttaagggagagcacgatggacgtcgtggcgaagtagcggtggttgcagatgctgtttgacaggtgcaggctctcgtgcatgcggttcacttcgtcgtcctctactagcaccatgtcgtaggcgctcagcgccgcgatgaagatgatgcaggtcacgccctcgaagcagtggatccacttcttgcgctccgagcgctgcccgcccacatcgaacatccggaagttgagatcct

SEQ ID NO: 141765 - DNA, 691 bp, Homo Sapiens
ccttggggaaaaatgtttaatatcaccatactcagaatacatttttttgaatatgcaattatttagtatacactacaaaatcctcaattttagaaagtttccaactgtctaaatatcagaagaatgcaatattttggtacaaagatgaaccatttcctatattatagcaaaattaaaatctacccgtattctaatattgagaaatgagataaaacacaatattataaagtctacttagagaagatcaagtgacctcaaagactttactattttcatattttaagacacatgatttatcctattttagtaacctggttcatacgttaaacaaaggataatgtgaacagcagagaggatttgttggcagaaaatctatgttcaatctagaactatctagatcacagacatttctattccttttgcaagttggcacacagtaaatgcccgaatgaataaataaattgcattaacaaggatgtcttcatgtgtaaatcagagataataccacctaccacacagaatgtaagggaaaagagaacaaataagtaccaaagtgctttatacgattctgagttattttaaaaatctgtgttaataggtttgttattttacacaaaatatcaaatttcaaatgaactccagtgctggatttcgatgtagtattttatttatagctatgttttccttttaa

SEQ ID NO: 141766 - DNA, 469 bp, Homo Sapiens
ttgacaccatctgttccttccactcccttagtttcatcatccacagcttcccgctcaggactagattctgattttccatcacaatccataagttctccttctcgactatcatccatttcaccatcccttgaatgctctgattggatgtctggaggggtctgaaggacggccacgctattctgatttataatcttcaatttcaattttggttttgaccgttttcttcttggaactgtaactgtgaggctctgtaactgagtcatccctgattcagtcaaacacacaccatcctgggtataagtcttgggtgggtctagctcttttacttttgtgacaatttgtgctacaagtgaagattcacagcagtctgaggaaggcacattagacgcaggcatatagggtctgcacatgctacaatcaaaaccaatgtctgctacattttccacttcttcctcagtatttaagttct

SEQ ID NO: 141767 - DNA, 616 bp, Homo Sapiens
gggtttgctttctccccctactttattggagagcacttgccattgcttttatcaagtgcttgctagccatggatgccaactaacttcttcaattgaaggccggaggatcatatcgggttccaggagcctcttgagcaggtcctggcaatcggccgagatgctcagatgagtggggaaggacacccccttctgctgctgccacagcatcttggggatgtctgtgtcgtcaaaaggtaggctggcacagagcatgacatacaggaccacacccatgctccagacatcaccttttttgctatcgtggggaatgccctgcagcacctcgggggcagcataggctgtactgccgcagaaggtctggctcagctcccggtgtgacttgggcaacaccttggcaaagccaaagtcagtcagcttcaggttgaaagccctgccacaagggcgttctcacatttgaggttccggtgggccacaccacagccatggcagtagcggatggcctcaaccatctgacggaagagggccttggcccggctttcaggcagtggccccccattcagcacgcagtcaaagacatcccctccctcagcgagctccatcaccaggcagattttcc

SEQ ID NO: 141768 - DNA, 436 bp, Homo Sapiens
gggtttgctttctccccctactttattggagagcacttgccattgcttttatcaagtgcttgctagccatggatgccaactaacttcttcaattgaaggccggaggatcatatcgggttccaggagcctcttgagcaggtcctggcaatcggccgagatgctcagatgagtggggaaggacacccccttctgctgctgccacagcatcttggggaatgccctgcagcacctcgggggcagcataggctgtactgccgcagaaggtctggctcagctcccggtgtgacttgggcaacaccttggcaaagcccaagtcagtcagcttcaggttgaagccctgcaacaaggcgttctcacatttgaggtcccggtgggccacaccacagccatggcagtagcggatggcctcaaccatctgacggaagaggggcttggc

SEQ ID NO: 141769 - DNA, 1051 bp, Homo Sapiens
tttctggagtgtgattgtaattttacttttgaagcacccgcttcccagaagaactgccagtgatggatgccactgtcaggaacccagatgcgcacgctcatacatcagccgggaaatcatacaaacagctctcccagcaggccagggctgacacacccattactcccctatggaaagagatgtgtcaaaaaactcagggcagcagcaagaaagaggcagagaagaaggagttgggagaggatgggtttttttaggtccacccagtttttttccttcctcatcttcctctgagggcagcagcagcagcaggctaaggtttggatttgtggttataatgctgtgtgacaggatcatggggagttgtctggaaacatttctcctgggagtgtgctgtcagctggttttcatagtgcacatgaagggaaacattctgctctatacacatgcctttatccttatataggtacaggtgatgtctacattttcctttgggatggatgtggcctacctaggctaagatcacgctatgacatttagtctctttggagagcaagtctgtgttgattccagcaggatggggcagcaggggctggttgctaggatgtctgaaaacagaggatactactggagtggaggagtggaagcagcccagcaggcccactggtagccatgagtgtgaggatagcttatcggtagcggcaggccaaagcattgacattcttgaccacaaaaaagcccatggtgactggagggatgaccaatgtccggccggcccgaagggggcggggcttcaattctgggagggtcccgtcgtccaccatcactaagggctggccattcagttgcactgacttgtccttcaagtcaggggtgctcccacaggacccagtacttcttggatctcagctcctgtcacacagtattgtgaccgctgagctgactgcttgtcagtctctccactagattggaagcccatgtgtcttactcatccgtcactcttctgtccgcccactcacacaggaggcgtcaataaaagacacattggatataa

SEQ ID NO: 141770 - DNA, 639 bp, Homo Sapiens
gagcccaagcaacccaatgttgtttgtagtagaagtcatggctggcctgcgctgagcatcccacagctagtggtggtagctaatcctgccagagtcaggcctctgcctgtctgatgccaaattgcatgctgtgtcttttaacctggattgcaggccacaaatgttttgtaaacattttacgggagaaaaaaccgagatagttctaaattccatacatccattagcttagtttttcctgtggattgggaaaacccggctctgatttcatttcagggtgggacagcccttggtgcactgtctggcgggattttgcattttatcctgatgcttccaggagcaatgaagggaaggcagggggctggaggcgccccgcaggcgggtacgttccctgctggccttagccccagcccgccttccccaacccctgcgggagaagacccccaaaggggaggagtcgggcctgccccctcccccgagcaccttccgtctccaggtcggagtcccaattggcctcgggaccctgctcggcctcggggacccctgaaagacgcccacaggccaccatagcctcttctttctgctcttcatcctccccagacctctcacaggaacccctcatggttacgaccctctcgcagt

SEQ ID NO: 141771 - DNA, 808 bp, Homo Sapiens
aatgccccatgtccggtggtgccagcactagcccccatgtcggtctcagagaaccttctccccacctctgagttattctctcagtgtatcgaagatatcagtcaactatcttctggattgcattgatgctattgagaaggcagcctgcagtctaaaagtcatggttttaaaggcggaacacaccaggagccccagcgcaaccctcccctccaatgtgccttcatgccggtccctgtcatccagcgaagacggccccagtggcccttccagcctcgcagatggaggcctagcccacaacttacaggatagtgtcaggcaccgcatcctctacctctcagagcagctgagagtggagaaggccagtcgggatggcaacactgtgagctacctcaagctggtatccaaagcagaccggcaccaggtgccgcacatccagcaggcctttgagaaggtgaaccagcgcgcctctgccaccatcgcccagatcgagcacaggctccaccagtgtcaccagcagctccaggagctggaggaaggctgcaggcccgagggcttactgctgatggcagaaagcgacccagccaactgcgagccacccagtgagaaggccctgctttcagagccccccgagccaggtggggaagacgggcccggtcaaccctgcctcatgccagcaggcccttcatcttggagagtcgcttccagagcttacagcaggggacgtgcttagagacagaggatgtggcccagcaacaaaacctgctgttgcagaaggtaaaggcagagctggaagaagccaagaggttcc

SEQ ID NO: 141772 - DNA, 709 bp, Homo Sapiens
ttttttaaacatatctatttatttagttcaacagcctggagcagctgtgcatcaacttcaccaatgagaaactgcaacagtttttcaaccaccacatgttcgtgctggagcaggaggagtacaagaaggaaggcatcgagtggacgttcatcgacttcgggatggacctggctgcctgcatcgagctcatcgagaaggttggttttgcatttctccttttcaacagctctgcagtgaaataaatatgcatttttaggtgccatggagcatgagcttgtcctcccaccagctgaggtgtaacggtgtgctggaaggcatccgcatctgtaggaaaggatttccaagcagaatcctttatgcagacttcaaacagaggtcagtttctcctgattatggtgtattctgatgctattcctgtccctttgaactttattaaagcttgtgatttgcaactctttccattcacaggtctttttcaaagctggtcttctggggctcctagaggagatgcgagatgacaagctggcccagctgattacccgaacccaggccaggtgcagagggttcttctgccatttctgcatctcctgcagtatggagatgatttgtgactctctctttctccaggttttcttcaaagctggacttctgggtctttggccaggtcccagtacggcctccaggcctgccgcagctacggcaggagtca

SEQ ID NO: 141773 - DNA, 391 bp, Homo Sapiens
tttccttacaattccatttttattctcaggaggaacaatccaacaccaatctagctaaattccgcaagctccagcatgagctggaggaggccgaggaacgggctgacattgctgagtcccaggtgaacaaactgcgggtgaagagccgggaggttcacacaaaagtcataagtgaagagtgatcatgtcctgatgccatggaatgactgaagacaggcacaaaatgtgacatctttggtcatttccctctgtaattattgtgtattctacccttctgccatttctgcatctcctgcagtatggagatgatttgtgactctctctttctccaggttttcttcaaagctggacttctgggtctttggccaggtcccagtacggcctcaggctg

SEQ ID NO: 141774 - DNA, 539 bp, Homo Sapiens
ttttatttttagaggcttttatgacatcaagagaaatggtcccagaaagaaaaaaccaagaaaaagaatctgatgatgcctcaactgtgaatgaagagacttctgaggaaaataatgaaatggaggaatctgatgtgtctcaagctgagaaagatttactacattctgaaggtagtgaaaacgaaggccctgaaagtagtggttcttctgactgccgtgaaacagaagaattagtaggatccaattccagtaaaactggagagattctttcagaatcatccatggataatgatgacgaagccacagaagtcaccgatgaaccactggaacaagactatttagaaacatttacatgcagtattttacacacagttctggttttaacactgtataaaacttttatgtaaaaaagtgcacctttagttttacaagtaaagcaggttgtaaaataaagtactttatggataattcctgaaagagttgtacatgtaagaactgtgaatatcagctcctctgggtcctgcttaccttaccgctga

SEQ ID NO: 141775 - DNA, 491 bp, Homo Sapiens
cttttttaatagacaaatcactttgtattttggaacatgttcaagaatcagtagtttgtacatttgggatgtcacaggtgataggtgaagcattttctgggacatgtctagccagaaaatgcagtttgagtggccgaaagtccctctgctgtgaaactgggaggtcttatttcaagaggtatatgccaagtcataacagcagtagacagaattccatattgtcactgggaggaattgcttcaagtgctgtttgtatttctcaccataaatattcctgatgtttcttttgcagataccctgtagggataaaggtttttgcgattgctttattagggtgtcccttaagaggcggaattctggtagcatgattcctgcaggtagaattccttggttattggtcattctcagaggataagtgtgataaagtagcctggccagaagtgccgtatctcttacattgcaactgcgctgaaggtacatataaattggcg

SEQ ID NO: 141776 - DNA, 564 bp, Homo Sapiens
ccatgaggtaatacccattgctgtggccacctttacaactccaaggccaaatccctttgggggcacggggtccgaaaattagttttgaaaactggaccaacacatcccccggggcgtgagggcccttctgatgccacagctaaaggatcggacccagtttggttccttcttgccttctgacctcaaactctcctcgtctaccttctcttgctgttcttgtctctgtagctggaggataactgggagcaggaaaagaaaatccgggcggaggtggaaaaggctcgtcggaaagctgagagtgacctgaagatgaccatcgacaacctcaatgagatggagcgttccaagctggatctcgaggaggtggtgaaaaagtatgtcttgtcgtcgttcgttttgtccatcacaatggtagcaatagctggagctgcctggagggtgccaggagccaggcactgtatggagagcctcacaaacattcctgcatgtcccaagcacctggcaggcatggaggatatgcagagaggtaggggctgccctgtctgcagggaatgcccagtgtca

SEQ ID NO: 141777 - DNA, 457 bp, Homo Sapiens
ggcagcaagtaagttaatgaaaagatatatggaagtacaatgggcaaaggaaaaataggaatagacaatgctaaaaatcagtgtatgtgcaatagaagaggcacacagaacatgaatgcgggtctgaggtcgcctatcactagaattccaccttctgatcacacaattccatcgagaaactgtacggttaagggaaagattcaggtcacctgaagatgacgttggtaccccaaagcttagcagagcttgaaaatcaaaagaaataaaaaccaattaaatggaacgggttacagcaatgccagttgagcaatttgcagcttttctccccttggaatgtttcctaattgagggtgtttccctttcgattttcctggccagcaaatgaaatcgggagtcgagggcgcaccttggcagcgtgaggtcaggagagtgccaccagcctgctcctcctgggggc

SEQ ID NO: 141778 - DNA, 471 bp, Homo Sapiens
tttttttcaaaaatcctttatttttccataaattggtgtcaggtggttgaaaaactgtagctagaatatctggtgataataattttttcttctatgccaggcagtgcccttatatctggcagtacagccttcttcattcctctctgaagacctgattccttaaatcaggcatcagtatgtttttggagcacaggatggagaaagattaagtgtcaaatggaatcacacaagctgaacagcaaagcagacagcaggagaagaatcaaacaaggtacatgctgggatggagaggtcaccttttctcccttttctcctagatcacccttctcaccccgtggaccagggaagccatcaagaccaggctctccatctttcccaggcagcccatagggccctctttggtccaggctctcccatagctcctttttcacctctttctcctttgggacctgcaggccagggggggtcccc

SEQ ID NO: 141779 - DNA, 496 bp, Homo Sapiens
tttgggatcctgtgttggcagaggcgttgtaactgtttattggggtgatatgcgactggcttcagggtggagagcctctttttcctaggactccatgccaacgaagaatgctgacttgctgccaaggcccacaggaacattctccaccaggttgaacaacaggaaggccaacttgaaccccgacaacttcataagagtttcttacagacatgcctcctggttccagataaggtctccttcctccaggtggggatgatgacgccaccaagctggtcatctgtagaagcctccccacatcctgaggctctgagcggagcctgtgccgggctttctctgtgctgccgtcccagccaccgcctgctgctccgggagatgacatgtgtagtccagcatgaaggtcgtataagttgacttctggggacagcctgaactttcccagcaccctccagccttccgcctggcttttaagactctcagtatttaggttggagcatct

SEQ ID NO: 141780 - DNA, 1004 bp, Homo Sapiens
agaattaaaaaatgctaatgaactggaagcagaaaatttggtgcttattgatcaactatccaactgtagacttgtggatctcaagatacccaggcgactatatcttacccaagctgctggactagaagtgccacctgaagaaatgtctttggaattgccagaaacacatatagagaagtcagaattgcaacccacagaagtagaaagtagagacttgatgtcctcatcagatgagagcactatcttacatcttagtcatgaaaatagcatcgaagatctccagtatgtgaagatagataaagaggaaaactcaggcacagagtttggggacactgatatgaagtacttactatatgaggatgagaaggatttcaaggattatgtaaacttgggcctcctgggagtgaagcttatgagtgtggagagcaagaaaatgcccattcattttcaagagaaggaaattccagtcaaactctataaagatgtcaggagcccagaaagccacatcacatataagatgatgaagtcttttctctaagacggaaagctgcaaaggaaacacaacttttccttataaatgttctttgggaactgaagtatatccgttgcccattttacttacactttggctcatttttaaaccagctgttatttctaaaggtcatatttacatttaaaatcaaaggtattcagctattcatttacttgcatggtatgagtgaccaaaacggaagcacgctttgtatttctacactgaagtattcagaagcatgacagtgggttcaaggtagtctctgaggttccttttcacacacaaaaaattcactgattaatctgtgattccagtatgaaatagttccattagaaatgtttctaagaaaaacttagaagtttgcatagcattgtctacacatctttccctctgaggatgctcaatgtgatagacagccagtctataatgcaagccaattctccgtagtttaaccctgtgtattagtctgttc

SEQ ID NO: 141781 - DNA, 705 bp, Homo Sapiens
tttttgtgctgtagacttttaattcatacctcctgctctctcacccgtggcagctgagttgggaacagtactgtaacaattgtaactgtaactccctgataagcctacaggcatggggtctggatgagtagacaggggatgtgatcagagctgactatgtttaaggtttcttctttcaccctccaaaaaacagcaaggggctcctgagatctcgacaaccccgtccaccttggccagacctcgtgctcctgcctggatctgaggctgggtccagggtctgcctacctttagatcgttttatctcagacctgcccaaagccagatgtagtggttctgggagttcagggacagacagtggttagcaatgagcacggtacctgccagtttgtcacaagcacagagggtgtgtttatacctgcacacttccagaaaacagatcccagaccctcagcagcccacctgcagacaaagaccaacttccttcattgtgagaggcaacctgaactcacacccaatatatggagctcttggcagtttatgagctttaaaaaaaagtgtccctggatcccttggaaagttttgctccagaagctgtaccattttggcagtgatccctcaccccacgttcacatttagctggctgctcaaacaaacaaaaaaagtctttgagggggctgtgggctggttggaagagcctgctctgct

SEQ ID NO: 141782 - DNA, 457 bp, Homo Sapiens
gagaatgacaatgccccagacgtggtttttacttcagtgtccagttctgtaactgaggacgcagaaccctggacggtgatcactctgttcaaaacacatgataaagattcgagagaaaatggggaggttacatgcctcataaacgaaagagttccttttagaatcgaatcttccgccaataatgactataagcttgtaacagatgggaccctggattgggagcggatcccggagtacaacgtcaccatcactgccactgacaagggcaagcctccgctctcatccagcacaagcctcaccctacgcattggtgaagtcaacgacaatgctccggttttccaccaagtctcctacgtggtccacgtggccgaaaacaaccttcccggagcctccatcccacaagtcagcgcctctgacctggacctagggctgaatggccaagtctcctactccatcg

SEQ ID NO: 141783 - DNA, 489 bp, Homo Sapiens
ttttcagggcaactccaagaagatatattttgctaggatggtacgccaagtgatcctggtctgattttgtttttcttgtgaaatgattttgcatttcttcttcagcatcttcagcttttcattgaaagactagttttgtttcttgcttcatttttgtttatatttaatccatgacagatctttccacatgtcctctgtctgtctttagattgtgatcaaagaagagtaggtctccttctgtattctgaacagggctataaaaagtgtcttcatcacagtttgaaaaatgccaaccaagatcaagaagtatgtccattccagattagcaattatctctccaagactactcatgaaaggggcaaattggagccagtattaaaggtatgatgatttgtttccttcaactaataagaccccagggcctcccacaggactccttgcagccttctccctcaaaccctgctacaagaaggttggagcaaagaggag

SEQ ID NO: 141784 - DNA, 520 bp, Homo Sapiens
ttttttttaataattaaggattttattgaatagaccggctggggattaacttctccccttagggagaaaggaagcatctgtgacattagaaactgccacatttaaggagttggtggaagataaccatgaaggagcccaagtagtaagcaaagagtgaggagagaatggatattttgggagccagggaacaacttttgagaagaagggaatggttatcaatgataaatgttagtgggaaaagaagtattcaatctatccattggtttcctttcaaacagggtaagatcaggatgccattcctcattgtgtaatgtctctctctaaatttgcagatttcaggaaagaggcttcaaatttgcaatttttctgagggtttgagattgtttaaaaataaaaaagttgagggggcgtgttcccgtcggctgcgcccgcggcccggggcggagttggccaccgcgcctggctgcgggcggccgggcgaacgggctcggcgcgcaggtggctcctccttcgcttctcc

SEQ ID NO: 141785 - DNA, 615 bp, Homo Sapiens
attatgtttaacagtattatttatgtgcgtggacttagaaggaaacagcaataactactacacatgattttatagcagaacggcctcatttcttcttttggtatcatgaatgactattatgatgaaatccacgtcttgatggagttctgtgtgcctttattccatcttttgcattgaggatgaagtttactaagttggaaggcatggttttttcaattattgatggggacaattttcctctcatttctgtctggacaaacatcactagtttggaatatgctgggtttaactgataatgttcatatttccttcgtagcgcttgatgtacactaagtcgataaagtctcgaggggaaatggagcccacggcaaaactttgtgtaatggtatgacatatgaatgtgtccgaatcaatcctgtgtaccatattatacacttgcaatgatttatcccatgtaattctgtctccagtttggtagaggaaatcagatagtttagctggtgattctggaattatcccttcaacacgatatagatttccatggaattttctagaagccttactggaaacagttatctttttctcaaaggggaataaaaatccacaaataattag

SEQ ID NO: 141786 - DNA, 471 bp, Homo Sapiens
ttcaacggggtcttcctgtagtgacccctgagttaaagtatttattttcacgctgcaactgctgatcactttacagagacatatcatgctgtagctctgcatggagctgaagacaaaagcaacatttttattaatgttataattattataattatctttaacaaagctattaaataacctgtacaaagcccaaaccggtcctagcgaaaacccgagcactgtttcaaatctcccaagttcctttctattcagttcagcagcatttcctatatacaaggccagcccagggtggtcccccgaaactgtaggtctccctgacggtgggaacggtttagagtttggaaccgccctggcgtacggcagagctcccaattacaatccaaatgccccagccccaaccctacctccccgctcctgggaactgggtccctatgtccgaaggcagcggaagttggaagcctggctccattt

SEQ ID NO: 141787 - DNA, 703 bp, Homo Sapiens
tttgtaccaggtcattctttataattaaactggcagtatccaccccctcgagccggccccgcctccttcctgggaaggcaacgccccctgtcctccggggctccgggtgggtggccccagcccgcggggcggtgcgcaagcgctgccggggcccgcccgggcgtcaggcctcctcgttcggctccgcccccagggcctctagcatgcgccgccggaccagggagcggcgcaggtgcaggcggtagtcgcccagcaggaggtcgtcgtggcgcacgatctggtgcgcaagcccgcggggactgagcccggagcgcagcaagcgcgagcgcgtctggaagtccgtgaccgcgatgagccaccggttccggcgcccagcagtcccacagatgacgttcatgttctcaaagcggatgctgctcacgcgcccgctctccatggcccctggtaactgggcctccagggcttgcagcacctccaggtgggtaaaatcctcctcgggcaaggtctccatgcagaggcagaggggctgggcagctggtggtgtggggaacttccggatgcacgggagttctcggtccagtgcctcgtactctgcaatgacctgccgcaggtactgctttgaggatttgatgggcctgcccaggctccgagcctgcatctcctctggggtctccaggtccataaggagggctcctaggagaag

SEQ ID NO: 141788 - DNA, 425 bp, Homo Sapiens
ttttttctctagaacattacaaattttattttctcccctaggaatgcccagaaagaggatcgtgttccagtgcttgaggagtacagagagtacaagaaaattaaagccaagcttaggcttcttgaagttcttataagcaaacaagattcttcaaaatccatataagatacgttccttgaaaattcatatcataaagtcagttgtattccttgaagctatcatcgtgtgtacttggctggtacttaaattcgttttgtcaggcactcagagaatctcattttgtacttggttgtggtgccactccacttgtctcaatactatagagctgaaacctttctcaccacttgatttagcttcaaattgatgtagtgtaattccttctccagctccacagcatataaaaaaagttctcgaaattcttcttg

SEQ ID NO: 141789 - DNA, 258 bp, Homo Sapiens
ggcatttaaaaatactttctttaatatgatacatcaggcacaatacttttcatatatattttttcttataagatttcaaatgcataaaatgtttgttgttattcataggatcatcaggtgtcagatgcttcattaggtaagaaactaaataatttcaggtttgtgactttccttttagaacctttgacacggtaaaggttggaatgtgactcagcgtctcagatactgaggtcggtgctacattctttgtaaggtcgc

SEQ ID NO: 141790 - DNA, 1382 bp, Homo Sapiens
agtcagcgttcttgggggccttgcatgtgtgcacatccagagcttccaggcagtcctgacagcgcacggcgcagcaccagtggaacttacacccacacttggtcatccgggtgacatgggaggtgtcgtagcctctcccacagcacatgacttcacagctgtccatgccccgggaagtcaggttgcacacacggcctgctgtacccagggagcctgcctctcggtccctgatacagtagtctggagaattctcaaaatacacgaggtcatttttcgttggcttcttaaacctctcgttatccacagtgaaccgtgtggcatcctggttcatggaccacctggatggccccattgtacttcctccagagataatcgcccgttttcctgaagtcggccatggccagccagcatgtcctgagagtacatgagccgctcaccccgtggcacttgcactcttgtttcaagaaccgctttacagccttcctgccagctctgttgttgtgaagattcatcagggctctggcatcctttcctgttcctgttcctttggcatccacgaatgcgcgggcaaatttgatcccatagtcaatgttatcactgcagccaccccaatcaaaaatgcctttgctgtccttggcgcttcccatcttctttggatcacaggaacaggattttacttctgccttggctacaggccctggtgatggcaaatacaactccagctgaggagatggcataaacaaaggcagattcccgactacttcggagtaggaccctgccaaaaaggctgtgatccctgtccagggtgttgcaattccagcggtgctggcggaactggtgctggcattctgctgtccactcggccacgcctggctaatggcacgcatcacatctggatgtcggtgacacagctgccgctggctgctcaccaggcctggcacattatcgcacatcaccctggaggagccacctgtagctctcatgtaccaccatgaagagttgacctcgggggtgagccaggtcaagagcagagggagccagagccagattccaccgagaggggcgttcatattaacccccttgcgtctgcatcaggtcagactccgtgtgcgggcgccatgcgtgcccagagcagaagcgctcagctccgggagcgcctcgtcacggccgccggcgcctcgccgcgcccccgccccccgctcgcgtctgcgacgagtggcgagactcgctgataaagtttcaaacgatgggcccagcgagcgataaaggccagcccggaccgcctcgcccacagcccaattccccaggcgcagcgagcgcctgcagcccgaaagctctgcgcgcctcccgcgcgccatcccaggaattccggaccggtccac

SEQ ID NO: 141791 - DNA, 598 bp, Homo Sapiens
  misc_feature (42)..(57): n is a, c, g, or t
ttttgataattgcagtgactgttttaataataaaaagctacnnnnnnnnnnnnnnnngatttggcaccaacagatgcatcaggaaggggttgtatctggtttaggtgaacaggggtgtcagtgtgatgagtctggccatccactagccagtctgtggcatcagccagagaagcactgccctgaaggacaccccttctccgaggaccggcacactccgcagtctgagagctgtgagtgtctgcaccaaggccacctgagcacccttgcgactgagatccccagcggctcgtttcctggtccacagactggtgaagagcacacgtcttctgcagtagacactgtatattagttttgggtggctcatctgctttaatgtcattggatcaaagtctcattcacgaaccgtcacggtttcaccatatcccactgtctgttttcccctcgtactttgccattcctgcgcatctccgtcatgttctgccttccggctccccgcagagcgtgcactgcgactctgtattcctgtctggtaagatacagcaatgcttctgcagaatgccaggcaaaacaggatgggttaataggtgcagcaaaccac

SEQ ID NO: 141792 - DNA, 824 bp, Homo Sapiens
tttccgaggtggagtctcactctgtcacctaggctggagtgcagagcgagattctggttggattgaatgatgtctgctgcatcatcagggtagatgggaatcctgtgcagctttatgcaattcgtgaacaagtaattcttcacactgttattttatgtctgtaggcttcaggaagaaatcatgaatttttcttctaaaataagtattctgttgacacagactattggtaagattttcaacataaggtgatgctaggactggcctcctagcatgagttgtgagtaaagatctggtctgttgtttctccaaaagaagtttcttactgcttgtctctcatgagttttctgtttctgctttctctttttcatattgatatatacggttttttaaatggttattgtaattaaatatctcctcatttttctcttttaggagatgatgttgcattttcctctcaagaaaatgaatatcaattgttatcttgcttttgttgtcagctttcttatgtgcatgaactaattgctgttgaagccacatatttttgctttgtagttgaaataatttctgatctagagactcctgctgttcagtgtgtttgttcacattatcttgttcgttttgatacatgtgttcagcttccttcatttgacactgtgtttcacgttggtctctttgtgcatgttctgaaaccaatgtattttctcttagagcatctcctgcataattgagattaatttttaggcttttggatttcctttgagcttcagaaagtggttgatggagcacctcattgttatatatcgtactactcacatcaacattca

SEQ ID NO: 141793 - DNA, 715 bp, Homo Sapiens
tttgaaactgaagaatacaagatttatttaagggaaaaaaacagcatggtttggacaattttgttctcccctccttcagcctcctgctgctcaatgatgccacatggccaacaatatcctggtatctaagattctaagggaatcattgaggtcctatctagacatcaactgtctggtgtcactattcccccattgcttcctcctcttcctcctcctctgtccagctcagatcatcatctgaatcgtcagattcttcctcatccatctctaacacaacccctgccctagccttcttagctagtgcatcagggtgctccagctgggcccaggatcctgggtcagccttgaccagggagatttcaacccgagatggcatcaagaagacagagctctgctccacgtttatgaccccccagagcttcatctgtgcttggaacacacggttaccatcaaagacaatgtggacatgaagctcagtttgactggccttcacccagttaaacgcaggaagtggaatctggccatatacagtcaccactactaaggaatctgtctggtgccaatcatggcggcaagatgctgggagctgcttcccccagtcatgtctaccgactctgcaccctggttgtgccaagaatgccccaaaatccagggtctggatgccacaacagctccaagacttcatcccctcatggaatcggggtgctcctgggtg

SEQ ID NO: 141794 - DNA, 588 bp, Homo Sapiens
tgggcttcattaagtttttcagtcaattcttccaaagccctttttgtttcggcatctgaccggctccttctggaaagctccctgttgaaatcatctccaaggcgaatttgttcactgctgaggtctcgaagagactgatgaaaaccatgaagctgagtcatatcatcagtctcttgaacaaaccggacaccagttcttgatctcattcgtttaataccctgtggatccccatagtccttgagaggtgaggtaggtggaaaatgatggagctctgacccagtgccaccatcaaggtcacttgcactcaaacttgtaacagaaatacttctccctcctgagtttctcaataaacgttgactccggagttggtcgattgattgttccaagctttcttttaaatgttctatcgcacccgcctgtccattactgtattctcggtatcgtccaagcatctggtccacttgtcgcaggttccgactggtatcctgtaaagtacttgttatagtgttgaccttctcggtaacttctactgtaggaagacttcgagttcccctgtgcgttgatctggcagcccatggactcaatcgg

SEQ ID NO: 141795 - DNA, 615 bp, Homo Sapiens
cgccaattttgatgctcagcagtttgcagggacctggctccttgtggctgtgggctccgcttgccgtttcctgcaggagcagggccaccgggccgaggccaccacactgcatgtggctccccagggcacagccatggctgtcagtaccttccgaaagctcccgagacgcccgaggggctgtgcacgtggttgtcgctgagaccgactaccagagtttcgctgtcctgtacctggagcgggcggggcagctgtcagtgaagctctacgcccgctcgctccctgtgagcgactcggtcttgagtgggtttgagcagcgggtccaggaggcccacttgactgaggaccagatcttctacttccccaagtacggcttctgcgaggctgcagaccagttccacgtcctggacgaagtgaggaggtgaggccggcacacagctccagtgctgagaagtcagtgccccgagagacgaccccaccagtggggtgcccgctgcctgtcctccgtgaaaccagcctcagatcagggccctgccacccagggcaggggatcttctgccggctgccccagaggacagtgggtggagtggtacctacttattaaatgtctcagacccc

SEQ ID NO: 141796 - DNA, 460 bp, Homo Sapiens
gcctgggggatttattctttcttggggcccacttgcagtgtactttataggatgatgtatcagaaaccttgacccagcagcctaaaaatagtggtcagcatcgatgagtctcatattttttccaaacatgtcctcccatagaagatatgtttcaactattcatagaatcgattatttcaggggcttggttacacgccttccttgccatctggatgtcttccgggagcacaaaactaggttgcacccaatttttggatctggatagctttgcccctggcaagattcctgaatttcttgcttgagaaaacttgacagtaatggccactttaccagaaagggaactcttgtctaccatgtggcagtctgctgggcatctcttctgaccctctctcctttttcacttggagagcctcgagttccctaggcactacttgggtgcatgtgtttgcttgctgtgttc

SEQ ID NO: 141797 - DNA, 794 bp, Homo Sapiens
ttttacattgtctaacacttccttttattattgctttgtgtttcccaaaagaatggaggcccagggagggaaggtaatgagtcttccttgctgagaaatccatgcccagcacccagatggcctaggcggggccatggactctggactgctatcctgcacccagagcttcccaggtgctcctcggaactcaggtgggtgctggaatggaccttagggggcgtcgaacatctgagtggctgtgacttggggcaagcctctctgactcatgggcccctaggaggggcacaggggtgtagaattagcccagtggagggacagcagaggactgtgtcaaagcccccctggggatccccaccacagcagcctccttggctgggagggtgggttgcagggtggcaggaagccacgcttctccaaggcgtcctgatgcacccaagtccttgtgtccctcaggtgctgccatgactgaagctaaaaaaggcgcagggggtcctaggtatgggtgcctcatgtccccggggagagagcctgcctgatccacctcaggatatgggcgggggctggatggtctgagcctcctcttttcctgaaatgcaggcagctgccaggcacaaatccccagtccctggagttggggccaaaatttcaagagcaagataaagcaaagggcgtggtgtcaagggctcggtccccagggtgcaccgggaggggaaggttccatggcaggacgtctgtgtggcgactccgggggtgacagctccaggtggaggtccggcaggacgactggaggtggg

SEQ ID NO: 141798 - DNA, 552 bp, Homo Sapiens
ttttcggcagaagggcccagccttgagccttgtgcccttaacgcgggccggcccggccaggtgagcagctatatggccacggtgtcggggctcctcaagatcgtccaggccttcgtggcctgcatcatcttcggggcgctggtccatgacagccgctacgggcgctacgtggccacccagtggtgcgtggccgtctacagcctgtgcttcctggccacagtggccgtggtggccctgagtgtgatgggccacacagggggcctgggctgcccctttgaccggctggtggtggtgtacaccttcctggctgtgctcctgtacctcagcgccgccgtgatctggccagtcttctgtttcgatcccaagtacggtgagcccaaacggccccccaactgtgctcggggcagctgtccctgggacagccagctggtggtggccatcttcacctacgtcaacctgctcctgtacgtcgttgacctcgcctactcccagcttcagcagtgcccggcgggcatctgtgcactgtgggcatctgtggcactgggagggagc

SEQ ID NO: 141799 - DNA, 966 bp, Homo Sapiens
aactgagatggacatgatataatctccattgagtcaaagaatggcatctagtcctgagcttcccaccgaagatgaacagggttcctggggcatcgacgatctccatatttcattgcaagctgaacaggaagacacccagaagaaagccttcacgtgctggataaactcacagttggccaggcacacttctccctcagttatatccgacctattcacagacattaaaaaggggcatgtcctcctggatctgctagaagtactttctgggcaacagttgcctcgggataaaggatctaataccttccagtgtagaatcaatatagaacatgccttgacattcctaagaaaccgatcaattaagctaataaatattcatgttactgatatcattgatggaaacccatccattatccttggcctaatttggacaattatcctgcactttcatattgagaagcttgcccagactctttcttgcaattacaatcagccttccctggatgatgtgagtgtggttgactcatctcctgcctcaagtcctccagctaagaaatgctctaaagtgcaagcaagatggcaaatgtctgcaagaaaggcccttcttttgtgggctcaggaacaatgcgccacctatgagtctgtcaatgttaccgattttaagtccagttggagaaatgggatggcttttttggccattcattcatgccttgcgaccagacctaattgacatgaagagtgtgaagcatagatccaacaaggacaatctgagagaggccttcagaattgcagaacaagaattaaaaatccccagattgctggaaccagaagatgtggatgttgttgatcctgatgaaaagtccatcatgacctatgtggcacagtttctgcagtattccaaagatgcccctgggactggagaggaggctcagggaaaggtgaaagatgctatgggctggttaactctgc

SEQ ID NO: 141800 - DNA, 678 bp, Homo Sapiens
taagtaaaaattgggaaatttatatttattataacaaatgatggccaaatgatggccacaaaagccattgcttgtaaataattataattcatactgtaatgacatttcctatgaaaagaattacaatatatgtcatggaatccaccactagtcttcctcctggaaataaaaatcaaacggatcaatctgcttcagtatattaggtaagaaaaaataatggtgtctaactgcagagtgcattgtgttgatttggatttcgcataaagttgcccatataaaaacttttctaatgtggattgaaattctgattatacaactatgaaaaaaattggaagtattattattctcagtgaattctaatttgatttgaaggcctttggaagaatccctctcctacattctgctttagtccttaagatccagttagaggctgcttgtagtcatcctcattgcttgagaagactaggcttttctatttagcaaccaatccaggaactagatttcaccacactaaccacatcttgcttctctgtgtcatacttgtatgtttttggtcctgaaaagaagtaaatgtagccatttaattctacagcagcatcgatttggccatttactcctgaaaattcttcttcagtattctttggatagtctttttccattttccttttcctttcgtcg

SEQ ID NO: 141801 - DNA, 895 bp, Homo Sapiens
cgtaagggtacgcccccgttgcagcaagtccaaagatggcacccgagccgggagacatcgtgtttgcaccgactgtcgcaccacttcagaatacggtgagctcccgcccatgagaagcccgtgacccgccaccgtttatgttcaaacccgtcaaggaagaggatgatgggctcatggaagcatagcatgagacacgcggagtcgggttcgatgtcgacactacgcagtggtcggaagaagccagccagccagccctgatggtcgcacctcacccatcaatgaagacatccgctccagcggccggaactcccccagcgctgccagtacctccagcaatgacagtaaagcagagacagtgaagaagtcggccaagaaggtgaaggaggaagcctcttcccctcttaagagtaacaaacgccagcgggagaaggtggcctctgatacggaggaggctgacaggaccagctccaagaagacaaaaacgcaggagatcagcaggcccaactcgccatctgaaggtgagggagagagttcagacagtcgcagcgtcaacgatgagggtagcagtgaccccaaagacatcgaccaggacaatcgcagcacgtccccgagcatccccagcccccaggacaatgagagtgactcggactcgtcagcccagcagcagatgctgcaggcccagcccccagccttgcaggctcccactggggtcaccccagctccctcctcagctcctccagggacccctcagctgcccacgccagggcccacgccctctgccactgcagttcccccacagggctcccccacggcctcccaggcccctaaccagccgcaggctcccacagcgcctgttccccacacccacatccaacaggcaccggccttgcacccc

SEQ ID NO: 141802 - DNA, 546 bp, Homo Sapiens
ttttttgctcatgaaaacgctttataggtctgggcacacgacaagtgctcaatagtggttggttagggcctgtagctttgaccttcatctgcccattatcctcgtgctctgtagagacagccatgctgtgagctctccccagagagaaggagaggcactcacagcccagctctggagagcctcagcccttggagctggcaagggaggcgtgggaaaaccacccgttcgtcccgtgcttacatttcgtgggccggagtggctgaacatcgcatgcttgagctggtgataacgtattccaccactaagtgctctgaacatcaatgcttgcctgggtgaatgattttccctgttacaccaagcatgtcctataccaggcactgtgcattgtttatttatggggtcaaaggaagaagggggatgccagtttcctcctatgtgagatgggagcgaggtagacctagagacaatccacagagagatggcagtcattcgatgtaagtgtctgtgtgaatcacctcaaggtgcttggcatatcgtaggcaataa

SEQ ID NO: 141803 - DNA, 1249 bp, Homo Sapiens
  misc_feature (375)..(375): n is a, c, g, or t
tccgtgccgcgcttgggcagcccgtttagtgagctgcgtgtgttgatgtgtgcccgcgctgtgccgttccaggccgtcgcgtgtgcgtccgctcttggggttcttcctttttcaatgtctttgtgatgtccttgtacattggtacgccatgctgcgtgcgggccttatgcctgtggtgtgcgtcatggtccgggcgttcaccagtccagttctgctacataccagcttgattaattcatttaccatattgaagacgattgcattaaggcatacctttacaaccattatttcacgatattgtaacatttattgtgggttaaacatgtatcttttgaaccatatattagactccactttttagctgaaaatgaattntactgattccatctttttaagaatttgtggatgtttaaaggacatgtatattagcatgaatgtggtaactattgaactcctccgcaaagctattcagctgttgctaaaaaattgaagtttaaaatataaacaattgaagtttaaatataaatgtgaaaattcggaccttttttccccagatatacatgctgaagataatttgatccaataagttaaactaagtagagatttatggaattaactcatcaataggaagagtacacatccataaaagtaaattttttttaaaaagtatatacctttttgatgttaattttgttataaaagtatctctaaacatcattacaccagtgtgataaaataatatacaaatgatctcttaaaataccatgaatagggagccagcttccccaaaaatgttattctgttaacatcagtatcttgctttcttaaaatgactttgtaaaacctgataaatactctcagcaatcttttctaataataaacatctagtattgctattaattagattgtagacttttatacatagtaaacaaaatagctttaaatgaatgcggcatagtattttcaatgatttttgtttgcaatgatgaaacagaaggtaactttgtgcagcatctaccattttccaggaattgtagtcccacattcataccactgaacataattgatttgggtgtgaccacctatttctccaaattggacaggttcctggcgaactgctctgaaataaccttctttgatcggtaactggtcagaagtgagttgctgcccagtgcgtccatctaaaaatgaatccacaaactggcagtgatcttctccatggcccctctgatcacctatgttataaaat

SEQ ID NO: 141804 - DNA, 518 bp, Homo Sapiens
atgaattcacagatggctgtctcactgatctcttctttgtttgccaatattgtggctgccaaatttactgtgatgcagaggtatcttgagtaactttacaagaggctcttaaaccaaaaaagtgtccatggatcagagaaatggcttttatctataagccttgtcatctcctctcgcaataatcttcatataagtaatcatctcatcatatatagatcaatcagccttgttaatgctctgatctcagctctcacttttcaatgcagccctcgtgactaggaactattttctttgtaatttgaaggttttgatttagtggtcacattagtcttgtcagtttgtagcagcataccatgatgttattcataaccagtgatagtattatctgctataaagttgcactgtaaatcaggaatagttgtcaacttaaatatttatgcatgtctagggaaagtaattgttaggcagacaccctttgctgtaaaacaccaacaccccagttctgatgtgttcggaaa

SEQ ID NO: 141805 - DNA, 535 bp, Homo Sapiens
ggaaagcacccattctcccctcttttccgcattacgggccttttctgcttctccccagtatggtccgaaactacaggaggggaacccctcctggcccggcctttctattccctggctggagtgattccgcctgaaggagaattcgcccgttttccccggacccagctgccacaagcatttagtattaggctgccgcttattattagagcgggcttagaacatcctcagcgagggaaaagttcagttagaagacatacttcaccatcttgaaaaagaagaaatcaatccccttgctactacagaagaacaactctgtttggtgcttattccagccagcacagtgaagacaggctgaggactgctaccacagatgtagaagagcttatagtgaagcacatgggtgaaacaaaagaagtgagaactaatagcatagaattttaaagacacctgtgattttgttcattgcccttcattaaattgacatattaaaacctaatgtttggctatccctgtatagtaagaaaagcaaaaaaaa

SEQ ID NO: 141806 - DNA, 562 bp, Homo Sapiens
  misc_feature (311)..(327): n is a, c, g, or t
tttgatagccaaacattagtttttaatatgtcaatttaatgaagggcaatgaacaaaatcacaggtgtctttaaaattctatgctattagttctcacttcttttgtttcacccatgtgcttcactataagctcttctacatctgtggtagcagtcctcagcctgtcttcactgtgctggctggaataagcaccaaacagagttgttcttctgtagtagcaaggggattgatttcttctttttcaagatggtgaagtatgtcttctaactgaacttttcccttgatagaagaaataagcatatgtatatgannnnnnnnnnnnnnnnnactgaggatgcaagatatctatgtgggtgccaccttagtctccttattagagtactagtctttagggtactagcaatagaaagctagtaagctacctgaaccttcatcacacttatgtatgtgtatgtatatatatcttggaaaatccaagatatttctaaagaacaaaatatagctggcaatacacatacaaagctgctatgtgaggaaaactgaaagcaggaataaagaagtc

SEQ ID NO: 141807 - DNA, 534 bp, Homo Sapiens; identical to SEQ ID NO: 119699

SEQ ID NO: 141808 - DNA, 440 bp, Homo Sapiens
aacaaacgaattgtttttttcaacttgacaagtatcctgcataaaactgcattaaaaaccagtaacatcagacccgggatggggacggaaggtccaaatcagaacctccatggaatgcatctctacatattttcacatctgttttcaagcaaggagcaagaccagcaagaaagtgaggacttcctctgatgcacaaacctgggatgtgctgtgcaaatcagctacctgggcttcccacctgtggatgctcactgacctggggccgcaccaggtgatttcaggacttcctcagagaaaacccaggcaagacaccagcaacagagctaccctgataattattaaattagctctatgtggagaagccatatttgaatgagttattagtggaggtcaaaagtaacccatgctccattatataaatggcagatatcattatttaa

SEQ ID NO: 141809 - DNA, 364 bp, Homo Sapiens
agctctggcacagtcaagaatccaccttgggcagttcttctttgagtcttagccctaatccctttgaaaattctattttcctttgtcctcaatccagtcaacacctactatgtaccaggcaccaggaagccagaagctcagggcccagcccttgcctttgccgctcctgccagaatccccggaagggggcaatgccagtgcctggacccaccaggatgcagggcaagctgggatcgggtggcagccggaaggagggagccctggcaggagagacactccatcaggtcccctttgcctttcctgctccaccattctcaccatgcagggtgggtggagcaaggaggacccaagttcttcccatctc

SEQ ID NO: 141810 - DNA, 879 bp, Homo Sapiens
tttgtttttgttttaattttggtgggagatgggaagaacttgggtcctccttgctccacccaccctgcatggtgagaatggtggagcaggaaaggcaaaggggacctgatggagtgtctctcctgccagggctccctccttccggctgccacccgatcccagcttgccctgcatcctggtgggtccaggcactggcattgcccccttccggggattctggcaggagcggctgcatgacattgagagcaaaggtgaggctggggactaaaggactgcctgaagggagtcacacaatctagggacagaggggtggggctggaaggcaggaaataggaaagagagggcaggaaacaaagtccacaaagctgaaaagacgctcatgagaccaaggggagggcaggtaccaaaggcaagggctgggccctgagcttctggcttcctggtgcctggtacatagtaggtgttgactggattgaggacaaaggaaaatagaattttcaaagggattagggctaagactcaaagaagaactgcccaaggtggattcttgactgtgccagagctgaccgaggtctgtccaagacctaaggatgctacaaggtgttcatattgagcatggggtgcccagggtggtctgtcaatcaaaagaagagggctgtgactgggaggagagttataagtatgggagaatatgaagtgggagcggggaaggggactgcgatgtcacacaatgcaaagggcatggaattctgagtccgaagccgcgcattctagcgcagctccaccaggggccaccacctcacccgcgcttgccttccctctgtaaatcagggctgtgctaggtctctgtgaaagcattctacactctcttagagatga

SEQ ID NO: 141811 - DNA, 459 bp, Homo Sapiens
tttgtagcagggactaatttatttacggtaaaacagttcctatttctttaccttcagtcactctaatcatgttgaagtgaggttcaaagagaaagaaatggagcctggaccacaccatgagagcctggaaggaaaggtgtagccctgagctcatcctctgcagaggggaacaggcttctcaggccaaggtagatgacaaggagagctggcctccaccagaaactgccaaaagctgtaagaagctcctatctggctctaggcccttcataaccagacgttgatttagacccactttgccgtgtgctcttggaattcagaagccaggttaagctttcttctttcacctggagacctcaatgtattcagtctccacggcatcgatcccagcagaaatgcaaatcagcttttccagggcgaacctccctcctgaagaagtgagtctaggccagcaactgccgc

SEQ ID NO: 141812 - DNA, 566 bp, Homo Sapiens
tttttttcagttgcttgccaaaaagatttattgaagaaaaatgagcaaagtgaaaacagacccatttaagtagtctgtgccagaaaagaatgaagatttatgtccttgaatcgctaacaagagtcataagaagagtgtgatattcagtgtttaagaccttaaatgcccacattctttcatttctaaaggtttttgcttgttggaaaaatttcttagatgttaaggctagctggctagactattgcacaattctacatggtatcccttttgttgcttttaaatcatgaactcatcgggttcttctttcagtagttcaaagatatccgtttcagttgtggaggtgtcttccttatagtctggggtatctaatacagaggtagttccagaaaatggctcagtgatcttaggtacagtctctgtattatcagtttcagacaaatcttcttctgtagatgattcttccactaggtttgtagctattgatgcagggacaacgaagtcatatctggattcaacagcagtaagcaaaacagaatgggtctctgcttcatttgcagtatctctct

SEQ ID NO: 141813 - DNA, 577 bp, Homo Sapiens
tttttgcagacaaagtaaaatttattgagacagacagaaatgcacctactcaggactacagttaagcatttactattaaccaaagagttgtgttcacattccagataagtctacgtggaaaagcattcagaatttactaggtttttgctacatcactatttcatctacaatagggacaacaaactgacactcaggatttgatgggctctcattacaatgctatacatttaacaggaacaaacatcagtgactttgagaaaaagttataaaaagaccaaaaccacccactgtagaatgggctcttggatgttactgtacagcgtggtcaaggtaacaagaagaaaaaaatgtgagtggcatcctgggatgagcagggggacagacctggacagacacgttgtcatttgctgctgtgggtaggaaaatgggcgtaaaggaggagaaacagatacaaaatctccaactcagtattaaggtattctcatgcctagaatattggtagaaacaagaatacattcatatggcaaataactaaccatggtggaacaaaattctgggattaagttggataccaagg

SEQ ID NO: 141814 - DNA, 454 bp, Homo Sapiens
tgtcttgcaagataaatctttcttcctaattacagtttaaaataagttgctgctggcatacataggaaagctactgattttgtatgttcaacttgaatctggctatttagctgagttatcttattagttgatcatcatgactttctatgtaggctaagggctggcaaattatgaacctcagaccaaatctggtctgctgcctattcttattggaagatagccatacccatttgtttctgtactgtttggtgctttcatgctagaatgtgattgttaatgagctgtgacagagacactatggctcaaaaagcctaaactacttaactatggaccctttacagaaaagggttgcccccctgatgtagataattatattacctgcaagtaatgacaattctgtctcttctaaatgcattttatttattaattcattccttttttctttttcttgaga

SEQ ID NO: 141815 - DNA, 459 bp, Homo Sapiens
tttttactttcaaaagaatttcatttgagtttacaagaaggtaacagaagccctttgatctcaacaaggcacgtcctgtttcattccacggtttatgaaacaattttagactaattatttttgacaacttgcaaatgtttgtaaacttcttcaagaaggaaatggcacaattatgtcttcctctgacatacagagaaggaagtttcctttgtgctgaatggctgacgtctgttcccccaggagaatttggaagccttgatcttctgaggtgctctggtttcattctgagatagtcagaatgaatcagaattttcgtctgagctggtgtgagttaaatttaacgaagcaggtgaaaagccactgtggtcagaactgttcactgtggtgacatcctttgtcacatgggcgtgatggtcacggtcagatgccagccctctcccagcatctgtgctgtttacc

SEQ ID NO: 141816 - DNA, 264 bp, Homo Sapiens
cacggtttactgtttataaaagccaatctcggggtcaagcgagatcaggtagcaaaagtttcaggttcaaaccccccacccgcccaccatcagccttttgccagcccctgctgttgtccctggcatgcactggaggccgcagctaatgttcccactctccctgcagtccccgcgcctgacgcgtaagtgtccctatcaccatgtttcagctgaggctgcccaaagccacacaaagtgcagtcatgtgtaacgaccaggcgtgtt

SEQ ID NO: 141817 - DNA, 418 bp, Homo Sapiens
cagcttttgattcctgttctccaacctgttcctctcctagttttctccatctcagaaatgttacttcctctgcaaagtctttccctgacttatctaaaataataacctcctctgtttgctgtgggaatttgtatagaatggtgggaaaatttcaagtttcatatttggattagctctgacatttatttatctgaacactggtaattgcctcagtaaagacactgataataagtaccttttagagttattttaatctttaatgctttaatgtgtaggaagagtatagtgtcctgttttgcacagaaaggcattctgtaaataataagttgccttaattttcctgtaatgttcattatattgttgtgggaaggtatttactcctattattaaaaataaaaatgtgtaaaaattactacct

SEQ ID NO: 141818 - DNA, 520 bp, Homo Sapiens
ccagaagcccagattttaaatgaccgctccaggttaacctggggatggtcaggcagaacaaggaggagaggccagcagtgaagggcagggctggtgggcagtggctgggggtgtcctgggtggggctggccaccctcgctgcctctgacttgggccagacctgcgttaagtggagtggctcctccattctttacaccccgaggcccctggcaggtgccctgcctttcctctgcccctctctctgccaacccatcctctccctcccagcccctgcccgcccagatataaatataagagcattttccatgggctgagacagtcgggagggagggggccctggaggacaggctcctagccctactcctcctcaagacccgggtgctggcctgtcccctgcctttgccccgatggggatgagggagaggagatgggtcagggaacagctatggccattggggaaggtgacttggatgcaacctttgaaagagatgcttccagtaaaccccatcggttaagatca

SEQ ID NO: 141819 - DNA, 593 bp, Homo Sapiens
  misc_feature (231)..(231): n is a, c, g, or t
  misc_feature (577)..(577): n is a, c, g, or t
gccataaatgtctttattggtgtgttttgtaaactggcaaattctgtgtaacaatttgttttgaaaataaggtcttcctgctaaaaacaaaactcaaaaagccacaggattaaagagtctttcatcttgggccttctgtgagtctccttttcttcaggtgactgactgggcttcgcatgggtgtaaaatgggttggcagctaaggccttgggaagaaagcccaggcaaagnaggagaggcttcctggggtgcatgagggagaaaaacagcccactgctgtggttcccagcatgagggggttgtttatcaaggcgctggaagaggagttggctagactttgagaggtccagtgttggccaggagcaggactgaaagactggaaccattcagctgtctttgctgttagccgtttggcagttttctcctttcctcttaggccttggtcttttcatctgtactatttgggcagaaatatgtgacttgagcccccagtggggtgctggattatgaaaacacccagaacagaggtattttctagatctcagctaacatcccctctgcaacacatggaagcatnctggatggtttccgta

SEQ ID NO: 141820 - DNA, 560 bp, Homo Sapiens
  misc_feature (544)..(544): n is a, c, g, or t
tacgatttaggtagattattttatattatacaaacttacagcttatttcattttgggcaaatgaccacaccaaataatattacataagcaaacttggatttttttagatagctactatagaacaaatgaaaaattcaggcattatgttttatagcttttagcttttttgttgcatagtcagcaacaaataactattagtgctgccaatgcccacttatcagtgttgtctgtcaccaatttctaatggttccacagcttaatatggtctggtgagtaaaatgaaaccacaatttaggtaactatacacaatctaatttaaaaaacaatggggcaaaattattgttgtaaaacaatttttttcttaatgttgactaatctcaagaaacaagtaatttagaaaagtactttaggaatatgcagatgttaaatttgttcattatgttgacatgccaactttgttcctatcatttcctattttctactctaaaaaagatctatcctttataatggagtaatcattctgcaaccaaagagtttaacattntcaagagttaaatatt

SEQ ID NO: 141821 - DNA, 1215 bp, Homo Sapiens
  misc_feature (1106)..(1140): n is a, c, g, or t
gcggccgcgacggccctggctggcgtcagtcaggaagctgttaatcacctccagccggtgcaggtgcaccacctggaagttacccacatatacggcccagtgcgggtactgagcctgcgacacgaactccaccagatcgcccggcttgcacttgttgagcaggttctcgggcgtgtaggtactcagcgccgccgagcccggcgcgaagctcttctggtagatgcattcgtcccggtagaacacggagcattccacctcgtgcagccgcggatcgtagggctgcggctggggcggcggcggcccgtccccaccgtcgggcaagccgccgccatctggcccctgaggcggcggctgcggctccacgtcctcatcgtcattggagaaaatgtaggagaccccaatgcggggcccgtcgtcccggtccacgccagtcgggtcggccgtgggaacttccttgtaacttaggtgggtcaatttctccacctgggttgcccatcacgctgcggacacacgttcacaccgccgcaaggggagaaagcgaaaaccaactccagggtcatttgcacaggtccccaggacaggggctgaggcttacccgcggagaggtgaaggccgtggggcctggggaagggctccctgccgcgccccgagacttctagggcgagtttgaaggtgtaggctcggcagtccctcctctcccggcgcgggcggcagcgaggctgggcagagggcagcgcagcgggcagactaggggcatgtctttcccccgcggctgcgtagcgccccgatacttgaaggcggggggcaatccctgttcacaccgcgcttcctcccgccagctggggctgctgcccctcctcagccagctctcgggggaggtggggcgcgaggaggagaggacggcagcctcgcagcctggcggcaacagctccccgcttgggccagggcgagcaaacaagcaccggagctggagggacgggattgtagatccggctccgggctcccgggcgggagcgcagcccgtggcatttaaagagacaggcgctcactccccccccggccgtaatggccgaattcccgggcatatgtccggtaccgtcgactgnnnnnnnnnnnnnnnnnnnnnnnnnnnnnnnnnnncgccgcttcctcgctcaatacttcgctgcgctcgtcgttcggctatgacgagtagcgccctatagtgatcgacag

SEQ ID NO: 141822 - DNA, 209 bp, Homo Sapiens
ctctataagcatttttaaaaggcatacccaaaagaggtgtttaatcaccatccccaccaaaatatagtttattatctctctccctcttttttaatgatagtgtaaactgaatccaattcctggcccccagagcaaataagctactgtcagaggcaagaacatccaactgctgatatgcagcaatccccatcatgccccgcagctcaaaa

SEQ ID NO: 141823 - DNA, 555 bp, Homo Sapiens
tttttaagtactctaaattttaattactaattattatatagtttagaaatgcccaaatgcaaattaagtatcttcctgactaaactaacttcctatattttttcccctatgctaatggaaggagaaactctcacttatattttgggcatagaaaagcttgtacatcatcccttacacaccagggacctctgaggcatcagagcggctggaggtgggggtagggaaccactaggagctttaaccttcagcagaaggcaacttgtgtatcttaatctctgaaaaattgaatgcaatttaatattacaggactaggcctttggagttcaggacaaggaagtgaatggtcccaatacactctgcacatgtttaggcttcatttagactgttacattcagttgtgaacaccacgttttaaaagggccttcgacatccaaaaacacatgtagagcaagactgacacgttgctgggggatcaaaaaaaggtgttataggatgatgagaggaactgaagaagtttgctttggaaaggaaggcttagagagggtctgagcactg

SEQ ID NO: 141824 - DNA, 475 bp, Homo Sapiens
tttgaagatgtaagatgtctttatttattcggggatacatcagcgtttgtcttgggggaaggtgactccaatggccttcctcacctcttcaaggatgtcagccaggagctcactttccgacaggggaatcacaggactttccttcatacccttgcgtaggcactcccagacgtgcttggcctcataactcatgcctgccccgttgtcaaaattgcagtcctttgggactggggggcagcgggaactccttatgctcccccttcaccaccagctcggtcgggcaccagcaggggttgaggagctgtaccatgcccttggtgccgctcacggaggccgtgttggagagctgcacggtgatgctgcaggtgaagctgccatggacctcccctgggtactgcaggagcaccgtgacagtgtcatccacacctgtttcatgacgccttcccacgacagaaatcttctctggcttctgccc

SEQ ID NO: 141825 - DNA, 495 bp, Homo Sapiens
tttttttaataggcacttcttatttaatgatgagaagttgcttgttgacttacagtctagaatgtgtgcatcttgctttctctgcatcctgcacttgaacactccacctttgggagtgtggctgagattcccactcctgatttctttttccttttaatgatctctggccctctgggtcttctggtgcctggctctcctgaatgtcatgtttctactttgtagactgttcatctgtcgagcaaaactaaggggtacactaccctgctccttttctctcttaacctgtaacattctcctcttgaggctttaccattgctcaatttctgcaggccttagaccatagacgtcacctcaactgtttactgtttccccacagtaaattcactggtctgtggacacggtagattagttctcctatctgagcatcatgcttaagcagagtaaattaggctatatttaccttttcagtaaaaatgctatattgcccatttatgg

SEQ ID NO: 141826 - DNA, 523 bp, Homo Sapiens
ttttgaagcaacacattttattttgtttcaagtccacacagcaaggaaagtggggctaccgaggtggcgcagattggaacaaagagaaaactgtggtctctgattaagacatggagtctgcaaacaggggccaaaaaccttgccctctctgtaacacgagatcaatctatgctggctggagggatgttaaagtgcttggtggagactggtcccttcagtgtgctaaacatggccctgatagcttctccacacaggtaattcaccagtaaaacccatccctcacagaggagagccttggcccaagtctggaccaatgaccaggtcttcttaagtgcccatctctgggctgtaatcctagacccaggacatggctaaacctctctctccttgccagggaaatgtgaggctggggcctcccatagagaccagtggtttgtccaggctccagtacagatggctgtaaaacagagtcccagcttcccactcactcaacataaaaccagtgctgggtttccagtgaaaa

SEQ ID NO: 141827 - DNA, 577 bp, Homo Sapiens
ttttttaaatttatcgttttgaaatttattctccaggaaggggaactctttcaaattcccacaaagacgccttattgctaaggccagcctgtaacataaacagctgggctgtcccctgaccccggcctgttgcaggagggctggccgcgctgatgtacacggacacggtacagaccttcgtcattctggggggcgcctgcatcctcatgggttacggtaggggctcgcctaccagggaggggcgcggagggcatggtcgcggagctctcggcctgcgcgcggggccgttgcgcgtctccggtctgagggtcctaaggagggtcccctgacggccttgcccggcagccttccacgaggtgggcgggtattcgggtctcttcgacaaatacctgggagcagcgacttcgctgacggtgtccgaggatccagccgtgggaaacatctccagcttctgctatcgaccccggcccgactcctaccacctgctccggcaccccgtgaccggggatctgccgtggcccgcgctgctcctcggactcacaatcgtctcgggctggtactggtgcagcgaccaggt

SEQ ID NO: 141828 - DNA, 278 bp, Homo Sapiens
tttcttactccatgtcaggctcctgtgctgaaggaggtcaaagctatacaggaaagccatcccagacagctggctgagagcaaggccctggggaagaagtgggggcctgataggggagggggcagttctgaaaggagatgggagcagcctccacaggcaaacctggctgacttcatggcatgcagcttgctcttccctgtcatcaagtcccatgagctgaggctgtcataagctgaaggactattgagagcacactgtaccacttcctgggcactgag

SEQ ID NO: 141829 - DNA, 919 bp, Homo Sapiens
tttataagtaattagattttattatttttaatgtttcaatttttgttgagaaaaacattcccaataacaaatatacatttgtgttttgacatttgtaggttcagcttttcaacatttcaaatatttcagggcactctctgcagtgttttagggtgaagggaagcaacagggccttcttaagtggtttttatgctagaggctggctggaaggctggccaaggcgcgggctgcatgggaggctggtgtactgaaggactctcttgaaaagtagcatagaggcttgctgagaggctggctcactgggaggctggcctagagcctgtgggagaggctttctgtctgagaggctgccataaacgcttgctaaaaggcctgctgagatcctggcaggctgaatctggctaagagtctgaatgcaagtctggcttgttaggaggctggcctagaagctggctgcatgggaggctaaccaagaggctggcgaggaaactggcagagtggcagattgtctggctgtgcaagaggcttgctggatggctgttaaaaacgctggctgcatgggaggttggtctggaagctgattgtctgggagattcgcttagagactttctgaaaggctggatcggaggctggctgtctaggaggctggccaagagcctgcgggagaggctgtgtgagaggctgccttaaatgcttcctaaaacgcttgctgaagagtccggcaagatgaatgtgacttggaggcctggtggcaggccggttttttggaggctggcctagagcctggctgcatgggaggctaatcaaatcacgagtcttctggcaggggaagagggttgctggaatgctgttcggaatgctggctgcatgggaggccagtcttcaggctggctggctaggaggctgacacagaggcttg

SEQ ID NO: 141830 - DNA, 552 bp, Homo Sapiens
  misc_feature (249)..(372): n is a, c, g, or t
tttgagatgaaaaataaacttttattgtattaatccactcagatgtcaagatttatcggttacggtacctagcattatctatttacagaaattggtacattgaggttaggtgtgattgtaacaaaaacttaaaatatgtggcttaacagtcagtgattggtaaaaaacaaaaatcaaagcctacaaagatggagacccaggtttgtactatgcaaatatttaataaaaatattacctgtgatgacttgnnnnnnnnnnnnnnnnnnnnnnnnnnnnnnnnnnnnnnnnnnnnnnnnnnnnnnnnnnnnnnnnnnnnnnnnnnnnnnnnnnnnnnnnnnnnnnnnnnnnnnnnnnnnnnnnnnnnnnnnnnnngttggaagactgcagtcaaatataggtgggaccttcagttatcagaggtttgactaggatggtaggatccactcattcacatggctgcacaactaccaagttaatgctggcaagttggtttctctccacttgggcccctccatggtgctgcttgagtgtccttatgacccagtagctggt

SEQ ID NO: 141831 - DNA, 653 bp, Homo Sapiens
tttgagtaagcaagagctgtttattcaccaacgtgttccatttggagactgtcggcgagccctggaaagcccaggcacatttgagaaggtttctggagagggagagaatcatctttccttcccccaactccccagccccaaacacacatagagactcgggtggaagctgtctggtccaggcagtccctatttgcccgccccctcaagaagaacctcacgcaccaaaccaaccgacccctcgcggaggtggtgtagttcccccaaaatgggctctgccgcaggagaggctggctccagcgccgggggcttcggaaggagtttctgccacccccactgccgccactgaccgccccgacgccacggccggggccggggaccctgataagaaatggcccttcagccccctcccctcacctggctcggtcccacctgagggcaagagcggaggcaaaaacaaacaggcagggagggctgaccttgttgctaccgacagtggagcggcgcatcctgctgcttcctggaaagcggcccgaaagacattttttccccctggaggaaggaaacgggagggcgccggccagacggcggcaggcgcggaggcgttggtccgggcgggctgtgcagcctctagtggagacggtccgaagactaca

SEQ ID NO: 141832 - DNA, 1019 bp, Homo Sapiens
  misc_feature (904)..(938): n is a, c, g, or t
cccttaaaatttctgagataatttaggaaggctccggcgctcttagagacactccccctgctgcagataggaatccccagggtaaagagcaccctgccacgagaccttcccccttttgggaattgtgtttcagagaaccggcctcctggttaccccgcccggggcgtgtttttttatttggggggggaatccccaagccccttaggtccatggccccagggattttccctagggaaaaccaggcttatggccccatgtttccccttacccttactgggcccccgcggccgccaaaacggaatgggtttaggaaagctttctcggagggcccgaggcgggccgacatggctttttttctggtttgcgtccccgccttctagtgattaatagatgatttatttaggcaggaatacatatagtcatcattgccagacttaatatgagaggtgaaatgttcgatccaattttccttcctggataagtttttctttcctatccctctcagttttgataatataataaatgaagatgaggggcccaaatccacacagagctcccatgagtgagtttttaggagtgggtctgaaattaggatagacatttattgttcttgcataggcccaacgaagcaaggcaggattttcgatgagccctcggcggttgggatcgttgtactgaagcaggtactctcgtttcagctgggctcttatggccaaccgctcggcttgcgcccgccgggtttccggagatatgttgtattcggctgggtcgagggtctcaggcagagtgcgcaggctcgacggcttatactttgggaacgacatcttggcgaaccagggcacaattgcgcctccccggccgtaatggccgaattcccgggcatatgtccggtaccgtcgactgnnnnnnnnnnnnnnnnnnnnnnnnnnnnnnnnnnncggccgcttcctcgctcactacttcgctgcgctcgtcgttcgcttgagcgagctagcgccctatagtagtctatacgattt

SEQ ID NO: 141833 - DNA, 503 bp, Homo Sapiens
ttgagagcagggcagcgcatggggagtgagtgtaaccacagttgacaacaccacctgcttttttgaggacagtgaagaagtccacaagtgcctgccttggttctgctgtgcttgcagctgtcacgggatctgaagccagcccactgctttcacagaatgaagctccagctcatccacccagatgccaaggaccaggacaccctcaaccagtaacacacactctccttcttcaatgacgtttgtgttcctagaatccattttcctcagtcaggccctggccacgaagacccctgcctaccgatcttctgtactagcccagcatgcgtggacacattcatctgcacgacagacatcatggggcaccttctgtgagcaggcgctggggagacaaggccagcccgcctcagttcccacggtactcagagacagcaagccaggccaccccagcatggtgaggtgggccctgtgttcaccaacaataaaggcggacaaagccctaaaaa

SEQ ID NO: 141834 - DNA, 493 bp, Homo Sapiens
tcggcattttttaaaggcatttattctagcaaccacgggattgttacaaaagcacaattttaataggcttatctgctaagatgcttttataagcagctgtcacctatacagagttatgaatcatctttggtgctcaaggaacctgtagaagtaagagacatcatcatacagagaaatgtagttaagttaagttgaagcttggaaaagatcacatgaaaaaaatctagcttttgccttatctcttcctaagttaagcataaattagccgtctgcaatagccgcctgtaagacaaatgataacagaagacaatcacacatggtgaatggtttccagtggagtttttcttctaaagagacagtaaacaggtcacaactcattccttgagaaaggattcctattaaatacccagaaacagctatcaaataaacagccaaagctattacttgttttcatcacatctctgtatcttcagaattggaagaagaatgtgag

SEQ ID NO: 141835 - DNA, 588 bp, Homo Sapiens
ttttttggttacttagctacttttattttgaaaaataatcccatttaaaagcttcttgaaaggctggatgattttacaatactgacatacattttggaatgtaaccgagtgatgggaaatttctctatatgggataggtattccttagccggcttcactaatttatgttacctttcatgacctggtagtcatttgagtttgacacccctgataaaagtctctgtctcttgagtatcaccaagtcatctgtgtgaaatcgaggtatgagtgttatctatatttttcagttttcaggaaaggaatataagacatcacaaaaactccaccctattactcttactcataggttcagaacttcagatgaagtgaagttccatttctaaaataactcctatttctatgaatgtcttcagcagttgctcctggaccttccaggttcataagaattcattctcataaactcacaggaacagagtaaaaccaccatctctcaggaatcccctctggcatctgttaaagatcaagccaatcaatctaagatgaccagccctcccagattcaaatctctgaaatagggtttgtttggtt

SEQ ID NO: 141836 - DNA, 360 bp, Homo Sapiens
tttttaacactttaaggttttatttggtagattgtaatatggagtcagctgggtaatattgctgccatggaagctccaaggatatacttagggaaatacagtaattacaacaaagccattaaacatctttctagtttgtcacttgggtgaaaccttgaattcaattcttggcatcagggtttgagagagatgttggcaaagtaaatctcctcctgagagctttcctaatggatgaagaaaagctgatggagttaatatgtacccaggtaaattgaagtattctcctgtggaatcaaggctaggtgtatcctgtagattccagagagcagaatagcagatctgttgagacttactgtaatg

SEQ ID NO: 141837 - DNA, 555 bp, Homo Sapiens
tttattgacatttattatttattttttgaattttcaaactcctgaaaatacagagaaagacagttttaaattaaattttaaattaaattaaattaatgcagtactcttcatgctgccaaagtagggcattgtaatagaagacgtaatgatcgcaaaatgggaaatgtagttcaaagtacgttcctactccttttaaattccttgtggttgggaacttacttctctgcttaccttgaactgcttaatctgccaaaattgaacaagccaaagcatttaggcatggttaaggtacggaaaattcaaaatttggataaactctgaggcagatggaagaaataagtgccagccctaccacctgcctcagccctttcctgtttgggttcatacttttcccgcaggcctggcttgctgattcatggcttattttttccctatagtatatgttaagtcagtttcttctataccataaatcaccccaaaggagcaaggcagtttgctttggaaaccaaatgaatattctcaggtcacttgctgtcttgtgaaacatttgtaacc

SEQ ID NO: 141838 - DNA, 571 bp, Homo Sapiens
aagagagagggcggggggaagctggaggcaccagggagcagaaggaactctttattggaaagtggatgagagaggcagctccagccgtgggcatcctgaatgggaggaagaatggacagtgtgggaaggggaagggcagcagggacttaggaccagatggggcctgtagctctggggacggcacaggtgcagcaaggaccggctccctctcactggggaacgaaacaggccatcccgcaagagccttcacagcacttcttgattcctgggcagtcagtatctttcaagcagcggttagggggattcaacatggcgcaccggatcaagataatggggcaggagccaggcttagtggagactggacctttgactggctcttgcgctttgactttatcttgacctttaactgaaacttgtcctttaacgggatcttgtccattgaatggaacacggcctttgacagtgtcttgacctttaacaggaactcccgtgacagctgcctctagaaccagcgtcccagcgatgaggaacacccaccacgatcaagaagctgctggccctcatggtgtcc

SEQ ID NO: 141839 - DNA, 531 bp, Homo Sapiens
  misc_feature (19)..(19): n is a, c, g, or t
  misc_feature (92)..(100): n is a, c, g, or t
tttaagatccaaacgttanaccttttatcttgaaatggtgagcgtctgcatttgcagacttcaatctacaccacatatcaaggaactgaacnnnnnnnnnctaatgtcatgacttctctctgcttcttgggagcacttctggcatgattagtggcactccatatgggtgccatggtgttattcaaactttacagtattccacttaacatgatgaaaaatacacaagaaccacaagtgatcactttttactgctacatccaacttaccagagagacaaattgcttatgtggagatgattagcatcacatagcattttaagcgtgtatctgcaacacttgagctcacagcaatagcaagaagaattggctatgaaattattatattaagtagtacagtatgtacaacagtgaattttatgtagttatgattcagtactatacctttacatttgtttacatttctctggactgcaaatggcatcatgtgtggtctttaagtgtttctgtgcctaagttttgataaattttaact

SEQ ID NO: 141840 - DNA, 671 bp, Homo Sapiens
ctccagctgaagtgcacgttggaaggaatcagaccaggttcccaggcttcctatctttgcctttgatgggtactattgtgctctctgcattgttctgctgaaactgcagtctgctgcccctgtgtgcgttgctgcgctggtgatggaggaaagaggcgcctgggtggtggcccatcacctcgctgtatgtggggggtggcccctccatcctcccgttactgctgcaggtgcttgcactgatgcccgagttgctgctgggtgggcatggacccccgctatacatagcaatgtctattaaatcactgtcaaatatggttcggttgggtggggccctcacggactctcggttgagttccatctgctgttcagggtcccggagctgcagggtgcagggcccctggtaaggaggtggctcttcaccgtcggacagggagatggtgggaggaagatcaatctcgtgctgcacataggggtaagtgggctggaagcggctgaagcgatccctctggatgaaggacggcgctgtgaacctgtccctggaccgcggggcatgcatgatctgcggcagcccgtcctcccgcctccggctctggttcgggcggttgatgaaggaccgcgtggagactttgtagtggttcagcaggcagacgatgacaaccggatcacccgtt

SEQ ID NO: 141841 - DNA, 567 bp, Homo Sapiens
cgaggccttgtatcagtcaaacatgctttggagctccccagagcgaccagccacctctgtctttcagctgcattcactgccttcatgtagaaatgctgctctccaggaatgattaattccattcttgtgttgtctgctgaatgaactttaatttcacaaactgccatctttatgcttcctttgctccctttgcaaacatcatcttgtgaatcatagtaggataagattccattatctaaaacaaaccaacgaggctgccagcctgtgagatagttggtccacttgtacaacaccccctccatgcttcagagccccacaccgcgcatcctcccggcccggcgccggccgcggtgatggggtaggcgcagggcctggggcagcccctcccggcccgcccgggccccctccgccggcacgaagccgctttctgcctgcgcgcgccgcagggacgtggcggcctttagaggccgggacagcgggcgcagcgtggagcttgggggccgcgaggcgcgggcccagacattcccgggtaagcctcggcggcggcggccgccagcttaatccctt

SEQ ID NO: 141842 - DNA, 513 bp, Homo Sapiens
ccacctctgtctttcagctgcattcactgccttcatgtagaaatgctgctctccaggaatgattaattccattcttgtgttgtctgctgaatgaacagaatttatgcatccaatcaagggtggtcccctccaaagttgtcacctttaatttcacaaactgccatctttatgcttcctttgctccctttgcaaacatcatcttgtgaatcatagtaggataagattccattatctaaaacaaaccaacgaggctgccagcctgtgagatagttggtccacttgtacaacaccccctccatgcttcagagccccacaccgcgcatcctcccggcccggcgccggccgcggtgatggggtaggcgcagggcctggggcagcccctcccggcccgcccgggccccctccgccggcacgaagccgctttctgcctgcgcgcgccgcagggacgtggcggcctttagaggccgggacagcgggcgcagcgtggagcttgggggccgcgaggcgcgggcc

SEQ ID NO: 141843 - DNA, 946 bp, Homo Sapiens
tgaaagcgtaaaacctactgaatcaagaaacgcgcgtggttgattattattaagcggcaacatagaaatgcagcatctcacatagttcagcagggaaatcccatcttggttctggcctctgcacatacctgctgcagcatttcttctgtggcattcaacttctctctgtgctcttcaagacaaaactccaaatctcgaatcttctctccctgagccttcacctggtcttttaacacacttacctgaagaacgagggattctttatcattttctaaacgtgccagcctttcttgatacacatctccgttccctggtaggtgtccatttgtcatttgactctgaagccattcaacaagtgtttctgctgttgaatctgggatctggcatctcaagccttctttctcatctgtttccatcatctctaacaatccacgcaggtcttccacaaggtgcagagctcgcaaactttccatgaatggagaggtgggagattggcaatcaaaaatcccattggaatattccagagccttataacctgctatgataccatccatctgctccaacgctgcagtcaacatgtcacttgcatcactcatcattttattatttgtcaggggcaaattccaacccagatatttttaaaaagcaggtttaaagctgatttatttcagttcttcaaatcttggatgtactcagcaaagtgatccacacgttcttttatactggggggtggagagccgccggcactagttccaaaagttctggtccacctcctctcggagttcaaagccccagcactccggcccggccgccagctcgcagcacacgagtccttccccgtcctttccccaccctgcctgcactacaccatgtcaggaatccgggcaggcaccgagctgggagctgacatcactcccagttccaggtacctccccctcccactccc

SEQ ID NO: 141844 - DNA, 1458 bp, Homo Sapiens
gagcccccgggccaaaaggaaagatctggccttttggagtcccgaaggggggttgtcattccatggaggttgtcctgccctggggggcctggaggaaagggtcccaaatggcctgctttctgccggagctctgtcctctgaagtcttctgaatagtttcctgtcccccatcagatgtctctttcttcagattgcccaggctgctggacttctgcagacttgaagttaaaagtttatcacacagttgggtatcaacagtggcaccaaggattatgtttccatcattttcttcaaatgaagtctctggcttaggagtcaactttgatttttcagaagtttccatgcttacagttgctggcaataatgaagggatggaaacttgcaagatggtagtatggaactcttcgggaacacttgtgttaaatgggtcacaactgggagatcccattactggagtgggtgatggacttttctccagatcactgaaaccctgtgcatccagcaaagaggagatggaactggaattgagcagctcttcatattctccatctttgccttttttaccttgggccagtaccaccgtgtcttgcattttcttgtacctgttcaggcactgtcgaagatcttctattttccgatccttttcttcatttgctgccatcaaggactccacagcttttttcattttttgtacttgcgatgtctctatcaacaatttcaaccccttctcctttcatcttgcaaacccatttttcttgtagcctttttacttcagattccttttcttctagttgttcttttaaagatgccagttcatctttggttgatttaagctttttttcatactgaagtctctcactgtccatttcactaacttttaacctcaaatcattgatctcctgaatcagcccctctgtgtctctgaacttatcttcataatccaatctgtccttctctacagctgtcagtttcaacttcaagttagatatttcagccactcagatccaacttctgagtttctaaggatgtcctacttagaagctcctgctgcagcatttcttctgtggcattcaacttctctctgtgctcttcaagacaaaactccaaatctcgaatcttctctccctgagcctccacctggtctgttaacacacttacctgaagaacgagggattctttatcattttctaaacgtgccagcctttcttgatacacatctccgttccctggtaggtgtccatttgtcatttgactctgaagccattcaacaagtgtttctgctgttgaatctgggatctggcatctcaagccttctttctcatctgtttccatcatctctgacatccacgcaggtcttccccaggtgcagagctcgcaaacttccccgacgcgtggtcgacgatatcccgggatatccgaccgtacagcctgctttttttacactgtctatatcctaact

SEQ ID NO: 141845 - DNA, 817 bp, Homo Sapiens
  misc_feature (112)..(112): n is a, c, g, or t
gctggaggactggagatttcagttcttccttagatttcttcggggtaatttattagaaatggttacataggtttgcttcctaatctcaaagctggtttcccctctccccaanttcagcaactatttattctcccaggaggccatacaagcgaggggccctgaagctttaacatttattaacttcatgtaaaggtctgagcggacctttcaggccaggcagcgtgtcacttgcctgtgttccttgttagggcctaccaccgggtaggtgcttggaatgtgctgtggattaaaggcttaaatcctgcgggcccctcaatctgatctaaggacatgagtggcttagagaacggcgcaacaaggctaagcgaaagaaaacaaagcggtgtggctgggagtgggctccttccctccgctggtgagggtgcgatcttagactcttgagagaacccgacataaaggccgcgttccaatggcggccttctcccctaccggccaacctgccccgaaaagagcagaaggcaccctgcgggatctgcagatcagcttgcgtctcattctggggcaccgacacggtggaatgcaagacaccccactaccggaagtttctttgatgttaagaaaaacggcggaagtaggccgcagcgcttcctcagtatagtgcctcgagctggctcgcctactttctacggtaaagggaggtgctccacatctctatgcagctgtgcagcgccgcaggttccatgcgcaggctcggttggctaaatgcgctttccagccatctttcagccacccagtcctttcccaggttctcgagccc

SEQ ID NO: 141846 - DNA, 477 bp, Homo Sapiens
ttttttttggctttcatatatccctttatttcttgctaccatgcacttaaaggactcccaacagcgggtcaacccggaaagtctgacaatgctgccccccacagcacagcgctcggcacagcgttagggacagaagtcatcggagttttagcacagggcagcggtcccaggctggctgtgtcctccggaagagaggagaagcatcgggtgtagtcctcgcagggcaatgctcgccggggtagggacaatgggcagggggcacccgaggggttgctacagaggaggcagcggcccgtcccagatggtcgccaaggaccagggggcgattgagcggcagcgggcgtcccgctggcctcgggctgggctgtggttcggtccagagccgaccggcccatagtcaggtcggccacctgctgatgaggttgaactgcttcttcaaggcagcggcggcggcagcccgcggggcgccgcctggca

SEQ ID NO: 141847 - DNA, 1079 bp, Homo Sapiens
cagtcgacggtaccggacatatgcccgggaattcggccattacggccgggcttcactgcagaaacagtatctcacttggccatggctgtggatggaacatctttaaaaagtctctcctataaatttatggcccctggctagcactctccatcacaggtatagggccaaagttcatattatttacatgttcaaaagaactgcaaactgtgacttttaattgcaagcatatctggagctatagtgcccccaggcctctggtagaaagaaatgtatgtccttgcaggaggaacccccaacccaggcctcaaggaattccagcgagcaggatccctagactatgagctcatagtggaaaatcacagcacacactagagaaggggcctcagaagttatggccgaaagatagcacacctgcaaagactcagatgttagaataggagatgcaaatatgtttaatgtgtttgaagaaacaaaggagaagctaaggagcataaataagcaagagagtatcagaggctaagcagcataactaaatgaaccaaatagaacgtctaaaaatgaaaaatgtacatacttgaacattcaaaactttaatggaagtaatcttgatccctacctcacaccccatagaaaattaactcaatgaatcatagacccaaacatgaaattcaaaactatgaaacataggaaaaaagttttgtgactataggttaagtaaacatttcttagatatgacaccaaaaatagagcctataaaaggaaaaaaattggcaagtcatactttaataaaattaaaccttcttgctatgtgaaaaccattgtttagagaatgaaaagacaagttaccaggagaaaacctttgccagtcatgtagctgattaaggacgtgtaaccagaacatacaaaaaactgtcaaagctcactaatacaaaaacaacttattttgtacagtgggcaacagatttgagcagacactccaccaaagaagctctctaggtggcaaataagcactgtcctctgggaaatgcaaataaaaatcacaatgagaaactactgcacacccgtgagaatgccttaaa

SEQ ID NO: 141848 - DNA, 702 bp, Homo Sapiens
  misc_feature (547)..(547): n is a, c, g, or t
  misc_feature (627)..(627): n is a, c, g, or t
  misc_feature (645)..(645): n is a, c, g, or t
  misc_feature (647)..(647): n is a, c, g, or t
  misc_feature (686)..(686): n is a, c, g, or t
gtaatttgataaatgtttattgacttgctgattcaaaaaaacagtgtagctgagaagtctgatcagctcagaaaagagtggaatttggcaacaaatatgttatccaacaaaatctgagtaatttatcaccttttaacatcttcaacatatttataatataaatattttttaaaaaaccgattattaaactaatactcccctgtaagaacaagaggactaattttcggtgacgacagacttgtgctgatccatcatctggaactcctaaagacctgaatggctgactgggattagtgactactatctggttttactggttttactctactaagcccatgattttgtgttttaaccaattaagaaaattatcccaaagcacaataaaaatagcctaggtctgaataccaccagttttttggcaacagtcctgcttcttgcctttttctcatcctcatctgcagctttcttgaattcatgttcaaaggagctagctagttcattgaagagtcccacctcctcacagttcttcacgaatctagttggagtnaggcgttgatctgcaatgatgactgagtcagttcgggctgggccaaatttcaatgtcatctcatgcttgctgttatgacnctgccagtggtcctcatntngtaatctctgtccacagcccggggcattgcacacaaacngtctgtcgtctcccat

SEQ ID NO: 141849 - DNA, 781 bp, Homo Sapiens
  misc_feature (308)..(355): n is a, c, g, or t
  misc_feature (755)..(755): n is a, c, g, or t
ctaatgtatttattgagggaacaagtgtgcttcatggaataagggaaacgaccggaggagaggaaacaaggatggggaggcttcaaagtttcaaggtttgcacccatttcaaggtattggggggtgaggggtggtccttcccatctctgctcctagtgcctggcacccagcatgcagtaaagccaatgctgtgaagtgcatggacagaacttgagaaaacagaatgagggtccaacaaatatctctccaggggagagagacagagacaggaaataggaagacaggaatggtctaatacagagaaaccnnnnnnnnnnnnnnnnnnnnnnnnnnnnnnnnnnnnnnnnnnnnnnnncacatgagtaattactttctgcatcctgtttaggagagatacacttaaatcctaagactaggggaagttagagagcaggcctgcactgtgcatcaggggacaagctgtgctacaacctgcatcaatgtcaaggcaatatctgtcctggaagaaaaggtcaccttgtgtacctgggaatcccaaagctcactgtggactgaatggccagagcaggaggggaggagggaaagaggtctcatgccacacaggtgtccagactgcactctctgccccaggaagtaccaccttttcctcccaccatctcataaggccacctctgccctatccccatagggtccagcaagctttggggaagactctacagaagacataggggagcaaactaatagcatgaaagatnctggagtagtcagagctacagaacta

SEQ ID NO: 141850 - DNA, 339 bp, Homo Sapiens
tttttggaaaaggaaggtccaagaaatagtttattccaaacaagaaatgccaacttgaacagaaccaggaaatctggtgttcctagggcgacttccagctcctgcccctaattcgtgaactcagcccaataaaaaaaaccatcatcatcttaagagcctccagggtcacagtagggagaggagcaggccccttatttcctgggggaggtggggagcaggacggttgttgatggggacatgaagtaaagaaaagtgtgcaaaacaagtcaactgacgaggagcacacaatccagaaatagtctcggttgaaaggaggaaaacactgactatttctttttt

SEQ ID NO: 141851 - DNA, 486 bp, Homo Sapiens
  misc_feature (450)..(450): n is a, c, g, or t
caccctatattacatctttgaaatcttttcatatgaatgggtagaattttaccccattcattttttaatgtggtaaaatatacataaaatttaccatcttaaccatttttaagtgtagagttcagtggcatgaagttcattcacattcttgtgcaactatcatcactatccaaatccagaacttttccatcatcccaaactttgaaatcattaaacataacagcctactttcccctcctcacagttcctgagaatcactgttctacttcttgtctctctgaatttgactattctaggtacacaaaggtggaatcatacagtgtttgtccttttgtgtctaggttattccacttatgatgtcttcgggcttcatccacattggagcatgagctagaattgtactcctttctaaggctgaataatattctgttgtatgtctctatctcattntgtttatccattcatccaatgatggacatttgggtt

SEQ ID NO: 141852 - DNA, 505 bp, Homo Sapiens
ttgggttcaaatgggctatgactgtgctacaggtggcagtgtgttgttcctaaaaaattctcatgtaaatctgttacttggcacctggtacttcatttttctccagaaagaagtctctatgtgttagtaatataaattgtttaggactctccagaaagtttaatgaatcaaaatttaagtacaattctttattactgaacctgatcattatgtgtgacagcaaattgaaccgaaatttgcttcaaattcatgttccatttgaaggcacacatcgttcttgcccattttgatttcctaattctcaagtccctccaccatgtgactcatgctcttcatgagtcacaggtatctttgcttcccctcaaatagagatcaagtgactaaacctgaggcaggggctccatccaatgtgatgatggctttgggtttgggcaccagctctgaagggtgagggacagatacagggtctcttagctcttttctttctgctaagggctattctgct

SEQ ID NO: 141853 - DNA, 520 bp, Homo Sapiens
  misc_feature (18)..(18): n is a, c, g, or t
  misc_feature (407)..(407): n is a, c, g, or t
  misc_feature (418)..(418): n is a, c, g, or t
ttcagagaacaactttantttattttttcttgagatggaggctaggaacaaatcaacaaaaaacaacaccacaattgattatttacaaagcgccaggctccacgcctgagatttactcctgggaccctccctgctactctggggggtcgggattcttatcagtcctactcgcagatgggaaaaaagctcctagagagcaaataccaagtcatgaagcctgtgggtggcatgatatgggaccagaatccaaatctgtccccagaccctggcggtgccaccatctgtcccgagggacagccaggaggatgatgcagagaggatggtgaaactccctcctttttcagacccattgtttatctcgggccctgcgactcgcggcggaggcgcacagcaggcgctcaaacggnatcgtgggttncagggccccgcgccagcgttcccggggccttctggagagaggcagggtcccgccgccccggttcccgcaggaatcagctggagaaaggcgggcggcttgggg

SEQ ID NO: 141854 - DNA, 499 bp, Homo Sapiens
  misc_feature (60)..(95): n is a, c, g, or t
tgggcgtcctctgctcgccacgcacagccgcctgcggggcactgaagggttgagccgcgnnnnnnnnnnnnnnnnnnnnnnnnnnnnnnnnnnnnggaggcccaccccgctaggggccctgggacaggctcaagtctgaatcccacgcaggatggtgtgactgccactcagagaggttaagtgacgcgcccgaggccacacagccaggacctgggtcggcctgacaccagcccaagctatttcttcatgccaggagtggggcccgaacccctgggcttctggaagatcccgtggtggacactcccagatgcaaattctagtactcaaattctcctctcaaggtgccaagggcagggaaggcagggaggcaggcccgaggtccagcaggaggggtggcccaggagagtagcaggccctgctccgtctggtgggcgccattcacccacgctggccggcagccccccaagggtgcccaggcatttctgcacatggtggtggt

SEQ ID NO: 141855 - DNA, 438 bp, Homo Sapiens
  misc_feature (120)..(120): n is a, c, g, or t
tgggcgtccactgctcgccacgcacagccgcctgggggcactgaagggttgagccgcgccccagcgccgccctccctccctccctccctccccggagcccaccccgctagtccctgggancagtctcaagtctgaatcccacgcaggatggtgtgactgccactcagagaggttaagtgacgcgcccgaggccacacagccaggacctgggtcggcctgacaccagccgtcgctatttcttcatgccaggagtggggcccgaacccctgggcttctggaagatcccgtggtggacactcccagatgcaaattctagtactcaaattctcctctcaaggtgccaaggcgagggaaggcagggaggcaggcccgaggtccagcaggaggggtggcccaggagagtagcaggccctgctccgtctggtgggcgccattcac

SEQ ID NO: 141856 - DNA, 398 bp, Homo Sapiens
tttttgatcattgtatatgtcaagtttttttaatgtccaaaaggagcattacaccaataaaacacaggaaaactcgcactgcaattacttaatccaacttgcacccgtactgagctttctcagagtggcattaggttctcgggggttaggcagtgccaggtgtgaggtatctttttccagtaactgtcacacacgctgctgctgagatggccatgatttggtcttagtggcccctgggggtcaggttgctgcttccaggatctgaggagtgtcttttctgccctcactgtgacgccttcttccctgcgcccagggtgctacctgcacctaaacccctcccctgtccatcgcaggggaatccctcctcataggtgtgtccctgcaaatcctgtcttccc

SEQ ID NO: 141857 - DNA, 637 bp, Homo Sapiens
  misc_feature (84)..(92): n is a, c, g, or t
  misc_feature (118)..(168): n is a, c, g, or t
ttttcttttttaaacctgagggcaaaaaggaatggataaagtagtgtaatggattgacaatcaggaagaacagaataactcagnnnnnnnnnctcctacaaggagatatggctggacnnnnnnnnnnnnnnnnnnnnnnnnnnnnnnnnnnnnnnnnnnnnnnnnnnnttattgtcaccttaaatgatttcaaggttgttagacccacacttctgtatcctagagagctgctggaggttgcaaatgctttctattaacaactgttgggaatttttgagaaaccatggagaatgtaaggtgacagaagactggaaatgagcaaacgtactgcagttttcaaatcattagctaatagctttagctatttttctaaaataaaacctcatgaaccaaacaaatgttagtactctgtatttgggggaaagatttaaatagctgtaaagaacaaaacagttatctgtttttaaacccattatttgaagaccctgaagacagtaagttgtttcaggactcaagttttatgctgataataactttatgttcattaaaccaggttggataggacctctgcttagcaactgtttttcagctgtgtttgaaaatttgtctgattcgcaagtaataaaattatataata

SEQ ID NO: 141858 - DNA, 155 bp, Homo Sapiens
  misc_feature (64)..(64): n is a, c, g, or t
acttttcatttttgcaatttcatgtcattttattttggtccagccatatctccttgtaggaganaaaaaaactgagttattctgttcttcctgattgtcaatccattacactactttatccattcctttttgccctcaggtttaaaaaagaaaaa

SEQ ID NO: 141859 - DNA, 662 bp, Homo Sapiens
aaaagaagtttctcgcataggaaatttgtggatcgcggggtccatttctttgatcgaaagataacttaaatttaactgtaactctacaggataagttgttgaagctggctaccgacgaaggattgaaaatcagttttgaaaatacagcatcacttccttcattttggataaaagctaaaaatgactatcgtgagcttgctgagattgctttaaaattgctgcttcttttcccctcaacatacctctgtgagaccggattctctactttaagtgttattaaaacaaaacatagaaacagtttaaatatacattatcccctgagggtagcattgtcatcaatccaacctagattagacaaattaacaagcaagaagcaagctcacttatcacattaaaagctttaaatattgatatgtaaggtattggttcaaagtatgcatataagcattgagtgtgaggaatttgctatttcactttaaactttctgtctagttacagttatggaagtatgagaagttatgagtgaaacagcaattttctatataaattgcctatatgtatattttcaattaagaatgtgtacagtttttataattctatttttcctcatgtttgtcgtatttatttaaatataattccaaatgcgctgattctaatattaa

SEQ ID NO: 141860 - DNA, 963 bp, Homo Sapiens
  misc_feature (158)..(159): n is a, c, g, or t
  misc_feature (188)..(188): n is a, c, g, or t
tatttattcaattacattggcaatggcgtatctccctgaggaagtatgtagagacactgccaggtctcatccagaagccacttacaattactcatgaacatggcttgtttaggttggttttggtggtggcctttaattatattaccctttctccaacnnccagctccccccacccttaaaatcccacnttcttatactcaggctcttggggaggagaagatgcaccaactttctactctttctcttcctttcccgcttacttcttctagaagctcaaagtactcttaggcctgctcttctggtttggtagtaggtttttcctcctaggggttgattcacacacaagccctggcaaccaatctagggtccagcccctagtagatcagtgttgtctctcataaagccagtctgcaaatatcaccttgaatcctacagtctgtagaagcctccagtctactgctttctagctccaggttttttaaggtctttggaccttggcaaccagactgctgtatctcggaagcgggttccacccaggctgaaaatctccgtgatcacgggtgtgccagcccctcctgcctcttcctctggggccaatttggaggcagaatcatccttgttctcctccttgtcctcctctgggtcaggtggctcttgcttcacagaaggcaggcctgggtctactgccttgctagggcagccaggcaccaatacgggagaagtcaggacagctgtgcctggtgtccactcgtcctgggtatccgccttctcttgcttcacctgcaacagggcttctgtggaagctgcaacagggcccggcacctgcacaggactgcttgcgccttcccgtaaaaacacaaggtcagtgccaggcgggggcagcacaaagccaccacctgcttcctgcttcgttggagcctgggtatccttgtgccgaattcgccacccaggcctcgctacctt

SEQ ID NO: 141861 - DNA, 1544 bp, Homo Sapiens
  misc_feature (1404)..(1464): n is a, c, g, or t
gtctgctcccagatgcgggcctgggtctctcccgcatcagggcttcttgtggaagctgctacagggcccggcacctgcacagtgcttgtttgcggccttcccgtgttacacaatgtcagtccagccgggggcaggctcataagccgccaccgtgctttcctgcttcgttgagtccttgggtatggtctcgcttggggtctgtgcgtgtatccaaggtgggcttcaagttatggccaagatggtgccgtcgggcagagctgggcctctttcgacgacggtaagtctggggcgatcctgccccatccctcagactctgaccagacactgggcagcagccgctttagctcgtcctcgtctacacagtaatagatgaactcggcaggtggcgagggggccagggctctggggtgcggctctgtgggctctggggactgtgatgggggtggtggaggcagtggctgggctccggggcgccgcctggcagccatcttggagtcacagcctcccttgcggcgggcatgtttaccccgtaggcaacgtcgctggacacatttccactggcgcctgagaccagggcggggagggcgaaggcagatggggcaatggccacaatcctcttgggtctgacagccccggcatactccacaccctcggctcctttccacaatccggaggcagcgtctccgttcacacttgcagaacagccccgatgccacatcatggggcagctgcaggaggcaggtggagcaggccccacagtcttctgttacctggcaggctgcacactccccacagcccacacgcttaaacattctctgttcccggttgaaggcaattctctgtgctcgacagtctttgcacaacgttttgagccgctgcctttgggtgccatcccctgagaagctgattccacagttctcacagcacccaggagcagggaatgaagctggggctgtgtcagtgtcagccttggtctcatccctcggggcctccttcctgacctcaccactctggggtccaacctgacgtttccgagtcttggctggccttgaaggcttctttcgcttcttgctggcaaccgccacgggatgggccttgggggctggatagcacaagatgccttgtttgaagtcgaagagggtgagatcacacgcagggcccaggtatcgagtcagctcaactttgcttcggatcctgtctcctgtggggctctggtaataggtgtctgagcgtccacaggtggcccctgacttgcgaaagacttcgcggcgcttccagccagggcccagggccgggcagtccagccagtcctcagccatggaggccacaggaagcagcagtagccagtttggcaccaggccggtatcttccgccactctaggcccgtggacccatggcgagggnnnnnnnnnnnnnnnnnnnnnnnnnnnnnnnnnnnnnnnnnnnnnnnnnnnnnnnnnnnnntgaagcggtagctgtcgcctccgcggctgttcgttgctcccctcgtgccgaattcggcgcgccgtcgacttcatactcta

SEQ ID NO: 141862 - DNA, 673 bp, Homo Sapiens
attgtgtgctgagggttttcaactgcatctctaaagggaaggccaaagaaagagcaacaggaatggatgtggcagtctgttaaagaaatacttcattgtcactgaacacagagtcattaaagacaccttggaaatttggacccttttactagaatcagggcttaaatagcaacttaatttatgacacttctcgaggctgatggcgtttttgctctaagacctgccttgcaagaaatgttaaaagaagtgctttagagagcagggaaattctataggtcagacacttggatctacataaaaaaaggaagaaaccaaaggagaaataagtgaaggcatggaaaccttgttccacacattgcctggtgccctgtccagcgctgcaaggtgcactgcgtctcctctgcccagcaagccacaagcccctccagggtgagagggagagcccttcccttcccttggtcctcccttcgacacagggagctggagctggacagccccataggcactcagggcttgaagaagatatctagaaatgtcaaagcagaagagcctcggagataatctgaactatttctgagtttatataagggaaaactgagactggagagaactaacatgtctaatattacaatggaaacttgtaataaaacccccaattgagtccagtctcctg

SEQ ID NO: 141863 - DNA, 590 bp, Homo Sapiens
  misc_feature (22)..(22): n is a, c, g, or t
  misc_feature (71)..(71): n is a, c, g, or t
tgtagtttataatattcttacntaggctgtgttggtcagcttagaatatctaagtgataggataaaactanagctgagtggcaaactgccagtctatatactgcatttagtctataggcttgttttgtttggcccacaaagcattttattatttaagtttatgccaacatttaagaatcaagaatttcccagacattcagatttctgacttcaattgaaaatctgacagtataaaccctattatattcctgcatggcataaaatcttcagttgctgaatggtgatatccacttttagaaagagtactctaccctgttctgcattcatacaacctaagccaacccgcccttcaccatcccacttctctttcaggttatctgcttaggctggtaggcatttgtgtttataaaccttgaactcaagctgctagatggtcagttgcattgtgaactgaactatctgaatgatttttcattgtaaatatatagctatagaaacactttaaattcctctttctataaaaagtgaagtagcaaaatttttggaccattcccaaggacaaccaataaaatagaagaaaaatccagcaa

SEQ ID NO: 141864 - DNA, 416 bp, Homo Sapiens
gcctttggctcgctccgcctttctgccccccacccccacctcacgggtacgggccattcccggccaggaaacgccgtggcgccgcgttgggcctaactcgagtcctgccgcctcccgggagtgccgtgcgccgcagcccgggcccaggccccggcagcgcctgggacaaggtcttcagaactactagcagataatttggggggacttcatattcagaagtctatataaaggattcctcatgtccataacatgttggatgaggctctgcagctcacccccactctcagagtggtcagtctccattaattggaccccgtgatttccaatctctgctgtgttggacgtcatgagcattgcaatccctctgtgagtcaccacatcagatacatcctactcagatatggctgctggatcag

SEQ ID NO: 141865 - DNA, 653 bp, Homo Sapiens
  misc_feature (44)..(53): n is a, c, g, or t
  misc_feature (642)..(642): n is a, c, g, or t
gaaatgtgcattctggaattttaatttccacgaaggaagacagnnnnnnnnnnccaaaacttaacacaagaattttatttcctagggagccacggtcccagtggggcacagtacctgtgacacgcctgtttgggctggcggctgccccatgcccacactcatcgccccgctggatgacgggaactggttctgtggcagaaactggctctgagcgggcgcctgggccatcatgttgttggtgtgtgcacccatcatgttcggaggctgaggcattcgggaaggagaaatggccatccctggcactgagcccatgctgttcatctggacagagtggttcattggggaggctgcacgaggtcccatgggtgcttgtggcaactggacgttccccaaggacatggggttaaatgaattcatccttggaggtctcacaggttgtgcctgtggaatcacagggggctgagcccccggggctggtaaggctggctggttccccaagatgccttgtttatgtaaacgcgacctccgtttttccttctagttctttttgtatcttgtagattttctctgctaataagtgataatattcatcccctgctgttgggagactcgtacatgtccccttccactttcttagcatangctaccagttt

SEQ ID NO: 141866 - DNA, 936 bp, Homo Sapiens
tttttcaaattattagagttggttttaatcattcagtggatatttcagccttttatcattacacagcattttacggtccatcactccttactccagtctgaggaagaacgtcagatcccaggctgtgggtgaggtgacatccccgaggctaacgggaacgggctgcagacaccaggttagtgcccagaattttggtattgggacctccctcccacaagcattgccttctcctcctgttcttaggccttggctatggaaacccagcaatgcagtagcatcaggaataaggataattaagaatatagaattggaacatgattccatactcttcatcagtcttctcgggaggattctgaccaaatgacctaaagataaggatgagcccatccatgttgtaaagtaaaataccattgggattcacagtttattgaaatttaataaaaattatttccaaagaatgagaatcctggggtagcgaggcaattaattaagcaattcatcttaaaagatggaatacttggaacaccttagccatcattcaatgccaaaatgtttgggtttttttcatatcacatccgtcctatcttttcatcttcagtgaatcattcctcatgtttgtaattaaagccatatttaccatcataatctgcagtcacccgagctcattttgctctgaagccagtgatattaagctgttctatttctaacgtgtcccttaacttgattctagtaaaagcagcaagcagtggtatttaatatacaaactcatcaaattccacataaaacatttaaccacagttttaaaaactcaagtgtcctttacactagctaccttggaagtagtactgcacttttctcaccatgttgtcattgtgttatgcattcttggaatttcccttttgtaattaccttaagatccattcataaaccacagaa

SEQ ID NO: 141867 - DNA, 353 bp, Homo Sapiens
gagaccgagtcagccttctggacttcccacctgctgggtaaaactcaagtaacatgtgagagccgcgctcctcaggccccaccccctgtgggtgattgatttctaagtaggggaagcccgccctcctcaggtcccaccccttgtagatgattgatttctaaagtaacaagtgagagccaagctcctcaggccccaccccttctggatgattgatttctaagcaggggaagcccgctctcctcaggccccaccccttgtagatgattgatttctaaagtaacaagtgagagttgcgctcctcaggccccaccccttgtagatgatggatttctaagcaggggaagcgcggccgc

SEQ ID NO: 141868 - DNA, 950 bp, Homo Sapiens
  misc_feature (393)..(446): n is a, c, g, or t
  misc_feature (850)..(882): n is a, c, g, or t
gggagggcaagtaacgcagtctttatttacaccacaagataacacgttgcgtgatgtggtacagaatactggactccagtgaagtggaaagaaggtgaccgtcagaagaggatatcattggtcggtgaaaatccacccacacaaaacaagacaagaatgagaaaaccaaacacaaaacctccaactccactgagcaaaagaaagaaccatcgggcacgtccagacaatccaagagaaacggattaaattacagaggtgaatggtggccacggccagtgcgcagctcacggcgggcgcgaacaggcatcaggtaggttacagtgtcgttacaacttggttttctaccacattccgtaagaagctcttgggtgagtaaggttcaagccccctgtnnnnnnnnnnnnnnnnnnnnnnnnnnnnnnnnnnnnnnnnnnnnnnnnnnnnnntatatatgtttgtcattctcatcaattggaaaatagcgcctccactatggagcacacacggcaaaaaaccaaacaaaaactgttcgctttctttttctttcaatagcagacttttaatcaatgccagagacaaagtgaggccgagctaagaacacgctcagcttcgttacaatgaagaaatggtttcctttcgatgcaaagtataattgtaaaccacagtgctcgcacagttcacgactgcttaaagtgaaatcttagccatacatcacctaaaagtaattaaaaagtcaacacagctgtgcggaaaaggggactctttcgagtccgcccagttctcaatcagaataaaccgtcacaaggccagtgagggcgggcggcgctcgcctggcccgtggaaggagatnnnnnnnnnnnnnnnnnnnnnnnnnnnnnnnnnttcctccaaatcaactcgagagagacaggcagttcactgtgaattctgagtagtttccctaaaacact

SEQ ID NO: 141869 - DNA, 330 bp, Homo Sapiens
tttgagaattcaatccatttatttacacgtacattgtacataagtttacaaattctcacttctgccactcagctagaacttttcggggaaagcctccatctcttccttgatcctgttttctacaagtaatgcgaagttactgtctgtgttctgaaggttatagctgacaaacacctgtttgttggtcttcctggcagagttgattttgctcctgctgccaccaaacatcctacttccaccagagcgcacatgtaagccgtcagtatggccctgctcctcaaagagaatgaccaatacgtggtaagctggtgatgttgggctcctatgcag

SEQ ID NO: 141870 - DNA, 741 bp, Homo Sapiens
tttttcatatttatatatcactttaattctaattgaggatgcacgttacagtcatgtctgattgaaactcttagattacagtcttcaatcccaacaaaaatcccatttcatccctctatcactcacagccaaatgaggaagtatatactgcccactttgcctctccttcaccaggtgggtcagtatgagccttttggcccacacactgctgagaaggaagctcaaaagattaaccccttaaaaacaaaacgggagcgcggcctgatgacaaactgaaattcaatccatttatttacacgtacattgtacataagtttacaaattctcacttctgccactcagctagaacttttcggggaaagcctccatctcttccttgatcctgttttctacaagtaatgcgaagttactgtctgtgttctgaaggttatagctgacaaacacctgtttgttggtcttcctggctaggcgctgggcaaggccagtagaggtcgtgtcggaagtgtctccaaggagggaggtagacacggggatggagtcgtagcggctgcacatggccacggcgaggttgcgcaggtgcggcgtggcccccacccacaggaacagcgagtccgtcagccgcatgacgtggaagtggaccagctgctcccacagcctcgcgctgaagttgtgcagggagacgtccccgccggcggcgacaaccagcccctccatgccgccccacggctcccggcccacccc

SEQ ID NO: 141871 - DNA, 474 bp, Homo Sapiens
tttgaagacattggaaatttttattcatctttgctttacaacagaaccaaaagcgtcaacttaagaattcattttacctgctggtttccacaagctagttatgtgaaccatgttttacaaacaataataatattacaacaataattatggagaagttaattggataatagagcttttccacaattcaagtagaaacacagaagaaactggataattttaagtcctctaactcaagacatgctggtgcaagcctggcctgcgaggccccattgcctgcgtctcccgggggccttaggaaagactgacagttcgcgtgcctctggggaaatatctacgctacagaaaatctttaggtgttcagtagttctctagagaattttaagtggtatcacaacagcccatccggagaacttatttctaaataatttgaaaaacaaacaagaaaccattagggttttcatgcagagcagcctc

SEQ ID NO: 141872 - DNA, 718 bp, Homo Sapiens
ttgtccaggcgggcgaaggggttcctccgagcagccggaggccccggtcccgtttttagattctaatcaagaaaatgatttgctatgggaagagaagtttcctgaaagaacaactgttactgaattacctcagacttcacatgtatcattctccgagcctgatattccgtcctcaaaaagtactgagttacctgtggactggagtattaaaacgcgactccttttcacctcttctcaaccctttacctgggcagatcatttgaaagcacaggaagaagctcaaggtcttgtccagcattgtagggcaacagaagttactttgcctaaaagtatacaggatcccaaactctcctctgagctccgttgtaccttccagcagagccttatctattggctccaccctgctttgtcttggctaccactgttccctcgtattggagctgatagaaaaatggctggaaagacaagtccttggtcaaatgatgcaaccctgcagcatgttttaatgagtgactggtctgtgagctttacttctctatataatttgctgaagacaaaactttgcccctatttctacgtttgtacctatcagtttactgtcctgttccgagcagcaggattagctggaagtgacttaatcacagctctcatatctccaacaactcgaggtttaagagaagctatgagaaatgaaggtattgaattttctctgccttta

SEQ ID NO: 141873 - DNA, 736 bp, Homo Sapiens
  misc_feature (238)..(264): n is a, c, g, or t
  misc_feature (538)..(538): n is a, c, g, or t
  misc_feature (544)..(544): n is a, c, g, or t
  misc_feature (605)..(605): n is a, c, g, or t
cgtcttcaaattcatttatttttatttttaaaaaatcaatttttgagtaatactctagaggcagtggctctgccaagcagggaagtcaaatgcatcgctttttttcctgtacactgttggcaagcacagataatccacaactccaacgccatctattctcaatgcgtagggtctgtgttatatttctcctcttccagaaagttaaagctcggtgaaacttaaagcagtgatcccaggnnnnnnnnnnnnnnnnnnnnnnnnnnncttccatctgcctggtcatctgcatgatcccagctttctgaacaggatttgtgacactgtttcacggtcctaagaactctcaggaaaaaatcctctatgttttcatgacaggttttctaggtgggtgaattaaagtctctggagttaagcaaaaacggtccactgtcatagcgtaatttttttaggaaacatggcatggtggctgagaccatgggtttttaggctggattgtttgagttcagatcgcagtgccttcacttatgagttcctttancctttntgcaccttgacttcctcagctgtgaaatgggaaggtggggggttgggggataatgacaggnctgtcatgagaatcagatgagacagtgaataaaaggtgcttccagagtacctgccacagagtaaacacttcatatacacatagctgttatgatttccggaaggaggcttgcacacatgagctcattttctg

SEQ ID NO: 141874 - DNA, 238 bp, Homo Sapiens
tttgatttttaaggtttaatgtcctgggggacttaccagtaatacttctatttaaaacacagtataaaccaattattcctgccttcagtatttgaaacagtagaaattatttcaaccaacagatctgcccacaccagttttcatgacatataacactgaaatttacagacatccctgagaagtttttaagtaaaccagtgaatctcaacagagtctcagttaacagtgtagatccatt

SEQ ID NO: 141875 - DNA, 478 bp, Homo Sapiens
aaaaatcacaactgggttttattgctgttggcatagatttaggctgtaattaagtggaaatttacctctgatatattcatcaataagctgtacattaacttccacatgcttggcagttggatcaaaggcacaaatattgttgactaaatatttgttaacataaaatttacacttatcccaacttccaaagtcacttgaaaattccaactctggatgaaagaacaagataaccgccttcaggatgtcacgcactagtttcacgttggcttccaactccatagatttgctgtcttgaggagaatttggctctgttacaagagtatggtcatagagcaacagtgacacaaattccatggaattgagtagttggatgctttcctgtagctcgagcagcatgattcggaagaagagaattcctgcccgctggacttccctgacattttcaatctctgaagatgcatgacttcctgtggatgga

SEQ ID NO: 141876 - DNA, 588 bp, Homo Sapiens
ctgaagggtcctatatatagcatataataagtgttcagcaaacatttattcaactgaatactctacgagctgaccttacatggtctgaggtggagctctgggtcaaagccattctcctaccctgctcaggagatcactttttgctccacctgggcagtggtcatctttatcaatacacaaagaagtccactgataaagagggacttcttcaactctttctcaaccttttccttctaagaccaaggcttgaataggatgggctccctggagtctaagtaataagtatttcaaatatctttactgtaacaaatcttagtatctaccagaagctattctgaagatgaggaaacaaaagtactggcaattcctgacctgaatgccaggttaactcaagggaccaatcgactcccagtacaatagaaactgcaaagccataattttaactcttattatgatacagaaaggaaaacaaaagaatggtttatttaaagactaaaactgcctattttatgaagtcactgtttacattgttggaaactcaattttgcagtcctctaaaacaagttttttctccagaccacttaaggt

SEQ ID NO: 141877 - DNA, 531 bp, Homo Sapiens
caactcctggattcattgatcttttgaatatagttttgtctctttttccttcagttcacctctgatcttggctatttcttgtattctgctagctttggggttcgtttgctgtaggttctctagttctttttttgtgatattaggttgctaacttgaggtctttctagatttttgatgtgggcatttaatgttataaaatttcctcttaacactgccttaagtgcatcccagagattctggtatggtgtctctttgatctcattagcttcaaagaacttcttgatttgtgccttaatttcattttttactcaagagccattcaggagaaggttgttgaattactatatataatagttgtgtggttttgagttaatttcttaatcttgatttctaatttcattgtgccacgatctgaaagacactttgttatgattttagttcttttgcatctgctaaggagtgttccacttccaattatgtgatcaattttagagtaagtgccttgtggcaatgagaagaatgtatattctg

SEQ ID NO: 141878 - DNA, 674 bp, Homo Sapiens
tttgcgaggaacagcgagtttattgcaggttccaaccgggaacctggcacccacggctggttgggaagggacgccctccgcgcagaggctgagagttccgcgcaggcgcaatgcttccgtcccctctggtctcgccctctcggggcctggtcgcagggaatcgcggatgctcatgcccctccagctcccgggatcgcggggaacgtggattccgaacaagggcaactgcggactcccccgtgggaagaaagggagggaagcggaagggaaaaagcgcatgtgcagcagcacgcggcagcttcgcatattccttcgaagcgcgccttttgcgcgtgcgccgccctggcccagtgcccttggctgcaggaatggctggaaccacccggtttttagccggagtccccggcgcgcagccagcagttgcgcgctacctggcccgcggagggcctggcggacgggctgaactgcagcagcttcgggatcagggccttgcagcgctcggacagctcgaggccttcgggatagagcaccgccggtttctggcgcccgggcaggcccgggatgtccgagtcgtcaaaaggcatgcacccggtgacccatgagtaaagcacgacgcccatgcttcacacatcgtacttttttggggtcgtagggatgcccaagagcacccctgg

SEQ ID NO: 141879 - DNA, 346 bp, Homo Sapiens
tttgtgatgagtgcatttgcattttatttttccatgaaaatcacacacaacgcagacacacagacaaacatgcagaaaagcagatctgcttgaaatgagagcaatatggaggccaaagctgctagtgggatggcccggggtttctagttctggggtctggagaaggattttgtatttgtttggtttcaccatcaggtgttccaggtgagcaagtcagtttcggtttccttctgaaagacctctttctgaattcgctgcatgctcctcgtgtgtttgttttctgctgcagtggggtcatttacgctggccagtccatttggatgaccatatgggcacaggctcctgc

SEQ ID NO: 141880 - DNA, 538 bp, Homo Sapiens
tttgttatttattattgtgtagcttaacataataaaggtttatttccccctcacataaagtccaatgtgggtcagatgattttccagggcaactgtcttcttctagtccataacttgggggttcaggtgctctccatcctgtaatggggccatctcaacatgtggctttcagagttccacttgtttcattgcctttgacaagtcctttaaatctctctagacttaagtttctccatctttcatgttggaatggtgatttgtgcttccatcagaagatcaaacaaccttctagaggctgctttgggcttagagtcatgtgacatggtttgagttatcactctgacatcttctagctatgagaccttgagcaagttgtaatctccccacaccttaaggtatctctggagaagaccttcaacattggagaaccagctggtgccttcttctaaaagaaaggcaaaggtcttggacttcgtagttccttgcaaatcccagtctaagccattcagtagcaggaaatatgtgtaccctggagagg

SEQ ID NO: 141881 - DNA, 353 bp, Homo Sapiens
  misc_feature (266)..(281): n is a, c, g, or t
ccgatttaaattgggggcccttttattttttaacaaggtttttaaaaaaaggctgttccagtggttttaactcctttttttgatcgggaataaaaaacttttaaaattaaaacccccaaccatcaagctgtaatccctccttgccctgaaacattactcccaagggggtgtggtttttaaataaccagagggggggcaatgcaaaataaaaaccaaattggttaaaacagaaaagttggctttaagggctataaaaagaagggggnnnnnnnnnnnnnnnnaaacacatcgggttctggcagcaggttatattatgcatttaaagcaataggggccctgaaagtaatggtggc

SEQ ID NO: 141882 - DNA, 537 bp, Homo Sapiens
gtgacttggctttttaaatctgtaaaatggaggtgtttattatctcacaggctgttggggttaaataaatctgctaaaggacccaacactcattgagtccctggcagagttagtgcttaaagttctcttttacagagcaaatataccacactgagtaaggcatggtgagttttagtcagtgcagtatactgagtggtgggttcaagcatgccaggagaatgtggttgccctcacggtgtattaaccagacctcatttgctagacataggtctttttctttaaactttggatgcagagttgaattaattacatcccattggtgcccaggttccctattatccaacaatgaggactccttggttttaattttgctccttcaatcctgttttctaccattctccccacagaaggacccaatctgttgtgtttgacacacctttaaatctatagcctgagaaaatggtgtagtgctttgcatgtggtatgtttttaatttatgcttaaccaaatgtacatgatactgtgttatagttaaaa

SEQ ID NO: 141883 - DNA, 449 bp, Homo Sapiens
cgaaagatctgtaattgtaatttattttaggtcagtggttcggtggaggcataggggtcaagggtccagcactcccagtatttcttggagggtgttcagcagtttccagaccggctgactccaactcttatctgcagggaagcgtgttactctcgagggaggggcgtggggaaggcggcgggaggaggagcgcacgggccggctgccgtgcccaccacggctgaggaacatggttttcgagtcggtggtcgtggacgtgttgaaccggttcttgggggactatgtggtggacttggacacgtcccagctctctctgggcatctggaaaggtaaggagggccgccgccgccgctccccggcctctcgtgcttcccggccgtctcgctgcccgagcggcgtcctgcgttctcggggcttcgagcaccttgctcgcagggtgcagccacctg

SEQ ID NO: 141884 - DNA, 812 bp, Homo Sapiens
tttaatagaaatccatcattattcatttaacgtgtaaagagaaaacgctcaatgtacactttttcggtcctgcagatgattaattacagttctctaaacctcacatttagcatctctgtgacctcaggcctttgggattacttctaagtaagaccaaacaggtcgaaagatctgtaattgtaatttattttaggtcagtggttcggtggaggcataggggtcaagggtccagcactcccagtatttcttggagggtgttcagcagtttccagaccggctgactctaactcttatctgcagggaagcgtgttactctttggaatgaaagacagctccgtataaatgacttgaccaaaaatgggtgctcatctcagatgcagggcagggactatgtaactccatcctcgactcgcagcaggaagttaactcctcctgagagccaggcggtcggaggaccaggcggggaggttacaggcaccaagacacccaggctggctggaccctcccaccctgtaatgatgaggggagatgctccctgggacagcccccttgaagcttctggcgacggggctgggatccgcccacccttactcaggggcgagccctgtcatacgcgtggaagcggccaccaccttctagggggaggggcgttcccgtcgggcgtaaccgccccgccctggggggccgctggggacgctgatctgcaggagggggcggggtcggaaaaaatccggtagctccagaccggtgtcccgttgccaggcgatggggaggaggcggggccgacaggaaagaggagccgggctcggcgc

SEQ ID NO: 141885 - DNA, 573 bp, Homo Sapiens
ttttaactttgccatcatcctttatttaaggtacatggtagaataacagcacattgcatattgagcgagcataaaggaaagtaatgatggatacttaataaagcatgtttttgtaggagaggaaaaaggatgtaattccctctgcacagagcaaaggatgtgtacctatatttcggagtaagaatctaagaaaaggggaatatgccaacactatgaaatataaggttagcaccagcaatatgtgagtttgccagtatgtctgtttcatgtaaatttagggcaataaaagtgaatatatgtggcttttaaactgccaagtcccttctttgtatgcacatgtgtatgatgataaaaaggccacttaaaactcagatgttttttaaaggtagcaaggtgaatgctcaaaattagaaatgctactggacatgtgactttaaatatgaattactcaattatagtaaagaaaagactttctgcaggaagtccttattacaaaggctccaaatcttggcttcctgtttattttccctaaagaccaaagggaattttcaaacatgtaatgtcaataacctg

SEQ ID NO: 141886 - DNA, 466 bp, Homo Sapiens
tctgaagcatggagtattaattttatttaacaaacacatatagagccctcactatgtgccagatattattctaaacactttacaactacggattcatttcattatcattaaaatcctgtaagcgatgagcaccatgatgatccccagtttgcaaataagcacactgctcagagaagtgaagggtcacacggctggtgagtggtggagccaggatttgaatgcaaggaatctgtcaatgtctctgctgtttgtgctgttagagaaaagctccacctgcacagggagaagcctgatgacagggcctggtggtctctgtatccctgggcctggaccttagcagacctcagttagtagtcactgagatgaaatggaatggaagatgagtagtagagtgcctgtcaggcgttgtgatgatgacagggcctgtggacccactgtgtccttgtgcccactgcaggggacccga

SEQ ID NO: 141887 - DNA, 618 bp, Homo Sapiens
ttttttagcattctagaattttactttagataaaatcatacaattccatgtattatttttgcctttgattgctctcccagcaccctctttcccattacaatcccaagaggcaagcagtgagaagaggcatccagtgagataaaacaggggaacatgatggctcagcaatgcactcatacagaaccatttccctgctgctctgcgcttacagaattttatttgcgtagaagaactgcaggatctctggatgatagtggctcagctgctggtagagcttagtgttcctttgatcttcttcactctggaagctgtattcctcctttagtttcagatatggagaacaggcttgaaatgttgttttgcaagccttggcaacctggggatttctgtcctgtaaatggatcaggagggaatctcgtgtctgcttaacctgactggtgaaaaattttttccatttcctcccggcaaaggcagccaattgcccaaacaaaacaaaggccgagtatctcagactgtcgttctcatcatctaataaagtcctggtctgaagggcgatatctatgaagaaggaacccaaacctttcccctggatcttgcccagaacgacggtcagagtct

SEQ ID NO: 141888 - DNA, 580 bp, Homo Sapiens
ttttttgactatagttggtttgtggtttattttctttccgggggtaaacaataaagcaagactcatgaagagtttctgagaaagaaaatgatgtcattcaagccaggtcttggtagaaattagcctggaagtggggtgctgggtgttgaattagctgcgcattgtggcttaagccagtggggttttctgttcttgcaacataaagaagcctgcatgctgtgggcagtgttctttgaggcagatattaagacactgggctgtgagacaatcatgtttgagtcccaatttccatcatttcagagctgtgtgactttataataaagcttcgctacactattttgagcctgtttcttcacctgcaaagtcagggttaatcagaatgcccaccccctggtgcagctgccagatctggagttactgcaggccaagagcctagaagggcgcctggtacatacggaagcactcagtagacgctggcttgcatcaacatgaatcctggcatgctgccagctatcttttgcttttggcttccctgaatgcattcccaccatttctccctgtgttcctgccctcctcactg

SEQ ID NO: 141889 - DNA, 915 bp, Homo Sapiens
aggggtcccagggtagggtcccaagttttttggttttgggatcttgggggaatccacattggggatgggggttagagtgagccagcaagttcagcgagccccaaggccctgcttcaggagggtggtcaagggggccaaagcagctgagacatagttcccaccattgtcctgcagctctgcccagagcttcagccggtggcacgctgctggcaggcgactcagtggacggagacttgtcacccctaaactcactgcaggacatggtcaaaagcccggatcatgggtttgggagtcatcaacagcaggtggaacccgtcgtcagctctgctgtccagcaacatcatagacagccgtgcctcatgctgtacctggtggtaagtagaggcagtgacatcagcacagaggttgagatggcctgaggaatccaggaagacaacggagaaggcctggtggaagtcagccagggccggcaaagagggatctgagctgagacataaactgatcccgttgactgtcaggtctgtagtggccagaaactgcaagacacttctcaggacctggtagccactcatggtggtatggatcttgcgtgtagacacaaggaagacaaccagcatggagacaaggaacccagtaaacccaccctggcccttgtccagctcccgctgccgcagccagaccttcagaagtgccacgccatccttcaggccctgggctgaactcagaatggttgacagcagctgcaaatgggactcgagaactgtatcttgcaggacccatgtgttatagcggggggtaggaggctctgggctaccatcccctgcaggactctgccctcggtaccaggcagagcgcacattgttcttggttggcagcaagcggcacgggcggaagaagtcaggtggagggcacgga

SEQ ID NO: 141890 - DNA, 411 bp, Homo Sapiens
gccagcataccttagttatatattttgtctaaaataaactaaaattttgttttaggctgaaagcgaatgtgacaggtagagccgttactcccgggtcatgaatgtggccgtctgcgcttttccgtgttaactccacaggaagaaatcagaccttgcagcacggaggcggcggggacccgaaggccgagggcgcgcagccgccaagcgcagagccgcagaccagagcctcagcgcgcgcgtcggggaacgccgcaaacaaacgcatggcgggaaggggcgcggtagtgccatcgtctccccccctgagctatggagccggctgttggtttccttttgacacaaaagcagttgacgctgtcgccggcgccgcgcagccgcagtccgctgaaccctcggccgagttctgtggct

SEQ ID NO: 141891 - DNA, 1111 bp, Homo Sapiens
  misc_feature (182)..(193): n is a, c, g, or t
gggatcactgtctgaggtagcaagtgcagcctcacgacagataccaggcaatccagagccacaaaacgtgattcctccaggctctgcctggcctgaccctgtcctgtcagctgggtttacataccagtcccattcttccttttcaatacctacccccaaatcttctcctaaccaccatctgnnnnnnnnnnnnaaagcattttttgctttaaaagcatcctgaccccaatttctttgagctcacgggccttttgctgaaggtctctcagggtgtagtggtgtggctctctggacttaacgtcactctcagaggtcagaaccttggagatcagaactgattctcaccaggtgtgagaggtgtggtagcagattgcaatgctctgcacctcttccttgcaagtgagcaacttcaggctctctgggcagaggctggcccactgtagtttgcagacatgctctccagatggttttactaagtcccctctccctgatagggaatcctgctggaccagcgcatccctggtgtggagaggttaaaagacttgcacaggatcaccaagtcatgctgtagagccaggattcctagacccagggctctgcactctcaaggctggccccatgtgctcaaggtgatctaatgtttgggctccaaactaaccatctcggagctgggctcctcatttactgccaaaccctcaacttatgtaactagaaaaggccccggaagtgagaaagcctggatttttcaaattggatgcctccctactgaataaccttggccacctccggcgcaaatggtccttcctggagtctgttttccaaacctggaaacctgggtgatgcccatccctatcccccccgccttttatccacatttatcgcccagaaccccgcacatgacccacatcaccagtcaagctcatgcgaaatgagcaatacctggtccactcaccatccccagtccctcatgcacgaactgcgtcccgagcataaatacatacttcagcaataaacgatagtacgtgatacccacggacaaaaccgacacaactgcccccccgaaatatttatcgacaagtcgtaatcgacttgaacagataattcacagatc

SEQ ID NO: 141892 - DNA, 419 bp, Homo Sapiens
taagggctttagagtaagcagctttttcacctgtgggcctctggtgagaaattctgtaaattgtgataatcaggctggattttaatgctgcttttccagtacaatgttagagtttgggttcattaaaattaggcaaactcccattgggttagggcttctctcattccattttgtggctaaccttactgtgtttcagcccttgctgaaaattcttctgatatgtgttgcccttcctcacagccctttggccattgggagtttggctgtccctcagagccatccggtcaagcagatggtctgttctatctcacagaaaagtcttttcttccatgagttctgtctgaactgaacatgtaaaaagtatgggaaacagatgaatccctattaaacatgaagttttgattgtaaataaaataaaa

SEQ ID NO: 141893 - DNA, 368 bp, Homo Sapiens
tttaacatttctaatgtatttattttttgtggttcggctacagaagagaataagaaagggctgaaggggatgaatgaacaagagcaggagaaggactgccctgagggcaggagaaaagggtgtgaatcgggatagaagtcagaaccccaccagcttcttgcctgggaaccaattgctggagctgcttccttccttcgttcattcctgctttcttcactccttcattccctgaacatcagacatggtcataggccctgcttgatcttggaattccagcctccagaactatgagaaacaaattcctcttgttgaaaccatgcagcctcagctggtggaagcgttcggggtgagcatggctcctgtaatcc

SEQ ID NO: 141894 - DNA, 1199 bp, Homo Sapiens
tgagtgagcccgctagtttattcaatactaggaataagccggtataaaatacatttttagaaaattcacttggagataaaaaatcttgtccccactcctcccccaatcccacacatctgtgctcttctgcctgagttaattcagctttgctgagcctcctgcaagagcttgagcagggggtcgtcagccctgagggcgaaggtgagcgtgcgctgctggtagtgcctagggtcacactccaagttctcgatcacctcagccagcaggtgggcccgctccacgcctgagccgggggcctcgaagcccagggcggtgaagtgcacatgcaggtggtagtaggagggcaggtagtgcaggtatactcgcagatggtctcccttcatccggtagcgctgcaggatggcctcctgcccctggtggaggatgttcctgagcagcggcaagtgctccggagtaaggtcgcgtagggatctgatgccccggcgatggcagatggcgatcaagtacaagtcatcgagctgctgttggttccacttgaggtcagggatgaggacaaaaccatcagagggatctgggttctcgaaaacaatccggtccgcttcagccttcttgtcgagaatgttatacacccactggatgctgaggctctgggactccaggtggggtaaagtaatgttcctgtagtcatctcccgtctctcggatcagggggaggtcctggcgcaggtacttctgcaggtgtttctctgtggcagggtaaaccacggtcgtctttacatcattcagttgtcttggagggaacaagtgataggtgctgtagatatcattggagaactgcaattggagctcagggctgcccgtcaggagctgagccacctgttccacctgaaatggcgtcttctccaggatcacaacggcatcctctccatccccatccccagaggcctcattcaccttcccgtgtaggaaaatgattttgtcccgcgcagactccctcagcaccttctgcagtctgaagccggagaacggtaagcggacaggagcacaggtaccatttccaactcctgcctccttttcctctgtgctggcggcgtgggcctcctccacgtccaattcgcgcttcctcttgcctagttgagtagctgcgtccgccatgcctcgtgccgattaccaccccggcctcgtacctagcctacggtt

SEQ ID NO: 141895 - DNA, 529 bp, Homo Sapiens
  misc_feature (25)..(25): n is a, c, g, or t
aagccaggtctccaggctcctggcncagggcgtgtttaggaggcagggccttctctgacacaagtatgaggagcagagaggtttctcttcttcagtctccactaggtcctggcctccatggcttctataggcagggacctggccagggcattcaccagagactttgacagggagtccaggcccagaccccataggcagagccaggagccctgtgccagcttcccagggagcaccggggcccaacgtagagtcaagagctggcatcagcacaggtgcaaggtggggttgggaagggcatggcagcttgggggtctgcagtgcacaggtggcctggcatgaggtaggtgggccggcttgaaggtctagaagatggatagacaccagagacttgtagtctatgtctccttcttgctgtcccctggatgtcacctcccctctgcccccagtgctgaactaacccccttcatcttttacttgggactccatcagtgactcatcattgcttttggtgtgacttaccagcggccgc

SEQ ID NO: 141896 - DNA, 471 bp, Homo Sapiens
  misc_feature (69)..(78): n is a, c, g, or t
ttcaaagagaaattttaatgtattaatatatttatctttctaccaatagtcataaagtataattttaannnnnnnnnngcagaagaggcccatgaaagtcacaatgcatccatgccccatgcccagggccacccacatctcgggccacacctgatggaaggttggagtccttctctcagaatagctgggcccagtgtcacaaacactgccccgtgcagggtgctgggacctagagaacatgggtcctaaccaggaaccccagagtcactgcagaccaagttccaagagccctgagctcaccagaacagaggacagccttgggggataagtccctggaaagaagatgagagtgagctgggtcctgaaggatgggccattctaggtgagggaagcctcagtggacacagatgcatgagggagggggtctgcccagtcccggggagggggcggggcctggcctggcacgagaag

SEQ ID NO: 141897 - DNA, 544 bp, Homo Sapiens
ttttttacagactaactttatattttatttaacccaacataaccaaaatattatttcgacaagtcttcaacataaaaaattattcatgagctgccccgcctcacccctctgtcctctgagaaagtcaggaaaagcagaaacttaacagggaggcttcacctgcagagcccagctcatccagcgaagctatgctggcccagaaggagttacacaatgaaaagaagaaattctgaaacaaagtatctacactggcccagaggaacttcaaaagtgaaaggatgaaattctgaagcaaagtatctttaggagggagatgccactcagtgcagagaaaggcccggctactgctgtcaggacacggacccctgggcgctggagagcgtgctctggaaagcagtcactgcacacaaataagacatatgagatggaaaagcagctgcccaggactgtcggctgtcacccctgggtggggaaattatgggtggtgtctgttatcttttcaagtatatctttatgttaaaaaaccattaatttaataaaattg

SEQ ID NO: 141898 - DNA, 582 bp, Homo Sapiens
ttttgaaaaagtatttttgtaattaccatctgcatacacctgagagactgtttctaacatgttttggtcatttttaatcattctatctgcctttctttgttataaggatctatttttaattttattcactcctaacatagaggggaagtgcataccttcaatgacgcaaagtaactagttaatgttgtttcagaataatatgcaaaagggaagggaggaaacagcacaaagtatatcatatttttacacatcagacaccttcaggaagaaaggacatttctcatcttagtgtgacagactctggccaatatcccctttgaacatctgctttcgctggttggtaaaaaagtgtcattttaaatttagtgttactccttcaggctattccctctctcttcttacttgcagggccaaagcaacgtctctttccaccttggtcaccttccaacaacgatttcttcggacgcctttgttaatcattccgtccccactgaaccaccacttgactcctgcgcacccctaaaacctctgcccggctccgcggaatcgtcccagtactcctaacatggcggccgagtcccc

SEQ ID NO: 141899 - DNA, 420 bp, Homo Sapiens
tttcactttttaaacatttttattttgaaataattactgagtcataggaaattacccaaaaaatatacacggagtccatacgggttccatgaaggcagtcgcctttcacccagcattcttcaacggtcacatcttgtatcactctactgtggttcagcagcatttcaaattctggtcttctcccccaatctgtgtgctgccatttccttctcagagtcctcaaatagctgctttgtgtgttgtgtccatgttttattgctctattcaatgggagaggcagaatcgagtgtgtttcttcatgttacgtaacttttagaggctttgtagttagctttccagctctctcacgttcatttcgtgctttgactttgatcttcagagcttggggctcagtggaggttagcgaaatggggcatattg

SEQ ID NO: 141900 - DNA, 654 bp, Homo Sapiens
ttttttgccatctcagaagggctttatttctacttcatcacggtctcatacagacccagaggcatcatcatgtgtttccatttggtatccttgtgactttttgtagtgttttcccttaagaaaactttgagtaaactctgtacattgccagttaatcttttcacaataatttaaaaatggtgttgctgttggatcatcgatgcaagaagaccaacaataaaagtacagtacaaggaaattcacaacatattacagtggaacagactgagtcacatttaggtgatggcgaggacacagtagcggtatatacatgcacccgaagacgtgcaagccaagtaggataatataaggatcatacagtgaattttctaagcccactgaggactttgtaccttttcaaaatcatcctgtatcccctccagcatacagaatatctgtcttgtctactggcttcatggctttttcactacaaaaagttcactgaatcagacagtctgaagcattaaaaaattcgtaaaaaacagtaacactgacaaaataaaattaacttaatccactctaattcaacatggaaataaactgaaccaaaatgtaacagtgcaaatttaacagaggcagtcaggtattgacagcgagggtgttcagaatctctta

SEQ ID NO: 141901 - DNA, 455 bp, Homo Sapiens
ttttgaagctttaaaaacttctcatttaaacttggggtgcaaaaggcatgtgaagtgggagagttgctgcctggaccagcgaagggttagccagggaaggattcaacgaaatacaaaagccaacacagacctgaaggggaacaggcggccccagcaacaactgccaaactgtcattttgctccgcggctgaacagaaggctcgagtaatgacaaccacaaaactcatttaaagtctgaaaaggtgactaatgagctcattcatgctggctataaattattcactacaacactgatcccactcaagacaaacagtaaagtaaactttaaacacagacatcgctggccttccaaagtggaacaagttatgcctgtaaaagttttcacaatgagagagatacttgtctcccccttgtctattgtcacattcgttcttctgtttacttttttttactgc

SEQ ID NO: 141902 - DNA, 431 bp, Homo Sapiens
tttagaggataattgacgtgtcttgtaacgttctctgtccgcttacccaaccccacagaacccctcatgatgaccactttggcacttcgtaccagcagtggctgagctcagtggaggtgagagggcagggctctcaggaaagccacaccctcccgctccttgatcaaaacttagggtgccaggacctaactcttgatgacagccctattcccatggggtctcagctcacagccctgccccgatcctgccctgacttcaccctccctccccctagacgctgctgacaaaccaccccccaggccacgtcctggctgccttggagcacctggctgcagagcgggaggcagagattcggtccctgtgcagtggggatgggcttggcgacacagagatatccaggtgtggggcagggtattctcacagttggggaa

SEQ ID NO: 141903 - DNA, 535 bp, Homo Sapiens
gaaggaaaaacctttttgctcttcctgtctcatggtgtagctgtctccccacataggaagctggaacgtcataggggattctctgtcttcccattatggacagtctcaccccttgccaggaccccatcaccacaggaggataatgggcagttactgatataagaggctgagatttctaattttattcaaatcttagatcatatattgatgagttgtaatggggtaacatagttaacagtttagaaatctgttgactatgtgcttatcagagctggagccctaatatgtttagtcattgttttaaaaatgtttttgcattgattgctgtttttagtgaatgccaaatatattgtctttaattttattttcttaggaaaattaagcgttgtaaaaacaaaagtacatttaagtttactagttgttatcaaggctaaaggctttattttattgtctttggtaatagttgttgataccaaacaatgagtacttccactttgttgtttagtgatcatattaaagtattgaatttttaaaa

SEQ ID NO: 141904 - DNA, 341 bp, Homo Sapiens
tttctgtgaaggttttatggatagggtatggggcctcagtccttctttgtggccactttcttcatggcgggcagggcgttgcttagctcttctctcttcatcttggtgcggacgtgtcccccactctcttcttgatgaacctgagggccgtttgtccttggaaaccttgagcaactccatggcgcgccagctcgtagggagtaaagccatacatctttggaataatgtcccacatgaacttggtgtgcttggtcagttgcccactttggcggtggctgggccaggcttgctcccatttttggtaactctgtggccctcatcgaggcccacggccacagggt

SEQ ID NO: 141905 - DNA, 517 bp, Homo Sapiens
ttttttctgttgctcaggtgatgagttttgagaactttattgagctccccattaaaatgttggcattgggcatccagtcttgtgatttgcctcaaagtttctgctttgaagacactggattagacaagctattataacagaatttttaaaaatctagataacgtattctacagttaaataaaagcattttcagcatttattttattcagcatgtatttactgagctcttattagaaacttgctgatgtgctaagccctgagaatgaatatagggtgaacagatagaaaaggctattgcctctgaggcccataaagggccagctttttattcttggctgaaaacccaatacagaacccaaataaggccttggacttttgacctctacttggtctggcccagaactggaagataacttgcttttgatagactctttggaatgaaaccaaggggcctattgcctaacgctacctcattcgaacttgttgctctactttcaaattcataagcaagcactat

SEQ ID NO: 141906 - DNA, 482 bp, Homo Sapiens
tttttatttattaacaatgtttatcagtgaaggaaataagctgaaaatatgagtatcattagatccttggagggccttcattgctgaaaatctgagtaatattgtggtactcttttgagtcttgcagggcattctctttccagggcatgtaacagtgggtgaataatttcttttcattcatttccattaagggctgaacttccttaatgttctggagattattaaatttgatttgtatagttgtgaaaagtgctcatattgctgattccattgcttatatgtgatcatataaatcttttctcttctttctgtagtgtggtttaaacttaatccttaaagggcatgtatttgaatttttcagctggttagaaacctgaatataccaatcaaataaaactgctccttacatgctacagatttagttttcttcctgtactaagatgtcttttagatacagtaaattcgttaaagccaagagcccc

SEQ ID NO: 141907 - DNA, 514 bp, Homo Sapiens
ccttttcaagtatgattgtaatattaggaaatgcttgaaaataaggaaaataaactctcatcctgccttgcagcttactgagagaattatgggggaaaacacataaacacaaaggtcatctgtcttaaggcagcagaaaaagctgtcattttagatgtttaccttgaatctctatagccaagaaaggccaacaagagaaataattgtattccttaatatgaagctgagatgtgtttgtagtaatgaacattggtccttggagaagataagtgtgggtacagctcactattacaggttcttactcttgaccttatataatccaaaagcagaaggaacacttgctacatgttgtatttcgtgatttaaatattgtgctacagttggaagatcaaatgccaattggaatttgattactgttttattagtcctgagtaactcagactttaggaaaaagtaataccattacatcaaccagctcaataaacagcgccgccacccacttagacactcaaaa

SEQ ID NO: 141908 - DNA, 715 bp, Homo Sapiens
  misc_feature (99)..(99): n is a, c, g, or t
  misc_feature (155)..(155): n is a, c, g, or t
  misc_feature (200)..(200): n is a, c, g, or t
cgggatctgcactgtgtcctcccgccatgcatgaggcagactgagaacaaagtgcctgtgcccaggtgatacctggaaggggtcccacctttctccagngacatgaagcagggcctgctgtctgtgggcattggtggcctagagtcccggaatgnctgcctggacgtggagaaggactgttccatcaccaagttcctganccgcatcctggggctggaggtgcacaagcagaacgccctgttccagtacttctcagacaccttcgaccacctcatcgagatggacaagcgggagggcaaatacgacatgggcatcctggaccttgctcccggtatcgaggagatctacgaggagagccagcaggtgttcctggctcccgggcacccgcaggacgggcaggtggtcttctacaagatcagcgtggaccgcggcctgaagtgggaggacgcctttgccaagtctctggcgctgacgggcccctatgacggcttctacctctcctacaaggtggggtcgggcggggttacccccccagaggagggcccgcggggggcggaccggggcgcggcctcaacgcccccctccgcaggtccgcggtaacaagcccagctgcctgctggcggagcagaaccgcggccagttcttcacggtgtacaagcccaacatcggccggcagagccagctggaggccctagacagcctccgccgcaagttc

SEQ ID NO: 141909 - DNA, 1191 bp, Homo Sapiens
  misc_feature (28)..(28): n is a, c, g, or t
  misc_feature (69)..(69): n is a, c, g, or t
  misc_feature (205)..(205): n is a, c, g, or t
  misc_feature (480)..(480): n is a, c, g, or t
  misc_feature (578)..(642): n is a, c, g, or t
agggtcagtgcgtcgcatgacaactatnggtcgttggttgtacattcctcgggcgggcgtttagcattntcgttctgagacggcagtgttgtggtggctattatctgtctcctctgtgggttgtgtacaggaggggtttggttgtcttgtcacagcggctacacgtgcatataagttcttgttatgatgaaatgcgcagcgttgntctcaaatgcgggcgcggtgaaattagcggggggggaggtgctatgcgtgtttcgcgcgatttttaatgggagccgggcggggttgtcgggggatactgaggatatttcttttcttcgtcagggcgggacagctccgttggggctccgggggggcacagtcaagcttatatctctacagctcctcttgcttcgctccctcgtcaatgcaatctatcttatccaccctagcgcctccctctcgcgctccttccctatttccgcccggccgctcccnagcatcttcccccaagccgcgcgccactaacgcggccgcggcccgctctacctacccccctcgcctctccccgcctgccgacgctctaactcctccgnnnnnnnnnnnnnnnnnnnnnnnnnnnnnnnnnnnnnnnnnnnnnnnnnnnnnnnnnnnnnnnnntcaatgccggcgtcgagggggcgccgcgcgggcatcagcgcaccccgcagcatgtattggtctcgcagccgcggcccgtacagtcaatcctggccgtcatgcgccagccggcattgccggttccaggcgttgtggctgcagtgcggtcagcgacaaagcgttagccactctcggggggctccttggcctcctcgtgcggtgacccggtggaacttgctggcggaggctgtccagggcctccagctggctctgccggccgatgttgggcttgtacaccgtgaagaactggccgcggttgtgctccgccagcaggcagctgggcttgttaccgcggacgttgtaggagaggtagaagtccgtcataggggtcccgtcagcgccagcgacttggcaaaggcgtcctcccacttcagccgcggtccacgctgatcttgtagaagaccacctgcccgtcctgcgggtgcccgggagccaggaacacctgctggctctcctcgtagatctcctcgataccgggagcaaggtccagatgcaccatgtcgtattgcc

SEQ ID NO: 141910 - DNA, 349 bp, Homo Sapiens
ttttttttaaaaataggtaacacttcattaggtgctacttggccccggccatgttgctggaccgtaggagatactgatccacacttccttttcgccggctcacagtccgcctctcattgtcgaacatgcgctgcaactgcagagccaactgtcggtcttcttcctcttgctgaagcttctgctccatctctcgcaggactgggtctgttggggccagacccacctccccactggtttgtcgcagttttttaagggagccattttgttctaagtgcttggtcttgcagtgtcttttccggcctcgacgcaaagaaggaagtggctcttcacttaggctctcaactagaac

SEQ ID NO: 141911 - DNA, 471 bp, Homo Sapiens
ttttgtgatcaaatcgcatgctttattgaagaactaagaaaaaagagcaatggaaaggatttcattagaatgcgttttccatgtggctgcttgaaaaaattagagttcttcgctaattcacaattaatcttttgttcttgactggagtcacactggttctttgcaaattatgaagaaatagaagttgtgcgtggtgtgatttccaaggattccgacagtgagatttccgagggcgaagtgcgtttgaccaattgtatgtggttgcatttaatgcaaaagttgcaatctccatgcttaatagaattataccaagtgtagtcacacaaatagttatgctgttcattacaattgcttatatctcgtaacaggcttctgtattacactactggatcctgagttgatgaaccccattgctttggtgccttcttttaggataaatcttctcagcattttaacagagatattgtatag

SEQ ID NO: 141912 - DNA, 741 bp, Homo Sapiens
ttttttgtgatcaaatcgcatgctttattgaagaactaagaaaaaagagcaatggaaaggatttcattagaatgcgttttccatgtggctgcttgaaaaaattagagttcttcgctaattcacaattaatcttttgttcttgactggagtcacactggttctttgcaaattatgaagaaatagaagttgtgcgtggtgtgatttccaaggattccgacagtgagatttccgagggcaaagtgccttatatctcgtaacaggcttctgtattacactactggatcctgagttgatgaactgagctccgggatagttctgttttaggcgaggtaaaggcaggttctctgagcagtttctctatggaaccaccaggtagatctaacaagcagctgcagttctttgaggataagatttgctttgctccctctgttactgggtacatgtggccactgaatagtttcatctttcgttaaaaagagtataatttcacatgcaattagaagtataccaattattgcaaggccgaaactgtttaaattcatccatatggcatacatcaaccccaacattctggtttcttctttcaacacaatgtgagatgatggcatgttatccaaaatatggtgtagacattagaaaggatgaatggaatctatctgcgtgggccaacagagtgtgatctggcagtcaacttcctcaatttggggcctggcagccccgggagcccggtgggcgcttcct

SEQ ID NO: 141913 - DNA, 528 bp, Homo Sapiens
tttgcaagggtaacttgggaaatttattcgtatgtcttaattcacagaaacattggcattttacagcaaaacaattagcataatgagaaataagtcactgagtgagatgtggtgttttggatcaggtatacagctctgtctctgggaaggagcagggttctggcaagtgtctttggtttggcaagggttgttccggacttgtaggaacatttggtggcaccatccaaaaggatttacttgcagctgattttggggggtttttcttggtctcctcgtgcaataagcacaacttcaactattttcataacatttctcttcagctatttctgtaatatttttctaataatcttgcttcttgtatcagcatattcactttctctgttgccatatcgcacataatgaagttctgagggcggcattcgtgccctgggcctcggcgagcttgcccatcttccccggcagcagcagtcgcacggccatctggatgtcccgggaggtgatggtcacgcgcttggtgtaatgggccag

SEQ ID NO: 141914 - DNA, 748 bp, Homo Sapiens
aggtattatctaccggagacctgcaaaccaggaaaacttaattcctagatgcctgaggtttacccttaaattgttgaactttggatttgcgaagaaaatagggttctggccagaaaaacatggccattctgtgggactcccgaaatatgtagctcctgaagtcattctcaacaagggccatgacttcagtgtggatttctgttcactgggaattctagtgtatgagctcctaacgggcaacccacccttttctggggttgaccaaatgatgacctacaatttgattctcaaaggaattgaaaaaatggattttcccaggaagataacacgacgacctgaggatttgattcggaggctttgcaggcaaaatccaacagaaaggctgggaaatctgaagaatggaataaatgacattaagaaacacaggtggttaaatggttttaattgggagggactgaaagcacggagccttccatcacctttgcaaagagagctcaagggacccatagatcacagctactttgacaaatatcctcctgaaaagggaatgcctccagatgagctatcaggctgggataaagacttctgacagaagaaaagttgattactgcctgtactctacagaagaggacctcaaggatcaataatccaacacattattttcttttcagagtattataatatctttggaagaccattagggaaaagaaattcctgcccaatgggaagaggagaatggtgtggatat

SEQ ID NO: 141915 - DNA, 568 bp, Homo Sapiens
tttcttaacagtctggctgttgtttgaattaaactcttaaacaggatgtttagttagagggtaattgttgagtaatgatgcatacaacagcatacttccctttcttgctgggggtgcagcttttcagttttcttgttttactttgacagtgcaaggggaactgaaaataatttccattgtattatttatcttagttcagctgagggctttatgagacagtggatggggaggcagtaagacggtgatgagataaaatgtgtgtgttgcactgactgtctataaagttatcctttcttcatgaaaaagtagcatttaaatctggatgagtttataaaggattacaaaatgctgatttatagagtaaactttaaaatattaaagactaaagactaaaagaagagtaataatgaagtaatgtaggctgtcacttctctagatttgtattgttgaaaatttaactttggacatctttatagattattattttagacctacaaaaactaccctcaactctgtggctacagctagaatatgaagcatcattgctacaccagttcttactttctag

SEQ ID NO: 141916 - DNA, 590 bp, Homo Sapiens
tttttttgcttacgtgggcatccttcagcttttaataatctgaaaaattctatttacccattgtcaatgtgtataaattaatctcagtcaattttatacaataaaaggtgaacttttatgcatgaaacaataatttaacaaaaaatgtaccggaagaagaatgttcattacaaatataggaaacataaatattaccaaatattggcaagcactaaaatgttcagaaatataagtctattacagttatagctctctcaagcaaaaaaacagcagagaaaaacttagttttccttaggggctatttatttacttagggatttgttaaaaggtcaaatggggtcacacagaatactaagaagagctgttcacccaggcctcactaagaactcttcttcattcagtagctatatagtaatatgacaactgctcctacgacccaaagaggaactacagcaactactctttagcatctgttgctcccaactctgctttgcaattatatgactcaagcattctggctccgttaactattactgctgttactcccaattaaattccctataaaacataaaaatttttaaagctgtaaa

SEQ ID NO: 141917 - DNA, 611 bp, Homo Sapiens
gcacactcattactgtttattcataattctgcgaagagctctcgcggtaaaagtacagactgcaatggaatcgtgacgggaaacctaatctatcttatttactctcgggggagtcagtgaacactttcttgaagaagtgatattaaaaacatttgattttaaagagtgaataagaaatgcacatggtatgatattcacaggtcccaaagcatttagagggaaagcgtgtttccttccacccctatcacctggcctcggtttccctcctcatgagcaaccacagtcccacttagggtgtatcagtcaacactaagactggcacacactaagagggtatcggctagaatatgagccaatctgatgtttgacgccactgccactagagctgctatgttgctccaggacaaagagggttctgggttagggccattactgtggccaaatccccagcactcttcatcaccaggtgaccgtgaatgctaacagcagcacattttgctcacagaatcccctccccccgaataacgacttcaactctcagaggtcctggaaattctgctttcggcctcgcaatgccatcgagctgcagaactcggcggccgacaggttct

SEQ ID NO: 141918 - DNA, 671 bp, Homo Sapiens
  misc_feature (549)..(549): n is a, c, g, or t
  misc_feature (563)..(563): n is a, c, g, or t
ttttgttctgaatatgtttgtatttaaatatgtcccagataataaaatagaaagaatgcttgatctgatctgagagcaggagcaaagcctttctgaagggttgcctggcactgtgggtttcaggcagggcctctctgcagctgcctcatctccatttctttctttctggcttggggctgcactttggctctgactccgtgccttctgctgggagctctcctcacagggcttacttgagggatgcttcttttgaggttgaagttaaccaacgttggttccgcaggacccacggtcacagttactgtctctgggtcatacccaggtgctgtggcactaacagtgtagatacctggaagcagcagccggaagtaatcaccatggtcaccttaagtgacatcatggttaatcccactgacagaaatgacagcattggcgagattattgtaattctcatcaagcaccattcccttgatgccctggtgaacctgttccaggaactggattaggggttcccgattacccagccacttccgctgtaactcctcttcngggggaaacttgtncgcactcagttccagcgtgatctcaaagcagttggtatggagataattaaagtcttgcattcccttgctgagagataccaggaagccccattgtgatgccatctggga

SEQ ID NO: 141919 - DNA, 385 bp, Homo Sapiens
tttgaggttgcaaacctttatttcccagcgccaccccctttccgactgaggtttgcacacacagtcgcctcctcccccgccaccgccggcggtacacacttggttgggttcccgttttgcaagggaaggtcacaatagctgctttatcggttgcggaggcgcctgccgcctccactcccgagtcttaaaaccaaaaaaacaagaaaatgggggaggggaggccccaccaacagcgccctttgggggaggcaacctccaccctaaccagggtctttttcctggaacaagtgctcgcaaagggttgcggggagggcaaagggagcgcaccaaaaccaccaggctgttccaggccttgccgcagggcgctgggttgagggtgcccgga

SEQ ID NO: 141920 - DNA, 349 bp, Homo Sapiens
ttttcattatagattaagtttattttctaagcccttgggtcatttttgaccttgtgatttttgttgatccgtagaagtggcggatgtgacaacgtgtcagttcgaagcctaggacttaagaggtctcactattcttgttgctcctttccaccaacatgcaaacaagcctgggctagccttctggaggcttctggagagaatccatttccctgcctttcacagcttccaaaggctgcctgcattccttggcttatggacacaatatgttaacaatgattgtctctgggagggtctgattgctggtctctctcctctctgctggtctggttttcctgttttgcctgttgtg

SEQ ID NO: 141921 - DNA, 678 bp, Homo Sapiens
  misc_feature (649)..(649): n is a, c, g, or t
tttgttattaactaaagtctctactttattcagtttctacccaatgcccattttctattccattccaggatcttatccaggataccacattacatttagttgtcatttttcctttggcgtctcttggctatgacagtatctcaatctttccttgttgatgatcgtgacaattttgagatgtactggtcaggtattttgtagaatgtccccctcctggaatttttctcatgtttttctcatattagacttgggtgcctcatttgatttcagtcacaatcctattgggttgatatcttgcaaatgaagaaaccagacttggaagtcatgcaatgttatttccactgacaaactcccacgctggcatctgggttcctgattggctgatggagctcctgatttgacaaaggggcttggctcctttgagtgacctttattcaatttaatcggtttgttcttgattgtaagtgaatgagtttgctggttccccaagtccaagtagaaactgtcttactctggttccgttttccttgagccactgtggtaaacctttttttcgcggtgtgggcctggaccagatgctggacgtgccctacgagcagcttatgcagctatacagtgcgcgtccctcgtgccgcctcgtgccgaattncttggcctcgagggccaaattccctatag

SEQ ID NO: 141922 - DNA, 1030 bp, Homo Sapiens
  misc_feature (47)..(47): n is a, c, g, or t
  misc_feature (73)..(73): n is a, c, g, or t
  misc_feature (968)..(968): n is a, c, g, or t
atgatgggaaaggtggatttttagagcatcactcccaggatttcgcncaaagggagcctgaaccagtgacctncaggccactccttcctggggatatcagaaatatcagatgtggctcacaaaaagccgactcccaaacatcagagcagccctcttggttccaggcagatattcattcaacgctacacgttagagaaagaagactccagtgtcgcctttgcatttcaggcattgtctaagttcttcctgcatttatgtggactctgcccaaggctccctaaagacataagcttcacttcttggatagtctgtaaggagaagcaaggggaggctggtgtggaggcaaggaggaataaaggcagggctggagacaaaggctccaggctggcagacacacagggtccagtaggggtttccctgccctgcggccgccagaagtagatgtgacccacctggatgtatgggttttgtattgggcgccagcaggctccagccccacctggagggactgccaccaggggcaccagcagagggaacccgtcccaggactgccggatggaccctgctccaaactcagcctgctctccttgtgacagcagagcctttgcaattcctgagggtcatcatggggcaggagacagacagtcctgtaggatctgtggttgtctccttttgacaatctcactgttcttcgtgcctgccctccaaattcagtagcatgtctcaaagccttacatctctcggcacccagagttcagtgcatttccaacctgtgcacctggcctgtgcaaccacccagcctcttctgggggactcactctccctggctgaggctctgtctcttttgtgtctccaaagctgctgtctcccgacctggggcaggaggggctgaggatacctctcttgggtaatagtccctctcggctgaagcagctcctgctgggccaggcgatcacagggcatgctgngcagaggggctctggccggcttcatcttcccacctgctcctccggtgtctccctctctcgca

SEQ ID NO: 141923 - DNA, 492 bp, Homo Sapiens
gaaaaaagctggagggaaatacactcaaaatactaacagtagttttctctaggtggcgggattatcagtgatttttatattcttccgattgctttttctattttatcggtttttccacacgagcctgaagatcagtggagaagaggactccagtcgggaaggaaacagagcggctgggttcttggtcatccttgcaggggaggaattcttcttcacttaagtcttagctgcccagtcttcaaaaccacttcaggtatctgcagtgtacagggagccagctgggaatttccatgggagttgggggatttccagatagcatttcctcttgagctgtgcatgacacttgataggcctaatgctgctgtaggtacattccaagctccccagtggatgctgaaaccacgcatttcagaaccttctggaaactgtcttttccaaagtagttggaggggacatcttaggtcatacgactctcttctcaaagactgcttg

SEQ ID NO: 141924 - DNA, 637 bp, Homo Sapiens
  misc_feature (277)..(288): n is a, c, g, or t
ttttccctattgcgtactgaattggccggttacggcaacctaaatgggtctgcccctgatcccgtcacattggctcccgtaaggccattggcctgcaggatccccccgtttcccaatttgcaggatccagggccacgcggctttttgtgcccagactcttggagctcaagaacggagccgccgaggctggacagcttgggaaagggaacccaagcagcattttctgtgctgctgctttattcataacttagggttgccactgggtattaaggttgcnnnnnnnnnnnnaatgaagacagaaaattgcctttatctttgtattgcttcattttataatgcaaacatccaagagttggcagttagaatatttgccattttattaaaactgtgatttgttaccattttgatcgagacctaccaaaagctgtttggttctgccctttttgccaagaggcagtaatgagggctgcctactgcttgttaggcactaggagttcagagaagagacacgcttccagctttcagagatctctggtatctctgcaagagtgattccatgttttgcatttcagaagtgtttttccccctttaataattgtatacattgtcggtttagaaaaagaaatcgatttttaac

SEQ ID NO: 141925 - DNA, 463 bp, Homo Sapiens
actatgagagaataaatttgtgttgttttaagccaagtttgtgataatttggtacagcagcaatagaaaatgaatacaaatgtttccttgaccttattgagaacaacttttgtggagagggaagaggtaaactaaaagaaaattgtggtgggatgataactgaaagatacagaaaagacagcaaagtatccattttttaggaagtttttatatatctcatttgacccactaagaaacgacatccagaaaggagctaaagaccagaggtaattgattagctcagcacccaaaaatggcaggcagtgttggggcagtactagaatgaggtagccggcccgggcacggtggcctcatgcctgtaatgccagctctcagggaggcaagaggtgggagtatagcttgagcccaggagttcgagacctgcctgggcaatatagcaagaccccgttctccagaaaaagga

SEQ ID NO: 141926 - DNA, 1069 bp, Homo Sapiens
  misc_feature (786)..(795): n is a, c, g, or t
ggccgcgaggccctgagatgaggctccaaagaccccgacaggccccggcgggtgggaggcgcgcgccccggggcgggcggggctccccctaccggccagacccggggagaggcgcgcggaggctgcgaaggttccagaagggcggggagggggcgccgcgcgctgaccctccctgggcaccgctggggacgatggcgctgctcgccttgctgctggtcgtggccctaccgcgggtgtggacagacgccaacctgactgcgagacaacgagatccagaggactcccagcgaacggacgagggtgacaatagagtgtggtgtcatgtttgtgagagagaaaacactttcgagtgccagaacccaaggaggtgcaaatggacagagccatactgcgttatagcggccgtgaaaatatttccacgttttttcatggttgcgaagcagtgctccgctggttgtgcagcgatggagagacccaagccagaggagaagcggtttctcctggaagagcccatgcccttcttttacctcaagtgttgtaaaattcgctactgcaatttagaggggccacctatcaactcatcagtgttcaaagaatatgctgggagcatgggtgagagctgtggtgggctgtggctggccatcctcctgctgctggcctccattgcagccggcctcagcctgtcttgagccacgggactgccacagactgagccttccggagcatggactcgctccagaccgttgtcacctgttgcattaaacttgttttctgttgcttcccgannnnnnnnnntctacttccctcctcatcgctaacttcacgccccgcgaccccaacaacccacccgggtgtacaccccagatccccccaaacaaacacccttggttggggccccctcgggcccctgaagaaaacttttctaaccccacttccttttggggcccccggcgcccccaccgcgaaaaactcaacccggggtactagcgctgggttccccaaaggagaaaactcggggcaccccccacaacgggtcttttgggtctctctcccccccaataacacaaaa

SEQ ID NO: 141927 - DNA, 824 bp, Homo Sapiens
tttcagagagaatgtttcatttaatatagtttctacttgacaaattatttctcctcctagtggaacactttattttatatgacactaaatggcaagaataaatcaaaagcattgtttagttgggttaggaaagaaataaacttgaatgaatttaaactgtaagtcaaaatggtgcagatacctctgacaaattacagtgatttttctctcaatggtttcattatgcaaattatgttatttgttttctagctttgcccaaaataaatgatggtgccagattaaaagcaaatcatatctttatcaaggatctcaacaatgtgacttaaagtattacaaaatgtaccatgtgctggccatttttatatcacccattgatcatttaatttcaaatgttgatgtggcaatgtaatatcatcacttcaggtttttttaaataaagatcctgtatgtagagcagtatcatggaaaattagagcttatagtaagaagaagaaaatggctgtgatttttctagtcttcctgccatataaataagttatttcttattttgtaccagtatgtttacatttcctattatgcctccacagtaacagtagaaaaaaaggccaagtatttctgaattaatgaaatagcaaaatgaggcatattaaaataaattgttctctggagccagattttttcctgtggtgacgtgtcttttccaggccaggagaaccgatttcccaggccacttctttcccttggattgtccctcaattctcagctttgtttcctcacatctctgcttacatcttctcggtgtgggtgccacaagactttttctt

SEQ ID NO: 141928 - DNA, 560 bp, Homo Sapiens
ttttaggcgtacgggtgtgtttatagtgactagagtttacaagggggctgggtggcgggactgccgtgtacacactgtaactccatgtgtccagtttgtcctgctgacgcgttccacagctgtcaccggaaagctatctcctggggccagcagcatccaggaagggggtacctggggctgcagagacaagctcgtcggcagggcagggtgagggaccatgggtggaatggcagtggctgccagtgggctcggggctggcgcaggcatctcacgtcgcaccgtgatgcctgctgtggctccagaagttcccaagccacgtggtgacagactgtgggtggtggccaaagtggcacatgtcaccaagcaaggtctcgagcttgcagtggtcccaccctctggggcagtgttgtgtccttgccgaggatggacagactgaccaggccccacggtcctgaaggcaggatgtccccaaggcatgtgccgcccgcacgtctggaggccctgggtcctgccagggccaaagtcccataaaaggtctcctgtgcccgtatggccactgt

SEQ ID NO: 141929 - DNA, 482 bp, Homo Sapiens
gcggccgccagcgccgagtgccagaactacgccaaggaggtggcaggggtgagtctgccccccaaggagtgcagcccctgcccagcagatctgcggtcctccctgagctgcttctcctcagccctgtgggagcagctctcggtgacataagccttgaagtccgagtcctcaggcgtttgcctgaagcctcacaggcccctcgttgggctgtcaggcctgaggtgtctctcagggcaggtttcaaaaaggcagcctcccagccaggacaggggcagagccaggcagccctgccccgagggaggcgtttgacgttctaggttatccctccgcaaggggattctctgcctggcttgctgatgtcatatctggtggggagtggatttagatctgacactttttctgctcttcagaagcagaagcacaagcccagtatcccaattctggtttaatctcaaacttttggggccaggcacagcggctca

SEQ ID NO: 141930 - DNA, 511 bp, Homo Sapiens
  misc_feature (122)..(140): n is a, c, g, or t
  misc_feature (483)..(483): n is a, c, g, or t
tcgagaaatttcatttgcatgttgaaatttcattgcaacatggtcccacggagggattcgacgctgagaaagctactgtgcttggggcgggggggtcttgctgtggcagaagaaggaagagnnnnnnnnnnnnnnnnnnntggttgggaaaagtaaagctggtgataatgatcctaacaattctaaaatacctgcacagagacacagatgcacagacacacttctgctcccacaactgcttgcgacgcaggcaaggcgggagaggaaaccacgctcggagaagggacgggactcagcttctaggaatcagctgagaagtggagacgctgggaccgcggactccaggacccgggctcagtcacccacgccgggaagctgcccaggatggcaagaacccagcccaggcccacgccgcccccatagctcagtggacccggacctcagggtgcccctgtcctgggaaagttgcttcctgaccctgangaaacgccagcaggaaagactccacttg

SEQ ID NO: 141931 - DNA, 455 bp, Homo Sapiens
ttaatggttcaatgcataatatttattttgcactttatttctattattactacattgtaatacataataaaacaattatacaactcaccataatatagaatcagtgggagctgtgagcttgttttcctgcaactagacagtcccatcttgggggacagatcatcaggcattagattcttataaggagcatgcaagatagatcactcacatgcatagggcacaacagggttagtgctccaatgagaatctaatgttgctgttgatcttacaggaggtggagttcaggcagtaatgtcacaacggggagtggctgtaataaagatgaagcttgacttgcccacttgctgctcacctcctgctgtgcatcctggttcctaacaggccatgatcactaccagttgggggttgggaacccctggtctagaaagtaaaagctatctaattgtttacataat

SEQ ID NO: 141932 - DNA, 522 bp, Homo Sapiens
tttgttttgtaatccatgcttttattagcacattgttataaaagcataaccataggtaagacactgtacgggacatcctgaggatgcaccatgaggatgcagacaggtgcacatgggaagacaagacacctacagcacgtgaccatgaacccaaggcaggagaaggcttgtctgagcctttgctgttgtaggtacatggctctttccttcatcagataatgagaattggttctccatcatttctcattgcactagggattcccggaaactcggaattcaactgggacagcaaactaacaaacaggagaactctgcacatagcggtcctaaatccacagggaggggaagcagttgcctctgatgatgtttcaggctccacaatgctgcttttcaaccagaaagccagtgccaggtagggctgatggtctttaggagttccataataaaatacttcgtgaaaatgaaaatggcttgatcaacgatggcgtctatgggaggtctagaaaaatgacttgtcttctg

SEQ ID NO: 141933 - DNA, 490 bp, Homo Sapiens
tttgtgaacataactttatttctgcagtcctacaatttgcaattcagtaccattgttttcaccctcctggtgatgctcaaagttgattgatatcttgttgttcttttcgggtctccctgcacagaaatggcttcccatcatcctgtaagtgttctaatgtggtgatttagcgaggtaatgcatgtaatatagtaagcctcaccaaatgttgggtactatccaaaagtcttctgagcagaatttctcttttacttgatgacttagaagacactctatttcaacaaccaaaaatgtattgtgcatcttgggggcctttactaaagacactgataaagtatttttcagtagatgggccaaagtcctggttgccagaaggttctgatcaattagagagtctttctcttactacattttttaaaggctttgattccattgcccttttcctagatggggaagaaatggaaatccaagcaactttgattttgcatct

SEQ ID NO: 141934 - DNA, 558 bp, Homo Sapiens
tttcattttttggattttcacaatgtattcattcacctactgagggttattttggctgggtccatgttttggctattataaataaaggtgctataaacactgatgtgtagatttatgtatagatataaatttttaagttatttaggtaataccaagaagcatagttgctggatttgtgagagactgtgaaactgtcttccaaagtggatgtagcaatttgcatttccaccagcaatgaatgagagtcgctgctgcttgtcccattctctagatagtgtctttcacagaacaaacgtgtttaatttttcaaaaaccctggcttatcaattattttattcatggtctgtgcctttgggtgttcctacttataaaagtcaacaccatagccaatgtcatctaagctttctccttggttgtcttctatgggttcatatagttttacattttacatttaggaatataatccaatttgagttcacttgtgtaaagggtgtaagatctgtgtctaatggatctgtgtcatattgatttccagttgttccaacaccatttgtctaa

SEQ ID NO: 141935 - DNA, 555 bp, Homo Sapiens
tttagaattaggatatttcatgttttaatagtgttaatttggttagcattagcataagcacaggctactaggagccctaagtaggtgtctacagcagtacatatatattggcaccctttagaaagtggcaagggacaaatatagtccatttgacaaatttgtcctggcatttttccccggtgaatgtgccccatagccctttgaggaattggcttggtttttaactgttggcatgtagtgcattgggataaaattgtctgaactgcatcctggggtaacatccttctttacactccccaagccatggttccctgtacgcctaggtgtccgcactggtgatgcacccattgtgtgattgcagcccaatctacttcttccaggtctgagtcggcagtaatagtagaaattttagcttgttggtctgcctgctgattagtttgcgatccacactcttctgtttgtggacaaagaatgaagtcttgccattatctgctcccttctccagtcactcaaccacatgtcctgccttccagtcctcaaattcttctctcaatc

SEQ ID NO: 141936 - DNA, 329 bp, Homo Sapiens
tttattttatttatttttactctaatgcctcctcccactgccctgtaacagtgtggaggtaacagaacagatggtgctttgcgtggaagactgagggctcatgaggatacaaagcctgcccactctgaaatcacatgactgcacgtgcaaggaaaagccttgatttcccctgggagacacagatgcaatgatattagtattcccagtggaggaagaggaggggaaggctaacaggccatttataagtaagaccatacttataccaatatactcttcagcaaggaccatgtttaatcatgaagtaacaggaggaccaatatctgaagatt

SEQ ID NO: 141937 - DNA, 603 bp, Homo Sapiens
gatgaagcatgcaaaatgttttattaatcagagtaatagagtagaaatgaaggcagtacgtctttaaaagtgcctgggtgtccaggtacgcggggaaatccgtaaaaccgttgaccaagcacaatgtacgtagacaaatgtcttctcattgcgtgatgcgtgaaggccatgatagatggcttctaacaacaaagcgtgaccacagagacaaaattagtgttgttttaattaccagtgtctgtaatgttatctatccataactgcctgaaatagaccgtcacagagggtcagaaggcgacctgagctcatacttccacacatagcttccttatcggttctggagtcgtaacagcagtgtgcttttctgaaatccatcattccgctatgtcatccatggacctcaaggtttataggagatgctcggcctctttgttgaagccacagggcagtgaggccaggtgtgttgaaggcctctccagggccccagagacagggatgctggctggcatttatctctttaggcttcccctgcaaatggcggtaatgatggtgcttccataatacggcgtgttaccatattgcaaagcagaagcaagttggagc

SEQ ID NO: 141938 - DNA, 584 bp, Homo Sapiens
caggccagcctacctgttagggactaggggtctgggccctgccaaggcagggagccctgatcccattgccctccctctccccgtggggtctcaggccctaggccagggctcaacaaacacaggcagtgggatggggttgcccttctattgatccaaatcctgagtgtcgcctgggtgagtcatggaggtgaggaggcccacaaggctcagcagtgtggagaagagcagcaggaaggaggccgtgaagaggagggcaggcagagcactgagcaccagcagcaggagagccggtagcaggtggcgccacaccgcggccacgacaggccacaaggagctcagcaggtgggagccagtggtgaagagtgcatggcacaacatcagtgccagcagcaggtagagtatcccctccagaccccacagcaggcgctgcagcggttgccgccagttcgaggtgctccaccactggatccagctcgggggcatgtggctcacccaccagcgcacccagccatgcctcgtgacccaggctgaccagggcactgcctgctgtggcccctcgccagccccgatggtatctgtctcca

SEQ ID NO: 141939 - DNA, 637 bp, Homo Sapiens
  misc_feature (578)..(578): n is a, c, g, or t
tttgggttagaaatttttatttcacaatgtaaagggttatgtgagacccaactgtattctatctgaagcattagaagccaactgtagtaaatgcatcttacttatattcgatgctggccagaggagctattctgcttcctttagaagttatgctttttattgtggcttgtggtaaccatgtaacatgcaagagcaatggttttcaggaagaaactattatgccttacagcttttgccccaaatcacaagaaaacttgaactatgtcattaaacatcccataaatgctgacagaagataaaggatatttattatatgaaattgtctacgccctcagactacaattcctgaatagttagatggtgaccatgttcatccttctggattaatgaaaacttggaaagcagtcaaagctgcctgggccctggctggctggctctcccttcagcctgctccccccaggagccctgagcatctccttctgccattgcctgtacagcttggaggcttttcacatcttggagagcttgatgtcataagtgaccatgttcaagttgtcccaggcaaagagcttcttctnccaggggttgagtcaatcatgctgctgtactaatagcggttcttgaatgggatggtcag

SEQ ID NO: 141940 - DNA, 392 bp, Homo Sapiens
ttttcatgttttagaattcatttattgtaaggaaaacagaatcattgttatctttgataaactttctatgtacgtaaattgcaaacttctgaaatcaggtgtttttccaacaataaaatacttttggtgaagaggttcttagagtttgctttcttcaatgctaggtcaatgtgttcttcaaattttgaaacttattgttctttctcttgaagtggaaaaggaagcccttgctggtacctccatcagtacggagcctgtggactagacttctaaagttcttaagattccaaaaagctgaaagaatggttctcaaagcgtggccccaggaccaacagtgtcagtatcacttgagaacttgttccaaatgcaaattctcacaacctccggcaact

SEQ ID NO: 141941 - DNA, 443 bp, Homo Sapiens
ggactgttgcaaacacttttgggcgccagcagaagtgaatttgtgagccccgtggcagtgtctaggtgggggtgcctgtgacctccaaagccccagagggaatattacagtgctcttttagctctgccatctgcagagggcttaagtgttagcacctcagttggccttctgctttttcacgtgaggtggctgctttttgccagcaagagcaaagggccagtgtgacagctttttgtatccacacttgtggctcccaagctcttgtccagcacccaggaaaaatgaggtcgcacaaacaaattgaaggatgcgtggaagtatggcatcatgatgtctactgcacatctattcccaaccccatattcagttgtttcatgtagtctcttgaaatctatggaaactagaaaacactacaaataaagccttgatttattgttttaaaa

SEQ ID NO: 141942 - DNA, 484 bp, Homo Sapiens
  misc_feature (339)..(359): n is a, c, g, or t
tattttcataaatgacttttacttatcatttctcttgacagtaattcttggcaatgtgcatataacatgaagggaagcataactttcagaagtcatcaaagatattatcctgttgtcctcattttcttaaaccattaaaatattttcatttataaaaattaatctaaatataaatattgacactaaagatcaaaatcacttgatgacaaaataattcttctggaactataacatatgcttatggtttttaatagtaaattaaatctttgcacttatttggcacaaggaaacctttataaaagttcagatgccacacagcaggctgctgctgctgcttcnnnnnnnnnnnnnnnnnnnnncaaggcttacacagtacacatttttgtcaaagaaaactgaatatttttaacactgtaacacaacaatagttgcttttcatgcctcttaaagaaaacattctattcggaagtcaaatcttttttgt

SEQ ID NO: 141943 - DNA, 565 bp, Homo Sapiens
cagtgcgctggctgttggaggagcgggggacgttgaccagtcattgcagcagcctcaccagcagtcaatatagcctgacaggcgggagcccaggccgctcaaggcgaggcagctgggacagcctgccagacaccagcaccaccgaccggctggacagtgtctctattggcagcttcctggacacagtggcccccagcgagctggatgaacagggcccacctggggctccacgttccgagatggactgggcaaaagttatagctggtggagagagggccaggactgaggtggatgtggcagccaccaggctagggagcttgagagctgtgtggaagcccccaggggagaggcttcaaggtggaccacctgagtccccagaggatgagagtgccaagctgggcttcgaggcccactggttctgggggcagtgccaggatgatgtgaccttcttgtaacaactattccacccttttgtaatcctgtggctcttttatccattagatgtggtctcccccaaaattgattctccctcagtctgacactaggaagaggctgccctgaaatc

SEQ ID NO: 141944 - DNA, 796 bp, Homo Sapiens
acaaaggttgcttttctactttactcaggacatttcagaaagccaatgaagaagtactaatttaacagctgggagaggggcagaagacactggttgaatggcattcctattagtgttcctgataggcactcataaataaacagaacattaagtaacagaatttctttgcattaaattatatgtaactaaataaaaccaaattttgacatggttcaggatgtgggaagctagcaaacatatgcactgcaaaatccagcttggtttctttcagatttaaagacgtgtttagattctcaagatacaaaagctgatgaactgaattatgaagttgaatttcattcatttaattttttccacagaatttaatgaaaatagaaatgatcaattcttagatactgcaaatattagattttcagaggaatgttttgtacagagtgcatcctagcaaaggatgaaaaacactagaatgttttgaaactttcctggatatttggctggttaatctcttctaaatgaaattcaagagaagagatgcaattctcaaatatatctcaaaataactaaaattaaaactaggagttacttcatgctgggatgcatgagttttccaacaatagacagtgaaggacatattgtttggaatattgctattataacatattgtatgaacaatcatatcacataccaaattctgaattttctttgtttctagtctttactattgctactgactcaaaggcattgcagtgaaggagagtttaggcttatggtaccaacaggcatacccaagtatgat

SEQ ID NO: 141945 - DNA, 590 bp, Homo Sapiens
  misc_feature (282)..(290): n is a, c, g, or t
tttcttcgctaaattgttacttctcctaagttgtcttccttcttgtgtgttgtgtgtgtttcaccatgcttcctctttttttcttctgctttcccagaagatcttgccagtagaaattaataaggactgtgtactttcagtcattacaattatgtattcagccagtacatttatctggtacaaaaatgaagctctattgcatcacatactctcagcttctttttgtgaatttagattttataaaaaatacattccaaagaggtaatactaagaactgatgannnnnnnnnctttccccctaggagacttctcagttggggtcatactactttctgtctcagcccattttctgctgctataacagaatacaacagactgggtaatttataaagaaaataaatttatttctcacagttgtggagcctgggaagtccaagagcacggtgcctgcatatggggagggtcacctcatggtgaaaggcccaagacagcatgagagacagagaggcaagatgggagccaaacttatccagttattaggaacccactcctgcaataactaacagtactcctcatgacctaatcatgag

SEQ ID NO: 141946 - DNA, 324 bp, Homo Sapiens
tttgaatcttttgtcttttatttttgtaaaaatcatatgatgtgctggactaggcatgcaggagcattagcttcagtgagacaaaacaagtgaaagagcttctttcccaggagatgtttgtgttgttgttgtttgcttaagtctgtgtttatctcagaggctccagcgggagagaggagagcaagcacgaaagggagaatgatacgtgaggaattccttgcatttgaggaagatgaggtggccaaagagacctgagcaaagagcaggttagtcaccttgaatcaaaaacttctattccagtccggcgtggtggctcacgcctgg

SEQ ID NO: 141947 - DNA, 986 bp, Homo Sapiens
  misc_feature (148)..(157): n is a, c, g, or t
gaaaaggttatatgttactggcgtattttgactttgctctcccttgggtataaggcgtatattttattagaaagggaagaggcttacttgatcaggaatcccagtaaaagcctgatcatggttccttttgcccctcctccaaaacaannnnnnnnnnctggtagtcggatttgttatgaatttctctctcccctcacccctcttaaagtatttagctgaagaagctggcagatagagagtgacagacagacaggcagcagtgtgaggccacaggagagtcattcttccggagttatcagtccatccatccatcactggagaagagctttgattgcctggttgtcagtggcttcaaaggcggtcagtccatctgggcctttcacagtcttatcagcaccctttgacagaagcaatttcacacaggaaacatgaccctcatagacagcagacagaagaggagtaatatgatgtttatctggagcattaatatctgctcctttcagcagcagaaattccaggatttcaagctgcccacaatctgctgcataatgaagaggtttccttccaccttctagtgtccggttgacatcttctcccttggccacatagtctttcacctcatccaagtctccgtttttcagggcccacatgaactccttgtcgcacatcactgcagcggggcaggccggttggccgggcagaagatgaggaggcggtggcagcagcaagcggatgccgccgggcgagagggaggcagggccgcgcgaagccggagaggagaagaagagaaggagggttaggctgccaggcgggcgaggcagttggccgcggcgaccgttcgggcgggagaaagaaagttcttttgcggccaccgggcccagcagagaggttccgcctggccgaggagaggccgacgcgtgggtcgacgatatcccgggaatccgaccgtaccagccgcttgttagccgggtcaatgtcagcgtttt

SEQ ID NO: 141948 - DNA, 525 bp, Homo Sapiens
cttccagcgtgtgcttaaatattttcttcagggtgttgtaaactgttggtccattttcagaatcaaaattaaccttagtgaatgccttaatggcatgggcaaggaaagcttcctccacatccacgggaattgtctgcaggttcactatgcagtgcaacacgcagagaatagtctggtgctgtcccttctctaataaaaaaagtgcttctgcggcatctgctcgcctgtcaaccaacatgtccacatcctctttggtgattacaggctccttcagttgctccacccaagaccacatcaagctgcataggatgaaagggtccctctcgccacatattctttcccaagctccatctcgggaattaagctctttctgccacatttctaccttcctttttagttcctccttttctacagattcatttaaatttgctagggctttggccgccagtattcttcttgcctcagcactcaattcagactgtaatgcagagtgtgaagctgcttcagacagatctttactgtcct

SEQ ID NO: 141949 - DNA, 897 bp, Homo Sapiens
  misc_feature (727)..(727): n is a, c, g, or t
ttctgtgcttattttaatatctcatattgacattcaattcttattttaattaggaaacataatattgtaaactatggtgtacagtgtttcaatatttaattcatttaaaaaagatacctttttacgagtggtaatgaaaatacacgtgactaaaagcagagcactgataattttggggggaaaaaacttaaatttattaaggaaagaaagaaattgaaccaggccattgttttaatatgcacataattaactgtagaactttatattgtgaaatttaattaaacacgttctagccatttgggttttgaaatgctaggtaaaatactaagttaaagatgtgaggaatcaatattatccttctggcatttttgtttcagctacataataacttttttagtaggtgtgtaaaaaagctcctgatatttttgccttgatctaaaggaaaatatgttctataaagggtaaatctattaattagagacccacacaactttctttcttgctagtgtaatcgttaaattgatttttccagtccatcatgtaattgttccagcgatggaatcctgctttccactcccattctgcttcatcaatatttcctgtcatttccaagacttttggaaaaaatgatgtccagaatcgacattgttgagcacgtagtttcgtcattattcttgttgactctgtattcaaggttaggatatttttgttcagttcttttgaagancagcgcagcttgtgctattgttctgagtctcatttggattccattattttgcaaaattggccaccgttgcactatggatctactcaaaattactcgggctttgtgtaaatatctcttctttcagaggtaaaccaagacaaattcaaattctagcatgcatcactccatcc

SEQ ID NO: 141950 - DNA, 572 bp, Homo Sapiens
cgggcctcaaggtgctctgtggaccacagcggggcccggggccctcgcgagggagggaagagttcgctccaggtccccgcgattccaccggaaagtgaaactgcagaggtgttgcgtggacacccgcggtcagacacgaccccaggccgcgcgggccccagaggaagcgagcgcgagtccgcggtggtggctgagcgctcagtgaggacgccattccgccacgaaaacgcccgcgacgccgctggcccctgcgcggtggggcgaggtaggctggccggacctgcgaagcccgacgagcccggcgccggctggctgcagcttgctctgcctccctggcctggccccgaggctcccgcgagccgggatccgcgaacaccggggccgaaccgactctctcgggcctcagacggcgtggaccctggaaggccccagttcggccgcttccccggaagtcccccagtgggctccggccgctttgggccgggcgcgtccggcttgctggttcccttggcgggaaccggccccttgccctttttcggccgttagggggggcccgccccaaacttttcctt

SEQ ID NO: 141951 - DNA, 385 bp, Homo Sapiens
ttcctctgttttctcctctgggtaccagaattgcgatagagtgggacagctcaggcagctgcaggtcttggccagtgctcttcctcacccaggccatgcagcatcaacacagtcaccgtagaactcctcttaagacaagcaaaggaactttccaacccagtactcagggagttttgagattttccaagatgccatcgaggaactgaaaagtgctgcccagctgcagtgagggctttttaaaggcagtttcatgtctacaccccactgagttcagactgtccaatgaagcactgacattgttacacatgcgtgttgtggacaacttgagaaaacacttgtctgcaggaagatgaaattaaaatcaagtgtgatcctaccaccgaaa

SEQ ID NO: 141952 - DNA, 634 bp, Homo Sapiens
attgtgaatagtttgctcagtgtttattgctgggggaaaaggaaaggatttgagtatgataattggtggattaaaagtattattttccatgccgactagttagacgttgctcattgattcaccagcaaccctgcgggacctgggcatgcagtcctcaccctcttgggttgcccagacggcatggcatggaccctcgtagtgggtgtccctggccaccccccagccccccgtggctaagtgcaggcccccgccctccagtctgtctgggccttgcaggccagttgaggggtcggggcagggcctgccagaggatgcagggcaagctgcgtgctctggctggctcctgagctggggctgggagagcctgcttctgcggagatgtcagtgagggcaggagtgactgcgctcacttaggcaggccttcagtgctgcagcttgtgtggcaggggcagtgtggtcctggcactgtgggggcagctcccggcagtgccttctgaggagtgcttgaggctgaccatgcttgattttcccattgttgtggctttcacacctcaatcctgttcagtccctgtgaaacccaaaatgcaacgcagtccagtgtgtctcagacagggcctgggaggtggcattggcg

SEQ ID NO: 141953 - DNA, 916 bp, Homo Sapiens
  misc_feature (285)..(299): n is a, c, g, or t
ttttactgtgatttcagtttaattagaaacacatgctgaatgttaagacaaaaccaaaattgttggtttcatttgaacttgagaagaattggagactatagacttaattatgtttcccatccccatagtaaacaataaacacctattatgttcttccagagttaaccaagtctatgagccaatgtaatcagtccaatgaatgtgttagaatagatactacacattttgtgggtgctactgcagcttgtatgtgttggcagcagttccgctttatttcctgctgannnnnnnnnnnnnnngtaccttcactgccatataatgatttaggacttttgcttcctgaggtcagtgagaacattcatatctgatacttaactccagaagaagattcttgtttagttatgagaaagtgaatggctttagtgatgattcgcagaaatctcccaagtgatgatggaattctgagctgacagccacagccttgcggtgactcctggcatgacctgcaggctccattctgctctgctcctctccacacccaaagaatgcaaggctggagctcctttctcttctggagacctcagggacagaggaaatggcagcaggcacattggccagaggccttcagatacaagccccttctaacttcatgacttcccttttccttatgacaatagagaattcatttctccatccttcactttgagatcaacccaacttaaatcgtcatatgttaatcgtatcatttctgagctgttttttgattttacaaacccttaaattaagaaacggattaggaaccgcccattaacactgttggcaaatgatttaaaatcagggttgctggtttttctgtgataatctatcggcttcaagacgcacagatctcaatttcatggaaagaagttgcctgata

SEQ ID NO: 141954 - DNA, 399 bp, Homo Sapiens
tttcgtggttgcgtttgctttattacagaaggaattattgcaggttttattcagttttcagggccagggccggtaacccccacagaggtgaaggcccctggtcagcttggtgctgggtgcccaccgggtgcttgacatgcatacttagaccccttaagaggaaagggtggccttcttcaccaggaagccggcgctggtcccggccctgttgccgggaacgtaagcaactggggcttttttttctgggcataattatggtgtgccaggctctgcccgagggggttgtattttttcatatatttattcccttcttttgtggtacctgccatccacctcttctcacccccactcaaaggcagccattctgtcactttgtgtctttttgctggaatgtgtccc

SEQ ID NO: 141955 - DNA, 716 bp, Homo Sapiens
ttttgtaatgtgaaattttatattttaaaaaggggaaaaaatgttaggtacatgtacaggttttcatctgccttagaaggggaaagttgtttctttgagaatcttccatcctttcctagaacgtgctcttttcataaaaagacaggtaaaatactgtaatgcagaccagaagaaactagctgagttggtgtttttcaactggacactgaacttccaacctataacaggatggtccatagggacattcaggccggtcatcagtctcatcttggcccacgatttgtacacctccataatcactatcaccaggatggctaaaatgttgaaaatgaacaggattcttcctatagcagtttgccccatacatgcaggatgtcctcttgaccttgtttccttcagaaccttgtagaactgaatcagttgcctttgcatgcaaagtttcaggattggagggattagagctggactcagaatgagacccttgagactcatcctgaagtgagtcgccctgggcactcgaacaattttcagaacagctcattgcctcatcttctttatgtggtgttcttttagtggcaattttatgtttagaaactttaccaagttcctctattggaagtttgtttctctgtgcattagtcttaatattattcatctactgtgttacttaatgtgattgcagaaaatgattgtggcatttcatttgaagccaagtt

SEQ ID NO: 141956 - DNA, 1326 bp, Homo Sapiens
ttttttcagttctcagtcctctttttatttgaattctcagcaatattcacagaatcatcactctccttgaaatactttcttcctacttcactggcctcagtctcctttgctagattactctgcccctttccatcctctaaagttgggagaactccaggatttggtccttggtacactttgaatatattccctccctaagcagctcatccggttctgtggatttatatacacacggtacacagtgaaaggctggtatacatttcagagtcaatggcatacataacgctgactacagctttactttgaaaaacaaaactaagtatcttaacattttattttacattatatttaataaaaattatacttacaactacccagtaactcctagaacaaggacaaactcaaattttgttttggtgacagttttctgacaagattaatagagcacaatggacaggtcccccatttgactttcaaggaacaatcataaaacagggtaatctttactgcatcaaattcccaaaactacgcctttgaagtaagttgacataatacttgttgtttcttctcaaatttttaatggttctccacggtatgctaggtccttattttctcattggctgtaatttgacaagttctccaaaagcactatcatgaacttaattagataatactttccagctgtacttaaatcagaaggatcgtaggcctgataagcaggtcaacctgaagctaccaggcagctctggaggctcccgtggccatagctaacagtgcacaggagggcccctggcccaggatgagccctcagaaccttttagagagagtgaaattcagggtctactgggtgtccaagctgcagagtggagcgtgagaggtcagctgccatgtgatagaaagagctgacataagagaaaagacccccacacagtgaaaagctggaagagaaacaaaactcacaacctgacagcagagttcctggttccaactgttgagacctgtctctacctccaatggtcacagtatatagttacccaggcctggaaatctccctcttttcctaattagtttaactggtgttcctgttgtttgcaaacagcaactgcatcttcagacagcactgagcaagtaaaaggtgtgggacggtcctgaaaggagatgatgggaaggcagagctggctggcagcaatgtctctctggccagaaggtcaggggcggcctcatctgagtagcaaacacctttatatttttgaaattacttgtcctacttcctggtactacttaaaccattctgttgattaagctgggtaatttagtatcaatgcc

SEQ ID NO: 141957 - DNA, 505 bp, Homo Sapiens
ttttaacatcatttattgctaacatgaattcaaagcaagtatacagtttattgatactagaacaaatcaggacatcaagacatgattgccatcctaaaatcttaatcttcagagaacaacatttccaccaggttggcctgaagacactcagattctaccagtttttgaggtgttccatacttaagtagtgtaggcactgctgttactttcaagttttttctgaagtcattatttggatctttccaataaggcttttctcctacttggcagtagatgaacacacatccttcactaatgtgcttcagcccctctcgtacgactggttcagctgcagctaactgaagaggtcaacagaagtcaggtgttcccttctggtcttagagccacgttaagggtaaggaccaaatcccagtcccgatttgcccctgcaccaccgcgcccgtaacaatggaaagcacatgtatttgctgaccaactcacgtatcctgtaagacactaatggtac

SEQ ID NO: 141958 - DNA, 1035 bp, Homo Sapiens
  misc_feature (463)..(464): n is a, c, g, or t
agggggaacaaagtgggtttagattgccgctggggggaattcaagggttccatacaatccccgttttgggaatgggttttccaagtgtgggcgcaaaaaggctttaaatgaaatttgcaacccggtttcttccactgaagatgcgccagagggcgggggggtaaattttgaatattcgaaggctccgctgtggaactccctgttgggaaagattcccggtaaagggccttccagaacccccattttgggatttttttcaaaaacgcttcgggtttgccgcccgggggcggtttttttatttggggggaggaaattccaaagccactagttcatggcccaggaatctccctagggaaaacaggttatggcccatggttcaccttaccctactggggccccggggcgcccaaacgaaaggtttttaggaaagctttttggaggggccgaggcggccgaacatggnnatgtggtcgtgtggggttgggtgagggtgtttaacatcatttattgctaacatgaattcaaagcaagtatacagtttattgatactagaacaaatcaggacatcaagacatgattgccatcctaaaatcttaatcttcagagaacaacatttccaccaggttggcctgaagacactcagattctaccagtttttgaggtgttccatacttaagtagtgtaggcactgctgttactttcaagttttttctgaagtcattatttggatctttccaataaggcttttctcctacttggcagtagatgaacacacatccttcactaatgtgcttcagcccctctcgtacgactggttcagcctgcacgcagtcggggcaccagcttttccccccggcgtccttagaacccgtaaagtaggcgaaaatggtcttgccattgtgctgttccacggcccggtggaactcctcgaagccggacacgctcacctcctcatagcgggccattggcacgacgtgcagccgctactggaggagtgcacgtccggtcgccgcggttgggtcccgcgtaggcccc

SEQ ID NO: 141959 - DNA, 668 bp, Homo Sapiens
tgtttttgggaggggatgaatttaattagtgagttgttctggcctatttgagggtttcctgagttcaaatcaattccatttatgagaagtcccgggggatccccaagaaatttggttggtactggggaggtgcctcatgaagatagaaaaaggatgtccagattgattgctgatttcaatcccaggggcacagctacacttctggctgaccacagcttaacgatgagcccgattatatctcaataagggaagttacagccaatttctctttgaacacaagtccattgcagcatcttcagaggcagggccagcctctatttttcagtcatggtgacatctgtggtccttgcatttttaagagtggcctgctacttgtaaggtccagggggcaggtcctccactttctgcaagctggtccttgaggcattacttctgaaacagtcaagaaatgtcatgggactgtgggtctgagaaccgactgatgagttatttttgtctgtcagtgaggacagacaagagcacagggctggaaacccaacccaactggcctggtggttggttcacataactaggaagttcagagcaagggcgggcatcaggctctgcttggtgcagggactccattataacccacctgctccttgctctctgtttctctctctcttttt

SEQ ID NO: 141960 - DNA, 451 bp, Homo Sapiens
  misc_feature (67)..(67): n is a, c, g, or t
  misc_feature (408)..(408): n is a, c, g, or t
caatagcatctttttctctagaagaatactgccagtctgctcgttcagacagatgtaaagtccaacngcttccgctttcatcacacatcagtgtgtaagttggatcaggtggcaaaaacgctaattttgaagcaatcttctctggacaaggtggacagcagaagaggcaccatagctcactaaatgaaagattattcatgctctgcacctgagcggccgggccgaagcgccgggcagaaggggtcgagagagaaccgcagccgacgcgctgtcctccacaaggcgagatccgcgctccgggcgccgtccgactctctccgcctgcagactggcccgacagaggagcggggacacaggctacatgcccccggcgccggggcgaagaaggatcgcggcccccaggggacncactcacgctcccgagtctcgcctcgcgccggccctgctcctc

SEQ ID NO: 141961 - DNA, 575 bp, Homo Sapiens
ttttttttaatgatttagagtttaatgtaaattttgtattttatacacaccaatacaaacaagtaattacaaacagatcaatcactttcctctcagtagttatgctgtgcaactttgtaatcatatttaattaattttttttcactaaggtaaaatgttcattaacctaattagcagctattttctagaagctaattaataaaggtaagtgtcagtgatggtattattgaagttgtaaaaaattagtaaaactagtttctctagaattaaggaaatatttctatattttttagtattagaatgtcataaaagtaagtctccttattttaatgacttcgatatttcttctctttattgtaaaggtcttctttaaatctttatcttctaaataaacataaaaaattaagtccaatcaaatacagtttcaattagtttaaatcccttaggtttttgctaataatgaagagttaatagttattattctttgtgtatcccacttacttaaatttttataagtatcccaataggtcaggatttggttaggggactaggatatatatacattttaactatca

SEQ ID NO: 141962 - DNA, 506 bp, Homo Sapiens
atcatttacagtatttaatgaggattcattgagttcctgccatgccccaagcacagcgctagatacattttctgtttctcctttaatcttgtgaagcagttcctgaaagaggaaaagtaagttagtcacaactgcagagtctggaatgctcattaaaatgtttaaactttttttcccccgaagatgggtcatggggagccctaggaaagttttcagtagggaggtaacatggtccagtcactcttgtggaagttggaaattgatcagaagagatatgaataaagtcaggagaccagttagagaattgttgcaatggcctagatagtggttcttaaactttaatgtgcctctgagtcaccttaaggacttattaataacacaggttgctgggctccacccccagagttattgactcagaaggtcatgagtgggatccaagaattgggacttctagcaagctcccagatattgttggtgatgctggtccaggaaccactctttggctg

SEQ ID NO: 141963 - DNA, 361 bp, Homo Sapiens
  misc_feature (343)..(343): n is a, c, g, or t
tttaagtcacagtttcatctttatttagcaggtcattgtttctgaattctacaacaaaggccagaaggagagaacattttctgcactttaaagtccttctgcctgtgggtgtggtggtaccaggtaaaaagtttgtcctgatgccttcaaggacacattctcaagatgaaggtgagatttgttcagttaatctctccttgaatttatactctgaaatattgacagtattccctgtgttgacagatcagtctgggcaggtggggatataaaacattcttttgggggatggtgctgggtcctcagatatcagtgagtgagaaaagtccactgtttatgttccatnctggatgctccatcagct

SEQ ID NO: 141964 - DNA, 380 bp, Homo Sapiens
tggaaactttttaaaaagactgcccttaccgcgtgagagtgcgtggctttttctccaccaggggttaattaggtgcttgaacttcctcagaaaagccaagccagggtttattttcatagttcatacaagtacttcacgtggttaaagaagcccatcccggctgtgagaatagcgtgcagtagctcgcgcgttaagaacgggcagaacgccactcaaaagcacgtcgggatggtgggtttcggattggggaccctccgatatgttccagaggaatccaaagacaaagttatctcagatgaagatgtcctaggaacattactgaaagttttccaggctctattcttaaatgatttcaataaacaatcagaaatcttgaaaaa

SEQ ID NO: 141965 - DNA, 1378 bp, Homo Sapiens
ttgagtcacatgattttggagtttatttttcagagaaggtcattaactcagcctaacttatataccaaaggcacagtgacgtcacacaacctctccagagtcatgaggctagtgagtggcaaatcattaaagcctagaatctgtctcctacctaacatattccaacctgaataaaggcaaagagtgtgtgacagaagtgggaagacgggggaccatggggtcaagggctccatgactgctcaagaccacaaaatagctgcccatggcatttcagacacagtgatgcctgggtggtctgcaggctgccctgatacccgctgccagactctcagtcaccaacctgcgcatgtgctttgggagaggcctttcttcactgtccacagttcctgtccatgttccagtagatagatcagctctggtttgggaacaggatgccccagtgagaccaggagcctgcatgtttctagcatcacctcctggtacagggtcctttggtccaggttcaggtgcccgcattcctctgcagtgatggtgacaaccacgtcttcaaatgatactaatgccaacgccggcgccgccatgggcccagggggctgggtgaggccgtgagagtcggcgaggaagccggtcctgcgggctcggccgaccccgggctccggctatgggctgcgagggacctcagtccccgccgtcgtgtaaaatgcacacaaggttcgcggcgccgcctctgcgcgccgtgaggacacagggctgtcgccaaggccccaggaagggttttgcagacgcttgtgggggtgggatcgcggctgacataaaagcgtgtaagtgggtcctatcctcctcactgtccgtctctactcggtctcgaaaattggcccctgtctggcgttctacccagtgtagcgttggcaaccacagcagccgcaacctaacggcggacgaagactggacgccggaagtcccgcccacgccgctacgggaacgcccctctgcgccttccgtctatggcttggggtcggcttccgtcccttgtagcactgccttctgggtaatgtagtttgacggaatccgggtggtacctggagcgcactttctgttctcggtgaggcggcttctcaaggctcccaagaaagggattggcttcacctcttcttaaaggagaggcacacagagttccgtggaaattatctgaggcaatgacccactctcaaatgtctctaccaggcaactcacgccttgactttcctccctgtgtatccctgcgccagcagttcatctctctgagccttgagatggagattcctaaggaaaatgaagataattatttaatatgataatattcaaatttcccctatcagtaattttcagatgacaaaaa

SEQ ID NO: 141966 - DNA, 416 bp, Homo Sapiens
tttgttgtaaaaagttatcacattttattatgcacaaatataatttttcacatagttatacatatgtggtgggtaaaaagagaacaagacagacgttaaaagaggaaatgattgactatatagatatggttctgacaatagtattcatttcctctgctaagaaattgatgttaatcctgaaataatgtctttagaaaattatacttgtcagatctaaattttctttgtgcccaacattgtttttttctaaatgacctgcattacactgccatattctttgcttgcttcagggctaggcttactaaatcttagccttggcctttactcagtagtcaaggaaatggctatgcaatctggaagctcagtctctctaacctgtgtttgacatgctggcttgtctgacagctgcatgtctc

SEQ ID NO: 141967 - DNA, 495 bp, Homo Sapiens
agccccatatttgccccttgagatttgcataaaatacacagtgggtgcccagccccatatttgcccctgcgttcctaggtgaaggctcttcccatcccaagagtcagcttcttcttcttcgactttacttacacactcgaaaaatctcagggctggaggcaccgcggagatacatgctccgcgtccggtagttttacgggagggtaaaccaaggcatagctctccgtcggcgcgcctgagcctccggatgccgggggaccgcggagccgcgggcggcctgagggtacgcctcatggtcctgccagacccctgatgcccgaagcccgaccagacgctcagcctcggccaggactgagcggcgcctcctgggtcggtcgcctggggaagcgccccgggtcccctcccccggccgcccaagttcgcccgcagcctctgcgcaccggccgcttacctcacagggcgctcgcccaccgcgagagtccgggccgcggccgc

SEQ ID NO: 141968 - DNA, 484 bp, Homo Sapiens
catatttgtatataatttattcaatcctacatttcttcggatataatcaattgactcttcaccaagagtaatgacaaaaccactttctcccaaatcctctctcttctctcctccattcaatttgggctggttattgctattattagttctactgctttactgttccgtagggacactgtgagtgtttgtatgagaaaaatcgtctttgtccaagacagtcaagcattttacagtttgctcattatctttggtccccacacaccaaatgacatcaacactctcaagctccaagaccaccaaagaagcagatgctacctctggccaacagcctctctctagagggttcttgtataacttcacacttatttgtatccctaatagctgggctacagactttaaacgtatcttttcttggccttcaactacaaaaaaatgagaaaatcaagatacttaacgcattcttaccttcattgggttttacagt

SEQ ID NO: 141969 - DNA, 510 bp, Homo Sapiens
ttttggttctgctattttctaatgaagacattactcacacttaaatatccagtacttcagttacaaattcaaacagtaaagtgcacccatttatagacatgatgtgatagaaacccattagtgcaagaatcctgggccaatggaacatacaacttggtgagaaacctattaaactgaagtttgtcacctctgtcctccatttcagggtggtatgaattgagtaagtttcatctgaaacattttctcccacctgaagccagacatggactcagcgagtgtttgctgctggggaaggggcagctctgaaatacagtaactcggatcattccattgcagtgaagtagcaaacagggcacagggcacaggcagtcttgttgtaaggaaaaacgtctcctgccccaacaagctctggttggcatattctagtcaaaaacaactggcatgcagcagtgatacctactccctcttatgatggccaaaaagaatggcattttgactgttgacatttta

SEQ ID NO: 141970 - DNA, 543 bp, Homo Sapiens
ttttttttcagaagtcatcttgtatacgccagttccttctcttcacagttttgtttctcatttgaacatccaaagacagttttgcgagctgtgtgcagtcaccacaggccagtgaggtcactgtcattgtgacaataggtagttttcagaggcacagaccttgtgctgggtgatggaatctaagacccatttctcagacagatacttgactgtggctttcttctttccgctgtagggcccgatgacgatgctggcctggcgggggacttggctgacccggcctccgcacaggtggactagttcacagagcttggccactggggggctgctggcaggcgagacaaacatcactggctggtcggcaaagagggttccgcggtacggccctgcagacaagtggcactcacttcggcacaggggagctgcagggaagtggtgagacagttcgaacggctcctcagaaatccagtgacccaattctaaagaccatagcacccaatcataagagagaacccagcagccacgcgcaattcccagcagcac

SEQ ID NO: 141971 - DNA, 555 bp, Homo Sapiens
tctaagaatttgtctctttgtattgagctcaattatgttttacaattaactccctctaaaatgcataagcttatagggctggctactatatgccaggttttatgaattaactcttgatgaaaatacaaaaattgatctaaaatattgaatgtgtagaacctttatggggaaatgattctttgctcttttgtctgtactggatttttcaaaatctttattggtaaaaagaaagaatgtatttctaagaattgttgcaaccatacagggcagccatggagctgactctacattttgttttaaaaatgttgttttatacctgcactatttatttaggagggtcctcttggtagctctttaacccatttattaagattagaagaggttccaccagcaaacaaaagacaactaatctgagtctgtttgaaagcagactgaagcacccactttcacaagacaggccagggctggattccatcctagatggccaagagaaccctctctaaacaataggggtttaaaatgtttttgaagtagcaaggcggtctccactcagga

SEQ ID NO: 141972 - DNA, 517 bp, Homo Sapiens
ttttttcatggctaaagattttattccaagcaagccaggctggtcacgacccaggatctcaggcatcaggctctgctctgaactaaaagtctcatgctctgaactcaaagtagcagtctctctttttccgctcctgtggagagaccctcttccctgatgggaaggtctggtaggtcttcaggttctcgggggctagtcttaaaaggtgccacttcttctttgggcacagaggaggcaggacggtggggagggggtaccgttccggctccctcacgggcatcgcaaagtaggggactcgaggcactgtgcccgtcttgtcttgatagtacttccgatgctgctggaccatctggtagaaattcgtaagctctgtggagcgatggctgtccaggttgaagcgagtgtagctgggcttgtgcagccagcggtcccgggtgctggcgcgctccatcagcaggaggttggggttggtggagaagatggtggggaaatggccgccttggctgaagggagtgtg

SEQ ID NO: 141973 - DNA, 545 bp, Homo Sapiens
  misc_feature (191)..(291): n is a, c, g, or t
agcaactccacaaattatggtcccatttgttgaaatggagaaagcaaatttaggagccagggaacaggtgagtaagtagagctatcagtatagagtcagtcacctattttacaatcaagctttcctcggtaccactaaatgttttctgtgacttcattccattaagaatagccaaggggccaggaatggtnnnnnnnnnnnnnnnnnnnnnnnnnnnnnnnnnnnnnnnnnnnnnnnnnnnnnnnnnnnnnnnnnnnnnnnnnnnnnnnnnnnnnnnnnnnnnnnnnnnnntttaaattggttgggtgtggtggcacacacctgttaatcctaggttttcaggaagctgaagcaggaggatcacttaggcccaggagttcaagtctgtagtgagctgtagtcatgccactgtgctcctgtgggcaacagggtttaaccctgtctcaaaaaacgggggaaaaaaagactaaccaagcttttactttaatgtcagttgttaacttggtccaaactggtcaatggtaatcttgtttatatattttaac

SEQ ID NO: 141974 - DNA, 467 bp, Homo Sapiens
ttttttaactttaaataaaactgtttatttatgggacacattagaaaagaaaggatcgaaaacgccacaaaaacaacgggatgcattttaaatcggtatgcagaggcatctaaaggattatacaaatctaaaattgcctaaaagattctttacaaaacgcaaatgaaaggctcatgcagcacatgaacctggattgctccttctctgtctcttctttgcctcgatgctttgagtacagtaacccttttgctcagttaccttttctccttgaggctaatgaaaaaggggaagttggacaaatgccttacaaagtgagactctctagtcaaccagcctgcctgctgtaaccacttttactccatggtctaaagctgagcttagagccatcataaagacttaactaatccaagagaaaatactcaaaaacgtactggaaaattgagaatcctcataagagcttatgattc

SEQ ID NO: 141975 - DNA, 406 bp, Homo Sapiens
caacatttattttttggagacagataggcgtgttcttggttattcaacaactccacgatcaatgtggtactttatttaatacgtctgatttcactaatgcacaaacaaccttgcctgagtctggtatgatcattctcatcttataaatggagaagctgagactgggagtttccaagacaccccagctcacagtcactggcaagggccgtccccaaatctgagccttccgcgcagcccaggctgctcccagctgcaccatgttccgggtgcaacgagagaagggtcagaagtgagcgggcagaggacgccctcccctgctggctgctggtggcactaggggctcctggcaacgacgcctgtcagggacgcctttccagacgcatcaaacccagctttcagacgctga

SEQ ID NO: 141976 - DNA, 510 bp, Homo Sapiens
  misc_feature (198)..(198): n is a, c, g, or t
tttgcactctgcagatttgctttattttaattttcaacacctagaacaaggcctgtctaaattaaacaactaaataacaacaataatttgccacctactgttaatattcagtcccaaaccaatggttgatttttgcgatactaagataaaggaccaggttgacaataaggtattcttcggtctctctgatccacaccnagctccaccgtgcacctctttcctttccgtatacaacgtagatccaccgtttgtattgttttgtccccaagaagctagagctgtcagagggtgtggcaggcgatctcaggcacaccggggaactgaaacaccaaaagggtttcccatgttcatccaaaagagttacgtccatcatggaacaactctttatacagccatcaaaaatatcagttttccacgagaggccaacttttccaataagaggtaggtgttctctgttatttcttaaatgtataacaatgagcttcacatgtccattttcaatatttcctg

SEQ ID NO: 141977 - DNA, 469 bp, Homo Sapiens
  misc_feature (211)..(211): n is a, c, g, or t
tttccttttttgtttgcagatatttaggggttcagaaatagagttgataaaagagctctgaggttgtaagggtgaaagatctgccaaattctgaaaaatttttgatttctggggctctgagagctgaaaaagaggcagggttctgccttggttcctgaacacagaggattgctttttgtgggaaataggtaaactatggctccggaattcncaagttgttccttcagaaaagacaggaagatgagacagactggagtcattgcatgatgaactaaaggagatgctgtggtcagtagaatgttttgctttcttatagtcacaacagcatagaacagtcttctgagccacaagaacagaggtggtagaggaagaaatcatatcctgtgattcaggcaaatcctgttccacaagccttgatctaagaaataaagagaaatgtttcagtttgcattgaaataggaaaacgaaa

SEQ ID NO: 141978 - DNA, 638 bp, Homo Sapiens
ttttttttacacaaagatacacacacatatatatttgtcttccaaccctcttggcttcacagcttggcccgtgcaggctttctttgcctttaagaagatgaaattgttaccaaagcaggagaagaatgtcagacactctgcatgcttgccagagagctcgctagaggacgtgcagaaggtcaaagtcctccatcaccagagcaagttcagccaccaggccccttaagcacagtgccaagagccttactgggccttcaggaagttcaggcttttgtggcaggaggactacacgtccagtgtcaacagccggggaatatctgggtgtcccctcagctggtcccggggaaggctggcaggggtctttttttctattgcgtaactggaggaggccacctcggtcttccagacagcctccatctgcttcccctgttggcgggccatctgcaggggcacacatgcccggtgcctagacagaaagggctgcttgtaggtggggccactggggcggatgtgccggggtgaggctgcaggcaacttgcatttctttggctttggcgaggtgacctcagggatgttcaggtgaacgttccactccagctggagcttggggaacagggtcaccatgctgctcaggcact

SEQ ID NO: 141979 - DNA, 414 bp, Homo Sapiens
tttttcaagttttataaatgtaatgagactattttgaatattaaatttgacagtgaatgaaactgacaatattatgttttataaagatttcatactattcatacattctttgtttttatattttggcacccatattttcaaaggtttcatgttttcacaggctcttggcactgtgcttaaggggcctggtggctgaacttgctctggtgatggaggactttgaccttctgcacgtcctctagcgagctctctggcaagcatgcagagtgtctgacattcttctcctgctttggtaacaatttcatcttcttaaaggcaaagaaagcctgcacgggccaagctagggggttgatatctcagagggtttcaatctgtgcatgagaatcttcctttgcagatagtttcttttccctc

SEQ ID NO: 141980 - DNA, 835 bp, Homo Sapiens
actgccccatctccttccatcatgtgcctatcgtgactctccttagtggtacctcagttataggcttcatttgcacccttaacaatggcctaacaactgcaaacaaaatgaaataccttatatgcttggccttttttccaaaaaaatttggaattgcctacaaaaggattaatgataaagctaacgaaccagaaagaggaatcagagccatgaagtgagtaacgtgtcaactctgtgggctcgtatcatggctctgttagagcagcaaattttgttctgaactcttggcaagtgagagagaagagataaattcaataatacccagatgtcatcacccaaaataagcaggcttaggaatttgcaaaagagtcaaagcttttccttaactaaattcctgaatgacatttctcatcttggacactacatttgagacttcgatgataaacgaagttcttgccaagatttttctataataaattcaggacagtttttcatgtggatattcttggtaagactcttcagtaaaagctgaagccataatggcaaagggcttttcaacgagaggattctagattcaggtgtactgcattttcatagaaatgggcttttagtgacagtgcatatatccacctgttatttccctctgatagagagacctttttctgactttttcaatcaaatttgttcttattttccataatgaacaaggttagcttcaacatgactctaccagcctagacatataggcctagactttaaccagttaacccaaacattgtgctaccaaagtcctgtttagataacttagtaagcctctacccgcccgccaccccat

SEQ ID NO: 141981 - DNA, 885 bp, Homo Sapiens
atacacgatagaagttttaaagggtggtgtattctacctgtatatccaactgagtacctcttcttaaatggccctcatggaagcatgaacatttaacacaattaataatattaagtaccatgccacattaatttcattaacacatattaatgtgaatgaatagatcattttatttaaaaatgaacaaagatttggccctactgaaaattatctgaacagaatgctgcttctgtatttaaatagcctgttttaattcagcgcgttgttttcctttgtggaatttatcaatctgtatcattttatcaaagaacaaagctcttagtgagacaagagaaagtatcaataggaagaaaaacatactgcaaaaagacaaaggcacagaccatgctgaagatacagaagaaatgcacacaagatgaccccaaacaaaattttatctaaatttgctgccattgtgaagacaaaaccatgtccgatgttcacggcctgaaatatgctcaattgcagaatatcagacaattgctatggcagagaccactaggtgattacccagtattgattctctacttctcccttaacagaactccaattctcttggcagcaatcctgttctgaccctaaagagaaattgcgcttctactctttcagatatgggagaacacatgatattttgtccaacgaaaatataagagaaagttgttgagcaaaatttccaaaatgggtagcaatcttacatgaaatgtgccttttgcttcttgctcttctctttctctagcgagagcatcgaaactggcaggcactctagccaccatttataagcacaaaaatgaaggtcacatgtaaggacagtagaaaaagagttctttgcagccacagaagcctctc

SEQ ID NO: 141982 - DNA, 563 bp, Homo Sapiens
gaagccctaaattttaagggagtagagagacaactggaagacctggattcgtgatagcttagtcgacatgtgaatagcgcaataatgattttcgagatcattggtgttactagtgaaaggtttaggacttttaaaataatttgactaaaaggctctttagtggaaaaaacgactcgccagtgttatggttatttttatgaggaaattatcgatcagcaaatattccctaagtagtgtttgtatacattgccctgggtaaggcataattagaattagtaagcaagtttggcgattcctgttccccgagaacttagttttagtgggtttttaacctgaggtctgtggatctggtggtaggtgattgggcttcagagttcataactcgcctgacattgtatacataattctatgtgcatttttctgggaagttagttttcctacaactttataatcagaatctcatacttgctcctaattccctatattgttaaagagccactggctcatttgactatctccagtcttcatgcaacaactcttaagtacttgacattgagaaaaaa

SEQ ID NO: 141983 - DNA, 541 bp, Homo Sapiens
tttttgaaacaaacggagacgtttaattacatgaacgcacacatgttaaaaaccgcctgtgcactcccggagggcagagcctgcctctctggttatttttgtgtcctccattcacttacaggctgtgacaaaccctgtgcccacgctgcctccactgccgggagactcagggctgggggagacatgccctggtcaccactgcggagactcagggctgggggagacatgccctggccaccagtggtgagccagcgagacaggaccccacgcgcgctgacccggggacgccatggaactcactcgcgattcctgcacgcgcgctgacccggggacgccatggaactcactcgcgattcctgctcacagcacgtttcctgctcgaaaaccaggagagcctccacgtgccgactagctctgtccacacatccattgcgcagctctgcagcggaaggaccttcagtaaagacgctggtttgtaacgagagaagcgttccaaagtgtcacacgacattgtttattactaaaaggagcagaatttctt

SEQ ID NO: 141984 - DNA, 505 bp, Homo Sapiens
atgaaaacctttatattgctttcctagctctttatcttggggggtattttgatgaagtgaccatacccggtatccttaattttggcaaataagctgtatattgctctgttgttgtttatttaaagaaacatagtgttaagcagccttcaagagacataagtgatgggtcagtgttttgtctactctactttattgagacataacgtaccctcagactgcagagtttctatcctattgtgtcttctactggttcttgatgtagtataactggttccatttctttttcttggcataaattctgtatagatttaaaatattgtagaaggaaagagtatttcctcaagaaaccttttgctctaaattaaagaactcctcttcctttagtagcagctatttaattaggtaattagaacaatctcattacatggccaccaagtctttataaacaggagcttgtttaacgcaagtatcaaagcacttttaaattctgtatttctttttatgt

SEQ ID NO: 141985 - DNA, 779 bp, Homo Sapiens
tacccagatgcagagactacaaaatttattccccagaggacattgtacacagtggtcacaatggtgacaaatgttgactttcttcccaaagaatctagtctatgatggttgcgccatctgtgcactctaagaaatgggactctgaactggagctgctaagctaaagaaactgcttacagtttattttctgtgtaaaatgagtaggatgtctcttggaaatgttaagaaagaagaccctttgttgaaaaatgttgctctgggagacttactgcattgccgacagcacagatgtgaaggacatgagactaagagaaaccttgcaaactctataaagaaacttttgaaaaagtgtacatgaagaatgtagccctctccaaatcaaggatcttttggacctggctaatggagtgtttgaaaactgacatcagatttcttaatgtctgtcagaagacactaattccttaaatgaactactgctattttttttaaatcaaaaacttttcatttcagattttaaaaagggtaacttgtttttattgcatttgctgttgtttctataaatgactattgtaatgccaatatgacacagcttgtgaatgtttagtgtgctgctgttctgtgtacataaagtcatcaaagtggggtacagtaaagaggcttccaagcattactttaacctccctcaacaaggtatacctcagttccacggttgctaaattataaaattgaaaacactaccaaaatttgaataataaatcgatccatgttttgtaacaaaa

SEQ ID NO: 141986 - DNA, 555 bp, Homo Sapiens
  misc_feature (379)..(401): n is a, c, g, or t
gggggtgagggataaaatgctacatacacactgggtacagtgtacgctgcttggacgatgggtgcatcaaaaagtcagaaatcaccactaaagaacttattcctataacgaagcaccacctgtttcccaaaaacctactgaaataaaaaataatttacaacattcaaaatggcaacagcgtaaaatcatgtactgtaaggaaacttaacacgtgaatatttgaattcaaattaacaaattggagagcttcctctgtataaaactttgtcagtgggacataattttgatcactgcaaataattttaagtttcaaattaggtatttttatggactaaatacacacatatgtgtattgtaatgttacaaactagaaagtatnnnnnnnnnnnnnnnnnnnnnnngacgttttctaattcacaaatggagaacatgtaattttaaatcccaaccctacaatcacttaaaagtttacataaaattcagagttcaatttttttgataaagttcagatttctttctttttaaaattgtatcctatcacatcattccatccag

SEQ ID NO: 141987 - DNA, 455 bp, Homo Sapiens
aacaccgttacatcgaaagttttaatccgtgacagaggaaatattgcttacgcccttaggtaatttcaaatgcacgtatgaaggccgtgcgggtttctgcaggcgaacaaaagaaaggtggggccggcaggttcgtggggcgggggtggggcatgacaccgtatcccagacgcaactcgacctcgtttgcaagaaattctgtatccaactctcttcagtgcgtttcgccgcccctagtctagtctggctagcccccaattcctttaaaaggggttaaaacgggtgttgcagaagagagaacactcaggtagaaagggcctgcggcagaggcgcccccaaatcatggaacctgttggaagagtgaggaaggaactctgggaccccgaacattctcacgggtgtaaaaagacaaagtaaatccccattagccaagttggggagaagtcacatccgtt

SEQ ID NO: 141988 - DNA, 725 bp, Homo Sapiens
  misc_feature (33)..(33): n is a, c, g, or t
  misc_feature (52)..(52): n is a, c, g, or t
  misc_feature (117)..(117): n is a, c, g, or t
  misc_feature (216)..(258): n is a, c, g, or t
atttgggagcacatcctgtctacaaattagganctgcctgtgttatctgttntatggttatattctagaagaagaaagggattttgtagcacctggttttgacctttctgcactgtntgttgagcaaataaaccttatgggctgttagccctctttatagcctctcagcttatccctggctcagacaccctgctgtcattttgacttttcattccnnnnnnnnnnnnnnnnnnnnnnnnnnnnnnnnnnnnnnnnnnnaccatttaagattagacagaagtaatgctcaaaatggagtggcttctgagacatttagtccaagggttcccaaacaggcttttcagtatcagatttctttctgccccattgaaatgctacacaaccttccgcttacagcaggtcacaagggtttcattctacttgaagtaggggccatgtcccatttccacttccttggcttcccattcagtcactgctaggatttgcctagacccctgaggccagacaatgtagaaacttctgctccatgtcacaggtgaggaaacaggctcagagagggacaggctccgaaagtcacatagacaacagtagggctgcggctcaaaccccagcgtctgactccaggtttagtgccttctcagggcatcagtgacactcctcatggccagggtgcccccagtgttgctcacagtctggtatccagggctgagagtgtgctgtgtgct

SEQ ID NO: 141989 - DNA, 521 bp, Homo Sapiens
tttgaaaatgtgtagagcttttattgtaaagtattgctctgtcctaagccagcaattataaagcttttctgccataggatataatccacagtggatggagcagcacaaggtgattttcaactgctatctgatactgcccgagacattcgttcttttatttgtggttactggcaccaaattcccactagtaccattggtggtgttggctgctgagccattcacaacaatatagtcaactttgttctccagcttcaccaatcgttgcaaaatgtcatccagaaggacagcaattgttcttttcagatccgcatatcctgccatagaagcaccgttctcgacatccactgtgttcttattttcctctgctagagctttaacatatcttttgcttaagtctagtatttgctcacgtaacttgacactgctttgatgtcttggttgttgaaaagtatagtgcagtaacatcaatccccaaatgagtccaaatacaagcaacagtaaactcaatttctgggacatat

SEQ ID NO: 141990 - DNA, 734 bp, Homo Sapiens
  misc_feature (256)..(311): n is a, c, g, or t
cagaggctttgggcagctgctctgtccatgcccgcaggccttcgtaagtctggctgggcgagaagtggccgaaggagccatcccagggagagagctgggcggctggaagctgggcgtggagggcgacggggccgagcaggggctgccatagtagtcagagccactggaggacagggcctcatccactgggccgctcagggggccggggtagcagccgtacacctggaagtcctcgaacttgaaggaggcagaggcnnnnnnnnnnnnnnnnnnnnnnnnnnnnnnnnnnnnnnnnnnnnnnnnnnnnnnnnatggctggactgttcctggcagctggtagaggaaggtgtcaaactctcctgtgtagccgtccatgaaggtgctgaagctgggcagggcagtgggggcagcgggggctgcctcggggctggccaggtccatggtgggcttgatgaactcaggggtcagggggtcgcttgccaggtggtcacggggtcccggactcggtgctggtgtcccatattgggcttggatacagggcatctcagcttcctcctcacgatctgctttgaccctggaaaaaggtcccagacaaccgcacgaagggagaatcccaagattggttgggggctcttcctggtggtctcagggagccctgtggggagagacgtgctgcccagccagcctatcctcacagccgaggctgggcagcagctgagcgagctctggatgtg

SEQ ID NO: 141991 - DNA, 1084 bp, Homo Sapiens
  misc_feature (370)..(415): n is a, c, g, or t
ccggaattcccgggattacgaaacttgggggagtgcacagaagaacttcgggagcgcacgcgggaccagggaccaggctgagactcggggcgccagtccgggcaggggcagcgggagccggccggagatgccctgtatccaagcccaatatgggacaccagcaccgagtccgggaccccgtgaccacctggcaagcgaccccctgacccctgagttcatcaagcccaccatggacctggccagccccgaggcagcccccgctgcccccactgccctgcccagcttcagcaccttcatggacggctacacaggagagtttgacaccttcctctaccagctgccaggaacagtccagccatgctcctcagcnnnnnnnnnnnnnnnnnnnnnnnnnnnnnnnnnnnnnnnnnnnnnngcctctgcctccttcaagttcgaggacttccaggtgtacggctgctaccccggccccctgagcggcccagtggatgaggccctgtcctccagtggctctgactactatggcagcccctgctcggccccgtcgccctccacgcccagcttccagccgccccagctctctccctgggatggctccttcggccacttctcgcccagccagacttacgaaggcctgcgggcatggacagagcagctgcccaaagcctctgggcccccacagcctccagccttcttttccttcagtcctcccaccggccccagccccagcctggcccagagccccctgaagttgttcccctcacaggccacccaccagctggggggagggagagagctattccatgcctacgggcttcccaggtttggcacccacttctccacccttgagggctcgcgggctactggatacacccgtgcacctcaaccaagggcccggagcggggccccaggctggacgctgccggccgctgctgctgctgtgctgggcgacaacgcttcactgccacgcctcatggctgtccgcccactgctgacgggctgccagggctcccttcacggcgcacagctgcccgcaccacgccaagtacatctgcctggctcccaggacctgccctgctggaca

SEQ ID NO: 141992 - DNA, 1358 bp, Homo Sapiens
  misc_feature (233)..(233): n is a, c, g, or t
cccagggtttttcccaggcccaggggtccaaaaagggccaggcggttccatgaaggattttgttcaaatgatggggttgaaggggggccccaaagtccttcccagtttgagggtagaagatgccgttgcaggcccctgggtgcaacagggtcccgcagctcggggcagtttgcccaaccaggcggggaccaggcagctggttggctgggggtcgcccgcccaacagttggcancgtgctctttcaggcagctggcgatgcggttgtgcagttcttccacccgccgcggctcctgcagcccatgccggtcggtgatgaggacaagggcagagaggcaggcgaaggcagggacatcgacaagcaagctgtgcagggaccttgagaaggccaggatactgtcaatccagtccccgaagccacgggcacactgcagccggtgtagcaccaggcctgagcagaagatgagcttgccctcgcctggcttagacctgtacgccaggcggaggatgaagagctccaggaaggccgactccagcaacaggtcctggtcagccggtgacagctcagcaaagccagggatcttctccgcccacttgcggatgacctccagagaaccggagagcaggtcgtagaactgctgtacatccccagcatcttccttcccaaagtggggcagcaccagctcctggaactaggaagacggtccagtggggtcagcaccccaggcaggctcctacacccactgccacgtatggctgtgtcagacacttggatgccagatcccgggagtgggagtggatctgagatcctgcccaggctctcacttgccaagtctcacatattaacccagggctgcagctgccaaaaggacatatttttctaattgggcacctgcctgagggggtgcattttcccaatctggtcagccgagagggggatcctctctttgatctgtcgaacgtggagggagtcgcttttctttctttcttttttaaacctcctttctcattcagtccttccagagggggtagctctcctaacacgcacaaaggcactgcatgtgctcatagacctcccctaggcagacacggggtgggacctcaccttggagtagtccagtttggcagtgctgggccctgagtccaggtgtgcacggaccagggaagtgaggagattggcaggggaggcatctgggggctgcttgggttttgaaggtagccggccccgccgccccttcaggctgtctgttcggacaactgcaaaggaatgggtaggggtgaggaaggaaaggatcctgagaagggcctctcagcccaagccgtgcacaccactgctgagacgcgccccacccctcgtgcc

SEQ ID NO: 141993 - DNA, 2210 bp, Homo Sapiens
  misc_feature (190)..(190): n is a, c, g, or t
  misc_feature (213)..(641): n is a, c, g, or t
  misc_feature (659)..(682): n is a, c, g, or t
gtacggggttgacccccagtgacgagcctcccgatagtccccggggtttggaaccccgttccgagggaagcgacagaccgtaacgcaggtggacggggcgccgaggactccagggaaacctggttcttatatccgtcggttccccactctgaatgagctcgatttttgatctcgtcaggggcggagcttntgaaaaacccagccacgcggccnnnnnnnnnnnnnnnnnnnnnnnnnnnnnnnnnnnnnnnnnnnnnnnnnnnnnnnnnnnnnnnnnnnnnnnnnnnnnnnnnnnnnnnnnnnnnnnnnnnnnnnnnnnnnnnnnnnnnnnnnnnnnnnnnnnnnnnnnnnnnnnnnnnnnnnnnnnnnnnnnnnnnnnnnnnnnnnnnnnnnnnnnnnnnnnnnnnnnnnnnnnnnnnnnnnnnnnnnnnnnnnnnnnnnnnnnnnnnnnnnnnnnnnnnnnnnnnnnnnnnnnnnnnnnnnnnnnnnnnnnnnnnnnnnnnnnnnnnnnnnnnnnnnnnnnnnnnnnnnnnnnnnnnnnnnnnnnnnnnnnnnnnnnnnnnnnnnnnnnnnnnnnnnnnnnnnnnnnnnnnnnnnnnnnnnnnnnnnnnnnnnnnnnnnnnnnnnnnnnnnnnnnnnnnaagaattcggcacgaggnnnnnnnnnnnnnnnnnnnnnnnnccaactacatgtctattttttattcaatatattaaatatattaatcagaaaagtcacatactataaatccaggaaaatacacaaatataaatgtcagaatctgtcatttgtcttcttcctagagtgacagtttatgtacatgtggaaggagggtaggaagagagagccagcaggaggctggaaaggctgcccaggaaggcggggcccatcccttcctcccagccccgctcccacctcaagctctttcttcctgtatttacagcagcactgggcttatttacagcacggcgctatgtgttaaaaacggtttatcttacaaaaaacataaaggccggggccaggctgggggggataagacaaatcgtggggtcacccccatgaaggcatccccctccccaagggcttgagctccctgcaaacctcctggagcaggtgagaaggtggagtcattctgcagctcaagcccaggcttgggggtgctctgggggtccgtggactaaaggcacatggggtggcatatgagagtgcgcatgtgcacacgtgtttcccaggcaggggtcagaagggcagcgtgtccatgaagatcttgtcaatgatgggtggagggggcaccaagtcctccagcttgaggtagaagatgcgctgcaggccctgggtgcacagggtccgcagctcgggcagtttgcccaacagacgtgacaggcagctggctggctggggctcgcccgccacagctgccacgtgctccttcaggcagctggcgatgcggttctgcagctcctccacccgccgcggctcctgcagcccatgccggtcggtgatgaggacaagggcagagaggcaggcgaaggcagggacatcgacaagcaagctgtgcagggaccttgagaaggccaggatactgtcaatccagtccccgaagccacgggcacaactgcagccggtgtagcacacaggcctgagcagaagatgagcttgcacctcgcctggctttagacctgtacgcccagtcggaggatgaagagctccaaggaaggccgactccagcaacaggtcctggtcagccggtgacagctcagcaaagccagggatcttctccgcccacttgcggatgacctccagagaaccggagagcaggtcgtagaactgctgtacatccccagcatcttcccttccccaagtggggccagccaaccaggctccctgggaactttggagtagtccagtttggcagtgctgggccctgagtccaggtgtgcacggaccagggaagtgaggagattggcaggggaggcatctgggggctgcttgggttttgaaggtagccggccctacaacatcctctctgcccgcgcgtacacccatctccttcatgcaccgctcctaaaaacagatgcacgttccccgaagggaacctacccggccggctcccgctgcccctgcccggactggcgcccacgagtctccagcctggtcactggtcccgcgtgcgctcccgaagttcttctgtgcactcccccaagtttcg

SEQ ID NO: 141994 - DNA, 455 bp, Homo Sapiens
  misc_feature (129)..(180): n is a, c, g, or t
  misc_feature (364)..(364): n is a, c, g, or t
gccgagcaggggctgccatagtagtcagagccactggaggacagggcctcatccactgggccgctcagggggccggtgtagcagccgttcacctggaagtcctcgaacttgaaggaggcagaggcaggnnnnnnnnnnnnnnnnnnnnnnnnnnnnnnnnnnnnnnnnnnnnnnnnnnnncatggctggactgttcctggcagctggtagaggaaggtgtcaaactctcctgtgtagccgtccatgaaggtgctgaagctgggcagggcagtgggggcagcgggggctgcctcggggctggccaggtccatggtgggcttgatgaactcaggggtcagggggtcgcttgccaggtggtcacggngtcccggactcggtgctggtgtcccatattgggcttggatacagggcatctcactctggatggaccaacaggccttggccaaccacattat

SEQ ID NO: 141995 - DNA, 254 bp, Homo Sapiens
ttgtccgaacagacagcctgaaggggcggcggggccggctaccttcaaaacccaagcagcccccagatgcctcccctgccaatctcctcacttccctggtccgtgcacacctggactcagggcccagcactgccaaactggactactccaagttccaggagctggtgctgccccactttgggaaggaagatgctgggatgtacagcagttacgacctgctctccgttctctgagtatcgcagtgcgaagtctgt

SEQ ID NO: 141996 - DNA, 507 bp, Homo Sapiens
tttattgttgaattttctttactaatcattgcatccttaggtagggtcttaaaaactgacaatctttagttgatactggcccatgaaaagcagaagaaaaacaaacagctgtcctttgttacattgaccgtctcaatggcattcaatggcataaagtcttctgctcatgatttttgcagtacctcaatctgccaagattggctgaatgctctggccagagcttccaatactatgttgaataggagtggtgagagaggtcatcgttgtcttgtgctggttttcaaagggactgcttccagcttttgcctattcagtacgatactggctgagaaacgccatctccacctcaagtatggcagtaccttggtgttgtcctcaaactccagggtctgttgtttaccattgcaagactcaatagagccttttatataattctgagtgactaatttctttcagcctgtttagacaggattagattgaactgagaatctctcctaacataattac

SEQ ID NO: 141997 - DNA, 288 bp, Homo Sapiens
gctcaggtgatcctcccatcagcctcccaagtggcagaggaaaaacaaaggacactgggtgtgagggagaggtgcaaagtcaggaccaagcatccatgggaacacaggggaggatgaaggcactgaggttggggagagagagcagagctatcagtgttgaaggccggaaaggatgagggagtctgcaggctcggcccgatcaactggttccagcttctgtgacctgccacttgttttacagttgtctcttcacgtggtcatatctgtcttgagtctctgcactcccag

SEQ ID NO: 141998 - DNA, 449 bp, Homo Sapiens
agggtgtgggttcccaccagtgagggctgaagtcctgccgcccaccaggcccttgccgtggggggcccggctcccccacctcccgtggccagaccatcaccctctgccatctcatccaggccgcctcgaagcctgtgctggcccagcctctccactcaccctgccctgctcagctctgtctcctcctcagggccccaggtgtctcctcccatcctgggctgcctgggccccatcctgggatccacccacactcagccctggaagatgagggtcctggaaacctggggggcaggtgtggcggcgccaggactttaggccaggggccccgtgccacgtggtcctgtcgccttcacacctgctgtgcctccccctgagaagctgcaagtcctgcctttctgtttctgttgtagtgaaaccttccaccgtttccttctcggaccatgaagggc

SEQ ID NO: 141999 - DNA, 465 bp, Homo Sapiens
  misc_feature (359)..(359): n is a, c, g, or t
ttttgcttttgttgttgtttttaatttaaaaagacaaaattgttcgccttgtatagaagtagatacagcttagagagccaaggtaacaagaggggaaaagtttgtgttgtctggtacttttgagggagtcagaagcctaaagggaggctctaactcatgattctcagaagacaactgttgtcaacagttcaaatgagaactgaacggccacactcctgcagctgaaaggagtcaatgcgagctgagttgctctcaccgaacagagtgcgttccccggggaggcagggaaaggccggcttgcacctgctctgtcacccagctccactcttaggacagaagaggtctggaaaaatgtctgngggccattccctcatttcacggaggaggaaatgggttagtgtgtaattggttttatcatcacccttggtttatcttccaatctgccaggctcactcaatgctacat

SEQ ID NO: 142000 - DNA, 498 bp, Homo Sapiens
tgtgtattttcacaaggctttgtcgtttctcggagctttcactgatgaataaaatctaggtgatctcaactcaggggtaaaagtcatttttggctgctttctttgtgggtttttcttacatagagcatgaaagaaaaaactcaccgaatctatccaagtctaggattaaattatttctgtctttcgggctgaagatggatttgatgctgatgactaaagatagccagttgccccttgttacaggtgggtcctcacaaatttggccagtagaaagctgcagtggagacactgttaagactgcaagaatatcagttcctcatgtcacagtcagctgctctggtccatgcacctctgccaacttccagtggctaataagcttttggcccagtgatggaagcaatggtgccaatgacaaatataaacaaggtcctctgccaggagcaaaagctgaaatctttctggtaattgcagcctgacatgtgcatggccccaggatcg

SEQ ID NO: 142001 - DNA, 505 bp, Homo Sapiens
ttttttaagaattgtaaaaatataatgaacggttgggccagaattagtacaagcggaagtgactgaaaggaagtttggtgacgggagggtccctcgttgcggttactttggggagactgtgaatccttgagggagggtgtggcctggctccgcccagggttggcctctgacccgctgtgcagccccgggcgacccccagcgctcaggcctccgcgtcttcatctgatgtgtgtctgctccgtgagttctctgggcgttggagctgccgttgttactgatggctgcagcccgttgttgggtgcctatggttgccgagcgctgagcttgacccgggctgtgtgctgggatcacttcagagctgcataaagcccggtgtccagggccgcatcccagactgactaagccggggcattcgggagcagaacgggctgccaggaggcgcccagcacgtggtccaggtcagggccggtggctgctccactgcccatgccccccaagggtcgcc

SEQ ID NO: 142002 - DNA, 577 bp, Homo Sapiens
tatcagtttttaagtacagggttttatagtgtaatatatacagagtaagtgtttgtttttgtttttcaactgaggtcaaaatggattctgaatgattttgcatatgggatgaggaaatgcttggatccttaaggagtttacgaaatctgctgttttatcaaagtgaaaaaaaattgcttattactcttcattttacactaaagcttaatgtcactaagtttcatgtctgtacagattatttaaatcatggaaatgaaaaaaatgttctctgcttgctaccaaaggacaaactcttggaaatgaacactttctgctttccttcctccaaagaattaataggcaacagtgggagaaaaaaaaggcataatggcaaatccttcaagcagggataaaagtcgatcttcaaacattaacttaagcagaccaaaaattctgatgaccgcatctagattatttttttataaaaatgattttcactatagctatgttacgctaagctactgtccaatctcttgtgatgtgtaacttttacatgtgaatattaaagtagatttctctgtcttgtactgtgaaaaaa

SEQ ID NO: 142003 - DNA, 544 bp, Homo Sapiens
  misc_feature (16)..(16): n is a, c, g, or t
atcccacactcattanaaaagagtgtttttaaatgattgttttaatgtttgttttaattgtatataaacaaacaataaatgattattagcaggtttttattagacatctattttatctaggcattggaaagggtaatggggcttttactttttttcctggcgttgtgtcatctgagtccagccatgaagctggtgcctgagtgtccccaccaggaaccgtgaagggcaggtaccacaggaggcacaaggggtgagtgcagttgccttcccaactttgttctgctaagtccatattcagggccctgtccttgtgggcccaggacgccaggctccatccccgcatgtggacagcttccgacctggcgctggggcatgactggagaagtgcaggaatactgcttgcggaccttgctcaaagtacaacttcccaggactacttcacattgttaaataaaccaccagggtctgtggcttcattcttgaagtcagtgagaccaagagcccaccaattctggacacaatagggctgagtgcggtggctcag

SEQ ID NO: 142004 - DNA, 609 bp, Homo Sapiens
ttttttttgaaaataacagcaatttatggctaatgggtgacaaaactgtggtaacagtgggtctctcgctgctatgcataaagtcctaggacatctgtttgtctttataccactccacaaactcgtccaacaaaactggccatgctccatcttcatcatagttgctgaggtcaagattaattgttctgctaaactctaggacattgcaccactggtctttattaataactttgtattttgattgctctaagaattggtgaaaaactggaaaaaggggccagatttttcctaataacagtcccaacatgcacttggcagtgtttatgtctaggctgcgctggtccttttctcctgctctgcaagggtgccagccagcagctcgcaatcactaacaccatcttcggcccgtgcaaagtcaaacgcatatctgtaaataagtttaaagtttgtagaatcatttaagaatgatcttaagtaatccaaagtatttctgagtttttctgttgtatcacattggagagaagtcattccttttaaccactcctgtagagtaaaataacccatgttttttgcatccaatttccaagctaggacaagcataactacctt

SEQ ID NO: 142005 - DNA, 1290 bp, Homo Sapiens
acaatacatttttcagaaataatctctaggtgaagctttttccttttatacacatatacaaaatttaaacagcaatatacacataatcacagtgaggacgttggcaaattcaccaatctgtagtgtaaatacaaactgcaaagcagccttccaagagaacaatgccacacagcaagcagagctggccaattcaatagcaaacaccaacatgtccctgcgaaagggaaacagtgcaagagaagcagcatgcgctttgatacaaacagcaatttatggctaatgggtgacaaaactgtggtaacagtgactctctcgctgctatgcataaagtcctaggacatctgtttgtctttataccactccacaaactcgtccaacaaaactggccatgctccatcttcatcatagttgctgaggtcaagattaattgttctgctaaactctaggacattgcaccactggtctttattaataactttgtattttgattgctctaagaattggtgaaaaactggaaaaaggggccagatttttcctaataacagtcccaacatgcacttggcagtgtttatgtctaggctgcgctggtccttttcccgtgcaaagtcaaacgcatatctgtaaataagtttaaagtttgtagaatcatttaagaatgatcttaagtaatccaaagtatttctgagtttttctgttgtatcacattggagagaagtcattccttttaacccactcctgtagagtaaaataaccccatgttttgtgcatccaatttccaagttaggacaagcataactacgttttctggttcaacaccaatgtcttcacaaaatttctccatgccttcagggcctacaacatcatcagttcctgcatattcatagaaccattccaagcaccttttacttgaaaaggcttcttcttcagtctttattctagtcgaatcatattttctatacatgctatcatgtctacttttcttggcagataaatcatctccagaggcaggtcttctctttttccttggtggcatcactttattaaagcagtctgaagaactgcaagaccgcagacttcctgtttggtgatcgtcttggccaatgccttctgttaggttcagcttattaagggtgtggtagatcttatgaatatttgccagtgttgagagatgagagttcagctgaaaattgacagcggcggcatccgagtgcattttcaggcagctcacacccggctcgccgcccaggctcccgcgctcgcctcgcggtccccccaccagctcactgcccc

SEQ ID NO: 142006 - DNA, 983 bp, Homo Sapiens
  misc_feature (49)..(112): n is a, c, g, or t
gggccccctccctttggggggaaatattcccgtgggggaggtaaccccnnnnnnnnnnnnnnnnnnnnnnnnnnnnnnnnnnnnnnnnnnnnnnnnnnnnnnnnnnnnnnnnaagcgcccggaggtggcctttcccctgggggcaaaaacccatttcggggggggcccgaaaggttccacgggggtccaaaggggcctcccaagtggtcccgcccttggagggccaaatgggcccaccccattttgtaagccttggggctttccgggccctttttccatcccaggaaattaaagggagggaaaaaaatacccgtagtttccccaataccacttccaggaatggagaatctgcttataggtcaatctagaattagaccttatttcttagcctgcttcatacaagactgccatagccactactttttgaattattttatttagtttgctaaagaacaaagatttaagtatgagaaaacaaccaactgattcacccaactcagtaagtttgactcacgttttctggttcaacaccaatgtcttcacaaaatttctccatgccttcagggcctacaacatcatcagttcctgcatattcatagaaccattccaagcaccttttacttgaaaaggcttcttcttcagtctttattctagtcgaatcatattttctatacatgctatcatgtctacttttcttggcagataaatcatctccagaggcaggtcttctctttttccttggtggcatcactttattaaagcagtctgaagaactgcaagaccgcagacttcctgtttggtgatcgtcttggccaatgtcttctgttaggttcagcttattaagggtgtggtagatcttatgaatatttgccagtgttgagagatgagagttcagctgaaaattgacagcggcggcatccgagtgcattttcaggcagctcacacccggctcgcagcccaggctcccgcgctcgatcccggaa

SEQ ID NO: 142007 - DNA, 1094 bp, Homo Sapiens
  misc_feature (406)..(467): n is a, c, g, or t
tcggcaaggctgcctgcatttgggtctagtcctgccgccctccatgcttgcgatttgtgtgttggtctccaccgtaaatgggaggactcatgtgatgtggttttccttcgtatacttacagttagcttatgttagtgttcttgtaatttgtcgatcctgtgacctagctcctgtttgccttttgtctcaattttccgtgctgctatcgctatttggtgtgcctgccaacgctctcttccccaagtatgacattcgctggacttccaaggtaaggggagtatacgtgctctcctgcagcgtgcagtggtctgtcctgccacgcccgtccttccttattattggcattgttctactcatttgcacgattgtgtcgtcttcttttgtgctttgggttgttgtttcctgnnnnnnnnnnnnnnnnnnnnnnnnnnnnnnnnnnnnnnnnnnnnnnnnnnnnnnnnnnnnnnatgtgtcttttttcttctatacaaggctgtttatttctgtacaaaaccatgtttctattttacacaaagaacaccccaccctttcccctcacaccagcaccctaaccctggggagcatcccccaggaggagggggctgaaggaggccccaccccccaggccctagcttctgcctgccctggctgggccagcctgagtgccactgtaaagaaaataaataaggaggctcaggcagaatctgtgttggaccaggcagaatctgtgttggaccagccagactccagcccagcccagtggccaggcagcttggccctcagagggtgggcaggatgtggaatgtcagttcatgaaccgtgtagttatatggagaccccgccctggaggccttagctgccagggttacaagtaggtgtcctcactctcttgggacgtcaagctctcctgggagcggtggtgggctgagacctgaggagccaaatcctgacaagtactgccaagcacggccccgcagaaaaggcgggatgcccttgtggcaccacaaacgaatctgtttgtacttcttagccatccatatatcccagttattgaacatgtccaaccacttatactccctctaccttatcacctc

SEQ ID NO: 142008 - DNA, 348 bp, Homo Sapiens
tggagttaaaggttttatttaagttacgctggacacagttgagaattgtcccactccctctttccttgcttcatgtggagcattaacatgaaacacacatggttataacagcacttcaagtggaatcaagacctccacagaaagaacatttttgtgtgctttggttcagaaagaacattgttctttttttctcctgtttgctgttagagttgctgtagataaaaaggttctaaggttagaagagagatggacttcaaactgggagatggccccagcaggtctcgatggcttttattttccagctattattgggacaggaaagtagcgatgtattattaaggtaaaaaa

SEQ ID NO: 142009 - DNA, 322 bp, Homo Sapiens
caaatacggagtactttacagcatgtcaccacggggactctgtaggtagttcggaggttctacaagtagccattgtgtaaaaactctcttgtttcttggtgggtggcacagagttgaatggtgctttggtatggacacttagtattaaatcaggttctcatggtgcaccagtagcagcttgaaaataagacagtggagagaagcaggaaataaggggctgaggcctccacctgggtccgtgtacttgtgtgtggattttgtgttagaagtctgcagctgtaatccatgtaaccagtgcagtgcgtatgatctctttcccatg

SEQ ID NO: 142010 - DNA, 362 bp, Homo Sapiens
ttatttcctgcttctctccactgtcttattttcaagctgctactggtgcaccatgagaacctgatttaatactaagtgtccatgccaaagttcaatgtctgtccctacagcataatataacatcggttatctcaaacaattgatctggcttagttcctggcccaggtgcatattagtttttggaagaaactgaatacatattgtaaaagtgtattagctctttcaagccaaaggggagtgattaaatagatgacttctccaggggtggaggccttcaagtggggcgagatgaggaggcagagaatcctaagcactctgtttcattttcttgtgagcaaaaaacatgaggcagtgtcctttgt

SEQ ID NO: 142011 - DNA, 441 bp, Homo Sapiens
ttttaagattcgtcttggggggttttatttatttttagtcccccccaacccacgtcaatttgagtaaagtcatgtgttacgtaacaatgctgcagtcaacagtagaccacatatatgtttgtggccacataatgttgtaataccatattttcactaaactttttccatgttttgatgtgtttagatagagagatacttaccatggtgtttccatttcctgcagtgttcagtgcagtaacacgctgtacaggttagttgtctgggaaccctgcgctaatccacataccctgtgtgtagtagggtattccttgtaggtttgtgaaaattcacccttgatgcttgcacaatgatgaaattgcccagggacacatttctcaaaaagaacctcttgtcaataaaccacacaccattgaatacaatcccctgtgccttctgaactga

SEQ ID NO: 142012 - DNA, 305 bp, Homo Sapiens
ggcttcaatactatttttatttagattcatgtaaggaatatgagcaggagacatagcaggtacaacgtcttcatttcaggaaacctagcagttaccctaatgtacagcttttttctcatctaaatagaatattttgactgccatggacaagagccaaggtgtgtggatgctaccttatcaagcaaagacccagccttgatttttcactgattttttaggtcattttagttaagtaggcccaaggcctgtgtaccatttcctagctttctccatccggggcaattctatacagcagatgaggctga

SEQ ID NO: 142013 - DNA, 1691 bp, Homo Sapiens
  misc_feature (72)..(72): n is a, c, g, or t
  misc_feature (1577)..(1611): n is a, c, g, or t
ggcacggcgcgggtgcaccccataggctccccgctgacgcgggcgacatagcgccgtgccatccataacggntcggcaacgcgggcgcgccacccggccggggtgctggcccccgagcgccgccccgacagcgcggactcgcctgtgaccgcgacgggcgcgccccgggggccggcggtagcgacgagccgggaccccgcaccgggtccggcggagcgacgcgcgtccggcggcataccatgcgggatggccccgcgcgtccggtcgcgggcatacggggtgcccgcggcgggccggcgggcatgtcggcggcgggaggcaaggctcccttccccgcttaggcttttcaacgggtttttggtcccgaggtcgtcttcggcctacctccgccgcctgcggggcgacccaggagggccagtgccccgtagcgggatgagggagccaccagcgggggccaccacgtaggcccaggtgctggaagaaagtgggctcggctctcgggggaggaggacattgatgacgttgtggccgcgcgccagtgtggggtctgggcctggggcgccgctgtggctggagccgttgcccggagagccccgggggggcggctccgcgtggggttcggcgaccgtcaggtggaagacgcggcgttcgtgcaggccacagtaatggtggtgcaggtggcaggagtaggtgccctcgtcggcgacctccagcggctcgatacgcagtgagaagtcaccgcgctcaaaggcatccgcgcccacagccacgcggtcgcgcagaaaaaggggcccgtaggcgcggcgctcgcccgacgcgtagaggtccagcaggcggtccgcgcggtcgtgcgggaccccgggcggctgccggtcccagtgcaccacctgttgagcctcctccacgtgccggtcggtccacacgtgcccgcggttcacgcaggtcagaagcgcgggtgcgccgcgcgccaccgccagcacctccttctcgccgtcccagtaggcgggggtggccggggggccgtcggtgacctccaggcggacggccaggctctcgtagaggtggcagtagtgatggtgcaggttgcaggtgtacagccccgcgtccgtctcctccaccgcgcggatgagcagcgagaagttgccgtcgtcgaaggccgaggccgagagctccaggcggccgcggtcccgcgcctcgtacacgcgctgctcgcccgccgagtacaagtccagcaggcgccgcgcggggccacccccggggccgcgcaggtcccagtggagcacgcgctggcggtcgtgcagccggtcctgggtccacaccatgcgcgggctctggcagcgcagcaccgcccgggcgcccgcctcccagctcaccgcggactcggacaccacggagctgccagcagcggcgggtaccgaggaccctgagtgcaggagaacagcagagctctgcagaagcacaagtttccaaagcaggattcgggatggcagcgccatggcccccgcccagccccaggctttgtcccccccggccgtaatggccgaattcccgggcatatgtccggtaccgtcgactgnnnnnnnnnnnnnnnnnnnnnnnnnnnnnnnnnnncgccgcttcctcgctcagctactcgctgcgctcggtcgttcggcaaatacgcccgctagcgccctatagtgatcgataca

SEQ ID NO: 142014 - DNA, 446 bp, Homo Sapiens
ggtctccgaggcttccaaagagagcagtgttaactccacaccaggggacaaaggaccagggatcaagggcaaggcgagctccatgtgggccaaagagggtcagggtacaaagaagccctggaggtttctgcagacgatgcggctggggcggagcccgtcttacctgagcagcccccagcaaggcagccagcccagcgagtccagcggtggcgactcccagagggtgagctgagggcaagctcagagcccagggtgagtcatttcctgtctccatggattgatggaccctgagagaggtggtccctccaggctcggcaaggccacaggtgtcaaaagcatcaaagcacagaacatcagtcacggtcactacgtgggtgaggtggtctcatatggttatcaggacattttcctgatgacaaatctgaatacatttcatacatatcaaa

SEQ ID NO: 142015 - DNA, 616 bp, Homo Sapiens
tttttaggttgaataagatgccctgtttattgatagatcttagtggttatcaatgatggaagcatcgcagggtgatgtctaggtcctatggactcctgaggctgagtgatctcaaactgctccaattcacttcctatgacagcctgcatcctacccactctctccagtagaagatggggtagggtaagggtctttcctggatacaaaggtggcccagaagtggtcataatactctcccctccatttcccttcttctcagacctgtgcagtggaggagcatctgaataggtatgggctcttgggatcttcaaggtgagcatgttagaatctggggtctggaggccactttcatgggaggtgagaactgctggtcatttccaggcatctccaactccagcacgcagccatggggtagatggctaatgggactatgcagatctgatcagtgtaatgtcaagatccaaataaacaccaaatttgtacagagtgaaggtactgagagttaaatttccccttcgttgtatgtttcctcctgtccttttaaagcatgggagcaatgatgataagaattggcagttggaatgaggaaagagagcggctgagggtctctgctgtt

SEQ ID NO: 142016 - DNA, 888 bp, Homo Sapiens
  misc_feature (91)..(92): n is a, c, g, or t
  misc_feature (107)..(112): n is a, c, g, or t
tatgaccagttcccctttacctaagggggcccgcgggcccaaaggaatggtcttgaaaagctcttgagggcggaggcggccgcacattttnnttgtgttttgggtgnnnnnntttgaaatgactaacgcagtgcataaaatattttattcacattttaactccactggagtcacagatgaagtatcatcttctattccaagaatgaagtcttcaggtactgtctcaggtgctatctgagctaactggtcatcataagaacgtagggtccataatttctctaattcatagatttctctggtttctggaagcatcaaatgaatcaccatgctgccaaaatccacgcacagccagtcatcagtgtccttcccttctatcttaacatgagggtcacgtttacatttcaggtgtttgtacattttcacaacgtagaaggccatggcatgtaagtgtcgggtagaagttccactaacaatcacaaagtaatctgtatatctcatttctggaggaacctggatcacacaaatgtctcttgcattttcttgcctcagaagtgaaaccatcatatcgatgtcaaacttgggaccagtatgatctgccgcgtccgattctgggcgtccctcgttgaccgtcccctccgcccgctcctccagcccaggctcgctgtgcaggccgcggacaaagtttggggtctggcaagcccggcagaacgctgctcctacgggaagccgctgcacggccagcagccgaagcccgggctcggctccaaccgcggaccccgccaccgaggaaaccgccctgcgccacattagtggggcgagcagccgcgccacacggccgcccggccccatagcagcagccttgcgtcggcgtcgcgggtgggtggtccc

SEQ ID NO: 142017 - DNA, 480 bp, Homo Sapiens
ttttcagagacaaacactttttaatttcagtaacagtagggaaaaataacagcatccatgcattaaaactaagagccttcacaaagacgtttcaagatgtattttgaacaaaagaggacaggctcttgggacccctctgggtcctgcctcagcacatcgagtcctcaaatccgagtgaggaaagtctggggagctgcactgtggagccatcagaaagtacctggagcggctgctgctgggctggaaaagccgcagaagtcctcggcggtagctgggttgctatggcaacaggagtcccaggctgcccgtgctttctggccacaacctttacctcatcattaatgacttcaaagtgctcctcttcctcttcttcaatgtccaaatcattctgcctaagatatgcttgtaatggtccatacagtctctccttgaaagctaagaaatccatcatgttcccttgaaagtgttgcaagaaaaaca

SEQ ID NO: 142018 - DNA, 232 bp, Homo Sapiens
caaaacaaaaacacttttagttaacatatttaataccagaataacttataatagtatgaaaaagagtgaagtatttgtctttagttttcattgacatgctcacattttggcatttttgtattgttttgcaaagattccaaagtttttatcagagatctctaactatttaaggatgcaaaccaaaagaactcatacttcatctgatcatacagtcataacttatatattttgc

SEQ ID NO: 142019 - DNA, 368 bp, Homo Sapiens
taaatgatgcaaggcacttttcttttttggggcttcatttagaaaaaaataatgctacattggtttattagattctatttagaatcattttggacaaaggaaaaaagggctggacaactctgaaaagaacaaatacaacgtttggcttttactgccaaaaaatgcaaaaaggaaagtcactcgaaaatctaacactatccttgtgtttaagcacttggtactataaatcaaaacgttttccttttatcatggaaactgtagtttttaaaatatagaaaaattaggaaagtaataagaaaggaagcaataattagactcaagttaaagtaaggacagctaattaggatcatgatttaaagattaatatg

SEQ ID NO: 142020 - DNA, 455 bp, Homo Sapiens
ttttttaaacaacacacattttattttatagtttccatggatcaggttaagctggttcctctgcttcaaggtttctcttagggctccaacctaggtgcaggtgagcactgggtctcatctgaagactcaattggggaagggtctgctttcatgttcattcaggtggttgttagcaggattcagtttcttgctggctgttaatctgagacctcccccagttccttgccaagtgggctccttcatagaacagctcacagaatggcagctgtcttcattaaagcagtggccacacagctagagtgttccattttagagcttggctggcatttatttatcattttcctctttctgcctctcgggagtctatttggatcagtatgaagtctttctcctcaagaggctgaatcagatgcaatgcgcccaattcatctgcttgatgccacactcccaagggg

SEQ ID NO: 142021 - DNA, 717 bp, Homo Sapiens
  misc_feature (173)..(173): n is a, c, g, or t
ttccacgctatctgtgttgacaagtactgggacaggatttgcttgtggtatgtagggtagcatgacagtattctcagcaggcactggcaggacatggatcacagggacagtggtaggaggggaaagaacagcttctgttggcttaattggtgaaatatgagaatgagaaacanatccatggacattctcaatctctgataagttcttctctgagacatgaaccaattctggacctatcacttcatttgtgatttgtggggaaatatgctcttgaggaggtgtatcttcatcctgatacctgtatttctctacactagggctaaggctgcttggcagtgtctctgaagtcacagtagagcttggaaggctggaaatctcccaagtattcacaggttgaattggttcagacggctttgaacgatctatacattttggattatccagtaaggtcacttcataaaattcttgaatatctattaaagcctgaaagaggttgctctgaaatatgttaataacccgttctatggaacttctgagctgtctgtcttcagtttggcttagttttgaacgatattcctccaaaaggtgcaatgctctctgggtatcttgcttccggaccggcatttttctccagaatcaggaagagggcacacacctttctccttgctcgctgcctccgggctgctccagcgggggccggacagggcagcggccgca

SEQ ID NO: 142022 - DNA, 319 bp, Homo Sapiens
tttttatgcttcaataagtccatttattttacaatttaatgtaaatctagaatatctaactatttatacaaacttaactttaaaaatagccacttgctattttacatacaaaacattcaaaagaaaattcttcatttagagtgactgaggcttcacattccagcccagagaatggcagcgaggagggtggcggcgggaagcagaggccttgggtggtccgtgctggccccagtccctcagcccaccctctccagcactgggaatatatttatgcttatttttctttttcaaataaaacttctactaaaaccctcgtgcc

SEQ ID NO: 142023 - DNA, 454 bp, Homo Sapiens
ttgagctgtccggggagtcaccaatagaaaacttaggaattttaaattgatttgtaggagtaggcataacctttgtcttggaatttagacaggaatctcgccgtctgatacttctagtcttattcaattgagaagattctgaccaagcgcaactggagttcagccactggccgccaccttccggagtctggggttgggtgggggatgctgaggggggtgccgtgagctgctccgctgccagctcagaaacatcgacccgcttggcctgccaggaggatgcccccacagggcctgcaggcagagctggccgcagcatggcgggtcccattctgcctgacttgctgatgtttgacagaggccgggagctatttgcaggaatacttgcaaattcacttgatttagctttgcccactgctggggatgtgcacgcactggatgccccgctccaaacagg

SEQ ID NO: 142024 - DNA, 349 bp, Homo Sapiens
tttagctgaagaaaagtgagggatttattggctcataaaactgaaaagtatagtgataatcttactcagtgaacaagctcagctgcaggcaaggttggatctagaagtcaaaatggaactccttctctctgtgtcttcgttctgcttttctctatgttgcactctccatcaggcaggttctcaggagctctattttcaatcccatggaaaagagatcctctttccaagtttgaaaaaaatttcaggattgaatctcattgtcctggctcggtctaagtaatccttattagcagggctactacatacacgcgtgcagtttgtgcactgcacaaaggctcccagcagagag

SEQ ID NO: 142025 - DNA, 1251 bp, Homo Sapiens
tcgcctcatgaaggcatgctggggcgacagcggagctggctcttctgggagatgactctccgagtcactggacaggtcctccgaggagccgaggagcttaaaggagctctcagagatgggcaaggcttccttttcacacacagatggctctttgctggtgttacttaatgtactagacagggagctatccagatccacactgatggagtgttcctgcaggcctctggctttattaccccgggacaaaatactttctaaagactctgttaaagatctctttgctttgtttttcagcatatctagcctaaatcgagtggcactgggtggtaattcacttccaatattctctgctgccatctgcgatgtctgcttcatctccccaatatggatgtgttctttctgtttctcttcatataaacatctcagaaaagaaataatcaattcattctctcgctgctcatttctcggtctcaatttctgaacctcttcaaaaatagtcgcctgctcctgattggttaatgtcgtcaggtgcttttgcagttctagttttgttttggaagaattcattccctctatcctctcacagagcttgtgcaggctttgcagggggcagccctcacacagctgggctggcgccttagctgtctgctgcactgcggccaccgtgaaggcctgtttcagggtcatcataatttcatcaaccagagcctcatttgtgcactgaaacacgtaacagacaaaatgaaagccgccacctccggaagactcccgacagataaacccaaagtggtccacgtgtctgatgccctgagagcaaaaggatatctccttaaaatttttctccaatgctatttttttggtgtcaggactgatgaggtaaacttcagactggccaatcgtgaagagcatagttcgattttcctcgatatctgtgggctgcacaatattgtgtccgctaatgaggtggttctcaatgtcgctctcctcgaaggagctgaagaagccgctgcttcggaggcccccatcctgcagctccttcctaaaggccagcgagcgcaggccgggctgggagaaggacttgcgcatgggcctgcgcacaggctcctggctccctgtgggcgcggcatggggcgggttggggcgggggctctcggacccccggctgccgctgacgtgattgaacttctcgatgcactcgtcgatcagggccggcggagccttcttgtgcgccaccgtcacgcggccgcaagc

SEQ ID NO: 142026 - DNA, 320 bp, Homo Sapiens
tttgacagtcatttatttttattaaagtgtctgcctacagcagaggcaagagtaaaaagaagctaggttatgtatgcttctctggaaacctaaatcttctgcattaatctataatgctcccacatggctggatggtccgacagcatttcagagacttctggcagagagcaataagttcttcgtttttcccgcaattgttcttgcatgtccctttaagtttgttgcatttctcatcaaaaaatgcattcttggctggggtcagaaagaagagcacggcaaagagaaaggggaaagtcctcatgactggggtgggtcttgag

SEQ ID NO: 142027 - DNA, 955 bp, Homo Sapiens
  misc_feature (602)..(671): n is a, c, g, or t
ccatttatttgacttttggttgctctattttcaggaaaatttctatcatataaaagcttatttcagttattataaaagtgcttattctctggttatttcttctttttatataatcttgtcatgtttcatagtagcagtatcttctgctatctctctgagtatattaattatactttatttctacttcagctactgttttctacaggacatactgcctctaattcttaaacaggttctggagtatgaactgtcttgtttctcattgacacaacactctccagtcacatgtattcggctttcccatttctgccagttcctcctttacatcttccaaaagttgtgtctctttaatatgttgcttcctcttccttatgcctgtggatttatatattttttagtcttttgctcaaaatttttagtcccttactaggaaggaacatggaaaaacatgtgttcaatcacgaagtttaactggaagtctgctgttaaatttcctgaagatgttaatcctagagctataatcatgctattcacagggtcataaaatcatagggctcttactataaaaaggttatcagagatcatccgattcaaccctcttnnnnnnnnnnnnnnnnnnnnnnnnnnnnnnnnnnnnnnnnnnnnnnnnnnnnnnnnnnnnnnnnnnnnnntccatacatttggtatttgacttgctttcattaccatagtgcctcctcaaatagatatccccttaaagtagtgactcagaagactcccagacacatcctagggttaacacatttgaataagccaatctagcttttggatataaaatggaggagagctgtcattaaagaaaatctgggaaaaaatgtctccaagaataaatatttgactctggacatcctgttttctactagtagaaattccctaatcaatactctcccatgaaactcattccccttattcagct

SEQ ID NO: 142028 - DNA, 789 bp, Homo Sapiens
ttttgcaaaactgaggtttaaaggacaaatacattatccatttaaaaacagatatctaagacaaaataactcaaacattctgaggtctgatacttgcttatgcacactgacatccacaactgctaccggtgcggaagcaacgccaggcctggttctgtatagtcacagccgagctgaacaccttagctccgacacctggatgtgttctagagaatgacaggctgagactgtagtttggtttaactactggctttgttgcaataatcctcgaataccacacagtggcagcttttggcatcataaaaatgggacataactgaagggaaggcttcacacatcacaaagaccgggttggttaatgactaaatctcactacatgaatacgcaatcttaaattactgtgcttatcagccatttctcgcattcatgtgtaggaaaaaccatggagacgtgtccctggagggcaggttgtaaactgcaacagttactaggaagtcagtcctttacatgctcgtaacatgggcgagctcttgagatgggatctgggtggcaggagaggttgcttttcagaggaaagctgcctgggacccagcatggtggagcagctttgaagctgagtcccctctgggtgcatactgggttccaggggatgatccttggcttgagggcaggctgcttgatggaaggggacgctccacaataagaaagaacaaaggctttggtttgtcctcatcctccagtctgtcccacacacctgccatctctgggttttggtggccccagtgagtg

SEQ ID NO: 142029 - DNA, 547 bp, Homo Sapiens
  misc_feature (42)..(42): n is a, c, g, or t
atccgtggactcgcaggggtgaggtgacctcaaggggtcttntacgctgttctcggggtctctggagaactgtcagtcacctggatacctctagactgtatttacagttaactgtttcctcgttccgtttttattaaataggggcactccaaggtactcttttctccatttggcttgcagtagaatgtgattgttctggctgggctattaagtttatggcataaacttccactagaagttctgcaagtttcctccagtctttgcaactgaattatctctcccgtctttttattatttaaggaatattgaaagtaaaagatggaatgatttggtgcgctaacaaaatcttaagtgttgagtatctgcattttttctacattaggatatcagaagcctagaattgttttttgattaaacgtttttctaagtgaattgagatagtttggaacttggaagagaggcagcatttcaaaataatttagacagcgttatttttacttaattacttaatatataaagtcctagtgttaactttttctcttggaaa

SEQ ID NO: 142030 - DNA, 648 bp, Homo Sapiens
tttaatttcaatatgtatttattattaaatgtcaagtgatgatatattaacttagtgaggtaatgccaaagaaatccacagaaggcctgaagtctggctgtaaatagctgagagccattttctttgtaactgtcttaggtttggatcacttatccacaaaatgtataggcttttgactttgattgtgtccttctaagtgttttctctgcagatcacagtcctcaaaaaatagacttcctgtcagatgcgcattttcttataaacagcgctatgaaggaggtactttctataaagttttttctccaaagaaacagacacttggacatttaaatactagataagtaacaacagggtaagccacctgagcaagatgtctgtttacattgattttgtatttgaggttttctttcttctttttactttacccactcttctaagttcccacactcaatgtcttcttaaattgtttaattcaaggatttttcacttacttgctgtgtttccctgagccagtcttatttgcttatttttccctggattaatttgctgccacgaaagctgtgcagatggtggtagacttccagaattgtttcagaaggatgaggtgactcagattcttccagtgaggtgctctgtgtgcacttggcc

SEQ ID NO: 142031 - DNA, 429 bp, Homo Sapiens
ttttattttggtattcttttattcttagattatattacaatgtgtcagtctcaagtataactacaatataactacaatataatttatggcaaactcaaacattttgagcattcatagatctatgaaatttgtaaagaatcctatgtaaacagctttatgatattcatggctatttatttattttcatgaagcaattcttgattgttttcctcaagaagataataacataataaaccacagatatttttaaaaaattggtggccttcatacataggtcctaaacccaggccaattccctggccatcctaatttagttggcccttctttcagcacttctattaacatttctctgaaatagctatttagaactgctttatttacatatgcattttattttcactctttttaataaagctatcaaaactctat

SEQ ID NO: 142032 - DNA, 545 bp, Homo Sapiens
tttcatctctaggcaatactttcataaagtggaaaaacgggggaagaggacgaaggctagggagagacgcagggatccacccaacccagtcctgagtttcccactcgctcttggagttgagtacaaagagcgctccaaagccccttctcctgtgctcagcccagtgctccggtgggtcaggtctccggaatgcgtaaacaaaagcaaacagctgagcggcggagggcgcaggcgacagatgtgggtgttccctgagaatgtgtggcgacttcccggagcagcgggtctgtgaggcaacgatggaagacactgcgctccacagcatagcaggaggccccgccccgtgtggcgccaagtaaaagataattcctcagaagccgtcggccaccggcgcttcgcctcgtcccgcgccaggcccagcctctcccccagaccaccggtgccatgcggattccccaggcgggaccccagctcacgaggcccactggccgaagatccccacaggatagagagccgctcctgcgaggccaagcttccgagaggcg

SEQ ID NO: 142033 - DNA, 560 bp, Homo Sapiens
taaaaagtggtatcaacccacaaaatggatttcataacccactacgcagtttgataagatgctgttttagaccatgcttttcaccagttttgtggtcctattttgtccttttcatgtctatacaggatgcttctagtgctagttgctagcttttctctgatttccaggatggtaataggttaagaatttctctaaatggttatttcttttctttctgcagctctcacgtgtgaatatgtgtctagtgcatccttaacctgaggacttcaccagttcgaaattacagttttcaccatcaactaccttatcctttttggcctggttttcttcctcaaacagtggaaacatttttaaagttgcttttgttgcagagttaaacaaatggctgatagtggcttagataaaaaatccacaaaatgccccgactgttcatctgcttctcagaaagatgtactttgtgtatgttccagcaaaacaagggttcctccagttttggtggtggaaatgtcacagacatcaagcattggtagtgcagaatctttaatttcactggagaaaaa

SEQ ID NO: 142034 - DNA, 538 bp, Homo Sapiens
ttacataaactgtgtggggtgtctttttaaataatgaagtacaaggccatgccaatgagggacccaggacttaaacctcaccatcctcaccttaaatctccctctaagctctgccgccctgctaggaagtggtagcagaggccaggtggctagctccagaacccgtaagagttataagcactattgagagtacacgagacagtcactgcagaatgccacacaaataagaggcagcacttccattgcatgtaccatgggctacacactcatttaacccttccaggaacctaatgagggtggcatattattaccacgcccattttacagataaggaagtcaaggctcagagcggaccaatggtttgcctgaacgcacagtgctaaggagtggtagaccaggattccagcccaggcagcctgatctcaggggccacctgtttagccactacaataactgtcacctcgctcatgactggggctcagcaccttcctctcacctccccttgcaggctctcccatctgttccctgacagcagctt

SEQ ID NO: 142035 - DNA, 1350 bp, Homo Sapiens
tgccccattccaccaaggcccatgggaagttgttgtgacgctcagggagggaagaaatctccttttggtaaggccctctcatccatcttgacgtgcattgttctatcaaatagcagctggccattgaacatagatatagcttgcacagcttcaatggactgttcaaaagtaacagtgcctattccacgactttttccatctttttcttcaagaatgtctgctcggaccacccacaccagcccatactaaatacttccttcagtttcttccagccaactttataatccagatttgctacaaatactgtgcttccaagtcttccagcctgtaatgcatggataatctcatttgggatgttgggattatttaggatactgggtgggatagtaatcattcctgggccacctggtcccatacccatcccaccagtcgtagccatcaccttttgcattgctctcctggcatgttcaccatcaggatcttctttgactttcagtggtcttccgctcagactatgcttgtttaggacttccgcagcttttttcatgctctcttccatcttgaattcaacaacagcacatccccttgactttccttcagcgtccattaagagctccacgtatgttacctcaccaactttttctttaaccaggtctttaagtgactgccatttcacatcaaaaggtatgtttgtaatgaaggctctgtatcttttagttggattggcatatggctcaaagcgattgcctcctctttttatgtttttctccttcctcttctcattctgagcaggtcgttctccttcacccttagggcccggagccccgttgccgctcggcacgccgggcgcgccgctctcttcctccattttgatctccgtcgccgccacctccgccgccgcttcgacccctgccgccattttctccgcgtctgggctttgtgtgagcgaacgggctgcaccgcgctgcgcctgcgcgcccacgtgacccgacgcaaccagtaacacctgcgcccgccgctcccggctgcctccttggccccactcgccccgggccacgcccccgccgcgcgcaggcgcagaccggcagctgttgatcgcttctctctcgagatacactcgcgttaggcaccgactggctgttcccggcgcgcgtcctctgagtccgatagaggaggcatctccccaccccaccccacacaaacacctagacctagtcactctcagctttctgtaaccagagctggagcagaggggaagcaatgatcctgtctagagattcctggaagttttagatgaagcttgttcaacccgcggtccggcacacgattcgtaaaattaattaaaacaaa

SEQ ID NO: 142036 - DNA, 696 bp, Homo Sapiens
attcattcagatgaaatttttatttttcaaaatgtgatacagctgtttaattttcacattaacaacagccaacatctgtgtgactcattcacttaattctctatgtacacaaagcacatactatttatataaaaaataaattaagctttaataatgaaacacaagtttacaaatgcagcttcttaaggcctaatgaaaaataagaaatgtggaaatttctgagaggcaggatcactggaatctggctcttcaaaaagaaaatattttgaaaattaaaaaccagggacaaattattgagtatttttaaatgccaattttctaattctgtataattccaaatgtaattattaactttttgttggttagaagatagcttttacggttgggttcaaaaagttaaatgtcacacaggttgaaggttaagctattttccttttaaagtcaaaagggttgaggtcctttttagccatcctttttgcttcatcacttagtggccctagatcagcaatcttgagagcttgtttggaggttccagcaggggagcgcagctactcgtatacccttgaccgaagaccggtcctcctctatcggggttggtcgtcctcttcgacggagcgcgcagcttcgggagggacgcacatggagcggtgaggtaggaaggggacacccacctagccagccagatcagccgaatca

SEQ ID NO: 142037 - DNA, 494 bp, Homo Sapiens
ttttaattataaaaaactcttgctttaatcattaaatcttaaaggaccattagaaaaggccagtcacattctgttctccagtcttgtaggttacataagccatttccataaattctatagccttcttcttagagtaacacacactcttgtttaggaatgttcatgttggttttgttcacggactgagattgttagtgggcaggagtttacttcttctcaattttctgggagataaagggggaaagcagtcttcaaaaatttaagaccaaaaatcttaaagacatttcacaaataatagtactccatgtaaagtggaatcaaaggcatcacaaaattgccatacttactgtttgtgaggagtcaatatttgacttggaccaggacacaaactatgtccttcatatggtagatcactaggatcagaccatctagatcccactttctctgctacttcagctgtgtagacttgagctaattgaacctgtctaaacccg

SEQ ID NO: 142038 - DNA, 492 bp, Homo Sapiens
tttccacatctgcataattttgcatatttatttaatggacaaataaactcatttggattctctcattccctttctttctgttctgcttttgatgtatcatataggtctggctcggcctgggtaaatgaccagttctggtcttcgttatttgcaaaggcacttgagaatgatgttgtgcttcacctttaaggaaaggccattccgtgccctcgggtggggttatggagctcttctgtggatggcagtgcgaagtcaacagccattccaaagagaatgccaagctgtcaaccttctctccactgggtcctctgagggggaggcaatggcttgctcccaccatgaggtgggcacgtgggcatgcattagctcattcaatcctcacaatggccctacaagggatgtggtattataatccccatctcataaaggtgaaaaaagggctgagagatgttaatcggagagagaccacacagctgttaactggcagatctt

SEQ ID NO: 142039 - DNA, 438 bp, Homo Sapiens
tttcttttggcttctaattctgagagaacaagcctatgacaatcagatctagacacatactattttgtgaagagtaagtaaagcagacacacacttatatttgtaattttacagatttaacgatgaaagaatataactcttcaggcaaaatgagttttggatttcttcaaatgtaaaatgttttgcaaactaatccaggatgttcataaaaacaaaccaaaaaatcactccagcaggaaatactattcttgtgatcatgactggaaactttgtgtctcttccctgcaatctcagtacaacaaggttacaccatagaaggccaccccttctgaaaatgttaattgctttttcatatcccctctggcagctgcctcagtccatttctgtcagatgggggacagcacaggtggcatcaggggtgtcatacttgaatgacag

SEQ ID NO: 142040 - DNA, 484 bp, Homo Sapiens
ttttaaaaattaacatattcctttattcgtttggtcagtatgtgaacctcaaatatatgctaggtgctgaggatatcatgaagaaaacagaattccctgacctcaatgagctcacattctactcggaggggataaaccataaatacgtgtagaatttcagatgctgatgagttgtgctatggaagaaattaaggaagtgaggggaaatttttccagggggtgtggtggtgggaggtgctgaactagtaaagtaggggatgcaggaagccttgctgatgttacagttgagcttcaatatgaaggtgatggagatccatttcggcatcgggaactgaagctgacagaggagatggcaaatgcaaaggtcctgaggcagaactgcggaggaggcagagccggtcgcacgcctgggtcccagcggaggcccagtcgactctcgacccgggccccagcctccttgcgtggcgaaggtcgtgcctcaggt

SEQ ID NO: 142041 - DNA, 1095 bp, Homo Sapiens
ttttcaacatctaaatagacttttatttttattttacttgtttggacagaaaagaaaattcatcagctttcattagagtctccttaagtgttggaaacacattaaactcagaaatagtggaccttgtagaaaagcatcacaaattaaaaatatatttctccatgtggtaaaagtgctttcaatcccattaaagggcacagcaagggtgtttggaaacacgatctgaaatttggcctgcaatccgtggcatcgattccaaccacagggcgggggagtcaccatgatctagagcacaggagccacgtggggcccggagcatgcggacagcaacactcgcaataactgagtgaggacgaggcccatagcctgagtagaatagattctgtatttgtaaaaaatgaggtggttacatcaactgggttgaagggggactgggtaatcccagaaattccttgtttctggtctgtggggatggtcagatctgcccaccactctggcaccgaggcttccctggagacgcataaacctgggttgggaaagtgcccatatctgcctgggggacacacgagcctcgctgccagtgccgggcacgcagcctctccagtcctgccgtcagcaaccgcctccggccctcatgtcaaatcacacctgaccagagttgtcaccacagtcctgttttggggtttttccaaggccagccctgttgttctgaggggccactctgagcaggcaaacactgccagggtcactcactacacacagaggaaagacaatgagcaaatggccatcgtagagaattcggttgtgtgtttcagcaatgctacttatttttcaagacaagtaattctgccaatgatgacatctgcgacaaagcttagggcccgcgggctccccatgcgcctcgtggagagcaaccacgtctgttcggaagccagcggcccttcccggccctgccacaggccagaacacagagctgtgatcatgcaaagagccgtgactgaggccggggtcagcgtcgggggtggagaggaggggacatctgccttttacattagatctgaagcaacagtaagaaaataacctgaagatatattt

SEQ ID NO: 142042 - DNA, 508 bp, Homo Sapiens
tttttcctgggtggaagacaaaacagctttattacagcaaaatagaagccagagtgtccgcatatttgcatcagttcccgtagcccaattcccacagtgtgatgcagagggccggatgacgtctgtgcacatggggggttgcattacagaagaatccaggatcaagaatcaagcagtttttgagcaaacaacaaacaagctagtctctctcccccagggagcagcagttaaatggtagtaatgctgtgattgccttgacctacttaggtgcctatatgactaactacagaaactgcttagcatcaggagatggatacgacttgcagtctggcacactcagtaataatatacaggcatgttcaggggccttcggagcttgtctcttctctactacaatggaaagcaaaatatattttatatcagtaagtcatatgcaatagtaagaagtcagacccttttctactctttgatctctgttattctgtcaacagaagatatatcaccaaat

SEQ ID NO: 142043 - DNA, 383 bp, Homo Sapiens
tttttaacattaaagcaattgaaatatttattgatgtttcaactatgaaatttgacatgttgctgcaacaggaaaactcatggctctttagggaaaatgagtgcctggctgactaccatccgtgcagttttgctccagaccccattcctgttcactggtgtcgttcatattcgcgtcttccctgtttcctttattctccccacctgccccctctcacactgcatgtgctttcctgtttgcttttagccatcatgtgttcagtgaagccagacggggttcctcagctgtgcagaacggatgagatcggggagctgtgtgtgtgtgcagttgcgacgggcacgtcctactatggcctctctggcatgaccaagaacacctttgag

SEQ ID NO: 142044 - DNA, 439 bp, Homo Sapiens
ttttgacaagattcatctaagttttattctaagagttttacaggcacttttaggtcttacatttaggtctttgatccattgtgagttaatttttgtatatggtgtgaaacccttaagtctttaaatcatcttgaaatgttttttgtgtatctactcctaggtgatcatctatctgcaggggacacccaaatctttgggtgtaagatagaaattcaatttcattttttcctcatggttaacccatcattccagtaccataaatgggagttcctcttttcccacaaatcagtcacagaaaatctgtttctgggctctgggtagtctatttgtctgtcaccatcccaatttcacattatcctagttacttgagctttatagaaagtctggatttatataggacaagtatgctctacctcattcatttttatgttattcttgt

SEQ ID NO: 142045 - DNA, 594 bp, Homo Sapiens
  misc_feature (500)..(508): n is a, c, g, or t
tttagattttttcattttattccaatagttatgataaacaaaaaacaaatactgcaactttacaaagtgctagacattgccctgagtgcttagaaaatattaatatatttagtccttcgtaagatacacatgttgttttactttcctcatcttatagatgagaacataggccccaaaagcttcagaaattttctcaggtcacacagctaagtggaaaagcaaggtttaaacaaaggaaaattaacttcacagactgtattttttatttcacttttttccctagaaatagatacttaaaatttggttcacaatgtaagtaaatttttaagtctgtgtattaaatggtagtcttttttttaaacttaaatattgtttaaatataatttccaacggctgcataattttgttccatattggcaatttagttttcactttcacagcagatagctcagctcatgtctcattacctcctcacccgcactgaaaacaatattcttttnnnnnnnnngtttcaatctctttgtaaagtgttttctcttatggttggtttattttatatttacaatctatttttacatttgtttcagtacaaag

SEQ ID NO: 142046 - DNA, 377 bp, Homo Sapiens
ccttcaactttttttattatggaaaatttcaaacaaacacagtagagaaaatagtatcatgaaccccatgtacccttttcagtcagcttcaataattatcattgtatggataatcttttcatctctatacccatctagccccctatttctcaaattcttttgaagtacatctcaaaccttatattatttcgtatgatcatctctcacagttctgtgcagaatatattgttgggggatgggaatggaagcagagacggggggaagagaccattgcaacagtccaggaaggggaagatgacctgaaatatatggtggtaggagtgggaatgatgaggagtggtcaaattcaggtacacagtattttagatgtaaaactg

SEQ ID NO: 142047 - DNA, 430 bp, Homo Sapiens
tttagatccattcattttactgaaaatataatccacaaagagaactgatctgatctgcagtcatgcttcctcttttcttccacttgttttgccatcagaatatgcgaagatggggagagagattgcttctgtgctgcaaaggaaccgttcccggtgattcgcagtctgatattcctcagtcttgtaaggctttccagaaatggagctctcagtaagccaccattccaaacggtcggatgataccacagacaccacaaagcctgacacgtgggtgcttaggaatgcctctagaatcatgcattttcttattttaccatttccgaagagttttgtttgtggaggtgatataaaattttaagcaacaacttcccagttctcctacccaaaactagcagacacgctttcattaattcccaatgtaaaacgtctg

SEQ ID NO: 142048 - DNA, 252 bp, Homo Sapiens
attcatactgtgcaagggctactccaagcacctaaagtaatctttgccacaccttgtcctagtatatgtacagaaattaactttcagcactatatttcatctactctgactgaaagcattccaactgttcatttacttgcccttgacctcacatttgagtatgaagaggggatatagaagaaaagctaaggctgctctatcactagataatagagttaatagtaatcggaggcctggtgcagtggctcacac

SEQ ID NO: 142049 - DNA, 535 bp, Homo Sapiens
ttttttttacagaaagatttagtatttcattttattcctctacctacaaaaccgattcaaattgtcgctggattagtaggtttgaaacttttctgtgtattgagcacaatcttagtactttattcttgaaatataaataaatttttgattcaaagtaatgcactctaatttttaaaagaatctacttggtcaggagtgcattgctttgctggtgtctgtgatcagctggagatggtggtgaacagcctgtttgcatttcttggaagaagatcttttattctgaggctcaacccaggtctctgccttccttagagactgaggcccatccttcagttttcctgattctggagaatggcccgcagcctcccactcaggtcttggctgtgctcatctagtccatcccagggctggaagggacatccctggtggtccacaaaggtgtcccagcagtactcaaactcatcgtaggtcatgatggagacttgggccccagcatcccgcagcatttgcagcgcctccttatatagggggtccc

SEQ ID NO: 142050 - DNA, 541 bp, Homo Sapiens
tttttaaggaactataattttatttttaaatgaacagagatgactagtgatttaaagagcaaattcacagattccatttttcatgaaattggtggggtcattacaagggcatggctaaatccagatggtaaactcttggaatagggaaacaaatcaaggcgtctcattctgaagtgctcaccaaactgacccgcttggctggcaagccatcctccagccctctctgaggccctgggtctacacagctcccagagtgtggctctctgctaacaagaacaggagaggaggcaggagggcagatcagagcgcctctgggggaaatggccgagctgcaggcggtcccagcgggggtggccaggcacactgtggcttgtgcaaccacgtcagtcgggaggagagagacttctcatgaaatcccaagcatcaagccacggcccccgccaggcaggcctcggtgctgtggttgcactggtgatgaggtgggagcagggtatgggacatgaggagctgggtccctggccgtggtctgggcgatgaatga

SEQ ID NO: 142051 - DNA, 499 bp, Homo Sapiens
tttaaagaatggtaaatatgggcccctaatctcttctggattgtagggtttctgctgagaggtctgctgttagcttgatggggttttccatttgtaggcaacctgccctttctttctagccgcctttaacattttgcctttcattttgaccttggaaaatctaatgattatgtgttttggggatgatcttttgtgtagtatcttgtaggggttctctgcatttcctgtatttgaactttggactctctagtgaggttgggtaagtgttaatatatgatatcctgaaatatgttttctaagttgctgctttctctcctcctctttcagggatgacaatgattcatagatttggcctctttgcaaaattcgatatttttcagaggttttgattgatccctttcattcttttttctttatttttgtctgtcttatttcagagagccagtgatcacctgttgagattctttcctctgggtagtctattctgctgtaatacttg

SEQ ID NO: 142052 - DNA, 446 bp, Homo Sapiens
tttttcataattgactaaatatattttcacttaaataagagtggtagaaaggacttgtcacctttcataagtgatatcattagggatatggctacccagctggggatatggctcccttcattgtggatataggtgtgcaggattcctctggcaaggacttggagaggggtcaataaatctcttaggccacatgctcatgggtaccagtttgtgcatgagattgcaggaggcccttgacctgtcccaaggcagcagctaggacttggcctcagccttggcttttgagaagctgtgggagagttgaggcttgaagtcagtcatcggaggagatggctgcttcctccctgacgacaagctgaggagcacccaagaggctgggcaggaggttgtagggggcaggggatcaggggatgcagcactgcctttgtcctcaggcttcacccaca

SEQ ID NO: 142053 - DNA, 633 bp, Homo Sapiens
  misc_feature (16)..(16): n is a, c, g, or t
  misc_feature (110)..(110): n is a, c, g, or t
atacacacttcgttcntgccagatgttcagcaatctttctaaaggtttttacagcccttcatctgcctctctggcaacatgagaaaaagcatccacaaggacagattcanattctctagtgaattcaggtcctttccttttactgttttggatgacatcattcgctaaatacagaaaagtaagctttctatttgatttggctttgcggagctcgcggtgccacacggagacgatgggtcccgcgtgcttgcggtggtggatgagccaaagggacagggtctgcacgctctgctgagagttgctcagctccgagagcttcttctccagcgccgactcagagaaggaggacatggtggcggcagtgaggcccggcagggagcggcctgggccgcccagtgcggcgggaagagcgacggcacgaggccggggcctcacctgacaggctgcgggactttttaccgactgacagactgccaggggtgcgagaagggggaggggatgggtctccgcagtaacagccgcccgcgccgccgccacaagatggccacccgacctctcaccctgccgcgagagcgaggtcaaagggcaagggccggagcagaggggcaccgagaggcgtcggagctctagaaa

SEQ ID NO: 142054 - DNA, 455 bp, Homo Sapiens
tctctggagtgcagaagttaagaaaataaccttcatactgaaaatatatccttaaaaaaacaacaacaaaaacctctatacaaatgtagtacagcatacaaatttttaaaagatggaatgaaggcacgaaccattgcaagtcttttggaaatgtatgaacgtaggcatgctaagttgaaaatagtcttaaaaaactagtgaaaacttcatgtatataaaataattcagaaataaatctgctaacattcttcactttcaggttgcatgtgtgaatccaacatgttccttcttcataaatagtcaagcgttccttcagtggtgtttgtgtggtctgtcttcgtgctggtcaccagcctcagtatgtctggtagacgtcggggatggggaccatgaatggcagcagcagggaaggcctgaggtatgtaccctgcgaatcctccatacacggcggccgc

SEQ ID NO: 142055 - DNA, 672 bp, Homo Sapiens
tcatcctctcacatatgttacggctggctgtcctactcccaacaggtgttcggggttcacttggatcaagcacagacacagagcaagcagaatctgaaagagcattcaagtcttccccaatagaattactgtctgtggaatgagcataacttaaggctatttttctacaatatgtgcaagctcggaggtctcctaatgctgaagagcgccgctggagttcctcattaagctgctttttataaggtgtgggtgacctaacagactgtgtcctcgaagggagctgagggctggtccaacttccactcaaaggctgctgttctccctggcctccttctgctctctctttgttaaaacgaaagagatttacaaaagaactataagctgatttaaaagggggctcatcttgatcaggagtcaaaggtttaaagtgtgtgagatgagaaggactagtaggagatcgaggcaaatcattagcagagtccagtgttggggacgtcttatcatctgtggccatttcatgagtctgcgcctcctgccccggccgcgccggctgccccccgccccagcctccgcttcaacggctcagcccccggaagtcggcccccgagagcggcggtgggctcctcaggccgcggacggttgcggcaggaagcgaagctgcttacatggttg

SEQ ID NO: 142056 - DNA, 672 bp, Homo Sapiens
cctctgggcttcttcaatatgacttttcttttactcaaactgtcgctattccctcttcatctgcctctgtcaattacctggatctcatctgcttgaggtaaggagggattctccacctgcagtttattcccatcagctttacatttttcttcttcctctacgatttccttccatatcttgtggttttcagtgaggtggtgcattagctgacaaaatattcgccgtctgcttttccttcttggtgcttttggatttagattgttttccatttcttcatcttctgtatctaattcttcaccgtcttcatcatcaccactttcagtatcattatcctcttctgcttctaaccactgacctggtagcaaaccagcagcatcataggagttacacaggggacccactatgtgggtgataaaagattcttggagttttgctagttgaggagaagaacgatccatgaatggactgatgggcagaccaagatttgcttcttcatctccctgctcataaaattcattgacaatgccttctgtccatttcaaatgcaagtctcgaacttttgctgggccatttatatctgccagtttgatgcacacctggcataccaagagccgatcattttcattactccattctatgccattactatttacatcatttgccttggcattg

SEQ ID NO: 142057 - DNA, 665 bp, Homo Sapiens
  misc_feature (522)..(591): n is a, c, g, or t
tttaagttttaaccaatttaattatacaattcaaatttggagtatagacaaggattgagacatatactattattggaggtggaaggcaggaacaaatggtgaagctaaagaaggccaagtttctcttccatttcaagaattcactttggtaacgtgtttacactctttattcttatattttttatccgtgtaataatagtctattgtcttgagtatgcttttctaaaattaattttaggcctttctacagaatcatcagctgcaacctggctgggcccctggacctccacacaaactgcctactgcggacagaacagcattgctttggtagaaatttggacatctctccatattccttgatgtggcgatcttctggatccatcaaaggaacaaagtctgctgttgctgaattccatgcattaaccagtgcacatccagaagagctgtaaactggcaatcctgagttgcttcccgatgtcctcagctttgctgattatccacataggaaaggcatggtttttnnnnnnnnnnnnnnnnnnnnnnnnnnnnnnnnnnnnnnnnnnnnnnnnnnnnnnnnnnnnnnnnnnnnnnagaagatttccagcatttgtttttgattttcagtgtttcatatttctcaactgaaaggctataaagctctgagg

SEQ ID NO: 142058 - DNA, 297 bp, Homo Sapiens
gtaaaagaaaacacagaaggaacactttccttgctggatttgtaaggttactgttaagcagacactgtgcttgaaaacagagagaattgggggacagtatagagtaagatccagaaatggactcccccacagaggaattcagtgtatcacaatggaggtttttcaactcagtgaaaaagggatattattttaatgatgctatcacactgcctttgcatgagaagaaaattaaattggactgctctgtcatgccatttacaaaaataaatctcatcatgtagaggagttgcttagaag

SEQ ID NO: 142059 - DNA, 658 bp, Homo Sapiens
  misc_feature (85)..(179): n is a, c, g, or t
gctcaagtgatttcctacttcagcctccacagtaggtaggacaataggcatgcaccaccgtgcccagctaatctatttctcgcannnnnnnnnnnnnnnnnnnnnnnnnnnnnnnnnnnnnnnnnnnnnnnnnnnnnnnnnnnnnnnnnnnnnnnnnnnnnnnnnnnnnnnnnnnnnnntgagccactgcacctggccccttttgattcctgatttttccttcctcacttaaaaatttacattgtggtctatggcaatagtctccacatcttagttctggtcctatagttaaacatctgatatacactgccagttctttttatttacattttccattcatcttcgtttgcgggaagccgtattttagtagattctccaacaatggttcacatttcctgagttcttgtatgttacaaagtgtttgttggatttatacatgattgatagtttggctggcaaccctgtaacatttgaatcctctcacaacatatgagaaattctggtcttattgatcccaccacctgaaagtagaaccaggaaaactccctagcagcctatgaaaggggcatataacataccctttttcaatcagatgtctttgtatgcaacttcttttttgaattcagcaatttagggaggcatctcatgcagaatcctt

SEQ ID NO: 142060 - DNA, 474 bp, Homo Sapiens
ttttgcagccacatgagttttagccatttcagatgccttgttccccacaatttggaggattcctttggatttgaccaagtcaggaagagatgggagaaaagtggtacaacatcaatcaatagcccaaacataaacgaaacagaaagagttaagcaaaacaaacaaatgcacaattcatatgattactgagtgttctaatggtaaggagaaattaaaagcagctggtgggtaatcttacattttattcattaaggaaaaattttaagacaaaactctaattcagctacttacctggaaataagtctcaggctggtgattgttctctgccatcttagaagctgggaaaaacttacactcaccttccctgtcagaggcaagctgagactcaggaaaggaggtgcctgctctccatcgtcatggaagcaggaaaacttgccttcctttttggagatgagtaaacttcagaaaaggagt

SEQ ID NO: 142061 - DNA, 399 bp, Homo Sapiens
tttaaccatttttaataacaccatgttattatatggtatatctgtctctgccatactatgtgaaatttcttttctttaagaagttgaatatcttttctggcttgtagggtttcagctgagaagtctgctaagtctgatggaattccctttgcaggtgacgttgcctttctccctagctgcctttaacattgtttctttcattttgaccttggagaatctgatgattatatgtcttggggatgatcttctcgtggcttatcttactgaggttctctggatttcctgaattggaatgttggtctgtctggataggttggggatattttcatgaatggtattctgaagtatgttttccaagttggttccattctcctcatctctttcacgtacactaatcag

SEQ ID NO: 142062 - DNA, 906 bp, Homo Sapiens
ttcttccacgacatgtccagccggggaaccaatgagttcaggagtcaggggaccgaaccgaaacctcgtgcagcgggactgcaaggcagggatgatctttgacagatagttacagatgaggcaagaatctggtattttctgtgaatttctcaattactcttctcaaggcattctggggcgtcctgagtcatggcgtctgcttcatccaagatcactagctttaaagccttttcttaaatattgtccttgtgctagcaaagctcaggatcggtccctcgaatgatgtctattcctcggtcatctgaagcattcagctccaagaccatggagccaaattctttgtctttatatagctgtttcgcacaggtctaggtatggtagatgtcttgcctgtccctgggggaccgtagagaagcaagtgtggcagtcggtcttcattgataaacttctgaatggtactcagaatgtcctgatgagaaatgagatcattcagggtctgtggccaggtatttttcaaccctctaaaagtcccagttcttcggaggctgaggcaggagaatggcttgaaccccaatgtttgaggttacactgagctgtgatcacaccactgcgctccagcatgggcgacagagcgagaccctgtctcagggcaggttcctgatcttggtcgccgcgggctgctcctgctgcttgagtgctgaggtctccatggcggggagacgaaggtgaccagatccgctgagatcgtcgcgtcacccaagcgcctgcacagtgaccagccgcgacctgacctgagacctggcacttaccggacgcgtgggcgacgcgtgggtcgacgatatcccgggaaatccggagcgggtaccagcctgcttttttaaccccgggtcataggtacaagccctt

SEQ ID NO: 142063 - DNA, 2094 bp, Homo Sapiens
tttttttaaagaacagcatctaaagaaagtttattctgtgatattagagacagaaggttttcatataaatgcaagtttgacaaagtcagcatctttctagctgtctaaggaagagtcacttgtaacacagccagccaggaggctgctttgttttttattataaagaacactaacacaaatgcagcatgattgctgtaaaataaatgtgaaatttgtacaaaagtcccagtccttccgcagttctaggtttacagtcaggctcaaccttacttgccccgctcctgcatgaaaacaagtgcgttttatacagcctctgccacccagtggcatagtttaaggctctatattatatttaaaattaaggtttttttcctatcatacacatcaatttggaacctgctggtgactcttctaccacagagggtaaataaaaagaccagtttttaaagtaagaggattcagctcatcttataaaagtataatagtttcggccagacgtccattaacatctgtttaaattagatacagacacaatgccaaatattagaatcataaatgtaattttggagataatgtttaccttgagtaggaagacacttggaccatattaaatttgaaagtcttctgttccagaccaaaatggggtaggctaattccctgtcatccaagcaactaaaaggtaaaaaccttataactttaaaataaaaaaggttatttttttcccctataaaagacaggcagtatgagttaatacattaaaattattttgtacatccctgctccaaacaaccacaaaaatggtactttttaaatgcctgcccatcctctcctggaagggggtttttccaagattcggggtgactgattcatcccacagccccaggcagcagtttatcctggaactgtcctctgttctcccatcactgctgagccctgagaattgtgaatggccctcagagcatctaggcctctgcaacaatcaggtctctggtgacttgaaatgcagcaatgagggagctcagctggatcttctcgttggtgccaacagaaagcctgtactcaatgtctgccattttggtcaataaatgtattcgaactgaagatggaaagtcaactctatgcacaaacaagtgtatctctgtcaggatatcatgcagtgccaaccccttcagagttttcaactctgtaatatttctgtaggctgtggtgaaatcttgattcaacatccagtccaggatgttggcaatgtctgacttgagcgggtgcccggtgcaggtgtagacagtctcctctgtcaccttcccaaaggccatattggtgctctgcaaaatgttcagagccctacgcatgtctccactggaaagagtgactagtgctttcattccatcttcacttatatcaactttctcttcttccacgacatgttccaggcggggaaccatgagttcaggagtcaggggaccgaaccgaaacctcgtgcagcgggactgcaaggcagggatgatctttgacagatagttacagatgaggcagaatctggtattttctgtgaatttctcaattactcttctcaaggcattctgggcgtcctgagtcatggcgtctgcttcatccaagatcactagcttaaagcctttcttaaatattgtccttgtgctagcaaagctcaggatcggtcctcgaatgatgtctattcctcggtcatctgaagcattcagctccaagaccatggagccaaattctttgtctttatatagctgtttcgcacaggctaggatggtagatgtcttgcctgtccctgggggaccgtagagaagcaagtgtggcagtcggtcttcattgataaacttctgaatggtactcagaatgtcctgatgagaaatgagatcattcagggtctgtggccggtatttttcaacccagggcaggttcctgatcttggtcgccgcgggctgctcctgctgcttgagtgctgaggtctccatggcggggagacgaaggtgaccagatccgctgagatcgtcgcgtcacccaagcgcctgcacagtgaccagccgcgacctgaccctgagaccctggcacttacagttcccc

SEQ ID NO: 142064 - DNA, 781 bp, Homo Sapiens
ctactgaaatcatccttctataaaaaataatagaagatgtcaaatatgaaaataaaactgtcctctgggccctcaattttctgtgttgtgggggaaggcagacagctactcaggcatttatatcccataagaatggataatacttaaacaactgacatcatcaagtattggttagaaagtggaactgaattctctcaaacattttcattgtagtttaagatggcataaccacttaggaaaatgtctccccatttcatacaatgccaaatatatacttattttataacccagaaaatccactcttatgtacttaaactcaagaaaagtgaaaatattattacagaaaaaaatatgtatatctgatttgttcgtagcaggtttattcatgatagcctcaaatcagaaactgcttttgtgtctatcaatagtggaatggattaaaaacaaaacaagcaaaggcctcaaacctgtggtatagtcataaaattgaatattacaaaataatgaataatcaataggagcaaaatgatgtgtcacaagcatgtttagtgagtgaacataaaaattatataatttatagtttcacttacataaatggtgaaaacagacaaaactaaccttttgtggaaagaatcaaaaccgtggaagcctctgtgttcaaatactgactggaaatgagcaggagaaaacatgtttctgccagatcttctatatgcctgatgtgcattcactcgatgtattttgcgtatactatttttgcaaataaaactgagataaaagc

SEQ ID NO: 142065 - DNA, 146 bp, Homo Sapiens
tttgtggctcttttatatatatttaaaacacacagtaagaacataagaacatctcaaatcatttagaaggtaaaagggggttatcaaccaaaatctttggaaatttcataaaatttaaatatctgcaaacagtccaaccaaaaacg

SEQ ID NO: 142066 - DNA, 691 bp, Homo Sapiens
agtcctggcacactgcttctcagaaggttgagcacgggaggggggccttggtacgaaggactccacgtgtacgcagtaaagagtgttcggctccagccaggtgagcaccagcgtgtggttggtcacacactgggaccacgttctgtttgatttagtattcaacacagacacgttatacttcagattggagtatatttgttgcatggaaacaggaaggtcttctggatttctcttccacttctctggagctgtcaggacaacagaaatggacttctcatctgtagtcagtgccacctctggtgggccaatttgtgtttctaaaaaaggatagaaccgtccactttcagcccatttggaacactttgttccccaaatggccttaactttggcataatactggtgttcgtagtcagaagtttcagcagaaagatcacagtaggttctattgatatttctgcattctgatttattcagccatttcttttgcccatatatgaaatactgcacagtgtaagtaactttaactccttgaagaccctctggtggagtccattgtaggacattcttcatgttgatggataagaaggtgatgtttgcaggtttaggcaaaccaccagagacacagggaactgcccgtccccaaggcgccgccaggagcaacagcagcagcggcggcagcggcagcggccgc

SEQ ID NO: 142067 - DNA, 497 bp, Homo Sapiens
tgcggccgctgccgctgccgccgctgctgctgttgctcctggcggcgccttggggacgggcagttccctgtgtctctggtggtttgcctaaacctgcaaacatcaccttcttatccatcaacatgaagaatgtcctacaatggactccaccagagggtcttcaaggagttaaagttacttacactgtgcagtatttcatcacaaattggcccaccagaggtggcactgactacagatgagaagtccatttctgttgtcctgacagctccagagaagtggaagagaaatccagaagaccttcctgtttccatgcaacaaatatactccaatctgaagtataacgtgtctgtgttgaatactaaatcaaacagaacgtggtcccagtgtgtgaccaaccacacgctggtgctcacctggctggagccgaacactctttactgcgtacacgtggagtccttcgtcccagggccccctcgccgtgctcagccttctgagaa

SEQ ID NO: 142068 - DNA, 983 bp, Homo Sapiens
agcaacagtttcaatatactcttttcctttagctcagcagagcatggtcaggaactggaccaatgctgagaacaattctaaacaacacatggatagagttcttattcattgtcctgggtccttgctcacatttttttcttcttctcagagaaagactgtgcaagtgaaagctcttcatcaaagtgaagtgtacaatctctctacactccaataacaacaccatatcctgtcaacagagtttctgtaaagaagatctgaagttagttctgtaaaatttctgtatatagaactttattttgtgcggcgtatcttttgaacatcatgacttcccagattcacatgcagagaatcaatgcatcagggttgtttgttcccacattagctacagagtggtacatgaatgtatgccccattccatttcaggcttaccgttctgtttgatttagtattcaacacagacacgttatacttcagattggagtatatttgttgcatggaaacaggaaggtcttctggatttctcttccacttctctggagctgtcaggacaacagaaatggacttctcatctgtagtcagtgccacctctggtgggccaatttgtgtttctaaaaaaggatagaaccgtccactttcagcccatttggaacactttgttccccaaatggccttaactttggcataatactggtgttcgtagtcagaagtttcagcagaaagatcacagtaggttctattgatatttctgcattctgatttattcagccatttcttttgcccatatatgaaatactgcacagtgtaagtaactttaactccttgaagaccctctggtggagtccattgtaggacattcttcatgttgatggataagaaggtgatgtttgcaggtttaggcaaaccaccagagacacagggaactgcccgtccccaaggcgccgccaggagcaacagcagcagcggcggcagcggcagcggccgca

SEQ ID NO: 142069 - DNA, 1157 bp, Homo Sapiens
  misc_feature (759)..(759): n is a, c, g, or t
gtgggtccccggaggcttggctggcggtggggctgggtcacagctttgaaatctgattcttcgtcttccccgtctccgtgtccaggtgtccgtgttcttcaggaccagcccaaagcacaagctcaaaatcatcaaggctctgcaggagtcaggggcgatcgtggccatgactggggatggggtgaacgacgcagtggccctgaagtctgcagacattgggatcgccatggggcagacagggacggacgtcagcaaagaggccgccaacatgatcctggtggatgatgacttctcagccatcatgaatgcagtggaggaaggcaagggtattttttacaacatcaaaaactttgtccgattccagctgagcaccttgggggtagagcccgttgacaaagacgccttcaggcagccaccacggagtgtgcgggacaccatcctcagcagagccctcatcctgaagatcctcatgtccgcggccatcatcttcagcgggaccctctttatcttctggaaggagatgcctgaagacagagcaagcactccccgcaccacgacgatgacgttcacttgttttgtgtttttcgatctcttcaacgccttgacctgccgctctcagaccaagctgatatttgagatcggctttctcaggaaccacatgttcctctactccgtcctggggtccatcctggggcagctggcggtcatttacatccccccgctgcagagggtcttccagaacggagaacctgggagcgncttgatttgctgtttttaactggattggcctcatccgtcttcattttgtcagagctcctcaaactatgtgaaaaatactgttgcagccccaagagagtccagatgcaccctgaagatgtgtagtggaccgcactccgcggcaccttccctaatcatctcgatctggttgtgactgtggcccctgccgtgtctcctcgtcaggggagacttttaggaggccgcagccttccatcaccggatcagtttttcctcttaggaaagctgcaggaacctcgtgggctccagggacccaggcccacatccatccagcgttcccgctggctgtgggacagacagggaggggcctgtacagaaacaccacactgtttattaaatcccaatgatttttaataaaaaaa

SEQ ID NO: 142070 - DNA, 543 bp, Homo Sapiens
ccctccttaccgtcctccggacctcatttttaggccgaactggttttgctgcgtctctctctcctctttggtaaatcgcggagatgcacggcgcacttcgggagtctgggcagggatggggccccctgggctcggccggagagtaattcatggtctgattggaggcatcaggtgtacccttggcacagaagggcgaacatggctcaaggatcagttcccagtggccgaggggcacctgttagaacaccaacgtctcctacaaatgtgtccccaagaatgccagcaaggggaaccagcaggggcccaagtataacatcaatctgggcgagtcaccactgccccttgcagcaaccgatgcactggtccagccctcccgcaggcccgctccgtgagtaaatggctctcttctcttgcaggaatgcagtggaggaaggcaagggtattttttacaacatcaaaaactttgtccgattccagctgagcacgtaagtagaggccagcattccgagtgtcattaagcaccacgcctggcgggcggccgca

SEQ ID NO: 142071 - DNA, 411 bp, Homo Sapiens
ctctttatcttctggaaggaaatgcctgaagacagagcaagcactccccgcaccacgacgatgacgttcacttgttttgtgtttttcgatctcttcaacgccttgacctgccgctctcaggtgagacccgggctgaccctcctcgctgcagagctgctctgtgttctcgacagcagcgccccgaccctgcccgcagcattgagcggctctggctcagcgtgggcagtcagagctcccctgcctgtacctggggtgtggacagcacacaatcccccgtgtgaccttctccctgcagaccaagctgatatttgagatcggctttctcaggaaccacatgttcctctactccgtcctggggtccatcctggggcagctggcggtcatttacatcccaccgctgaagatgatgtt

SEQ ID NO: 142072 - DNA, 516 bp, Homo Sapiens
attattgttatttcttttctttcccattgctgggggaaaaaggaggccaagagagtgtctttttttgccatatggcaaaagttggtcacagttgctttggcatttgaacatagggatcccaaggagtttcagggcttcatatacctgctgcctaaatgtgagttctatctactgtttctgccatctatggctcatgtaactgtttttttccactttccaccagcactgttgccaagggtcctggtgaagtcatcccaggaggaaaccacagtctgtattctttgaagggctgctgcacattgttgaatccatcgacctttaactgcaatgggatctctaatacattttgaggtcagccacttctccagtggaactctgaagtacagatgctgaattttcaggaaaccgtagagtggaagttggggtttagaattgaaagccctgtttccaagacatttggaaagcgaaagtcaactgcagttttctcctgttgctatgacacaggtgaacgtagag

SEQ ID NO: 142073 - DNA, 523 bp, Homo Sapiens
  misc_feature (422)..(422): n is a, c, g, or t
tttaacaattttgatttttttaataagctgtgcattaagtacactttgtttccatcactctccattactctagagctccgctttgtctgcctgggccgggctggcgaccccactgcctccctcggcggtgccactgctatccgcaggtgtaaaagacaaggcagccgaatttatgcagtatcttttcccagttggacgaggcccatcatcaaaaatgtgcccaaggtgagcaccacactgagagcagcttgtttccaccctgtgcatcccataggaaaagtcatctgtgaatgtgattgcctcagaattgatcacatcgtggaatgaaggccaacctgaaccggagtcaaatttggtttctgacttaaacaatggagttccacaaacaacacatttatatattccaggatctttgtgatgtngtgtattctccttcaaaggcactttcggtccctttctcctgagtgacatggtactgcagggggtgttagccgctttctcagttcctgctgggaaaagacca

SEQ ID NO: 142074 - DNA, 1585 bp, Homo Sapiens
  misc_feature (17)..(17): n is a, c, g, or t
  misc_feature (90)..(90): n is a, c, g, or t
  misc_feature (225)..(225): n is a, c, g, or t
  misc_feature (1569)..(1569): n is a, c, g, or t
catctgcacacttgttnactcccccgctgcagactcagtaagaacgacggaatctgctgcaaaaacaaacctgaactcgtccaccctctnagcccagtccccaggtccgtatggagcccccgtcagtgtgaggatgcggcggagccactgaggctaacgtcacagctgaactcatgggaacagccagtggccgccagtcgagctggtcacagccactgagttacntacggtgccttgatgatgattctctctttaatactggaaatgggagtccttaggaaagcagacaaccacgtatggcttcgagaccaaggtccctgggcagcccctccagcccgtggcccaggaggcccctggggcactggcaccagccccgagagtctgaaggcggcaggtggtgggtgctgtggcgcccccagctggagtcacagcttgtcatcggtcatctctagaaactgcgcgtagacatctcggatgcactcccccttggggttgaacaggaatttgtagtagctgccgtctgcacaaattgcaatgacggcgtttggctctgttccaaaggcacaaatgcacggagagcctgagggaacctgaaacttggagaaactccacttggaactgaagtattttggaaggaaactggctgaggccaaactggactgtttattcctttttggatcttcagctgcaaaaatatgcactgtgccgtggtcgctggatacgcagatgagggacgcatcctgattgaagttgatgcagtaaatattggctgcttgagatcctcttcgcagttcctggattaaatgccctgatgaagtatcaaatattcttataagcgtccctttctcggatgcagttgcaattcttgttccctgcaggttgagtgcaatgcagctcaggacaccctcgtgtgcaggaatgtccacgggtggcttctccgtgctggccaggtccacaagctgcacatggcccgtgtgcgtgcccggaaaggccaggagggagttgttactattgggacaaaggacacagaggcctttggggttatagcaggtttcgaagacgtgcaactgatggggattgtgtgtgaatgtgaacaccttaatcatggagtccaaaaccaccacaattctatctcgccgcagcttgactgccttgacttctgtagaaaattctatttcaataacagtcttcttcttcaggtcatcccagatcattactttgttgggagggtatttcggcttttttccaccaccaactaaagctaaatagttgcagcgaaataacatttcaacatggccaactcctccttctagaaattcttgtttctctttttcttttagtggatcagtgttatagactcggaatccattttccatcccacacgcaaagcatccgtggtcctggttgaagccggcgtagagcagcccgttgccgtgagggttacacggcaggaggttcatggcgccgccgtgctgggtcgccgctcctcagcgctgcatgcctctcgctggggacggcggcctggtcccttcgggccggcgctgaggccctcgtgccgaattcgccacncaggctcgctcctaga

SEQ ID NO: 142075 - DNA, 878 bp, Homo Sapiens
gttccactactggaggttgagcagtgatcactgtgtccgggagcaagtttcatgaccgaggttttcccgcactccattctggtgacagacgagactccttttctataatcattattcttcgtaaacataccgtttgtttcaagtccaaatccataagcctagatgacaagagttagcttttattcacaaatgtagttaaacatgaggggtgttttgtagaaactccaatttctacaaacattagtggtgcattttggtaacattgggacaataaataagttatttaattaataatacaattttaagacaaaagataccccaaacaaagcattatctgttgactgcctgagaaacatgaagatcttcaatgttagtacttttctgttcctcctttcttaggtggtcatccattggctttcttctactaggttgtctgccaagacttgggtctgaaggctgaagtgaaggccctttcagaaatgcattctggatgccatccttagttccacgcaagaaatgggctaaaatcccatataaaagaggtattgtattatcctttgattcttcaaatgcatttagttcatggatgagaaactgtctgtccaacggaactacaggttgaccagattctgctatgaggacagatgctgtatacttatatttgttgaattctaaatactctcgaattaattcattaattagaaggttttcatgagacaatgatggtcggggttcacggtcatcatctagggcattgaaaacttcagctcggatccttgcttttaaatgccctaataccccctttttttccaaggtgtcctttaaaacagcccggacgcggggtcgacgatatcccgggaattccggaccggtaccag

SEQ ID NO: 142076 - DNA, 561 bp, Homo Sapiens
aatatcttgcatttttgacaagatcatctgttacatgtttaagtatcctcctacggtgacctgtaggtgatattccaattttctgcagcaggctgtcatttattgctgcacagtccttcacagtagtaaaaccagactcatggaaatgtaagagatactgctccaaattaatgctcattaggaaatcttttatatccacatttacttcactgactgaggacataatggtggcttcattactaagctgagttacaaaaagtggcacgatgagacacacacacaagaagatgtacttctctactggcttttcctctatcaattgtgacagaaaagtttcttaaaatgttattttcttcacagtgactgctttacctgcttaagccttgcgctcgggtcgcggagttcgaaaagcgaggtgaggcggcgctgggaagctcagcgccggcgtctctcccagccttgggcgctcggtcctcgcccctctgccggaggcgccaggcctcctctttcccggtccccgccggctgtcaacagtcgcctctgctgcctggcggcggccgc

SEQ ID NO: 142077 - DNA, 1186 bp, Homo Sapiens
  misc_feature (140)..(140): n is a, c, g, or t
  misc_feature (898)..(898): n is a, c, g, or t
cccagggtttttccctttggggaacccaggcttatggccccatggttcccctttccccttacggggggcccgggggccccaaaacgaaagggttttggaaaagtttcttcgagggcccggaggcgggcccgacatagtanattttttgcttattgcgttccaccccaataaaagatggttaagtactggttagtaatttattcttgaggtttgttttaaagggaaaaagggggaagtagttataagtccagaaagaatatttcaggatgatacatgttgactataaacgcaaaaggtatactgatagcaatcctataaacagcaaatatggatgcaattgatttaagcctattagttcattttttaaaagcagccttgtttctttaaagttaagtactataaatgattcttgaaaatctactgtggacatgatatattcagtcaaacttgctaggagttggggaatgacttcgtgaccatccagttcacagtctgattgagagttaaacagcattacaaaaaagttacagtcacggtacataatcaattccttggacgatacagcttccacagctctcatcatcctggttattcttctttcagctttcacttacacattcctttctttcagacaaacaaaaaatatcaaagttcaccaaaattcttaaagtcacagttcatgtagcactgaatgatagtagctttggcatttgatattacaaagtcacttttccatcgcaaatgttttcttcattctgggtcaaggcgaggtaaaacaggaagaataaggttcccaaatgcagagtcttgagtgatgaagtatccagatgaatgtgcatgagcatgctgcaaagctgccttctgttgggctgcaaatatgctgctgcttcagcgtgantcccggaagtccttattaagagagggtctcgagagtgcaatgctagctccaggatgatttgttgaagactggttctgcataagtagttttcttttctctttgtccagttctgccaagattgcaactctatttttgttttgaaaaccttgtcctgaagagtttgctgccattttcctattttgtttcaagtatgtccagtggcaattggtcagcacttcacaatcacctgggacccgaggacaccgggaccgcctctccttacaatcgctgctcttaaagggggcgcgc

SEQ ID NO: 142078 - DNA, 437 bp, Homo Sapiens
tttaattgtgagatattctactcattttttatggtgatgaagagatttctaagacatttgcacttaatgaacgaaggggagaaattaaaataatcagaaaactagattttgaaaaaattgtgtcatatcaggtggatattaaagcctctgatggggcaggtctttctggaaaatgcactgtcataatacaggtggtagatatcaacgataacgctccggaactgaccatggcttcattcacaagccccatccgcgaaaattctcctgagaccgttgcagctcttttcagcattcaagaccgcgattcattgcgtgatattgtgattacatcatttcctcccaatttccaaactcctaatagaatagagaatagatcaattgtagcaattcgtttcgaagcaaagacaacgcatggtggcgctgcaggctaaggcttc

SEQ ID NO: 142079 - DNA, 527 bp, Homo Sapiens
ttttaaatggtggtacgggtcttttatttaaatgatgttcttttttattggcacatgtgggtcaattttctccttttctgttttactcaaaccaaaagctgcactctcggcaatttgtcccttacagaagaggctgtttcttgttacaacagtaccgtgctgtgcttcagccatccataacacgcccactgtatgtagtctcataggaggcattgcaggtccagtgtcctgggcaataggaagtatgagaggggttacagagatcctcttccttgggcaggaacacgtttacagccatgatagacactcactgtgaggaacatcaggtggtgtgcgtgtgtgtgtgtaggagaggtttgatacttggaaataaacctcctgaaccatgctaagaagtccaaagtatgataacaagtgtggatttatccagatgacattggagtaacactacagtgttttaagcagggaaattacatgatcacatttatattttataactatagtaaagcttccatgtgtagaataaa

SEQ ID NO: 142080 - DNA, 442 bp, Homo Sapiens
ttctgtcgaatctattttatggttggcattttgggggaagatttcgatgggttccacattcttgctttagttgttgtagagggatttgggtgtttctacccaaggcattggtctagcttttcctacaatgaacctatctttggaggttcaagctccccaccttcccccactgtggtgacctgtggccacttgcagaagggatggtgcctgacccactgccctagccccacgctatgcaccaaacttgttctccccgtcctggtccagggctggggtctttagagactgacagcctctgccccaggcctgagtccttagcaagggttgggtaaggaggttttaagggagaaggtccagtccttagcccttgaaatacaaagctcttctgacactgaatttggatgcaccttgttttatataataaatcgtgtttcacagaaaa

SEQ ID NO: 142081 - DNA, 547 bp, Homo Sapiens
tttttgtagagacagggtctcattatattgcctaggctagtctcaaacttctggcctcaagtaatcctccagcttcaactcccaaaagccctggaattacagggataacccattatgcctggcctaaaaaaaagtcttttaaaagttttttcaaaggacactattttaggcactaactgtatttggaaacacttcccagctcactcatttcttggtctggtattttcatttgctacacattctttctttgcacatataggccatttattgagggtccattgtgtagatgacaagatgccaagtgctgagggaaatgaaaaaagacagaaagtcctatgcaagttatctttgcatggtgccaaccacagcaccatttgcaattagatatattacaaacattctaggaaataatgggtcttatgtatttgtcaaattagaccttttgaaagaatgtgagccattgaatctgctaataagggcatactgtatgttcacattgtaggtatgagcctggtgagtagattgtaaacaaaggaaaaaataggtg

SEQ ID NO: 142082 - DNA, 129 bp, Homo Sapiens
tttgtattcactagacttttatttagttccagggcttatgaaggggcccaagagagtcaaagcagctttctacaaattcagctgtcacattaattttctcacacactagagttgccacttaaaaatatt

SEQ ID NO: 142083 - DNA, 474 bp, Homo Sapiens
tttgtgtagtaatcaatttattgcaaggaagtgacttactcagttttgaaacgtggctggacaagtccaaaatctgtacagcaggcagttaggaggggcaggctggaattctggggcataagctgaagctgctgtccttaaacaaaatttattttcatctcacggaagactcaactctgcttttatggcctttccactgattgaaatagacccacccagattatctaggagagtctccctattttaagtttagctgattggcaaccttaattctgtttgaaccttaatttctttgcaatataacatattcataggttctggggattagggcaggaacatcttggcggtcattattttgcatgcaataccattctagagtatctgcaaagttgagaagctcctggagacagaaaagtcctgacaagagagcagatgttttttcctcaaataattcaactccttcaccaacatatc

SEQ ID NO: 142084 - DNA, 372 bp, Homo Sapiens
tttgctgtttgaattaatttttatccatttctgtgtcaagggttcagttaatataaagttgacttggcaggtcttttcatgttagtagtttttcaagagatgatacagtagatcaggagcaccaagtggtgctagtacactgtgttgagaaggattctgaggccacatctgaaacacagcccatgctcctgtgagctcagtctggcccaccctggggctgtgcaccccacagggaatccctcgaggaaaagagtgatgggtgaaggcaggaggaaccatgccagggaaagactcctaaacatctcttctccttagatccacagcaaccaaaatacaatggcagctcgctctcttccagccccctctcctggg

SEQ ID NO: 142085 - DNA, 476 bp, Homo Sapiens
ttttctgttctttatattcttttaataaagatactttcaaaacaacacttatttggttattcagttatctatacacattccataaacagtgatatttaaaatgtcactgaaaagatttccttggtcctgcctgagtcctagacagaaattcctgaacaaagtagaccttagatgaatagagaggagtgagccagacctgttgaacttgggatattttgattgaagggaggaaagtatgggaaatcttcctaggagggcattaaagttaagcaaataatataaagaaatgtctgcataaccaggacaatcatctcaggacagcatggtcaatgtgttcattcatctcaggacggcaaggcccaggtgttcatccctctcaggagagcatggctgatgtgttcattcatctcaagacagcatggcccaggtgttcattcgtctcaggacagcatggcccaggtgttcattcatctcaa

SEQ ID NO: 142086 - DNA, 644 bp, Homo Sapiens
  misc_feature (61)..(61): n is a, c, g, or t
gaagaactggaagagactgccatctacaagggagattactcggccacacatcccactgtanaagtattttgggaaacatttcatgagtttccattggaaaagaagaagcagtttcttcttgttcctgacaggcagcgatcggtttcccatctacggcatggccagtctgcagattgtcatccagtccacagccagcggggaggagtacttgccggtggcccacacttgctacaaccttcttgacctccccaagtacagcagcaaagagattctgagtgcccggctgacccaggcccttgacaactatgaagggtttagtttggcctgaggcttctcagcttgtccagtatttcccttcgttcctcagtgtccacattgaggcctatacagaaaatcatggggagtgatttctatttttttattgtctaagtgggttgggacttttaaatactgagcctggttgatgtgtttctgggattgtatagcagtaaacaacctttttgaaaaattagaggttggggatggggtgaaaaattggcccttgtatgggaggtgtttttgtttttgttttaaaccaaactacccagtattccttgcacttgtgaatgtgttgcactctgctggatgaaatgggtagtttggtt

SEQ ID NO: 142087 - DNA, 374 bp, Homo Sapiens
ctgaaatgttgtgtttctggctatcctccaccaagttttacctggttacgaggcgaggaagtcatccaactcaggtctaaaaagtattctttattgggtggaagcaacttgcttatctccaatgtgacagatgatgacagtggaatgtatacctgtgttgtcacatataaaaatgagaatattagtgcctctgcagagctcacagtcttggtaatcatcgataaagtattggtggacaccttttgggtataaggattgcactaggttctgggaagactacagaaacatctgaaacctggcttcagtgggcttcgtataattacaattcgtaaaatcagttggcctaatactgtctgaataaactttttattaaa

SEQ ID NO: 142088 - DNA, 464 bp, Homo Sapiens
tttagtggcttaaaacaacaatatttatttttgtcaggtatttgcaatttggacagggctcagtgagaataattcctttttttgctccactcagcatcgactggggaagcttgaaggctggagactagaatcatctgaaggttcattcatatacctggtggttgagtctggctattagttgaaaccttagctggggctataagctggaacatcttcactggcccctccatgtggcctgagattcctcacaatttccaacaagtcatgaagtcacagagtgttaattcttcagcactcaattcattgaagctgttcaattcaagagaatagaaatggattttacctcttgatgcagggaagtggcaaagttctagaagatcatcaagggctggaaatattgctgtggtcattccagagaaatgcaatctataaaacaaataaagatgcagcaatcctaaataaaa

SEQ ID NO: 142089 - DNA, 683 bp, Homo Sapiens
ttttgttaatgacagaagaagggatttttttggtttattctcaacaacagaaggcagagacaaggcagaaccactctgagtccatttgacttctgtattctctaccaaggaaaacagtctcagttggaaatgactgagaagtgaaagcgttctgcctatgaggagagtgcacaggtgtgttttgcagctgtaagtgaatctcaggcccagagtagggagacctagggccatcactgagtggtatccgaggactgcaggtggcttgcactgtttcagcaagttggcgggtctcaaaaaccgtgcattgatgttaattcctgcaaaatctgaaactggggtattaaatggatgatttatgaaccgttagaatggtgagtttcttgtgttcctggagagtagatcagcacaaacgaatcccatctcccacggatcaggggtgtgtttgatgaagtgcacgttcactctagcaaggcttctgacaacgatgtcatgagatgcatgtgaatgagttggagaattgctggctagatgaaattgtaattacaaaacttttcagatggtttcccacgtatgtgtacttgaattgtgcattgatggaatgagggccttgacctttctggattgtttacttttccatctcctctctttcctagatgtgtgagtgggagcaaattgttcaacct

SEQ ID NO: 142090 - DNA, 669 bp, Homo Sapiens
ttttttttgaggaaagctatttatttccaagatatagactgtacttttaagacaggacttttcagaagcaggaaattttagttgttgccagagaggtgtgtcaaggacacagtgaaaggagccatgcggacatggggtggaaggctttgtccaacactgttacaacacttttgtaaatgagcaaaacatctttaaaaatccttataaattctttataatatgttacacatttagagacaatatttacaataaaagaatgggggagggagggaaagaaatctactttacagtaaatctttgcataaaacaagaggactgatagacgtggcagtgggttcaccacctacctgggcttccctggaatgagtgagggtgtgtgggggctggcctggtgattggaagtctatttacagcctgtggggagaagagggcgctgggtcctgtccatcctgcaggaacagcccagctcagaccccataaatcagtgtgtgagtgacagagagacagcaggggtgttgactatccctcctcctaaggggaagaaggtgggcttctgtgtgcctgggctgtggaaggaacaggcacagatggaaaaacaaaaagaccgcgtatgcggccgcaagcttattccctttagtggagggttaattttagcttggcactgccagt

SEQ ID NO: 142091 - DNA, 482 bp, Homo Sapiens
tttgtcattttggttgcttcagtttcattcttatacatcatataaagagtttctttcacctgtgcccaggctttttgggggctgctctttatgatcacatgattatccctggctgcaaagctcccagattgcagagcaacaaacagtgcggtgattgttcataattgtaaatccacccacacttctaccatttttgttcattgttaagtattcatatttttgtactcggctggagagcatcatgtacattaattgtcactgaggttgctactggctaccacttttattttggaaaagtatttaaggcaaaaacatataaattctaatgcagcatttcagttatttgaagtctttatatgcagtccttttagagaaagttagagaaagcgtgcacaggcattggtcttgattatctggatataattagaagcttattgcagaggagataatatgagaattagcatcttacatcaggcacagag

SEQ ID NO: 142092 - DNA, 450 bp, Homo Sapiens
aggccagagcaggctttattggggccgtgtaaaccccagggagaggcaggacgtggaccacagagagtcatgtacaggctgcgctttcacttgtcttctctgtctcagtctcctgaagagcccgaggaagtcaagtctccccaccatgagtgaggggtctggtctgacagttgggccttcagagccaggcacgtggaccgtgtcagaagcgccacctggtggtgactgggatgctggcagggaggagctgagggcaaaactctagtggaaatttcccaggtcggtcccacgccccggtgacagggtgaaccctgagaggagcccccaaactggaggcaattgtctttgaggtaaccactcaccccagcttttcagagaccagaggcaagacatttctggctaagagccatggatagttgttccatgcgttttggggtttcttatcccaaa

SEQ ID NO: 142093 - DNA, 506 bp, Homo Sapiens
caagaaaatttcaattttagaaaccgtacatttaacttaaggattttctttgttgaaatttcagtgtgggttttcctttgtataataccacggattttacttttatgcggtgtatacaggtgttctacctaagctttcttcctgccaagagacacacagttcttcctgctctgcctttttcatgagcttccatgcttgctttgtttctgaatataaagcagagtgtgaatagcctgtggactgtatgctgacagacaagtacatgaagcgttgaatatcttcaagaaatcgttttatatgatcaagtcactcaactcgtgttgacataagcttaccccaacttgaattactcagccctgttgttgcagagtgagtttagtaacatggctacttttcgttggatccatgtctcctgcgtttcggagagctgcatattcatgtcagtcataacctttgtccctgtaacctgtcagttaactagaaagaattatacattgcatagcact

SEQ ID NO: 142094 - DNA, 472 bp, Homo Sapiens
tttcccaggaagtagcctctcagttttagttttcctcaatcaaattcaagtccaggtccccaaagtcccgctggcacagtgtccgcttgctcagcgcctgccgaccccaccgcacagccccctcctcctcctcttcgctttcactcagcacctgggaggaacccccagtggggctgcaggaagcagagaggggtggggggctacaggccatgaaccatggtggagagatgctgctgccttcccgggctgtttcttggagacaaagacctcctgagtatggtttctgattcatcttgtcaaagtccaacgaaggccgcagacgccgggggtcttcctcgtggcgccgcttgaccccagttttgcgggcatccagattacaaggctgtgagcggctttcggggaaggttgcggagaccctcgaggtcgccaggggcagctctggggaggatgcgggagagctccgggcagaggg

SEQ ID NO: 142095 - DNA, 447 bp, Homo Sapiens
aggccctttccctctataaacctgccgttttctgtctcccaagtcatcccagtttagaactgctccaggaaataatgaatgaacagagagagcctagtttgtttatttatttacaatccactagtctaatctagtttagatccagcggcaatttttggggtgccaaggaggaaagaaggagatggcagtgcggggacagggcagagcctgggccaaaggaagccacacccagttcttgccctgccctgcccgacacaggcaacgtgaccccaagcgacagccagctgatgcttgcttctccgagcccggcggtcagcagccggaagtagcccgcccgggggcggggaaaggtgccttaaggaggagctaggggcgtgcggccaattgcaagcgactgtcctagcgaagagggcggaagaggagagatccagttccggacgcggccgc

SEQ ID NO: 142096 - DNA, 564 bp, Homo Sapiens
  misc_feature (518)..(518): n is a, c, g, or t
  misc_feature (534)..(534): n is a, c, g, or t
ttttgttttaagtgtacatcatacatttattaccaacaaccctctcaactccaaaattgggcacagggattaaaaataaaaattcattgcactacttagtaaagcattactagtaactttcataaaaaatgtacaaactttgttaaaaatttatcaagccttcaaatgatttggttacagatatttataatacatacatttaaaactatatgttaactgatacaatggaatatgatttgagaaaatgactcagcaaatgattccaaaaaacacccctgtgagctttcacaatctgaaacggcaaaatgaggtaaccaaatgtaccaacagggggacaaacaaacagctttctaatgaaaaggcccaaagataatctgtgaaaaatattctcacaagtgagtcggtagatctcattcaaaattattctaagaggcccaaatttaagaatcttaacaaatcacatttcagatagtatataaaatctaaatatgctttcacattttccagattttgctcanaaaattaaggacaganaatcctaatatgagatcttgatacctggag

SEQ ID NO: 142097 - DNA, 375 bp, Homo Sapiens
  misc_feature (158)..(176): n is a, c, g, or t
gcggccgctccctccccattccctcctcgctccccacgctgtactggattcatatcccaaatctgcaggccaagtaggctctgcggtgcggccagcgccccagaagggagccctgcaaaggagcccagttcttgcaactgcccctcctttgacttccnnnnnnnnnnnnnnnnnnnagggagaatgtccagaggtggagggctttaggggtgcagaggctgagattcaaggggaaataacctgccattcatccagcaggcccaggccaaagaccagggctagactctgcgtggacagaatctccttggggagagcgatgaactgaaggcgcattcttgtcccaagtcctagaattcctagacactgccctgcccc

SEQ ID NO: 142098 - DNA, 495 bp, Homo Sapiens
gcggccgcagtgacccccgagaagggggttgctgggaggataagggaagagggaatttggcacgcgctgctctgctgcctttgattccaccgccgccattttgtggccgcagagcgcccgcccgctgctgttggcgcaggcgcggtcgaggcgtcgcgagattctggcttccacccgctgtgacgcgcccgcgaggccgccattgggctggctttgcggagggcgcgggcggctccgcccgcacttctcggcctttcctaactgcggcagatgggagggggccggagagcccggagagtgtgcggctgcgcagttggaaaggtggcagtgggcgttgcggttgctgcggtctgggcccagtagcggaccgtgttgggagggagctgggttttcattttgtctgcaggtaacctggcctcattagaggctctgttggcaatctcgttcataacatcactgtgtaaacattttatgccgttgatgtttttgattgtt

SEQ ID NO: 142099 - DNA, 518 bp, Homo Sapiens
ttttttttacaagcctccatttttattattaaatttgtcagatattactttttaaattcctacacagtttctaaatggttactctcaacttccgtacttatctcattataaaacattaacaatttgtgaactggcactagtccatgaaccaaactttgagtacctctgctctagatttcaaaaacagatgtggatatatgtgtaaaaatttggtatataaaaaagatgcttttctagatgggtagaagaaaagattgttcaaatgtcctatggtctcacaatccagtggttataactgtaaaactcatccagcctttgggagacactgaaactccatttaaagataagaacttgaaggatgtttaatgtaaacctaaattgattttcccttcaactccttttgggtacataattacttttacctagaagctgttcttgactttactcataacaattataccatgacctcactgtccttctccaagatgaaacaaaaaacccttcaagtgggcctggcc

SEQ ID NO: 142100 - DNA, 499 bp, Homo Sapiens
ttgagtctagtagaatttgagtctccagggaaagagctacttgaccaaattaaactagtagcaggtagagcatgaatgacagcatattataccatcaagatgttcttagagcagtgtatggatggatcgattgtactgccatcagttgtgactgacgttgtattcaaggagaaagagaaacttgtttagaaagcactttgaaagttttttgagtacgggggtgccctgtatcaccccgttatggttgaactttctccttcaaaattaccagacttggcagcagtggcaaattattgggctaaaagacttaatcagacatattctgggttcaaggctcctaatataatacctggtgcaaacattatacttccactcattcagatggttgcatcctgccaggcatccagtgggactgggaatatggacacttgaacattaaacatcctgaagaattttggaatgacaggttacaagtgaacataatcagttctctatatta

SEQ ID NO: 142101 - DNA, 453 bp, Homo Sapiens
  misc_feature (394)..(410): n is a, c, g, or t
accagggagttttgtccctgaaaattcgcaagccaagcccttatgatggaggcactacttctcgcaaagcagtcaatgcccttgggccagtggagattgaatgcaaactgagggtgaaagtcattgcacaatgaggatttttgaatttataatatcatctaaggtgggctctccttctgcagactcctcttgcaaggcgtacctccaaacataattgattcatatctgcgagacttacactcaagcaatcctgaggaatactgagggagggcctggctactgtctctctgcactctgctgctttgaaatctggttgaaatgagaaaaagcattttctgttttcccaccaggcccccaagtgtggtctttttctttcctcctaatgttgaagagnnnnnnnnnnnnnnnnngtttgcccagattgcttaattaaaaattgcaaacaaaatctca

SEQ ID NO: 142102 - DNA, 399 bp, Homo Sapiens
  misc_feature (332)..(332): n is a, c, g, or t
tttactaagattaatggtcatttgcatatgtttattctttaaaaattgaaactcagatctggaacatttgcgttcactgtaggcctgaatgctgataaagctaaccattttggggtggttgtttgcttgacattgattgtatttccctgaaggcaacaattctcagctcttagcctttctccattttgtgtttcaaggctgcttaattccacatggctttatagtgtcaatgaacaacacacttgcagtgataaatattgtaactcagtgatgaagtttcacagatattcttggctatttacgtcttgtcggattctcaggaggccatgcanagggttaatacttccttcacttctttgctctgcaaacaaaccttccccacctggcccaggtaacacc

SEQ ID NO: 142103 - DNA, 514 bp, Homo Sapiens
tagattttgatttcatatatatgtgtatgggaggcatggatatgttatgaaatcagctggtaattcctcctcatcacgtttctctcattttcttttgttttccattgcaaggggatggttgttttctttctgcctttagtttgcttttgcccaaggcccttaacatttggacccttacaatagggttaattttcagggaaaaagaatgttggcgtgtgtaaagtctctattagcaatgaagggaatttgttaacgatgcatccacttgattgatgacttattgcaaatggcggttggctgaggaaaacccatgacacagcacaactctacagacagtgatgtgtctcttgtttctactgctaagaaggtctgaaaatttaatgaaaccacttcatacatttaagtattttgtttggtttgaactcaatcagtagcttttccttacatgtttaaaaataattccaatgacagatgagcagctcacttttccaaagtacccctaaaggccaaatta

SEQ ID NO: 142104 - DNA, 437 bp, Homo Sapiens
tttcagatataagaggtttattaaggaaaggctcccagagacaccagtaaataaatgggagggtagggaaagggattaagcccagcaagggtgtgatttcatgtaatgtcccagcctcaggccgatctagaggaaagggagtgctagagcataaattactcctcagagaatgtccttccttgaggcaagggagctgggcttttgactcgtagcccagtcagtcagcggccttggccaagaggacggagaactcccagaccctgctggctctccatatgggctgactggctccaataccaggtcacaggtgccagcctttaacctcaaagcacttaattgggattgggcacacagagctggccagagacccttggggatctgggtggccaccaacactgctggtcatggcacagcacctccattactaccctgcacac

SEQ ID NO: 142105 - DNA, 581 bp, Homo Sapiens
cgcccacatatcacggtggctagtaggacactgaaaaatgtgggaacatacatgtatttctgaaaaatacatcatttctgacttcctcaacaaagctttgagttcagtgacataggaaaaggcaaagcagtcttagctgaaatcatccttgctcttttcagaacataatcagcaaaactaacaagacagattaaataagtagaccattgaactctctcttaccttatgtgcaaggccaagccatcctgtaggctagagatccccaaatcagagagtgtatctgagccaacagaagcaggtgacaaggagccctccttctcctccagtaggtccaacttcaccaggttgctgatctcatcctctgagttatcttcagacacagaacctattatgaatcgagagtgctggttcagctccagaggttgggccaagggagatggttcatccattattcctccaaaatgagctcttacagctcttataattcttactgtctgagtagatatccacttccaaaaagacctgagaggccactctgctcctgatgcctgcttatccgtcttcacgttgtctctgagagg

SEQ ID NO: 142106 - DNA, 671 bp, Homo Sapiens
tttttccatttcaggtcattttatcccacagagttctcagggccattggcagtgatggttgacatgaagtggctgggattcagggcccgctggcgggctgcttctcggtttgcgtagagggcctggccaatgaggtactcgctttcctgggccacatctgacaggcgcaagtcaaattccaggagggtcttgttgtctgacatgccttccaggagctgcttcccaccgtccagcccgatgtggttgcaggacaggttgatgctggtgagtgtggtgttgatggcgagcacctgtgacaggagtgtggcggtgggctcagacagctcattgccaccgaggtgcagcgtggtgaggcacttgttggtctgcaaggcatgggcaagagcctggccaccctcatcctcgatgcagttgagacgtaggttgagggaaatgaggttggtgttgtgtgccagagcgtgagccagggactgggcaccgggtgcacgcacctggttgttagccaggttgagcacacgcaggcggctgtggctcagcagcttggcagcgctcgtgaaccaggttctccatgaagttttgttacaaattcagctctccaagactgggttgttccaaaggcttcgattatgatgccgtgcctgtcatcatcaactctgcttcggtcaacttga

SEQ ID NO: 142107 - DNA, 545 bp, Homo Sapiens
ttttaaaattccacagctttattctatatcataattttgtgtagcaggtatatgggcagggctcagttgggagattcttctgctacacatggagcttgacggaggtcacttggtggtattgagttgctggatggtctggtttaaaggatcaaagacagtcttacccaagtgtctggttgcctgacaggagaggctggaagacagctcacctggttcctcttcctctccatgtagtctcagagtctcttacatggtctcccagaaaaacagctggatttctaatatgctggctcagagttccaagaccaagtgatcctggagatgagattttggtcatggtagatacaacttcgcttgatccgctctcagaagcgctgacttaagttggcaccttgtccctccaatgcaaacaccacatgctcatcctcacagcatcagtcactcaggaaaggccctggcagcgtgctttattcactggtaatccccagcaccaagcttaatctcattgaggacctgtggccagctggatctagatccaatttcca

SEQ ID NO: 142108 - DNA, 480 bp, Homo Sapiens
tttcatggaagaaaacttttttatttatatgtatatcatagaaaggctaaagtaacattgatcacaaaaaataaaattccccaaaccaatagattattagtttatacagtgaagatactttggctctttagggacatttttacttggagtcacgagaacagagaatatgacttttagtcacacggaaatgagccttggatgggaatttttaagatttatgggaactgtgtgctatgctgatttgggacaataagcgttctagtcccaccaggtggcgcccgcgttcggcattctgagaacgtttggtgtcttctggactccagaatctggacggtccgaccgcctcgtgcttggtgggtttacaaactctgactggttcttaccacccatctaacaggaaatttttgttttttaaaaacaaaccaacccataaaacatctgaccagatgccacactcaagagaacacttgtattcgggtg

SEQ ID NO: 142109 - DNA, 752 bp, Homo Sapiens
tttttctgatagatctgacgtttattcaggtctgagacttatcctttttttacatgtataatatatggatatacaacacacagagtttaaaatttcatacacagaaaaggaaaaatgagaagtacagtgccattgttttatctggttccatcagtgaaagctgctccctataaatgagttttctagataagtacatatagagtctatgctactaaaataaattactaatctcagctgaaatctggtaatgggattgggactactgccattatcctaaattactcccacactagagtacatttagagcttctgggtcttttttttctcttagtgtttcttactctcctcactacctttgtagtctggtggtgtagtctgttttttgcagctctccatgcacttgattctagttatcctctttcccttctcctattctaattttctgtttcaaatatatcttgggttgaagaatcaggaaaccaagcatttaaaaactgtacttaaataatgggtcaggaggcagtgagtgaagaccccagagttcgtgagagtgatcctggttacatcatgaccttttctttctttctaccaggttcttagctatgttctacgctaacagagaagttatcttcttgcattctatcatttcagaaggtgcttcagtgattgctgtgggtgggcaagggggaggatgagtggcccctctcctctgcttcagtgggagtagccctgaaggagtagctcttttacta

SEQ ID NO: 142110 - DNA, 508 bp, Homo Sapiens
gggtcttctcacctgtctcataaagcagcagcactatcttttggtaggctgacaataggcacattacccatgcggatgaggctatactagtgctatggcaaaaggggaagtaaattagaaaagtgggaggcatgtagagggttcctattatagttatatacaaatatattaaatatactataaaaatagtcgattctattcctttgcaattacttcagaagctccttttagaagaaagctcacccaatccaaacttaaaaggttctctttctccaaacacttaaaatggcaagtgcctttgtgctgtttcttctctaccattcaaaaattccaatcagcttgtcctggctagaaagactcactcagcaacattaatatccagtgtttacccgcttccaacagggactcctgtgggactaagggccacaggtaattggaaaggttatagacttgaatgcgttttacacacatattcatcgacgaactttaaattaccgaggatgcaaag

SEQ ID NO: 142111 - DNA, 410 bp, Homo Sapiens
tttagttttgggaatttattactaaaatttatcaaagcaggcaaggaatgaagttgtatccttcactgtcaaacattacttgagtccctttactacacaaaaaagccaaagaatacaagaatacagagacatacttcctgattccacagaactcataatctggaagcacagcccatgaaagcatttcagtacaaactggtaaataatagggacaggaaaacctaactaactcagctgtcagctgtggttgcaggcaggccggcagtggatggttccttcagtgatttctgaactgagtttgaagcatgggcaggaattagtaggtcagacacagaacaaaagaagagcagtcttcatcagacatttagcttgcctgaaaatcacaagcacaatctaaaaaggtagtgaaa

SEQ ID NO: 142112 - DNA, 322 bp, Homo Sapiens
ttcaggtatttcagcaaaaattaaatacctaggaataaacttagatgtgcagggcttttatcaaggacatgacaaaattttgctgagaggaatgaaagatttgcattctatgttcctgaatgagcagatttcatgttataaatatgttatcaccatgtcttcatattaatttataaatgtaatttctgctgggcacagtggctcatacctgtaatctgaacagtttgggaagctgaagtgggtagatgacaattagctgggtgtctgtggcacacacttgttccaactacttctgaggccgaggtgggaggatcgcttgggc

SEQ ID NO: 142113 - DNA, 532 bp, Homo Sapiens
tttgcattttaagattttatttgtgacagcattagtttcctaaataagggaaatgtgaagatgtgtttccacgctgatggttaataagtgtgaagactgataaccaataataattggtaaccataaaatatttcaatacaatgaattaatccatatgaaatgaaaaagagctatatgacataaagcaagtgttgagcaagcagagctcttcaaacaagtacaaatttacttagcaataaaattcagtagtaaatgaaatgcaattatggcactggagaaaaacctcacagagtttgggatgaatcaggtttggaaggacaatgtactcacactctttcatacaccctctcattgcacgcacatacacataaccacgtgaatttgtgagcaaaaacattccctgacctttctacccacaacacatatgtgcagtacccaggttagagctgctccatccacacccagtgcctgactctatagcctggacctcctgccttcttcccatgccattcgtacttgtgccctttccctc

SEQ ID NO: 142114 - DNA, 1153 bp, Homo Sapiens
tttgattgataccctctttcagagcatttttaattgtgtttccacctggctgtttttagtgtttacttgtccaaacttctgtttaggagcaattattcccagagggatgggtattatagatgtttaggaacggcagaactttccactaggaagcagctaaacagcccgagaggctcccagcaccagagaggctgagagcttcccacgtggcatctgcaagctgggcagcatttcatcgagtgggaagaccatgaaatacaccatgacgcagtcatgaggagtcaaatatttcaacaggcgaaccaagaaggcaaacagggagaaaggaaagagccgtgagcacgcgctatctcccaacatcccagtggtcgggatcctcaccttttgatgagcttgatggatttgaaggcttcgtccatgtctcctatggtgacaaagaagctgaagtggagcatggcgtcccgggtggccttgtcgcagtcctccagccccacaaagtctcgcaggggtctcctggacaccatctgagggatgtggtggcacccaggctccacctcgtcttctctgtctgcttcttcgggctttcttgtgaagtagtaataaggcacttccatccccaggagactgtgggaggtggcaggccgggggaagctctcatgaagcaggaagccgtgctcttcggaaatgaagaaggacaggatcaaaacatctgccgcagggccagcgcgcccatcttggggctgcccgtttgcagactgaggctgggagcgcggcgtctcctgcacggcttcgcatacaaacagccggggctcgctctggtcccagaagtggttcacgggaacataatttttcagtccctcatccacaaagaggtggctcttattagtctcttgctcattaaaggacagcgtctctctccgatcaatttgtccagtcttgaagtcaaagacggtcactgtgtccatttcaacatcgtagaagcagattttggaatcagggctgttgtcagccttgctggggaggatgctgatggtgctcccgctgctgctgcaccgcagagaagcgatgccccccaccccagggaccagctccgccaggctcctgcagctacagtgtgcctcgtgccgaattcgggcgccgtcacttcatactc

SEQ ID NO: 142115 - DNA, 658 bp, Homo Sapiens
caagaaacatctccgctgtattaaaaattaagaacaagtaagctgaaggcagataaccctctgaataatagttattttacaagcttcagagaaatcattttgagaaataagagctgaaattctgtggtttatcttatttactgctagagaaattctaagtgcaagttgtattttaggagatgtagcacccagtgtccttttgaggtttgatgtctggttctttcacaggtttcacttcttcttctggtttgggtttagtactgtcatccttgggtcttttggtgagatcaaatgcagccaatgtttctggtgtccactgaacacttgtaggaggaaattcgaaaggtataggctctacgagaccataatttgctttgagttccagctgtggggcttctgttggaattttttgaaagtaaataaatccattttctctctgacatttttctagggtgttcttcacaaggtttccaagtttcctaaagtacagatgtcctgaaggtttgactgttggtccaggtcctttggtttctccatattctttacacagtgcttctgcctttgcatacaatttttctgcttcttggagagacctgattgcttcaccgcatttatcactagccaataaagtctcaccatggtaacagtaagcataagc

SEQ ID NO: 142116 - DNA, 428 bp, Homo Sapiens
tcagttgactcactttgtatttttctagtttgtatctttcaatgaggatgcattttctgtttgcatgtagatggtaaattctattttgtatccactctacctcttacatctcatagatcctgtaggtatcctctggtgaatggaatacctctttaatttcaggtttaaaaaagttgtcttaattcagcaactcgagaaggcgcttaaagaaatagattcccactgccatctcagaaaagttaagcacatgagaaaaagataattgtgttagtgcaaagaccaaggagaaacaaggacatatgctgtaggatggaacaggttattgctgaagctccctataatcctgaaatgaagagaattcccttccagaagctacgaaaaagggagctgtttaaatttaataaatctctgttagtaaaagctgcaaa

SEQ ID NO: 142117 - DNA, 459 bp, Homo Sapiens
  misc_feature (392)..(393): n is a, c, g, or t
tttcacacagttcagcttttattaaaattaaaggatgggaaattagaacatgattcctgttaaaataatacatttgaggaaatgtttcttcagctattgctgtaactgatcaagcatgtgacaagtgttcttttacaagatatacagtccctaacagccacgcagagaacaccagatcgaggatcttacctatgcaatatgttgtacggggtgtcagtgatcaagtctgactggctatgacaaccacagggacagagcacccacacagacatacacattcagtgtcttcagttttctttcaacgaaagcattttacacataatatgcaaattaaacaagaagtacaacaagggtcctctattgccactgaaaatgaggggaggggaggttgnngggagccgaataatttacaatctcataaccaaacatggcacttgggtgatttgatgctgcaaatgc

SEQ ID NO: 142118 - DNA, 800 bp, Homo Sapiens
ttttttttaaaactggtaacatgtatttaatattgtgcataacattgctttgagttgatgaggtaagatcagctatgaggcagtgtttttgcaaaatacctgtaactacttctgaacacccttcagtcagccactgatcacctggtttctgccatgtccaaattatgatctttggcaacaaaagatctgactggaagaagtgttgtagacacccctaaatgatctctttgccctggccggctttatccactttaactgctacaagttggggaatgatttgctaaacgtattagcaatcaatattgcagttgctaatgaaaaactagatatttgtatggaactccataatcaaacctctattaaacagaagacagattagtaaagaatgtagatgcctgttactaagtgaaacatccatgtatcaggaataattccaaagtgttataatacatgatcttccttagtccatttggtcttcaaaaatgtatgtagttgtatcaataaaattcactgccttttcccacagggaatggtattgctagggactattgtctaaacatgatgatgattcatggagaccactctcatggatgcatctgtccgaatgtgcagtctgcattcttaatgtttaccacaaacccagcgaagctgatgatctgtctgaaggtcagtcacttcttcaatagttctccagctacactggcaggcatatgcccgtgttcctttcttctttatcaactttgcttttaatttgtgaaattctggcatgttgttcctgaaaaacagataatcacacgatt

SEQ ID NO: 142119 - DNA, 655 bp, Homo Sapiens
tttcagaatttttggactgtcgtcagtcctaacctacacatttattcgttcaacaaatatttcagcgcctgggtcaggcatcaggaatacactggtggttaaaacagacggaaagctccatctggtgggacgcagtctgggagggaaagggagtcctggggacatgttttcgtcggctctaggctaagcacctctcgccgtagcacacggggtcggcaccgctgcccggcgaagtacttgttactttgcagtccagtacgaagcggcggagtaaccggttccaacccaaggcagcgactcatgcgagtcgttctaagcgccgcgctggggggtacatacggtgcacgcgtgggtgcctcaccccctggcagcgcctccagggacgctgctccgggaaagagcagccgccgcgacctcaggcggcgggaaaggtgggacctcacaatgcgccggaagcggtccctcgtggcttgggatctctccgggttattccttgcgccgtccacgccgcactgcccacgagggcgtccccgcccgagggacaactcaccgcccggggcctccctgagcgttcccttccaccatctgacacccactgctaagtgtgagaggacccagggggtaattgccgggccgcaggcgcccttaggaaccc

SEQ ID NO: 142120 - DNA, 427 bp, Homo Sapiens
cactggggcttccaagggggccagcaggagttaaaacgcttaagctactcaaaggccttatataaatctaataagtgtttcacaacacaggaactgggaatcccaacgcattttcggacaacccaaaaggtctgaaaaacaaactcgagcagtcccctccaaagcagctgttggctcagcctccgagcttctcagcccgcagcctgttttcaaacttcaccatccctgacggatgaaagaccccgacctccgccgcccgagctcccagcgcctctcggggtttcgaggtgcccgagcctgcggagaagggaaaggaaacccgggccgggttcggcggaggagaggagccccgcgcgctccgcagcccagacaaagctgcgcccggagagcggcgctcttcccgccctgtctagcggagaagcgcggc

SEQ ID NO: 142121 - DNA, 374 bp, Homo Sapiens
ttttaacttacaattcaattagcaatttaatcattggtttttcactcccccgtagcagaattttacatccgtctgcttgctgtggtctgtaggtggtgggtgggctctcctcccttgactttgggcttggcgagtgacgtgctctggctagtgggaaggtagcagaatttgaaatgggcaaaggtttggaatgtgccagcaagggcagcctggtcttcctgcttgccagggacccactacaagcaggctgtgccccagagaagaatggagaacgcagataactgacgggggctccaagaagcgagaaacctgggcggacctcagcccagcccacatcccagaacccggaggccaggggcttggccaggtggagg

SEQ ID NO: 142122 - DNA, 337 bp, Homo Sapiens
aaggggggtgatgctgagtcacatttattaccagactttcctggccccatgctcacaggcactggtcactgagtcaggcatttgccagggctgtctgcttgggcgactgctgcaggaaagcaggctgaggccccagtgcccagtctgagccttagaaccggccctcaggagggctcagccccataccactaggggggctcctgcaaacctggtcccttgggctgaggcagggatttcacctccttttgcaggagccgctgcaaggctgtggatgaagctttctggtcacaaagccccttctcctggggctgctgtgggagtagctcttggcacacag

SEQ ID NO: 142123 - DNA, 396 bp, Homo Sapiens
tttgttaaaataagataaactttatttttgtaattttcaatcacaaaaaaatctatatttttgtctaagcatttattttactgaatcgaaaagacatgaaaagaaaaatcatgtttttactaacgtatataagtgactctttttggacaacatataataaatatgatatatcacttatcactcagtctttcaaatgtacattttttcatattatggagcatgccacttttccaaaagaaaaaaggtcatgagaaatcagtgcaaagttctcagttaccctcctcttttctctggggcagacggaatgtcctcggcaacgccctttgcctcagcacttgaggctgtccatatatagttcactctgcctgtgctgtttccgctccgacatcagaatgg

SEQ ID NO: 142124 - DNA, 717 bp, Homo Sapiens
gcattttgtacatgtttaatattaaaatagtatccatagttgatataattgttagtatatggttaataataaataataaatacagttcttctcacttgtgaaaaccctgtagcacctccacagagccctagagtttctcaagacagagcgagaaacctctggcttagatgcttttgaggactggaccatctctgatactctgtacaactgatgggttattctgtgaaaagtgtcgtttggaatattgcatcttattacagaagccatgatctttaggatctctagggatcctggaagggagtgataaagttacagaatgtaaatataggggaaagttcctttcagctatagtcaagatagcagttgtgtcaccactggagactgagccagggttctgcagtcaggtaaaccttaggcaagtcacttgcttggcatccccatgtggatactggagctaatacccgagaaaggtaatgtcctttgtatgtggctggtgctcagcacttgttaggtgcctccttcacccccggtcccccagctttggggtcaggttggagttcatcaggcaaagcctgggagagagcagtccaagcagaggcagcagggcctgtggaagggggttccatcggctggaagcagcaccaggtatattcaggcctgcaggagcaccagcagccctgggctgctgcaggagccctgctgaaaccatacctgtag

SEQ ID NO: 142125 - DNA, 360 bp, Homo Sapiens
gtagaccgaaggcagctttggtgactccacttctttttaaagtcaccctcctctgccctctgactttaagtgacaggcagttccctcccctctctttcaattctgtaaaatggggataatccggacctcatgcccccagagccttgtaaggaccggctaatgagggcaggcgagtgggaaacgaatcgtctgaacaatgatcagtcattctttcgggcttgcaaagagggtaaaaaaggttgggtctttagcggggtccgtagaaggctttgaagacgaaaagtgctgtagaggtgctaagcagcagccaacggaccgggcccgctgccagggggtcagggctgggccgaggcggccgca

SEQ ID NO: 142126 - DNA, 480 bp, Homo Sapiens
cgaagaagctgaaagttttgctccaaatgccattgtttatccatttttgaccacctgatctgttccattagcttcaaaagatgccttttcatttgtttcgttttgccttcgatggccttccgcctgccgcaagcaaccctctagaatatgggcctgtgcttggcttttctacacaaacatgagcagccttcaattactgggggacattcatttcctccttccaactagagagtgaggagtgtcccggggagagtgggtccttgagctcctctgggccttgcttgggacttggtccaggaggttatgggaagaaactggtttagaagctgacctcatgggttcgctattcttatgtaacacttaggaagagcagagacccacgcgattcagtcccagagcaatgttgcggtcaagagaacacagtccagctaccaacagttatttcaaaataattcaagctctttgtttatatttctgaaa

SEQ ID NO: 142127 - DNA, 557 bp, Homo Sapiens
gtgaatttataaagtttatgtgacctttattataattaatattgtattaatcatcacatattattatatataagatataaatttaatataactatctggtaattatacctatgtttactaacaattttacaactgctggctgcagcggtgcatgacattcattattattacatttccattttgcaaatgttagaggaactccttccatttgtcaggtgtgacccatgacttgcatgtctctggggacactctgggaagatgtcttcatagataagagctcagataaacatgagacagaacagtcccaaaatccctcagcatgcccagccctcagggagttcctacttgtttatgaatctgtccatattatagctcgttgagtagagaaattccaggatcttcctgcatggatttctgatcaaaagagtggtccagagtgagctgtcataatacacttcttcttggcgcagagctccccctttgatgatcttcagggacaatccttcttttgagcgtggtgcatatggaccattcccagaactggctttaatggttgt

SEQ ID NO: 142128 - DNA, 1178 bp, Homo Sapiens
  misc_feature (799)..(812): n is a, c, g, or t
  misc_feature (1104)..(1138): n is a, c, g, or t
tcatattttatatgttttattcacaaattttatgaataccagtcacacatttcaaaaccatttattagagtcagaccactcaagttttacactagacagaaaccgtctctaaacaatatattggtggttgttgttaaagtggcctttaaaaaggggttcactctgctaaaaggaggctcatcctgataattgcaatcactaacaactagaaaaaactaaaccgtgagtacaagcttgaaaaataaaatgtagcactgggacgctattaaaactcattgtaactaagttgaacagtaactttacttaaatgacatatcgctcccatatgaatccacagaagaggaggactacagggaaatataaggtggcagaggaccacttctgtcaaggggtaaagaaaaacactccttcgctatcagggaagggagaaaaagagaaaaggaagaggaggagggactgaacttttcagagaaactgcaagtacttgttaccctctgggccagttctccacctacaggttggataagatctcctccccccacccttaccccaccctcaaccccacttgcccctattttgggacaaattagaccctccaataggagaataaaagtttttatctagccgcccccaccccaaaatggggctgacgggagtgagcagctgcctggctggcagggaatggattctcctctcttccctttcgcatcatgtgcttttcaggcgccatgttgggctcctaacaggcggctgctccactcggggccaaatccctattcccacccaccaacagttggannnnnnnnnnnnnnttggagagaaggaacactgtcccccttgggatggaagcgagacctgggatgaggctgacactaaaatcagggagtattagaagtaataggaggctgcggggtgtataaaaaccttggcggtttgggcctcgatgagagagacgatctccttggcgaagggcaggttctcctcggctagaatggtcagcatattgatgtgcggcttgctattgaaggtcaggtcttcgagcgatgactgatacccggccgtaatggccgaattcccgggcatatgtccggtaccgtcgactgnnnnnnnnnnnnnnnnnnnnnnnnnnnnnnnnnnncggccgcttcctcgctcaatgactcgctgcgctcgtcgtt

SEQ ID NO: 142129 - DNA, 580 bp, Homo Sapiens
tttcatattttatatgttttattcacaaattttataataccagtcacacatttcaaaaccatttattagagtcagaccactcaagttttacactagacagaaaccgtctctaaacaatatattggtggttgttgttaaagtggcctttaaaaaggggttcactctgctaaaaggaggctcatcctgataattgcaatcactaacaactagaaaaaactaaaccgtgagtacaagcttgaaaaataaaatgtagcactgggacgctattaaaactcattgtaactaagttgaacagtaactttacttaaatgacatatcgctcccatatgaatccacagaagaggaggactacagggaaatataaggtggcagaggaccacttctgtcaaggggtaaagaaaaacactcctcggctagaatggtcagcatattggatgtgcggcttgctattgaaggtcaggtcttcgagcgatgactgataatcccgacaggcgtccttccgggcccccgcagcaccggcctcggccggcgtctgctctgacattgcgccgcggccccccctcgaagtccgctgcagctg

SEQ ID NO: 142130 - DNA, 531 bp, Homo Sapiens
aacaaaatgcacaaaattcctgagaaatacattttctccttgaggagtatacttgttgtgttagaggaactcatggttatcaagcttctagtttaataaacatgacgagaattctctatcttaatatgagtagctaggtactcacaaggcatctagaaggttaatacctatagtctggaaatagccacatttttttactggccacaaattacaattgcagaatatttatggccatacaagacacttccaccaagcctgaaaaatgtataaatgtcctaggagtgcagcattttttcttaaaagataatattaatgagctagcttaggtcaacgggttaatggtcattgttaaaacgaatagccccgactttaatgagtacatctgcaccttccaagtttaattataactctttctctttatagttagagtacagacactaacaaaagacaatgcattcctgctcttgttttctgaggatgtccaactctgtaatggagtcatttctaataaacttgcttctttaactttgc

SEQ ID NO: 142131 - DNA, 392 bp, Homo Sapiens
tttgttaaatggaagaccagagttttattactactcaaatctgcctctcccaaaatttggaggctagggtttttaaaaaaatagtttggcaggcagggggctaggcaatgggtgctgctgattagttggggatgcaattataggagtgtggaaaatggtcctttgtgactgagtctgcttctgggtggggaacacaggaccagttcagtcatgagtgaagtcatctggtcatcagaaatgcaaaagtctcaggtgactcaatacttaagttctgaggcttttagctggtctgcttttttctctccacctttcagaatcattttaggtttgttttatatgaaatattcagcattttaagccggtctttaactcctgatttcctcttagcaatt

SEQ ID NO: 142132 - DNA, 1251 bp, Homo Sapiens
  misc_feature (1138)..(1172): n is a, c, g, or t
ttttttgcattgtttttcagctttatttcaaatgctgtgtagcataagaacctagccgtcagacatcattttttagctatgaaaaatatgaaacaaggcatattctaaagtgctgaaggaattaattgccctattagataacgaatacctggaggaatgaacagagtgatttatggcttaaagtgcttgggtctgatcatcatcttagcctctttgaaggaggacttgtagccaccagggtgtgcctcacttacaccaggccaggtaccccagaaaatcccattacggacacctctgtatttttggtgataatatttgccatttaagtttgcagaaagacatgcatcaaaccaccagcctgaactgtagtacagcccacagttcccagaaggatatcgatcattgtctttatctggagtggtgaaaaacttcagatcgtggttgtaatgtttgttgaaacgtaatgcatctccagctgtgccattatagttaccaacgtgtaaacgatatttgagaaactcattagccacataaaactgatcatacaaggcatatagttcgacaccattaaagtccttcaagatctattctcagaatcatttccttactcttggtcagaagatgaattttagctcagaggacagcttgttaacctcactctctgaattctctaactctgttatcaccaacctctcccggggctcctgtactgggtaacaacagtccgtttctgcctgggtctccgttgtcatcagcctgcagcttgcagtcttggcaagatttctttagactatttacgatttccttgaggttttggacttctttgaacacctcctcgatcctgctgaattgcttcgggagctgaatagtcaaggggggcaggcttacctggtaggggcactcccctgcctcttcgcatttccctctgctttctagtctcactgggcagacatcctttgctctttcatctttaatttcctctgtttcattgtttgccacaaccgaaaaaccgtaagcggcaagaacagctgagctcagccagtaccagttagccagcttcatctttacagtgctgctcaccccagcccccggccgtaatggccgaattcccgggcatatgtccggtaccgtcgactgnnnnnnnnnnnnnnnnnnnnnnnnnnnnnnnnnnncgccgcttcctcgctcacagactcgctgcgctcgtcgttcggctgtgaaacgcgaggccctataggagtgtatcagttt

SEQ ID NO: 142133 - DNA, 971 bp, Homo Sapiens
  misc_feature (42)..(50): n is a, c, g, or t
  misc_feature (448)..(448): n is a, c, g, or t
tgttttttaagggccccgggggaaaatttttcgggaaacctnnnnnnnnnaaaaggttccccgaaaaatgggtcttcccctttcggattaccccccttgggaaaagggccccaaaaaaaatccccttggaatttgggtgggtaaaggaaatttttaacctggggactttttttccagattaggttatctttttcccaataaatccaataggtactaaaattcccccctattttgtaatcagaaagtcatataaattaaatgtaagttgtgccatttcatcagatcttcttatagtcaatgtcacattaaaatagatctgagtaactaatgtttaaaaatagctgatatatttgaattttagcaaaaaaactcatttttatttgtaaaatgtgctcagtgttaactttattgataaataaccaaaaacaaacctaatattttgtgattntaaatttatttttaagcacaaaatagacccatgttggggatgaataacatgtctgagtttgttaattttgtctgctacttttccctatatttccttgtttccttcatcctaaaatttttaaaaatgaaaactttaatcattgttgcatgtttaaactattgaatattttcttttgttaactgaagtaaaaggaaacattcttgtagaattatggaaactaataatgcagtaggacttaaaattgaatgttaggaggttcttcgttttaagaatcttcctgtgggagaagtttccatcgaactgttatatcaattttatcatcaacatttcccagcgcctgctctttacagagttctaagaacacctgctccaaggtagcctgagagaggctgtattcctccaggttgaaggtctgtttcactgcctttaatttgaaaaaggcctgagacagagggtggacatcctccacaggtaacttacatgccattaaagaggaatatctttcctgcccagcagcctgtgg

SEQ ID NO: 142134 - DNA, 553 bp, Homo Sapiens
tgtgaagtacactttttgtttaattccatgcatttgtttgctttgatagtcattcttgttcccattgccgttcaatacagagagggagccggcatcagaaaacaacactgggagctggggactgacagtacaggagaccagaggggagccaggtaaggaggttcattcggagacctaaccacaaaagagaaattcattcgctccaagtcgataggagctcaaattactgtaataaagcgtcaaagagggtcttcccacttccagagtctgggaagtggtcactctgaaggtgaagagccactggggtgatatgggcaagatgggacatcttcctaatagcttgcacatgctggctggggttcccttggcctgcagtcactggaggaccctgtccacctggtcactggacagcagcctagggccgggagccagcgatccctgagtgctgtgaagtggctctggagagcagacctgggatgctgccgggagcttccttacagtggccttgccatctgcttagggctctgctctgtgaagtcctgccatcgtaccc

SEQ ID NO: 142135 - DNA, 570 bp, Homo Sapiens
gttggttagtttttatttttggtagcaggaagatgaaagagttacatctggaggctgctttttccttcggaaggagaaaacaaaatcatttgctgaaacaggagtactgtgggtcagagggttgcagggtggagagtttgaaaccactttgtacttagatctgtgaaaagtggcaggattgctgaaccgtggtgtggccccacttgaagttaatgaacatggatttgtagtgtaatacaccgcttttgtgtgactccttccagcactgctcagccagctgtttaggactgatccagaaaacttgcatagttggattcacccatgcctttttgtcttcaggtcacgttcacgctgtaacaccagcagtggtagtgaatcagaaaattctgctatgctgtgctgctgccaacccctccatcccatcattagcctcttaaattttgccggaacccactcatcccacatgaggatgcataggtctggatatttcatctgcagccctgcagtctcttcagcctcattcgtccttccttttcttggctgacagtgtgatccagccagttctcagca

SEQ ID NO: 142136 - DNA, 1309 bp, Homo Sapiens
  misc_feature (416)..(428): n is a, c, g, or t
  misc_feature (586)..(645): n is a, c, g, or t
  misc_feature (683)..(695): n is a, c, g, or t
  misc_feature (707)..(852): n is a, c, g, or t
  misc_feature (856)..(864): n is a, c, g, or t
cccgcgggggtttcgggagcgtgtttttctcccgggtgtgggtacagaaagagattggtgttttgttggttagtaaaccacccgctgggttgtttgttgacgaagtgttttgtggaggataaaggtttttcttgtttaaccatatattgggggggagggttgtctccctctccttgggtaatgacaattaggccgccgatgggggaggggtatgtgtttctgtacccggggtgtgggcgtgcggcggcaaataagttaattttttgagggggctcacatctgttttgggggggagagtggtttttgtcatggtgttccccccctccccgtggtaggagggtatgggcgtggtggggccggagtttttatataaaagagatttctcgccgctggtttttgtttcgaggaggcccgannnnnnnnnnnnnagcataccatcttctttcgggtagtgtttgtgatcgccccgcctgggtgggggcccccgggggggtttcttttgttgtgggcgctgccagttttttttcgtaccgccccggtgtttccccccgggaggtgttttatttgggggggatccgccccgttnnnnnnnnnnnnnnnnnnnnnnnnnnnnnnnnnnnnnnnnnnnnnnnnnnnnnnnnnnnncccgggcccccacggggaaggttttataaatttttgannnnnnnnnnnnnccccgcgagggnnnnnnnnnnnnnnnnnnnnnnnnnnnnnnnnnnnnnnnnnnnnnnnnnnnnnnnnnnnnnnnnnnnnnnnnnnnnnnnnnnnnnnnnnnnnnnnnnnnnnnnnnnnnnnnnnnnnnnnnnnnnnnnnnnnnnnnnnnnnnnnnnngacnnnnnnnnnttttattgccataaattaatccagtaggtatatttgagaaagcacgcatcagttggttagggcaataagcgcctctaccacgttgcccatgtgttcccgcaaactgcgttctgctgctgctcgagatatctccatctcagtcattattagctccagatcttccttcttgatagtgacttttgccagttctttctcccgctcctgtttggctttctgctcccgggaccttctgtctccaatcacagacatggccgtctccagattggaactctggatctccttctcctctgcatagtcggtgacccgctccaagtccgccgcaccgctgtcatgtttccgtggcttctccggaggccgctctggtccactggtctcagtctccaactccagctccacatccccctcggtcgccatatctatttcaccacgccgccgcataagcccc

SEQ ID NO: 142137 - DNA, 438 bp, Homo Sapiens
tttataagacttttttctttaataaaatattatagataaaatttgtatcaaatacagatttcataataaaaatcaacatttattggccatttactctgtgcagacatcatgctaagtgcttcacaggcacatgcattatgtaaattatttcatccttctacctaggactatttttcagactttgaccctgggaggtagagctccagtagaaaatggtggtcttcccaagctagaagacagagcagagttcaacacagttgaagtgactggaatttgtgggcaagagagaaaggagtgatgtgatggagggagacagctgtctgcatggaggctctccataaatctttggtatagagctgggttgcacatgtgtagaacaaatcgccacgagaactaggagaaagtggctactgtaggagtgagtggtgaacaagatac

SEQ ID NO: 142138 - DNA, 569 bp, Homo Sapiens
  misc_feature (318)..(328): n is a, c, g, or t
tttgtgatatattgtaaccattttattaatatgaagcaatgggataaatcctttaacaggggtactgatttactaccgtgaatatgtaccaacactttggtgcagtatcatgcctgattcagtcaaataatgtgttatttacttgcactgccacacatgtgaaaacacatttcattggttgacagaagagcacacagccatgtacctcgtttctggcttaaatgcatagaaatgttctcatgtacaacggatttttcaccactcaaggacttcataatagatgaacaacttttcaatacactatttctgccttgctannnnnnnnnnnaagtgaagagagaggggaaaaaaccaatactgtggtacaaaagacctttttacaaggtcctttctggagaaatgttgagaatacagttatagtcctataataagactataatcaagatcatcctacaaggacgtgagggtagactcactctcctggagagtttctgatcttattaagactattatatttgactggctttaaaaacaaagaatattataatgaatagaggggagaaattcta

SEQ ID NO: 142139 - DNA, 489 bp, Homo Sapiens
  misc_feature (440)..(440): n is a, c, g, or t
tctgtttcgatagttttattggaacacgatggtaacacaaacatggatttggggtcccaccacagatgttcctcctccaggcagcatgcaccccacttctgcagccagcagaggctccaggaggcctgcagaaggtggaggcagcccagagacagacgtggaggcgtcttctgcagtggcgggtggtgcgtgggcccctcgggccagagctctgaccagctgagtctgtgaacagccagactggtttgttttcacttgaggtcatgtggccgtgactgagagacctgcctgcctcagactcctgggaaaacttccaaggagggggattctggggattccagaaggaattcagccaagagactaagcacctctggggggatcaccagggcaaatcatgcctttaggtttattggcagatacactgctgaaagcatctgttntggccactctctgcactctcttttctctgatcattcatccaacacatat

SEQ ID NO: 142140 - DNA, 514 bp, Homo Sapiens
tttttaacacatttgctttttattttaatgactaaaggcataaaacacaaactagtaaaattaacaaaaatattatataaaaaattagagaagtatgaacatagtcatataattttacttacaaaattgaaaagaaaaatacttaggattatagagtgatagcaatttttgggggcttttttccttgacagaaatattaaacaacaaatgtgagttaagattttatattcttataaacttcaaacctaacttttataagaacagactgatgcttaaattctagaattaaaaagctaaagctgatttttaatggtataattaaaacagaaacaactgaattattaagacgttgctcaaaaacacccatcagctgtctaacagattttgagacaatgtatcattctggtttggagaataccaaatgcatttttctaaatgtcacaaaaaagctgagcagagtttctccaaggactctccagcttcagaatgttaaccttggagacagatgaagctg

SEQ ID NO: 142141 - DNA, 407 bp, Homo Sapiens
catgtgcgccccgcctcgctgcagggaaggccgagcaagccaggccaagagggcactggacgtcgagtctcacctccttttcctcccgtctcctccctctcaccaagtgacaccgctccctctcaaacggaaggaaggggaagaggatgctaagctgacataatggaagtctggagctgcctgtgaccaaggtttcccctgtgtagaagcctactgtcggaaaaaatgaggccagcacacagagactgagaggagtggagaaagagagctgggttgggaggagaagaaaaggatcttgatggtgatcacgtccttggttctagtgcttaaagtccccagggtcctgcaactctctgagttccttctaggacattcaattttgggattaaattggtcacttcatcaaa

SEQ ID NO: 142142 - DNA, 453 bp, Homo Sapiens
tttcagttcaaggacaacacctttatttcattatataaaatctattactagagcaaagaattaatttattaaaatagatgcaagatactatacagtgtacatggattaataaaaagctagtgtactgatgatatactcattgcttactaattgtcaaactagaatattctttaactgtcacattttaaatttgacaactagtactgatgagaggaagagtccaacttggaaagactgtggagggtgtcaagagtgaatttcagttatatacaaacttggcgtggattaaagctgtggaaagttatgatgaacacccagctaggtgtccagcctgggaaaggcataacagcacatgcagtggttagcgggtttgcggcatcagctcacctgcacactgctaagttccttcccctgagggcttcttcaggcgggcaatggtgaatcttttctttg

SEQ ID NO: 142143 - DNA, 608 bp, Homo Sapiens
  misc_feature (165)..(180): n is a, c, g, or t
  misc_feature (270)..(302): n is a, c, g, or t
tttttttcttagaatactggaggattattgtgttcctttgaaagtgtcataaaccgtgcttttctgtgtttcctgtgtctttgtgtgtctttttgttgatttctgtacatctagagaaacagttccttcattttatttttgaatttacgttcatttgagaaagcnnnnnnnnnnnnnnnnacgttattaccatgatgtttattgcatagagccatttggctttacttttgggtttgtgcataggaaagactctgtgtaagtttctcgagnnnnnnnnnnnnnnnnnnnnnnnnnnnnnnnnnaaaccaatgttttactggcttaggagtcatcttttctcttaggttgatttttaattctaagtctcagaaaataatttatctattttgtgttggtcattgagggccagcactcctgacgtaaaagggtgagaaggtaggatggtggtgtatggtgagagattacttaatagttataatgtacattattcgagtgatggataccctaaaagccctgactttaccactatgcaatctatgcatgtaactaaattatacttgtacccaacacatttgtataaataaattaaacacatccactagttaaaa

SEQ ID NO: 142144 - DNA, 363 bp, Homo Sapiens
gcacgaggaaaaagtattgttctattgatttaaaggaaactgtccttgacattttcgtgtctcactgtggggcaggggaggatggacccactggcagagactggactgagaaaagttgcacaatttaaggtgtcgctatgctagcaaactcagtcatcaggctaactctcaggaggatttgcagtggaagcaaagccagcatcccctctccatttattctgttatctaggagacacttcataatgccaaacaggggccagggttgtaggatctcttccctaccagtgatccatgtaatactttttttctccaaaaattctatcctttgaaataacttatccaataaatatgctgcatataaaa

SEQ ID NO: 142145 - DNA, 467 bp, Homo Sapiens
  misc_feature (431)..(431): n is a, c, g, or t
ttttttacatactggtgagtcagttgtattcttcatatggagtcttgcctcttcccttttcatcaacaatttcattcctttgtttgtggcttattttcaggtgacccagagaagggaggatctgcaaactgcatgttaaatctcattgtccctggagtgaattacattcccttgcaatatgctcttcttctttgttaagactcatcacatttgtcattagttattatttttcccatgtgcatcctctctgctggaccataagcaactggaaagctggaatgacgtctgtagtattataattatatcttccactttataggcagtgcctcagatggtcattgtacatacaaaatggtctgactgaggcacacaggatgactccagtataaataaaaggtaatgaagggagtgacttgggatgtgatgagtgnacttgaaaattttaaatgtgagacttcatcattgct

SEQ ID NO: 142146 - DNA, 491 bp, Homo Sapiens
accattttccattataaaagaaattcttccaaatcacacaaaacactctgacacttctcccaattccccctatcatggggctggcagcagccgctttgcgtcctgaatgtcatgacagtgatggtaacagtaatgatgataccagcaatgatgaagtctcacatttaaaattttcaagtcactcatcacatcccaagtcactcccttcattaccttttatttatactggagtcatcctgtgtgcctcagtcagaccattttgtatgtacaatgaccgacaatgagatttaacatgcagtttgcagatcctcccttctttgggtcacctgaaaataagccacaaacaaaggaatgaaattgttgatgaaaagggaagaggcaagactccatatgaagaatacaactgactcacctgtctgtacatgcctctgtgtgtgtgttttatattggtgctggtgaagatagttctttatgctgatgcttaaaaaaaa

SEQ ID NO: 142147 - DNA, 491 bp, Homo Sapiens
gcatttcttgaaaggctttttatttcaaagataaaatacagtcacaaaatacctaaataatccaacagcagcatgtgtatggaacaaaatgagcttctctaaatcctaaagtctagaaaacaaagtttttttaatgagaaaggggaaattataaacaaaaaatggccaaatgcaactatgaattgccactaaatattcagtgtgtatatatatgttcagcaaaaggcaaggacacttcatcttctactaatgagtttttaggactcggtactaggttaggacagcaatcaaacaaaggtctcacatgccttacaatgatgctgggtagatatatgtgctccttatgtaaccaagtaaaatgatctcagactgctaataactatagttaaataaatatgttattaacaaagggttgcaaaaacaagggtaagatggtatgaattgataacagtagcaataaaaaacttcctagaagtagtaagttgagcttt

SEQ ID NO: 142148 - DNA, 581 bp, Homo Sapiens
tttagagacataggttctactttatttacatctttggtcaaacagtgggcattccaactcatgtacaaaaagttggcttttatccattcctaagtttggaatgaaaataattccttgaatatcaactaatagcaaaatgtgtaaatacacggagtaaaatacaattctccttgtacaagtgacatgaagtctacattaccagttcggtattttccatttttgaaaggagaactgatagaagaggctgggatgattggaagtggccacaggaaatctttgtggagtctcttcagggctattacaaagttgtctacccgggcggctcgggtacgttccttgcatagccaactaattagttcaaagcccagctgggctgcaaagcagccaaggtcctttaacctcacatcttctaagaggcgccgagcatgtctccagagcatcatgtcaatatacatgttctcagcacagtcactgtctttgctccatctttttccagagggaccagatggcatacttagtgttttctgtaaactgaatttactggcaggaacattttcagctgactgggataaactgatgct

SEQ ID NO: 142149 - DNA, 369 bp, Homo Sapiens
aggggcttaaagcaacacaaaattttattttacatttctgtatgtcagaaatctaattcagataccactggactgaaaccaagatgttggcaggctacattcctttttggtggctgatatggtttgtctgtgtccccacccaaatctcctcttgaattgtaataatctccatgtgtcaagggtggggccagttagaggtaattgaatcacagagatagttttccccataatgttttcctggtagtgaataagtctcacaagatctgttggttttataaatgggagttcccctgcagaagctcacaagctctcttgcctgctgccatataagatgtgtcttacttctttgccttctaccatgattgtgag

SEQ ID NO: 142150 - DNA, 582 bp, Homo Sapiens
ttttttttgcaaactaataaagaacttatttttaacacacaaggggtacagtataatctctatgctgtaacagtaagtccattttcattaaatattttgatttttattatctctctacaaagaaactacaaaaatacccataaaagcatcgaaaatgtactttaaaattctgaactgttatgatacatcttctatgatttacaagagtaaaatgttaaattctccaagttagaatttctgaattgattttgacaggaatttactagaagtaaccagaacatcaaagcttacaggttttctattcatccccaattaagtttctgaaaagctacacatccgttgacaagcacagtccactcagttacatgatgctgccactaatggtgaggctactctgaagggcagaggtctatatgatggaaatgcccagccttccaggcaactgctcaaagtggtcttattttttcccttatgtgtaaaataaaagtacaaatgtacatatggtaaaaaatgtaaatattacagaaagagctaaaataataagtacataaccttttctcccataccacagcaaatctgatg

SEQ ID NO: 142151 - DNA, 534 bp, Homo Sapiens
  misc_feature (506)..(506): n is a, c, g, or t
ttttgtcttaatttttattttgtggttgaaaatgttcctattttatagtcattatctgatgacaattataattaaatagttatatagatttgactaggaaagtaacaaatattgacgtgaatccatgttgacccccacaatgaccctaccattatttctgttgctttttaaagtctttgaggtgcgttttcttctttttatattgcagccactcatagactcttgacagaagagtggtgcagtcacatttttttctcaattggaccaccatgcagcctgctaattcctgtgatctttcttctgcttttgaagaaattatgtaagacctactcaagtccttctcttcacttgtgggagactccacagctggcatctgcataccaatggatgtcaaaaagggttcatatccaactggctcattatcaagtcaggagccactgtggaaaagatgctgtgtcaaaatgatgtggtgcagccatgccctcgtgccgcctcgtgccgaattnctggcctcgagggccaaattccctatag

SEQ ID NO: 142152 - DNA, 595 bp, Homo Sapiens
tttttatcagtcataacttttaattgaattatccacaattttggatttttcactcctccagttagaataaataatcaggagttcactatagtgctaaagagtagatattaaggaaaggtttaaacaagaatgaacaagaagaggtccttctttagtaagaccctagtcctaaagctctgtgggatttacaacttagagccacaaactaaccagctcatcagagaatgacctgtcagcactgtcaatatcttctctaatgaggtaacactatggtattggcacctggggaattgtttgcctgtagtgaactggcacactgtattttccagttctaggctctcacagcagcttatgccaggattctgtacaaacttgcagctgggggccctgtggaccctgcgcatcacttctgtggagctgcggatgaagttattgctccacttgcacgatccgtttgcttctgaaacttttctccagactgtcatgtcattgcaacactctttgtcattacccgaactgtttcccttggggtcattataatgtaaacttctgaatgtcagtaatgtggaagacatatcatccttggacatgctga

SEQ ID NO: 142153 - DNA, 355 bp, Homo Sapiens
  misc_feature (254)..(262): n is a, c, g, or t
tttggctagataatgcggtacattttttaatggatatttgtatcttcatctcctagtcataaggactcaataaatctgtagaataaatacttataaaagtacaagtagtctgtagggtgaggcaggatagggtttggataacaataataaccttttttgggcattttctatgtgctaggcattgttctcagtgctttattagtattaattatttccttagaacagttttattgagaagagagtactatgattcnnnnnnnnnacaaatgagatagaggttacaaatgaaataaacctactaagtggtagaactgggatttacactcttaccaatgtgctcttaaagggagaaagg

SEQ ID NO: 142154 - DNA, 422 bp, Homo Sapiens
tttagcacttgaactttttattttattaaaaccttgttataagcagcacccttggcggttttttgttttggcttatgttttgaagggatgtgaggagggtgagaccctcagctgtgctgatgagagggggaggaggcaacacaggccttcagccctgagagctgtcgggagagggatttgggagcgtgatggactaggggactgaggctggagccccatccccactcaggctgtgcttgtaaaaatgccttgagacccatactctcctaggagtgggtcctcccattttccaggcgaggtcaacatcgtttagcaagcagagtgacttgccaaggccacgtggggacttgagggcccttctcccttctcgcgcttctcaatgagatgcccctcccacatctcactccaaacggagagagact

SEQ ID NO: 142155 - DNA, 869 bp, Homo Sapiens
tttgacattggtacaatccagagtttatttagatttcgccagttttactatgagagtattagggttacttttaaagtcaaatgaagttgggaaggggcgggacaagaattcaccttttgcaaggtcctttggagtcccgactgccctaaatactttcacccaaagtcctgggttacttgaaacagcagctctgaagaaggaatgaatcaacagatatagaaatgtccatttttgctgtcataggtcgcaggaaatgctatattctcaagggaactcatagacttggtgttttttaaatagagagtgacctggtgagagtgcctgagtctgcttgtctggaggcctctcaaatcccttggggctacctgaggcctggctcagccaaaatgcctctctgcccccatcgtctgtctcctggcagctggagataagcgataagcctgagagatgaagcaggattggagtctgaatcactgcttacccatcaggaggtttgaggctgtgaacctgtctgaatcactggcagccaaccaggacagttttatctggaaaaactctccccaggacagccccagcctgactgagggaacaatggcgggaaatggaggctcaggcttgggtgttagggccctgccacccacactgctttgcactgttattcctggccaacgcagagatttgctgtcgctcagagagacactgtgggaagaagtgcaaatgaggcttggaaattaaaaggaagtggtatgatgacaaagaaagtgataggagattgttttcccagctttagagatttaattatgaaagattctgagaacagcctccctggatgtataatggttgttatcccagtaactatgacagttcct

SEQ ID NO: 142156 - DNA, 522 bp, Homo Sapiens
ttttaaaacaatttgcatttattattttgcatgaatctgtaagtcatctgagtgttttgggtgtgtggggtcttagatgggctcactcagtcatacacctgtggtcagctgcagattaagtaggtacctctgataatccaggcagatctctttcacatgactaattagcgataagcatgtgtaggtcaataattctccatcagcctagcccaagctcaaggaggaggcaagagcagaagtgcacaaggcctcttcaggcctaggctcagaacaggcacaccttcacttctgtctcattcttggcctagatttaaggggtggacgatggactccacttattgttggaaggagagattctgggggtcaggaatttagacaaaaatgcagtggctgtcctttactggtttcaggaagacttgaagcttaggagtagcttggcagctggaggctagaatcatctgaaggctcattcattcacaggcctgggacctgggctgtggagattcaaagatgagtagtgtt

SEQ ID NO: 142157 - DNA, 513 bp, Homo Sapiens
aatgaagtgtttctatttctttttgaatgactacataatttgagaaattaacaggttgaaaatgccccctcccaactttcccaggaggcaggtctggaaaccagtttccccattcccttgtgcccttagtcaatattgacctttattttttacaagttttggaggctggaagtctggggtcaaggttgtggccaatcctgtgtctggcaaggctgcttcctggtttgcagacaccatcttcctccctgtccccttcctctcctagacttcctccataggagttcggcaggcactcctggtcttcctttatcttcttgcagaaagatggcccggcaggtccgtccaaacacaaagactggacgcagagacccggagaacagcaaaacggagattttcaatgacagtcttgcaagaactggtgtctggctgcatgcagccacccccagcagatttcaacaagcaatttattccctagtgcgcaggtcccttccccagttcctcattgactgagta

SEQ ID NO: 142158 - DNA, 534 bp, Homo Sapiens
gataggctcagcagcatttattttctagttttaagaaaatttgattattcttgtatgaggtctaaagtgtgtatctatcagtccaatcaagcttttaaattttcggaaatactaaatttctaaatcataaagcgtcatttaaaaataattaattgtttcagtccaaaaatagcgtgggtcaaactggaattttcaaagtgacgtatctgtggatgatatgcttatggtaccaaaaagactctcaaaaaccaatactcccacgggcaagggaatagccaagtttgttgcggtttccaatgaatgacatcagccctgtgtaggtctcaatcaaaatgggttcagttaacaccatcagtttctttcctcttccagatccagttgaattcttgtgggcattctggatagctggaacaagcttagacatgaacccagacaacttgcaaatttcaaggaatttctcactggtgtatttcataggatgctcagtgaaagtagcataaggaacttcagtggaccatgggttccagcgggaca

SEQ ID NO: 142159 - DNA, 517 bp, Homo Sapiens
gcggccgccagacacacgttcgcctagtccgtcacccgacttgctctgcccctcaacaggggctcctccaccgccacgtacacatccgcggctcatgcacgccctgaatgatcggctcagccggaccccctggttttttgttcacttactggaaccttcttttgcagaaaatcttgtttgctgtgggatccacagatgggtccgcctccctcttttagtgtaaaaaagcagtgaacggctattatggtacatttttaaaaaaatcaaacagaagccaaaaccactttaatgtctatagaaggacacgtctaatacatttaaaataagcttcagctgttctgaatacagttcatggtatttttatttaaagacaaattctttagaatgagcctgtaaggtgggtaggtcagaaaccccattttacagtttaacaagtggacatttaaacggctagttaaatgatgagtctaagatcacggtttcagaaactaagacttgggcaaagctgctctcactc

SEQ ID NO: 142160 - DNA, 937 bp, Homo Sapiens
  misc_feature (817)..(843): n is a, c, g, or t
gtgcgcgtcggcggcgccgggggcctgaggaggcgtagtcgccgccggctgtgccccgggagcgcctccggggctggtgcgtggccggcagctcgcgaacagcagctgatccggactggctgggaagttcaagatcaagatgctggacgatttggttccttagtgaaggctctcttcctggctggtggatgacagccttcttgctgtgttctcacatgacagaaagaggaagcaaggggctgtttcacagtattctggagtaccttttgagtattggttcctgaacatcagcagtcttggctgcctctgtggactcccggagttgtctccctgcttgtgttctggtgccatcctttgttcctccacccctgaccaaggtgcccagcagcctgtcttcaccagtcaaggaatccgccatcttggctgtagacatacataggtctggagaaatctctccctttttccttgatttctttttaaaggtaccttatctctccccactcctttcttccctcctcaatctagttaaatttcctaagctttcacaaaaatccgggaagagataattaagagcttagcatccctcttagagtagaaggcagtacagataacaaagaagttgtgagtatattatctacattttagaaaattttctgactctagatccatagattctgttgtatttatttgccggacactcatttgattcgatttgcaccttgaacactatactaggtcttttcagttacgttgcttgggttaagacactttgctaaaattacagcctgaatcctttctttagttgaagaaagggtannnnnnnnnnnnnnnnnnnnnnnnnnncagtttttcttgtctcaggtagatactcccactgtgtataaatagatctacagacttttcatacttacctcctcaaagcaaaaaccaccaaaaa

SEQ ID NO: 142161 - DNA, 567 bp, Homo Sapiens
ccgggttgcagtttttatgtttcgcagtttctggtcctaagcgtctgaataattggattgaaaggggagccttgttcaggttattatcattctatctgtaccttttcggtacagatgaagataaatgcagtatttccatctgttctgaagggctatgaacatccgggctatgaacatcctggctatccgggaagcctccacgtagacaccaacattgaggcttcatctcactcgtgcttcaagccatgtttacctgagaaacaaaatgtgctgaatagaggggaaaactggcaaagttgtcctctttgttcaccaggtcattccggtcactgggaacttaatactctacatttataccttcaactctatcaactcatgtaggcccggggctgcccacaggggctgccttccgtattttctcctttatgaaaatcatggagtggcgctcttttaatctgcacctgtcccagagaggggattcttcagctatttcaagtagaatatcttaagaatttatacttagcaaatataaaatacttcaaagacgggagctaaggcagaattaaa

SEQ ID NO: 142162 - DNA, 655 bp, Homo Sapiens
ttttttcatttttaatgtgcatttttaaaagaaggacccatgccggtttcctcttcctactggctgacatttaagggcaggtgaggctgtgcctggctggttatccttaatgacctgccttgctcctttcctcctgagaacactcctgctatgtaagccccgggacttgacaggttggttcctgcccccttgtggtccagagtgttcatggttatggtgagacctgcagtcttcagtctatctggtggttcaactcactgaaaatgttggtatttgccatgtgtgttccacggaatcttattggcctctgtagtatataagaggaaatgcagccggacagaacaagcttgcagaccccatgtggcaaacatgggaggcactgtagacatgaggattaattagactcataccctgccctcaagaaactcataattcagaggagattcagagatcaaccatctccactcatcaattcagtcgtttggtcactcaacaaacattcattaacactcaatttctgacaagcaagtatcgtggtagggattgaagtggttggtcatgcccttaagaaagtcctaacccaattggagagcctggggttagccatcttcactcaaatgtattcattcattggttcactaaagagtcactaaca

SEQ ID NO: 142163 - DNA, 407 bp, Homo Sapiens
cattggggacttggataaagactttttaattttaactttgttctaagactgcttgtcatgatttcaaattagaaaattatataattgcaaacagcttcacttctcctgttcaacagaggcttaaggccagatgtccaaacttgtctcaataaggaggtgatattttactaaagtttcccacgtgcacatactgactaaatacagagctaggcccagtttgtattgtactctgaacttaatgcaaagtctccttggtgattttcgcaaagtccgtggatttgggtcagaggcacatttcatacataacagcccttataaacgtttgccctgcctccacattttacagtatcttaaaacagtacatttctttcaaagaattttatctctatgagtcagtactccaactt

SEQ ID NO: 142164 - DNA, 496 bp, Homo Sapiens
ttttaaaatttgccatggccttttagtcaccaaatattaatattcacatgtttcagaagcggtgacatggagagaattttctgatctttcatcctaaatgggtctgtgggcaccatggaaaagacgggcaggccgctctccacctgtgtgcaccatcgctggcatgtgctgatgctgaagtaggatctaacttggttcccaggcccttactcaggccttcttcccgcttcttcaaaactccaaactctagggcatttttggggtgactttgtgaatgaggcgcaggcttctggaacatctgggcttcagggaaggtatcttcttccctctgttctgtttccagaggatccctacttgcagcagtctttctctggcatcccatcagggcaggtatgatctggttcatatcagtaggatggccgtaggtctcctggaagacgttatcaactaatttctattttgcaacaggatagcttgcttttaagactgtttgact

SEQ ID NO: 142165 - DNA, 988 bp, Homo Sapiens
gatctagtttgtctctggttctcttccaatgactggtgttccttggataatttaacttttttcttcatgttaccaaattcagtgtcactttttcttttcccatttccttttgggagtttctctttaaagtcttcagaatgcctcatactgtccatctctatgctgttaataccattcatttcctctttcggatgaggtatttcttctaccttagtaggtaattctgccacattttttacttcttctttttttaggagttggcatgtttcttgaatgtttcccaaaatacattgtaatacttcctgtgcatcatgctgtagatatccttcatacatagggttgagttccctcagtgtgttaagcagtcgccttggctgagtggcaagttcatcagtatatttctctggatttaagagaaaactagcctggagctgttcaaccgaaatgattaaggactgtaaactgcatatcaattcataacttgccaaagaatcttctttgcaatttcccttgtctttttgattggcttcatcctttagagcttctttcttccttgaaataatattaaataagtgctttactccagatttaaaaccgggacaaaaatataatacctgaagtatactattaagatagcaagtattgccgagattattcagtcccacaaatggtaacaagttttctctcttctcacagtttataggtgaagactgtgctgcaggaacaacttgatcaatttcagatgctctattttcagaagctttttcttcattttcttgagaatctgtgaaatccaaagctctcttagtttcctttttctgaaaaaactttaaggaaagtctgtttttctttgaagggctacctcttgaaagtccattactttcactaggtatgacaccaggcatttttttcttcaaatcccaaggagtgtcaagagttaatttatagaggaaagttgtaatcaccaattatatctggtcatggccca

SEQ ID NO: 142166 - DNA, 551 bp, Homo Sapiens
ccggaatcccccagtaaccgctctttctttgaattctaaaaattattcattttaaatacgccatcatttcctgtaggactctgatgttgagatctcagaaataagacaagtaactgctttgtattacacctgcgtaaaggacaggcacactgatcaagggtttgactcttttcaccgacaataatctggtgcccaacattgggcctcggagaagactcaggaccctgaaggagttgcccaaaactggagctaaggtaccagcagtagcccattgaagcctcaccgaattcgagcttctccttcggtggaactgattatgaaaagagaaaaggagaatggctatggcctcaaaccacttggaaccctgattttcctaaacttggcctctaatatccacccccatggaacatagcatctgaatgcaacagcaagacagccgtctacaaaccaggaagagtgccctcgccagaaaatggatttgctggcactttgatattggaattcccagcccccaggactgtgagaaataaatttctgtcatttaagcaaaa

SEQ ID NO: 142167 - DNA, 347 bp, Homo Sapiens
tttcaccttgttacttttatttctgcagtgtcagccttcacagagtcagcatgatgaggtggaaacaacaggggcattggagggaggcagatctgaacttgaatcctggcacttctgccctgggctatggggctgggccggtggctttttctgtagtctctgtttcctgatcccaggcaggttcactgtaaatactcctcttctggcagaagtcctgtgagcctcctcccaggctgcctccaaacatcttgcctctgggagtcataaactctgtaactgaattccttgcagccataagaggtttcacagcaactttattctccaggatagagggggaataccccctc

SEQ ID NO: 142168 - DNA, 733 bp, Homo Sapiens
acatgaatgtttgcatttatctttttagtgacttactagttacgaacttgaattatcacctctttgtcatacttaagtatcatttacataaagtgtaaaagattttttcacttttgaatctttacctacttgctttcacattaagaatttgaacttttgagttttttccaggtctatatataatagattacatttattttgtaaagaaaatagtaatttaaagttttgccattttaaggtgacaatatttgggacagtataaatattatagacaagggcccccttgctgtctgctttagcaggtagtgacattaattgacttatagttttgtgtaaatgaacaaactgcttttgacaagaaatttattctgtcctagtttcctgcgtggtaaatcatagaaagattcaagttcatttgggttaaatgtgctaataggatgtagcttttaaattctgctattgagtcagctgtaccttttaatactttaaatgtgttatttgtatggcccttataaaggtgtttgctgtaattctgttaaaagacttcgcctatgccatactggtgtataaaaactgccgcaattggacgccggtgtggtactcatttcagtatacctgaactgtacattttgtgcaatggctttatctaaaagaatgacgcttcgtgaaagcactttgtggccttttttgggggggagggtgagagagtaggagagaataccatgttaagatt

SEQ ID NO: 142169 - DNA, 561 bp, Homo Sapiens
gataaaaagggaaaatcactttatttttattttatttgagtttacttattcctaagggacttgatgatctcgctgtccatgactgcttcctgaacattcctacgtttgaggcaagactttggacgcctcccctctggggaaggtatctgctctgcagaagtggccttgtcttggcaacattcccttcaaggatgctaatgccttagggcatgaattacttgctttggggtactagagaagtaccagaagcttggtatgggctgagctatcctgatggcattttcagaaggagaggtacgtgaagttaaagtacttgctgctcaatttcagatagatagtactttgtttgtactgcaaatggcataagcaggtctgtcctgcaggatgctgggaagatgactgcataacattcgtgggatagagaagccaagttctcaagtcttccgatgaaggtgactctggcttgtgtaagtaaagtattggcagagatagccgaggccagcatgcatgctagaggttctgcaaacactgtcattcggcagtgtacacgatgattagttg

SEQ ID NO: 142170 - DNA, 653 bp, Homo Sapiens
cttgtgtttattcatggaacatttattgcatgctcattgggtacaaagcacattttcagtctctcaggggtttgaaaggtaaatgagaggcaagctgtgctcttaaggaatttataatctagggagaaagccactatataaaaaacccaatacacaaactggctacaattaaaagcagaataaatgttaatactaacaaaatagaagataaaggagaaattactaagcagttttctggagaaagtggcacttgaatttgactttcaaacatgagcagagtaactagagatgaaaaggactttgaacaaaagcctggaggagaagaatcatagatgtacaagtagaaaatgaagtgacccacattggtggagggcatgttatgtgacaggtcatagctagagacaaattttagaaaatgttttgggttagggtgtagagagtactaaataccaagattttggacttgttggtaggcagcagagaaaaaagaatgatattcaaagacatgtactttattactattaaaagaaactaccaattattgtgtgcttaatctatattaggcattgagctagatgttttgtatctcacctgcacaataaacctgaaaggataagtgatactattcccattttgtagatgaagagtatgag

SEQ ID NO: 142171 - DNA, 923 bp, Homo Sapiens
  misc_feature (233)..(289): n is a, c, g, or t
gaggggtttcgaggggcccccgtggaagcccccttttttgggggggcctttccccggtaaaagtgtttttaagataaggtcccccttttttaaggggcccgttccaccccccccatttcctgggaaatttttctccgggggttatcaggcttggaaaggccccaccgggcggggttccccggtttcttcccgtgggcccagggggttcaggggttcacaaggccagaccgccnnnnnnnnnnnnnnnnnnnnnnnnnnnnnnnnnnnnnnnnnnnnnnnnnnnnnnnnncttggtgtttgggccacggctggatttctggccaaaggcggcggccgcactgcgggcaggggtagggtttctccgccgctgtgggtgcgcctgtgggctgccatctccgagctctggcggaagcagcgcccgcagtccgggcacgggtagggcttctcgccggtgtgggtgcgcacgtggcgccgcaggtccgaggggtaggcgaaggcgcggccacagtccgggcaggggaagggggtctcgccgctgtgcacgcgccggtgctggtagagggcagagctctggctgaagcggcggccacagtcggcgcagccatagggtttctcgccggtgtggacgcgcaggtgcgaagtcagcgccgagcgctgcgtgaaggcccggccacactccagacagcggtggggccgctccccacgatggatggcccggtgtttgctcagggaggaagcgtggccgaagcccttgccgcagtcagtgcagtggaagggcttctcgccagtgtgactgtagacgtgctccaccagtgtggagcgccaggcaaagctcttcccgcacacgtagcagccatgacgctggtcagctcgggggacaggggggtgggcacagagggaggggcgtccccggtgcggtgcct

SEQ ID NO: 142172 - DNA, 420 bp, Homo Sapiens
tttatagtttagaaagtaacaatatcattttattgcagggtggcataggtagttgtacttattaaatacatgacaaataggtaccagcagatgagttagatgtagggatacagatggaaataaacttccatggtccccattcatcaaatttattgtcctctgagaaagacatgagttcatctgatcattacagaggagatgagtgttttgaaggagaagcagagggttttgtggatgtgattagcaggtggacctaaccagcacagtgggtcaaggagggattttctcaggaaataacattcaggctggagtctgaatcttgagctctgaagcaggtgtcaggacattcagagcaaagtggattatatttgcaaaacttcacatgctaaaagatgagagaagtccagtcagtagcaagtt

SEQ ID NO: 142173 - DNA, 975 bp, Homo Sapiens
  misc_feature (90)..(130): n is a, c, g, or t
  misc_feature (191)..(191): n is a, c, g, or t
  misc_feature (198)..(236): n is a, c, g, or t
tccccgtgagaatttcttttttccccaggaaccacaaggcccgcttatttcttattaaaaaggaaattattgtttatcccccttattttnnnnnnnnnnnnnnnnnnnnnnnnnnnnnnnnnnnnnnnnnttaccatggggctcaaaactaccaaccttttctgtaggcaaaaataatttttgttaaaaangatggcnnnnnnnnnnnnnnnnnnnnnnnnnnnnnnnnnnnnnnnagtgacctaatgacttgttagactgatgcctataacaaaacccaaagtggctgcatggatttcttcttggtagcctcaacaccattcctgtgattcagcattcacacatgcatactgagtttactcaaaactagtctgttctgcttcttcctcttcttccgggatgagagggggtcagagccaggggtctgtgcgatgtggtctgcaatccagaggaaccccttgccctaaccccccaaagtcaggccttctgtcttttgttaatttttcttcttgctgacacccgtttaagactggccgaaggggtaaggcccatggagccccttactgtaagtcactactgataagttgtttgcgtgactgctgggagacagatttacagagttctgtgacagtctattctggtcttgctcagtttggtcagggagcaggagcccatgtgtcaggagccaggagccccatgtgtttttgctgatcgagtcgaactcggagcccccagggtcttttaagttgttttcatctgattgtcggttcttttggggagaggcaaaagggttgaagtttccttctaccttacgatgcggctgtgtgttgaactccgtttcaaaagatgacagctgctgcgttactcctaaaagtccacccacctccacactgagaatcacccagatgacatctccatagtagagtcctgtagcagtgcctcgtgccgaatacgccacccaggcctcgctaccta

SEQ ID NO: 142174 - DNA, 609 bp, Homo Sapiens
gaatgcatctattattttattcaataattttggaagtgtgataggattacaaaccttgtccaggccctactctcactatgggatacagagaagccaccataggtaatgaagcaaaaatgaacaataagcaagtagagacaaagaaaacgcagtggctttcaacatgctatcgaaagttggcccaaaactttttcatgagttatttcactggtaatgagtacagctgtagctctctttatcatcacacatgtatcctaagatttctagagaacactagtttgtaattttagatattcacacttaggcaattctgagatgtctctgctggaaagtgtcagagggaaaaacaaacccttttcagcttcctttctcacagccaggattctttacaatctatatttttcagagagtgattgcaaaggagtttctttcaaaggaccgaatacacttattggagaagagatttacattttaaatgatggtttttaaagtttccatttaattactatagtcaatctttgtttttcagtttccaattattattctcagcatagcctacgtactaattcaccatgatttctaagcaagtacttctatacatgggatgat

SEQ ID NO: 142175 - DNA, 490 bp, Homo Sapiens
ttttttgaaacttcagtatgaaatacaaataaaaacaaagtgtagcagcgatggcctcagacagtagatggcagggacaaactaaggctggctctgggccaaagacacgagcctcctggggagcctgtggggccccctccctcctgtgaggctctcgtctggggtgtctgcatttctgatttacatttcatacttgtttggtgccctgtgaaattggcctttcttctttctgcttccagctggtcctgtgtggaggtgaaggacaagggctgcagtgagccaaaagtgaggtgcacagaggtcttgttttcctgaggctgatagagggttccctctagacccggctccaaataagcagggctcacaagccaaaatccagattctcacgggttagggtctggattcccgggaaaccagccccaaactgctcctgtgaggctgtggggccagcccatttctccatgcaacaggtgagactccagccccacag

SEQ ID NO: 142176 - DNA, 518 bp, Homo Sapiens
  misc_feature (487)..(487): n is a, c, g, or t
tttcattattatgggtgcgtaatagtgtatatatttatagggtccatgtgatgttttgaaacagacatgcaatgtgtaatgtaatcacatcagagtaattgtgggtattaataaaaagatcttgaaaggctgaagttgggggtgggatagtggtcccagagtgaatctggtaggcttcatttttttcctgctccctccagggtcggggctgtggcccttaagcagcagctcacccaccatcacccccaggctgtacctatgtcagagacttcgatagcgtttaggaaggacgctctggcttgcccccatcgatactcaggcatcaactcatccatggtggcaccatgtttacagggccaccagtggccgggggtgtcttgggaagaccagaccagtggaagccccagttaaaggtaagagaagctcccgggtgctctagagaagtgcttctcaaacctgaatgcgagcacgagccacttgtggattntgctaaaatgctgattctggtttggtaggtc

SEQ ID NO: 142177 - DNA, 781 bp, Homo Sapiens
  misc_feature (291)..(302): n is a, c, g, or t
tttttttaggtgcttgggcatacctggtctaccactctcatggagaatcaattatttattatttctatttcttgctgcttgaatcaacttggaagatttaaaatgtttgagatataagcaggtattgcttaaaattctatgtgaatgttacagttacagccttgggatagtggtaggaaatgcaagggcaaggctcagcatttctccttcattctggaattatagagtaacaggattgattatgagcaccagatctggtgtaaactataacctcaacaggtcttaaaaagnnnnnnnnnnnncaataaataaccaatctatttaggccactggaacaataaatgtctctcccaaactgcatattagggatgcttgctcatagaaagacatttggggatctgcctaatactatcccagtgctttggcttcccagttgaataaccctgtctcaccaaatgaatgcttggcatcatgtatctggtaaaataagatgcctgaagaaagaaaaaagctgagtaggtgctaagtgattatgggcatgtgtcatcatgcattgcaggaatcagatgtttcaaaataatctccaggtggctaccctgaccagctctatattccctgcagctctgtatccatcttccccctttcaccctcctcccctccccctgctccactgcctcccatggcagcaaattgactgctttgggtagatttccagttcttagcactcaaaagctgcccaggatggcagctgtccattaaagtggctaatggaggtgatggt

SEQ ID NO: 142178 - DNA, 955 bp, Homo Sapiens
  misc_feature (228)..(516): n is a, c, g, or t
tccagggggaatttttcccatgggactggccagggccaaaacccaccctttccacatttttggaaattcattttaccataaaacttaggagcaccctttattcaacccaggaaaatacgattttcatgaatactaaaaggaaaatagtaaaccatgaaatattacaatgaaaaaagggacgaattaaattttcaaataaacttcaatatctgccaagagggaattccnnnnnnnnnnnnnnnnnnnnnnnnnnnnnnnnnnnnnnnnnnnnnnnnnnnnnnnnnnnnnnnnnnnnnnnnnnnnnnnnnnnnnnnnnnnnnnnnnnnnnnnnnnnnnnnnnnnnnnnnnnnnnnnnnnnnnnnnnnnnnnnnnnnnnnnnnnnnnnnnnnnnnnnnnnnnnnnnnnnnnnnnnnnnnnnnnnnnnnnnnnnnnnnnnnnnnnnnnnnnnnnnnnnnnnnnnnnnnnnnnnnnnnnnnnnnnnnnnnnnnnnnnnnnnnnnnnnnnnnnnnnnnnnnntccatattgttaacatatagttaacactttaaaactgatgtgctttaattaaaaagcaagcaaatatacgataaaacagacaaggaatcaaagcacagatcctgaaatcagaatctaaagaaaataatacagtggggttgtatacaacttagcttagtaagaaattataattatacagaagcgatcggagctaccacaaaactgtgtaagaataaacaggtaattttaacagatggttatgtaaattggcaggtcgggtaaagaacaaaataagcttacagaatatgccatttaaaaatcctaaccaaatatttcatttcatacgtatattaaaatgcaacctggaaaagaaaccctgatctcaattcagctttgagtctatgggagtctactttctagaagatttcaaatttcatttgccaagacatcataattagct

SEQ ID NO: 142179 - DNA, 449 bp, Homo Sapiens
tttaacacggtttttggagagctttataacttctgaagcatttcttggcttctacaatattttcatggtcatcatttcatttcataattctcacagcaacacccatcaggcagatggggaaactgagtcacgtggcggtgcagtgtcttgcccagtgtcctataatcagtgccagggcccagggatacctccacctgggactgggcagggccctgggacacaccgaaagcacagaggagcagaatgcctgtcttctccatgagcttctggcacagcagcttgcatacacacatcccagcatgcactgagtcaggcctagggcttggtcattgttgcggacaggcaacaggatgttgtcattcatgtttggggaggtgtcctctgccatcctgctggtgttccggcctcactgggcaatcctccggggtctgggattgtgggccacatct

SEQ ID NO: 142180 - DNA, 409 bp, Homo Sapiens
ctgtccgcaacaatgaccaagccttaggcctgactcagtgcatgctgggatgtgtgtcctggttcacctgttttgcctgctccctgagaactcaggcccagcaggttctgtttaacacgtgcagatgcaagctgctgtgccagaagctcatggagaagacaggcattctgctcctctgtgctttcggtgtgtcccatggccctgcccagtcccaggtggaggtatccctgggccctggcactgattataggacactgggcaagacactgcactgccacgtgactcagtttccccatctgcctgatgggtgttgctgtgagaattatgaaatgaaatgatgaccatgaaaatattgtagaagccaagaaatgcttcagaagttataaagctctccccaaaccgtgttaaa

SEQ ID NO: 142181 - DNA, 563 bp, Homo Sapiens
ggcccacaagctccatttttctttaatgaaaacacggtggagaaatacaaaggacttttattactgcacagtcatcttacaaattgttaaagcaggatgtctgttttaaaaattgaaagccttacttataaggagagcttgcctatatgatactactttcagtgttaccaaaaggcttatgagcctaaatctatcctcatattaatgggcacactttaggcactttttccaagaagtgcaaacctgttccttggaaaagataacccactaatccattagttttttcgctttgaaaaagcagagagctgatggaaaggccttaattggagaaagcaatccagggctgctgggtggaggctggagaatcccaggtggaaggctgggcatgagccatacactaggtgtctcaactggtgaggtcaatcaagtgggagaacagaccaaaaaaacttgaggacgccctaaagagataatctgcctcctattgccttcagctgtcctttctgaggatgttcttaaattacctatgtaggttagacccaggaaagcttaaaggagacaac

SEQ ID NO: 142182 - DNA, 440 bp, Homo Sapiens
tttttttgctttgtgaagatctttggcattcaacattcggttcgattctgcaaacttctcaagggattatgattactttccactctgcagatcataaaatcgccactcagatgaactctctcggcttccagcagctgatgtcctggccacggttggtcccaggccctgtgcaggaagagcaccgatgtttgtggcagggttcacacgcctagggctgtgtctggtggactggaggcctccaccacaaggtggaacggagagagttcagcaaagatgtcacacattcggccacggtgtggatgatctgtgtccctttttctttctatatttgggtgtggtgatttatcggattccagcaggaaagtgcctccgtccaacatgtggccttagtggtttagacagagtgtactgtgctctgtgctgggtactgggactcatca

SEQ ID NO: 142183 - DNA, 320 bp, Homo Sapiens
gcatatgagcaaaaaccttttgctggatacaggagaaggttggactttatctacagttatcttttgattacagcaacagctctgggtgagagtagaatttatagagggataatttgtcaagccatagaaagaaaatctaaattaatctagtaagtgtatgacctctcaccattttaagaggtatcagattcatttgcactattaggaatgctagttttgtgcaaaaataatgccttacctgttttttccccacatttaggttgaaaagctttcaaatgttccaagttatgctgaaccaaaaaaagcagagcataagcaaa

SEQ ID NO: 142184 - DNA, 760 bp, Homo Sapiens
  misc_feature (313)..(313): n is a, c, g, or t
tccttgctttgctttccttgcagcctcatcttctagtttctttttctgcattagttctaatcttttcctttcaatttccttcaacttgtcacgtttgatcttataaagctgttcaagggctaactgctgtgtgttgtaggtttctctcagttcctttagttgattgttaaaagaatccatttctgacagcttagatgcagtttctttttcaagagcatctaactgttctttaagtctttggcataattctttccttttctaatgattttttatgaagtaaaactgaccccttgaatcaggtgtgttactgaanctgcatgtttttaattctttcatttaataattgcttctcaggtaccagatagataagcttattctgatattcctgaagttcctgttgaagttgcttgatttccataatttccaagtcacactgcttatccagaacttccagctcagtcttttgagtttgctttttgagtcggacatcctgaagtctgcctgagatctgctgatgtttgccattcagtgcttccaactcaagatgaagattcttctttttagagtttaacctgacaatttcttcttgttctctattcttttgattgagaagctcctgtcgccgaattctctcccattctaagcgacgttgtcgttcaagttcctgttttgctgcctctcgtctttctatgtcttttctcctttcttcctctcgttgtctctccaattcccgttgcttctctaagcgtttttctaattc

SEQ ID NO: 142185 - DNA, 610 bp, Homo Sapiens
  misc_feature (588)..(588): n is a, c, g, or t
gccatgccgcacggctgctgaccgcacgcaggggccggccccgaggacacatgcggcggcctttgccgcctcgcccctgaccctctgccctgttctccatgttgcatttctcgtcagtttctcgggcggtgtagctgccgctgccaccagagccggcggggcatcgcgctgctcattcatccggccgcactttcttttccgtttccacccatcccttcccatttccttctccctttccccgccagcttcgcatccatctcccccaccccgtaaccccctcctgcctccatccaccggggctatggccgcagaagaggtattgcagacggtggaccattataagactgagatagagaggctaaccaaggagctcacggagaccacccacgagaagatccaggctgccgagtacgggctggtggtgctggaggagaagctgaccctcaaacagcagtatgatgaactggaggctgagtacgacagcctcaaacaggagctggagcagctcaaagaggcatttgggcagtccttctccatccacccggaggttgctgaagatggagagactcgggaggaaacgcttctgcnagagtcagcatcgaaggaggct

SEQ ID NO: 142186 - DNA, 562 bp, Homo Sapiens
tttgggaatgcaatattgtatttattctattcattaacaatacttgaacatttacaatattcattgaacataatctaagagaaggtcaacttacattttttacttctctattaataagagagatggtcaaattaatttatggtcaaaattataatggcaaaaacttataaataaatacgtgcttggtgttactatggttacacacagttcagtttttggtgtaaagttctttggctgcaagaaagaacatttggtttacttcactaatagaaatatctcttaaggctggaatggcctcctcttggtatttcttctgctgttgattttttgcatagttatctgtgattgtatggatggagtcgagtggagaggtactcatcatgttaatcccaaacaagagcacgtagccaattactatagcaataaggaggtagacaggtaatgcaactgcccaatattgaagccaaattgggagcttaagaaaagaacaaagccataaatcgctctttctggcaatggcgacggtgaattttccaccatttttcctggggctttagacccc

SEQ ID NO: 142187 - DNA, 954 bp, Homo Sapiens
ttgatggaaagtggggaccgttggatgatgctgggagcgtaagtttagggaggttcaattaagatgggtagcgtgtgtatgtgattagaggggatggtccaaattagttgaatggtcgaaagatgatgaatggcaagaatttagtgaaagaaatacggtctgtggggttacgtattggttgacacacagttgcagtttgttgggtaaggttctttggctgcaagagagaacatttgggtttacgttcagctaatagaaatatctcgtaaggcctggaatggcctcctcttggtatgtcttctgctggtgatttttggcatagttatctggtgattgtatggatggagtcgagtggagaggtactcatcatgttgaatcccagacaagagcacgtagccaattactatagcaataaggaggtagacaggtgaatgcaaactgcccaatatgttttgaggccaatagggttaaaccctaaagagtttaggccaagattcaggaattaaaggcccacacgaggtaaagtaccatctgtctcctccccaagaccacgacctccttaagggcagggaccaggctttatccactttgccatcgcgtctggtgctgtataaatatttgtagagactaaaacctcctaggctagtgctggcacacggaacactcagcaaacacgagatcccttcagatttttgaagccaaattgggagcttaagaaaagaacaaagccataaatcgctctgttctggcaatggcgacggtgaattttccaccatttgttcctggggctttagacaatctcagcgctgagttctccgcgcaagcgccgactggggagccgcagtggggaagaggaaaacctgagggaaaggcctaggcgcgacggcaacccccaccctggccccccggccgtaatggccgaattcccgggcatatgtccggtaccgtcgactg

SEQ ID NO: 142188 - DNA, 790 bp, Homo Sapiens
ttttatgggaatgcaatattgtatttattctattcattaacaatacttgaacatttacaatattcattgaacataatctaagagaaggtcaagttacattttttacttctctattaataagagagatggtcaaattaatttatggtcaaaattataatggcaaaaacttataaataaatacgtgcttggtgttactatggttacacacagttcagtttttggtgtaaagttctttggctgcaagaaagaacatttggtttacttcactaatagaaatatctcttaaggctggaatggcctcctcttggtatttcttctgctgttgattttttgcatagttatctgtgattgtatggatggagtcgagtggagaggtactcatcatgttaatcccaaacaagagcacgtagccaattactatagcaataaggaggtagacaggtaatgcaactgcccaatatttttgaggccaataggttaaacctaaagagtttagccaagattcaggaataaaggcccacacgaggtaaagtatgaagccaaattgggagcttaagaaaagaacaaagccataaatcgctctttctggcaatggcgacggtgaattttccaccatttttcctggggctttagacaatctcagcgctgagttctccgcgcaagcgccgactggggagccgcagtggggaagaggaaaacctgagggaaaggcctaggcgcgacggcaacccccaccctcccccggccgtaatggccgaattcccgggcatatgtccggtaccgtcgactg

SEQ ID NO: 142189 - DNA, 636 bp, Homo Sapiens
  misc_feature (298)..(320): n is a, c, g, or t
  misc_feature (392)..(485): n is a, c, g, or t
ttttactttatatcaacaaatatttatttagtgacatcgccagaaacaaagatggcttctggtatttcacacctagccttcgggaaggcctgttagacttgattttcctctctgccttggagagacacgaagttgctaagctaccatggggaaggcaacttctgctgtaattgctttcccagttttggtgctgccctagaatctttggttctccacgtttgctgagtcatcttcacactggcactgtctatagccactgtgttcttgtaaaaacaggctagaattactcccttgctcnnnnnnnnnnnnnnnnnnnnnnncagggtcccagtgtgattgattctgggtaagatagccagccgtccgcaaaacgctgcaggagagcacaactnnnnnnnnnnnnnnnnnnnnnnnnnnnnnnnnnnnnnnnnnnnnnnnnnnnnnnnnnnnnnnnnnnnnnnnnnnnnnnnnnnnnnnnnnnnnnnttatttgtcgttactctttttcatgatggattataaagaaaagttataactatttgaattttctgctgatttgaagtctctataacagtacattcctttttggtacacagagggcgcttatctgtttcaggcaggaagggcggagggcaag

SEQ ID NO: 142190 - DNA, 465 bp, Homo Sapiens
tttttcaggtagttcagttaagtgaatttgataccaggaactagttacaaaggagttggaagggctggaaagcacaactggagaagaaggggaaccccagagtaacaatagcaggaagcctctaccgtctacctctagaactggggaggagctgagttaacagagtcctggagccattgctggggaagaagaaccccaactgcagaggaaaagtggccattgtgaagaaggcgatggtggagaagtcgtctgaatcaaaggggagaggatatgttggctcctttatctttttatctttcattgtcctaattccttctgggcatggttaaatgagcccaggaaatgcagttggcaggaatcagcttcttgtcgttactctttttcatgatggattataaagaaaagttataactatttgagttttctgctgatttgaagtctctataaacagtacattcctttttg

SEQ ID NO: 142191 - DNA, 560 bp, Homo Sapiens
ttcacttctcataaagacatttattggttgttgtcagtttttaggtatccaaagtgtgttgcctttagacccaattggaggatgacaaagatgagggagtgatcactgaggagcaggcagagtctcagagccctgtctgcccttgcaccactgggctgcacacacaccctcctgcctcaggctctggtctgtgcctgtggctttgaagtctgggacaaggagagacttttctcctgaagggcaagggctccgtgggcccagataagaaaggggaacagcagaattgaatcctctctgggatccaatgcctggactgatggaattccagtagcaccaatgtctgcctggtatgcataatgcagggctttatctttgtaacagcatttgttaaattaacacatcagaattgtacatatttatggggtacatagtgatgttgtgctacattaaatgtatagtggtcacataatagcatgcagcatatccattctctcaaacgtttatcatttctttgtgttgggaacattcgatatttgaaactatatgatatattattaact

SEQ ID NO: 142192 - DNA, 470 bp, Homo Sapiens
cccaaagccagaaaatgtttattaaacaaaatcaatgaaatgtctgagcacagtccaggtggcagaggtttacttcttgaataaatgacttcatcttttaacaccatttcacactgaagtccaaatggcctcacaaatatttcctggatcctgttttttattcaaagcccgtcctctccttcctgttcatgaatggcaggcatcctgtggtgactgaagaagggcctagcagcaaagggactccatcgcccgaggagcagcttccgcaggagctccggcaggttccttggaaaacgtggcagtgccgggcccatggtgccggcattaagaatcaccgtgatgggctggtgacatgcatctggttcatcaatgttagtggcaaagcttccagcatctacaactctagtcaccaaaatcaagaatgtctttctcttctctttttacatatgaagaattccaatctgactagg

SEQ ID NO: 142193 - DNA, 420 bp, Homo Sapiens
gtctcctgatctgtgagctttattattggtaccgtagccttgtcaaggactttgatggaacacggctcagccacgttgtgcttccgcagggcttgctccagcagctgtaaaggaggacgctcccatttcccgaagaccaccaggtctatgtcgctagttggaagataaagacctgtactaaagctgccaaatatctgtacatcagccgtcggccaaaggtctttcaccacagtttcgatccgtttcaccacctctcttctcatagctgcttcttcaggacaaggggacatgaagttataaaagtcaattatttcctcatgtagtccctggatgcccgggctgtacgcgcggctcttccacggggtgccgggccgcggcgcctgggccccggggccgccccctccgctgagagcggccgca

SEQ ID NO: 142194 - DNA, 1314 bp, Homo Sapiens
cccaggagaatagccttttattacccagcttttacccttggggccaacctgcctccccaaaagggcttccaaatccctcaggtaaaatctgcatcagaaaatgggaattggaatggggatgttcctttgcccaaacccttccagcttcagaactgataaagaggttgaagagcaggggtggggaaaaggaagttaaggaatgaaattacaatttccccctcatcccctattcaaattccagtcccagggctgggctaggcagactgggagagaagaccaggcagctgttctcattatcagggacccatgcagacctgttggacagacatagtaggtgagagaaggctgagctggaggccaggagggttctttaggctcctagagggagaagcaggggcctggggtcaagggggagtgggaagcaacacagtaacaagcagtgggaagagcctttgagccctcaaacttacgggccaccctccaccacccaccccccaagtgctgacagaggggcccctgcgggtggcaggataatcaagggcagagcttgatgcgggtgcccttggagagcacccggaagaaaggaaagacacgctcgcccaggaaggcagccgagaaggtgtgcacgtgggctagagtctctgcgttgtagaagcccaggcgcccagcttcatagtccaggtacacaccaaagcgccttggtttctcactggggctcagcagcgtctgttctgtggagctctgggcctgatagcgtttgccgttggtgcccacgcaccacacttcccgctggagcaggggctgctggggcaggtggagccggcggcggcgatggtgatggcgcgaggagctggcatccccgctgcccacggaggaacccccagggcccaccttttccttatgatgggttgattcacgggcagcacccaccgcccagccccgccgcccgcccacctctacctcccagtagtgccggccggagcggaagccctgggcccccagtacgcagcagtcggccgagaagcgcttgggatggtcagcaacctcctgccgccgctctgccaggcggaccccccggcggtcaggggacagcatcagggccgggtgagccgtgtcagggtccagcgtcaggtccactctcgcagcctgacagaacatccggctcattttcctcacgctggcatctgtcaggaagtcatggctatggggttggcacgggtcaggggaccagacctctgggggctgcagctgtacctcttcacacctggaggaaggggaccgggcagggggtgggaccacgatattcccagaggg

SEQ ID NO: 142195 - DNA, 928 bp, Homo Sapiens
tttataagtggctaaatcttccagctaaaaagtttttatttccagtagaagtagtacttgtattttttccttgactggatttggatacaggatccattgcaacatatttgatttggaaacctccagctgtcactgaagcatcacttagaaacttcaaggtcatgacatttcctgtactgatgatgtcatctggaagctcatctccacagtatcttcccacaaagccatggacatcatcgtaactgtcatatatttcaacataatcagccaagcaacctgggtcatcttcaaggtcaaaatctaaaaaactcaggtgaatacgctgaccatacttgagtctaatgtgccagtagcagatttggttatcttcgtactcatttgggaagcctggagatttaaaaattcgctttggatctgtaaagacgccaccacactcctttgcgtgtgggttgtagcaataggcatcccatctttcactcctattgagacggattccataatcaataatgccagtttttccaaatccacagttgggccctggcttcacaatggggtatccaactctgcccttagccatccatccagcagcacagacatgaaatccaatttttctggctgcctctagctgcttgtaagttgcgagatggccgccttcaaagttcacacaccgccttagcttctgcgtaggtgagcttgtatttgccagaccgtgcttctctgtggtacacaccggctgctcgttcaagccatatggagttatgtaaaattccatccttgaatccccatccttgagtgtcttcccatagcaagagaaataagtaaattaagatgatcatatcgtcagttgtagtgaagtaacagcctgttaggggctgctcacaaattctcagagcggacgcgtgggtcgacgatatcccgggaattccgg

SEQ ID NO: 142196 - DNA, 578 bp, Homo Sapiens
aaaaagaattcctgctttattctctacaagctgtcaacaagatggaaaaacaggggggaattatagcctacagcagtatgagcaaaaagaaagaatgaacattcaacagatcaagatgtgctagcaggagtgcatgtagcatcctgtgtcatggagcaggcctttagacacagaaccagacatgggacttgttaggatacactgtccaatcccaggggtgaacacacaccgcacactagctaaaatatctagttattcctactacacaaaacatatgtaaagcttccgcaaaagaaagaactcacctccactgctgctgagaattagtcctctcctactctaactctggcttctccttaaccggtcataaaactagaggcataaggaagtcctgactggagagctagaaggatactggtttctgacttgccttgtgatgaaccagtcagtactacagaaacctgcttatttataaacagagcacttttatgtggtcatctcttgagaacctgtactaataagctctaacaaaaagcatggggacctggaatcaataaataatcctaaaaacctcattt

SEQ ID NO: 142197 - DNA, 401 bp, Homo Sapiens
ctttacaacttttattttcggctcaaggggtacaagtgcaggttttttacacgggtaaattgcgtgttgtgggggtttgacgtacagattactttgtctttaataaggaataagcacaataccccatgggtagtttttaatcctcatgctccatcttctgccctcaggtaggcgcggcagtccttgttccctttgtgtctacacatatgcagtgatcagctcccacgtccatatgagatcatggaggacaggtgtctgcctggtttgttaccttcccagtaccttccttgtattttctagagtagatctcatttccgggatgtgtttcctggcaggctttcactgtggtgaagtgggaacaacgtgaccccacagcccacttcctactctgtcagaacctt

SEQ ID NO: 142198 - DNA, 636 bp, Homo Sapiens
  misc_feature (40)..(40): n is a, c, g, or t
gtgggagtagggggtaaaatgtttactgaaaagcaacttntagttggcagggaatgaaatccaacgttttatctaaagctgctacggaaaagtctgtctttgttgttgctgttaggctgggggcgtggatctgagagtcgtgtcgtcagaactcctgaagccctgtcctgctactgctgccagcccctggtggctttcaggccgagcaggcgaggtggagggaagagatgaaagtgagaggaggtgagtggcagggagcggagagcgagaggtcccagtgctgaggcagctcacgggtcccagctcccgcggtcagtgctctccagggagaggctcttggtttttcggggtgaaactgggcttggggggctgcttaggttggaactgttggaagctgtggaatgcctcggagagtcagagtcctctccgtcaaagtccctcgctggggcatcacttccttggtccatgcctccggaggacaaagagccctctgacggggagggcatgggctgccgcttggcactgtagcttcctccagagaattccctctttaatgcgctgccattctgtgcggatgacccttgctgacaagccactgctagcactcatggagcggcctggctcaaggcgggaatt

SEQ ID NO: 142199 - DNA, 568 bp, Homo Sapiens
tttttttcagaagaaattttcatttttatacttgaatgaaactcaatcttccttcattctcacatttttggggaaaaaaatcatttacccactccaacagtggctgagatccatttgctatatgaaaatgcactcttttctcagcatgatctctccgctgtccgatagacgcgttctcttaactactgctgccacctgctggttttgtcattgttagattttagaaaaagcagtgcataaggctccagtcaagatgatgcaaaatgcaagtatcattaataggtagttttgtagaccctttatttccttaaacatgaagataccccacattgcagctataaatcctggaccagcagtgattattggaaaactgaccacagcactcagagagtgatttgctatgaaccaacagcaggtagctatagcccaaagtactcctgacaggaatcctggtaggactgcttcaggatatagtttaggactatttttcatggctatgcagtaggccagaaaagtagacagtacttgtaagaaagatgccactgaagtgcgcaaacacatagtctaa

SEQ ID NO: 142200 - DNA, 435 bp, Homo Sapiens
  misc_feature (336)..(336): n is a, c, g, or t
tttaggagatgtgttggggttatttattacattaagtaattacattatcacttcattttgtctccatcaagtctgatgcccctctttttgtctcttatacatacattatagaaacaacctacattataaatttatcaactactaatacaaaacacctgtgggatatttagttcccttttcatcagataaatggactgtatgacaatatgagatttaagtaagtagaacatctgaagagtccttcaggagtttgggataaaagaatatataaaacactatatttgaaaggagaatataaggtagcaagcaacacatcagatgaatgatgcttatgtnttctggtacaattactggttcttcccacaacaaactccttccttggcctgtatcccacagatgtttgctttctttctcacttcatgtaatgatttctgg

SEQ ID NO: 142201 - DNA, 707 bp, Homo Sapiens
tttttgccgcgggaagctcagtttttattgaagacagagtctgggagaagaagggggactccggaagacagtgatgcggtcggagattgtgcaggccccgggccgggaagtgggcggtgtctgggtgggcgggaccagcgccggggcggggctacggactcaggctgggagaacctccccctagcccgcgcgagggcggcacccgcggaggtcccggggggcgctgggcagtgtggggcgcggggattggacaagaggccgactgaaggcggagccgaggtaaggccgggcggggcgtggcctcagagggcgtctgactgctcgccctgggcctggctctgctgcatttgggcctgcatcttctccagcatctcttgcatgcggcgcagctcttcgtctttctcgcggatcagcttctcggtgtccgccagaggcagcatgggcagcgggatctctgtggcgctctggcgggaaagcttactgcggctggctcgatcgcgagccccaggccgggccaggctctgtaggcagcgggcccggtagccctcgtagagcagatcgtgcgtcacctctttcaggtcctgcaggtgtgtctgcaccagcattcgtcgcatggtcaagaaatcgcatgatgtgggttcttcacctccatccgtccctaggaataagcgggttccctcaccggccggtttcccgcattccttcac

SEQ ID NO: 142202 - DNA, 643 bp, Homo Sapiens
catcttgagctctgacaatgaacatctaatatggcccacaggcacaagtgctgggtgtgccatatacaagtgagattaatggttgtggaaaattagaacaaaaagcaataattctaaaaacaatttaaaccgactgtttaaaaaaatgcttcctcaatttttttgtgtggttcagagcataaatctgccacaatacttggcattttactatttcactcctccaaaatgttttgctttaacagatttttgtaatctgtacctaacatttacttaaacatatgattttcaattctgatgccagtagcagttttaatcatggtttatgctctgaaaatgcaataatcaagtattttggatcatgcttcacttatgctacttagttcttaaaacaatgtaacctaattgtaaatgtttacataatgctaactgacatgcaaaacagaatgaaaatttacaatggataacgtgacaaaacgcagacatttctgaccagtggtccaatgaggctgattacaccctttgatgttggtatccttaatcctacaaggcctccagtgggattcccttctgcagtcttctctaacacttggttaacaaattctgaggtttgcccagcaactggtagaccgagagtatctttaat

SEQ ID NO: 142203 - DNA, 1142 bp, Homo Sapiens
gcggccgcggtcagagaaggagagacaccagcagaggacgcgaagctggaccggccaggttcagagcccgcctcggttgctcccaatcagaatctgctttgtgctccacggcctccaagcactttcatgagcgttctgctcctacgtggccaggtcctaccttccctgacggctctggccaggccagctcggtttccctctaacccatgaggcctgggggggctgtgacagaggctggaagcgtggccagagcccaggggcaggcccgcctggtcacagcaggatgaggctggggtggcgcagctgccggtacacctgtagcagcctctgggcggtggcacaggagctggcctcatcctccgtgcagagccggtcgcgcagggtctgcacctcccgcagcagtgtctcgtggttggcgtggatctggcggaggtactgcacacggagatcaggagcgctggagccctgggcggcctgctctgtcaccatcgtctgcatgcgcccgacaacggcatggtgcgccctgcaaatgtcggccagagaggagctttccacttgaatctccacggcctggatgggccctgctgggcacaggtcggtcatggccacctctcggacgatgaggtgaacgttggcgccatcaggggccactccctggatggaagatagtgctcgggccctcacgacgtccacagcagcattctcagcaaggagccactgcagggtggcacagcacaggggcacgcctgagtggccgtccttcaaggcagctctgagcagctccgccgacaccttgatggaagccacagatgggggcaggtactcggcccgcagggaggcgggtcctgctggctggctgccaggctcccgacaagtttccagaaaagtggccacagggtctcgggtggggccgagtggggagggggcccgtgtgtgtggcggggccaggccagggaagcgcagacactgcagcatgtccactgtgtgcctgctcaggggcaggcaaacaccctcttgctcgggcaggacgtcggaggggcactcatccagaaaggggtcctcagagtctgagggggcaagggccccgcccacccctcgtgccgaattaacacacgccatgcctcgctacctagccctaggtt

SEQ ID NO: 142204 - DNA, 1281 bp, Homo Sapiens
  misc_feature (1251)..(1252): n is a, c, g, or t
  misc_feature (1271)..(1271): n is a, c, g, or t
tatgactccatatttttttaatttacagaaaagtacaaattttttagaaagtaatcttatcagcacaatataatctaacaatacctgtaatagaaagctatcccagtaaattttttttgaacaattgaacttttgtcttatgcagcttataactttgttattttattcatctcaacaaaataaaactttattgaaacaaaaagtgtatggtttaggaatatgctcgttaataacaactgagcaaaattagaatgatgtggactataacagaatgaaggaagatctctcctgcttgatgtacttggtcaatatatgttagtaaacagaaatattttagggaattctatgattattctacttctacatttacatgtcatggttttaactagttaaatgggtagaaaaaagacatctttaataattgatttctatttctcaaactagatgctctactttaaatatgagctttaatgaatgttttgtaacattttaaagttgtaacatttctaagtatactccactaacttcacaataagagctagggtcactggatgacttcatgtggtaaaatcccttatcaaggaataaggctgaaatttaaatgaacattaggtagagaagaggtatgaacacagaacatgtgaatgaaatttgctttttttccttgctgctgttcccgagtgccgactgatccatagtaaaaaaggacaagattaaaattttaggttttaatggtacaaagtgtgaagttttatagttttctaataattattcagtattatccctttcagagatgagggtaggataccacagacatcagtaactgacaagttataatatcaacacatgtaacatttgggtcattattttataaccctaaagggagcaactgcaggtgcagaagcagtgagtgaactagttttgtccagacaaggttttctgatgtgctattactttaaacaccacttttggacactaaagatttaaagtgataaagccactaactaactttatttagactagtttttacataaataaccagatttctttgcctacctaaagtacaatttacatgcatcaacacatagattattctaagacatgcttgggaaagtaattttgaatgtgaaaagttttattatttatttttctccttagggcaggtgtccattacatattagtgctcaaatatatgttcatttccagaatgaatttttgcacagtaatcatatatccatttaatatgtatannagtgttcttggggatgggnggtattattc

SEQ ID NO: 142205 - DNA, 722 bp, Homo Sapiens
tttttggccatagaaacgtctttattgaagaggacaggagtcatgctgagtttggggacatgcagtgaaggggcagtcgtgagctgtccttggtggtcggggccccaggtccgccctggaccccctgggccttcaggttctccctcgagctgttggtctggcccaggtgctgtggggtcctttgaggccagtgactagaacgtagattgaaatcggggttccaggatttgagatcccctcagggccttggggccttccatttattagagatggaggctttaggatttggggttcccttagggctggggctcttggaatttggtgtcttgaaacccatggactcggggcattgaaattctccagtttccagggatgggaattcctgtgtggggtttcctggtgcctgtgaatagggcttgaggtgtctgggagcctggaatgcatatcctgactgcagtctcctccataccaggcacaaggacctcatgattgggtttcctggggacttgggattggattttcaaatttgggattccctggggatttgggattccatgatttgggggtcctaggagttacggcattggggtcttctaggggctgtaggacttgagggcacaggggagtttgggacgtgtgtactctagggtttgggatccccagagtcctagaatggggcctccaaattttggggtcccccaaagggggaagtcgttacttaa

SEQ ID NO: 142206 - DNA, 559 bp, Homo Sapiens
ggggagaagggaggagttattcaggcctccgccagcttcaagggcctggggatggtctttcacctccctctttctgatctctttttcatgctcctccttgctccaaagaaaagccggatggcaaaagagcccagaacctattggaactgacaaaatcaagtcacggcgcctacaaagatgaggggcagattctggctgccttttaatttcgtccttcacctgatatctgtgccagagaatgataaaaatcataataaaggaaataatggaagaggagacttatgttactggggacatctaacataattattttcctgattcagtggcatggttcagtcttccaggagttctgctacagagaagagagtaacccccatccatcatggccaaagcacccagtcaggctccgctctggatccagcccgacaaatgcaacccttgaatagggtttgtgcaagcaaactggatgacgaccgaagaaaccctgtcgcttctgagaagacacccaatccaagaatgtgagttctggaaatgtcattaaatgtcagttatatacaaa

SEQ ID NO: 142207 - DNA, 848 bp, Homo Sapiens
  misc_feature (67)..(67): n is a, c, g, or t
  misc_feature (184)..(184): n is a, c, g, or t
  misc_feature (210)..(252): n is a, c, g, or t
gctagttgggggggaagaccccagcgcccatttggttcaggtggcccagggttttttcctagggaanccacgcttagggcccagggtcccattataccttatgggggcgccccgcccccaaacgaaagggttttagaaagttttctgaggggccgaaggggcccaaaatttgtttttgtgattnggttgggattgtggtttcgtggagtnnnnnnnnnnnnnnnnnnnnnnnnnnnnnnnnnnnnnnnnnnntagtaagctaatttttgtttaatgcacatacacacttaaaattaagagcacatatatatcttatttggtttcctgacgatagtacaaaatactactttcataatatgttattaaacccacccttaaaaggagaacactttattttaccataattgtgtttttccaacacctggtgcaccacaaatttctgttgttttcattaagggcactccacccccaagaatatcatctagtgctgaacagaaggtgattatgaagccctgggtatgctcctgctcaagaagttccagtgctgtacacttcttgtgtgactcagatgtaccagcatatcttggtttatttgtgagacattctcttctgataatttgcagagtttctaaggcttctgctttagatatcccaacttctttgctaagctcggagggtttcacctctaggagttcctcagcagtctggaaccccgcagacaccagcttcacccgcaccgctggagacagcgggaaactcaccaaatcccgctgcatttcaaagcggaacgtcttcccgcgcatcgcaggctcacctgctaaccccggagcagccaaactccgcacccc

SEQ ID NO: 142208 - DNA, 783 bp, Homo Sapiens
gagtgtttctgaaaggaaattctggaagaaagataaactggtgcccagtaactctgtgtagtcacggacagcgaaaattattaaatatgagaaagaatatttatcaagagtgaaatcctccaaaagcttttcggtgttcctctcccttgtgtttttctgctataagctgaaggtgctgaatgcaggcagtagcaaggtctaccactctatcacccataaaacttccctctgtatcaataaaaactgcttcacctgccactcctccaaaacattctggtatctgcacatctactgccaactgcatacataattgtgtttttccaacacctggtgcaccacaaatttctgttgttttcattaagggcactccacccccaagaatatcatctagtgctgaacagaaggtgattatgaagccctgggtatgctcctgctcaagaagttccagtgctgtacacttcttgtgtgactcagatgtaccagcatatcttggtttatttgtgagacattctcttctgataatttgcagagtttctaaggcttctgctttagatatcccaacttctttgctaagctcggagggtttcacctctaggagttcctcagcagtctggaaccccgcagacaccagcttcacccgcaccgctggagacagcgggaaactcaccaaatcccgctgcatttcaaagcggaacgtcttcccgcgcatcgcaggctcacctgctaaccccggagcagccaaactccgcacgccctcgctggggcgtgcggcgtgacgtcccc

SEQ ID NO: 142209 - DNA, 567 bp, Homo Sapiens
ttctttattttgaatgttacaaaatatttctctattgtaaacggtgtgccaggaaaaacatgagatgtgtatttgtattttttatgcacataattacttaatccaatgcctctccacttaattgggcctgatgatttttatctcgacatctgcaatactgatgatatactggaatctctaccaatttatttttggtggtaagaaagcagtcagagaacgttttgctggttatttcattccgtgtgagttcccaaccaagactgtcagcccagtgtggttcagccatatctaacctatagaggccatagaagcagttcagcttaggctggaggccagcaggctgagtgtgcgagctgacccgatggtcatttgttagggttggggggtgaactggctaacttattaactagcttatcatattaataaaaactctttaatacaaatccttgtcctgacactctgtagctttaataatcctattaccaatctggtaataaatgtgaattctgacacattgttgatgctactggttttagtaacataatgaacatcataataaagaatatt

SEQ ID NO: 142210 - DNA, 465 bp, Homo Sapiens
ttttttaaaaaagagcattttattttaataaagaataaaagagatcaatatactgttttaatggatacaaaaataaatattcattcagcatattaaagatatgtgctttgacattcatttgaattggagattcaagcctattgttatcttatgaacacttcagcaaacaggactgccattcttaaaaatataatgctttgttggacaaaagggacaagccacgtcccctggtcctctcctctattcgcctgtgaactccatccacacgtaaaggacctctgggtctgactgtcccctccacaggcatggtgctgggaaaaggaaacaggcatatctggcttttcagattttaaaccggaaactctcacagtcacaaatccaccatgagacttgggagattggatgagctgtctcccaaaccctaacaccttccaccttctcaaaatgaaggctgccctttcactg

SEQ ID NO: 142211 - DNA, 454 bp, Homo Sapiens
atggtaacagaccccacgtatccgccacaattgctgtgagttgcagaggaaaaagactgggaggaaatcttcacttttcttctgcaacagcaaccaacagaaatgaaagagccaggggattttgcaaaatatcaactcctgagaactaagaatgagagcctttcctgccaagcccattgtgtgccagtcatcataaaatactatgacccttccttccagaagaacaatgcgctgtgatctttggctactcaagctttacatcatccatattaccctgcagcaggaacagattgatgggtattttcactgcccccagagagttaccctctaatccttcatttgctgctccagcacaattgcacggaagcaatagcagggatagttagagtgcatacaattgattccaatccatccatcacttaaactactgtctaggacatcaggaggccacaaa

SEQ ID NO: 142212 - DNA, 715 bp, Homo Sapiens
gcagtgtcggccaaacacaatgcccaggttgtggcagacatcttgttttccataaatcgtgcagccaccctgaacagatgggccaccaggtgccgcagggtgttgtagttagagtcaggcagctgtaccaagagggtcttcagcgagcggataacctcagggctggggctgggggtcccagggtcgtccccagggtctgcatgcaaggtcttagccagagagatgaaggcgtcgtagaggtggaaggggatcacgggctcggtgagctcctgaagaaatcgcttgaggacactcgagacgtcatgaggcgagttccccgacagctccaccaacgctcggccattctcgaaagcctggcacagccgctccacacggacccgggacccgctgacccggtaaatgccctgcacatccagggcacggtgttctatctcagccgtgcacttcgtgaccacaaagggtacctcctccgggaagtccctgggtagctgcaggaagtcaacccaaaaaggggtgtccgggctgggagccgcctgtgtccacagaggatcaggagagtctccaggcagcgcttgtggcacggtcagaaagcactcctcacactccgtcccgctgaccatgaaggcttcgcactcgcggcacttggctgggccccgcagtcgccgcagctggtgggtctgagccgcgctggacagtgtccacttcccgaaggggg

SEQ ID NO: 142213 - DNA, 467 bp, Homo Sapiens
ttttgagtggcttaaacatttattttttcacaattctggaggctacgactcttaagattaaccctgtgggcaaggttgatttcttctgaggtctctctccatggtgtgtcgataactgtcttctccctgtgtcttcacattatcttttctctgtgtgtgtgtccagtcttctttacttataaggacaccagtcagattggattcagacccacctcaataacttcattttatatctttaacgaccctaactctaaatgcagtcatattttcaaggacttcaacatatgcagcagggaggagggtaaatcagtctataacaagaagtgcagtaattagtcttccaaatactatatgaactaagtattccacaggtggctcaaacccagcaggaccaagactggcctcattatcctcatagctctgcttatccaagtttgaaatttggtcctcatcctagattaccacat

SEQ ID NO: 142214 - DNA, 440 bp, Homo Sapiens
ttttttgatgacataacttgatatttattgtcaacaaagcaaagcaggcagaagtgctggtaattggtgtgtcctcatctcatccccagtgctggtgcttgagtgctgcattttttatttaccttgtcagacagcatcatttcacccaagatttattgagtccatgtggagtatgttttcattccttattcatctctctcttggttttctacaatagagaaataactggagctgagctaagaggcttctcccactgtatttgagatatgctaaccaatgccactcttgggactggcttctggagaggtccctgagatgggcagagggagggaggttgaagacgtcacgtaacagcatcacttctggatcctagctgaattctgggaagatgggatttccttcatttaccacatgctgccaagtggagatgaagctgattc

SEQ ID NO: 142215 - DNA, 388 bp, Homo Sapiens
ttttcaagtttctgccatttttaattgtatttagagcaacaaaagattccaagattacaaaaagagaacagaacactagcgcttggagctggtcctgctgcccagtggaggccaagtgccaccgtgagaaataagccccatctaaagagatttcaagcaaaattgtttcttttaagaaaatctttgtgtgatgctttctttctctctctcttatttcttttttccttcaatattgaaaattaatttttatctctgtttacatagtctgctccctcctgctgccagattaattccaaggacagcacaagaatgtcatgtctgaggcactccctaatcaatgttccagtctagaggaaagcagaaaggtgtcactgggttgtgaggggac

SEQ ID NO: 142216 - DNA, 449 bp, Homo Sapiens
gagctgggccagagcaggatgtacttcaacgccagcggccctcaccaccccgacacctcggggacaccggagtttctctcctcctcatttccattttctcctgtagggaatctgtgcagacgaagcattttaggaacaccattaagcaaatttttaagtggggccaaaatatggttgtctactgagacattagcaaatgaagactaaaatagggtgttttctgaacattttgagggaagctgtcaacttttttcctctgaattaacattgctaacctaggcgtttgaatctctaataactttatatgtaagaataatagttggaatttgcactaatatttaaaaacatgttgaatcatgcttctttcacacttattttaagagagatgtaaattttgttcctgtcctctttctgtcattacaggtctggctcttgtaaccgtgatcaaa

SEQ ID NO: 142217 - DNA, 1258 bp, Homo Sapiens
  misc_feature (1033)..(1045): n is a, c, g, or t
ggggagcgtcatcgcctcctccctccccaagatggcgtccttgctgcagtcggaccgggttctctatctagtccaggtagaaaagaaggttcgggccccgctctcgcaactctacttctgccgctattgtagcgaactgcggtcgctggaatgtgtgtctcacgaggtggactcccattattgtcccagttgtttagaaaatatgccatcggctgaagccaaactaaaaaagaatagatgtgccaattgttttgactgtcctggctgcatgcacaccctctctactcgggccacgagcatctccacacagcttccagatgacccagccaagaccaccatgaagaaagcctattacctggcatgtggattttgtcgctggacgtctagagatgtgggcatggcagacaaatctgtagctagtggcggttggcaggaacctgaaaatcctcacacacaacggatgaacaaattgattgaatattaccagcagcttgctcagaaagagaaggttgagcgagatcgcaagaaactggcacgacgtagaaactatatgcctctggctttttcggacaaatatggtcttggaaccaggcttcagcgaccacgagctggtgcatccatcagtacccttgccggactttcccttaaagaaggagaggatcagaaagagataaagattgagccagctcaggctgtggatgaagtggaacctctacctgaagactattatacaagaccagtaaatttaacagaggtaacaacccttcagcagcgtctgttacagcctgacttccagccagtctgtgcttcacagctctatcctcgccacaaacatcttctgatcaaacggtccctgcgctgccgtaaatgtgaacataatttgagcaagccagaatttaacccaacgtcaatcaaattcaaaatccagctggtcgctgtgtaagtattttgggattggtgttttcagttactgttttgagttattttggtttattcttcttccccagtatgaagtgtgtttactcttggcctnnnnnnnnnnnnnttacatcaaaataatcttgacattctgttcctgtttaggtttttaatttagttacatgccatgaagtttaagataaatagattcaggggtattgggatcagggacacagtgtcccagtatgatctggagcaacaaggtatgttgattatttggtggaaagtcactagtcatcattacaaattataaagtatctgagtttgggaataatccttc

SEQ ID NO: 142218 - DNA, 514 bp, Homo Sapiens
aacctcccaagagccaatttattttaggcacaattggggaaagccctggtatgccccagcctcttccatgacatccagaaacaaccgcacccaccaccggcaccatgcaaggtgtctgttcacattgctgagctgggcgagatcgtctgtcagtcattacataaaacaggagccagtgacctttgcgaagtacacaaggtacgctggcagggccagtggcaggaagggagggacaagtggacagtggtgtgtctgaattgtagagtgttagattccaggtcattcccatctgctcaattccatcagccgcagagttcaagctgtcatctaagcccagggaggtgtaaggaacaggccacatctggttcttggaagtatatgcccaggcatttaaagcggatctttcctctttgggccatgggtggatttcctgctcaagcaaccttcatctagagagggcaagatgaggaatgtatttgatgctcacttctctctcagaaaaaccctccagttg

SEQ ID NO: 142219 - DNA, 584 bp, Homo Sapiens
taacagtaaagactgtctactcctttggggtttaaagatcccgactttctccattaaaattttcatatagggcacttcaactttaaaggtctgtgactcattttgctccaaagagatccttttaaataaagcacagcagagccttggaataaggcccagctgctcagcatggcccatcatggaaaaggattttcccgaacctgtctgtccatatgcaaaaatacacgcattatacccctgaaaggctttttcaagaattccttccccaaggcacttgaaaaccacttcttgaccagcgtattttgtagtgttagattcatccatggaccaaaagcaataatcaaaggcaaataccttgggaggtttcctttctccctgtttggtgttagaaggaggagggtgcaggaccgtttgattcccttccatctccaccacgcacttggtgttcagttccagttctcgtcggttcatgggccggacccggacggcaacttttaccttggtatccgacatgttggctgcgctcgcccggccgctcgccgcgcccgctcggccttagacggcccctcacgcgcggcgccgcc

SEQ ID NO: 142220 - DNA, 1041 bp, Homo Sapiens
ttttgtttttttaaaattttacaaataattttattatgaagagtgggggaagtggtatgtagatgccccataaagtataaaagagtctgctgataataaaaatgattttatttttaacagctaaaataaattttaatgtgcattagaaaaactacacattcccaagtaaactcagtctttcagatattattcaggattaaacaaggccgccccgaggttaatccacttacacagaccacgtgtgagttacagccggggtattcaggcatgtccgtgaatattcccaacttgtagtaacagaaccttcaaatacgtcctctcaagcatggacagtagcctgggtgtcaccatgcctcttctgcgggatggatgggaaggtgaatatggattacgtgtatggattctcacgctgcatttgtatgcaccttgcaggaagattcgggaattcaagctgctgcctggaagcaagatctaagcattgcttcttacctagcggggcactccaatgccacagacagggcagaacacgacttttaccccctccttctgcagcatgattttaagagacaaaacttataaggctgtttaaaatggtaaatcatgttagagacgttctttttctttccttggctctgtgaagagatgagtagttaccccgcctcacacctgaagcgtactggcttctgtgggtagcagtcttacttgtctactattcgttctgaggagtcttgtctttctggatgaagcttttaatctggtgatcacatacatgattggaactggctgtgcaaatgaactgataggaattttgcatacatgagcgaaaaatgtatcctcacgaggcaactttacatcagtattgcaccctggagctgtgaagtgtgcttcctcgtcatgctgagtttgtttagatctaaatctcagaaaataatcagctatcactttacctcaacaacgctcttaaactattctgaacattaagaagagattcttgaaggacttgagaaaacatcttcaattattttcccaacccaggtggca

SEQ ID NO: 142221 - DNA, 364 bp, Homo Sapiens
ttaattttcatcattccatggagattcagtctgtctggaatcccggaacccctccacagaatcgtgtctggaatcacactgtggtgtggctgccacggcctcctggctccagaggcagctgggccgggccaaggcaggaaggcgcccccatgtgtgtggcctcagtctcagcatctgactgtgctgccctgtccccagggaagagaatgaggaccactggactccgcccacacagagctggctgctgtgcccaccctcaggggggtcaggagacacagcctggcctcctcagggctgaagatgcctccattcgcctgtggaccttgatttttagatttcagtgtcaatagacctgtcttcctgc

SEQ ID NO: 142222 - DNA, 331 bp, Homo Sapiens
ggaacatgacttaatacattcattttggagggtaagtctctcaaaataggcctttcactaggggaaaatggtaaaaatactccctggtaattcaagaattggagactccttgagatgctgctcatattagctgagcacttatcaatacttcacttttttccatatatactcaaggaacaagtgctatttaaagtgtttcactccactgtgctaggtgcaagactataaagaggtgtgaggatcaacacttttatgaaaaccagtgtcattctggatatagtttcagatgctagtgcaaaggaagctcttggtatacggaaaaagtattcaa

SEQ ID NO: 142223 - DNA, 532 bp, Homo Sapiens
ttttttagtacgaaccagtttatttggaataaattacattgaaaattaaacatgtagtcacactgtactggcctcattttccagaggctctttaaatatagttgtgattctccaggttgttacattgaatatacgataaacacgttagatttttcacaacacatctcagaaaagcttaaactccaaagatcttaacgtgtttgctcctttcaagagttatcagtttctgggttgacctttgatggtttttagggagtttatgataaacctgaatatttagtatgatagagcatgagccagattaaatgcttaacctaatttgctgtacatatttgccagtggttaaaaaatttaagggtttttggattcttgtgcgatgatggcttaaaaactagtaaaataatgcccaagtggcagagaaggaggactctcagtactgggttaggaattttattacttaggggagtttatggtaaaccagcaagttagaaaaggggggcatgctttaagcataagctcttaatgtgaaaga

SEQ ID NO: 142224 - DNA, 533 bp, Homo Sapiens
tttatttttattagtgtagactttaatcgaacaaagccacctgtggaaaaaggaagttctttgcaaagttgtattgaaaagcaatcaattggtccagacttaggtcaaacctccaactaaaaataaattaaatctagttacaacagcaacaataattaaaacaaaacaaagcttgctaataagattttaaagccctaatctttacacaacacaattcactgcaggaaaataaagtcaaaatgctgtaagaattacaatgggattttaccagttgttagtgttcaagttcctcaagtaaacacaaatgcaaatacaagtctggacaccagtgacccacagatacatatatatacttttaataggaaattagtgctcaatactctgccctttgtgtgggggaaaacattcttttatacaaggatttttacctagctattacaatagtttaaggtaatgtacaatatatatttgacacagagagtgttattagatgttcgcactgcataaaatgaatcctctagcctttgatgtct

SEQ ID NO: 142225 - DNA, 427 bp, Homo Sapiens
cactctgagattgttttattctaatttgtcctaaggacctgcctgtacttagagcctgatagaaagcccaagttgatctactgggcagctctctgggcctggaaggaagagcacacaacaagacttcaacagtgagcctggctaggtccaggcagaccatgatttctgaaagcaacagtatagtccacatggaatcaggctgctgatgaacagcagcgagaggctgcctctgaatcatatctgcagggtcacctgcgcctggtggaggcccacagtcatccattaggccccagtatcctatgtgggagtatccacgtctagtctctacttctcactgcaggagaggtggcagatgaggaggtttcctactttaaagaaagtagaagttgtttcctttcttccctcctcacagccttgagggggaggt

SEQ ID NO: 142226 - DNA, 519 bp, Homo Sapiens
agtcagatgcaaaaattatgcacttttccgggcctcaggttttccataaataaagcaagtggtttgaactagaagccatttccttcccgctgcgacgtggtgagttctaagagcaggggccgcgtcagattgaccatggaattcccctcatcgacgccggcgcccagaacacaactggcgccctgaaactgttggtcagcgcaataaatcaatgaatggcctgctacgggcgtgggaccaggccccggcgcccgcaaagaacgcgatgggtcgcgctgaaggccgcgagaggcgtccggcaaggaaataggggccggctccaccacaaccaaagcgtgccgaggaggggaaccggggccttggagattgagggcagaaaaaaatcagactagggacccgacaccgggaattaggagagaaggccgaaacgtgggtctgagaaaggattctggttccaagcctgggggcccagccactcaccgcagccgtcgccaggctgtgcatgttgtgagcggccgc

SEQ ID NO: 142227 - DNA, 360 bp, Homo Sapiens
cattcctttcttcttggtgtaaaattcctgtttttgacaactcttcagcaaccaaattagatgatgaggtaaaaatacataatctgtgaaaagctcaaatcacaggatgacgcaacattcctgggaaaaagtcaatttcatttaaaaaagctcattaatattgtcaatcaaaaatatactctgagcagagaatgattccataaatcattactaggttggctctaatcttgtttcttcactttaaattacattcatgaatactgcattatatataaagatagggcaataatactcactgggaacacaattaggcaaaaagcttattgattacttatttgaatattcactaggggacaaagc

SEQ ID NO: 142228 - DNA, 474 bp, Homo Sapiens
  misc_feature (162)..(259): n is a, c, g, or t
tttaaagtttaaagaagggttatatattgcaaacatttggtccagggaatgggatagaacggatggtaccgagggaatcaaaggtcttgcacaagaaaggattcaaggagcatgatcttctttctcaacacgtgtagcagtgacatctacgtatttcctttnnnnnnnnnnnnnnnnnnnnnnnnnnnnnnnnnnnnnnnnnnnnnnnnnnnnnnnnnnnnnnnnnnnnnnnnnnnnnnnnnnnnnnnnnnnnnnnnnntgtaggcacttgataccttcttactgagtaggataaggaatccagctgacttccccactttggcaggggaccacctgaggaaagcctcacctccacatggggtgaggaggctcaacatcctgtgatgtgattgtatctggaaaataaactattagaatcataatcattgcttcaggctcggctttccataggattcaggctaagtgacatagata

SEQ ID NO: 142229 - DNA, 443 bp, Homo Sapiens
  misc_feature (401)..(401): n is a, c, g, or t
ttttaaaaataactttttattaaaagttaaaaacatattcaaagtttacacatgcaaatagataattccaccataatatgaacttctaagatcaatgacaagcagatacaaaccggtctggaaaacatgcatcagccacctaacctcccctaagttcctatactcagggttagcctgctcactgggagggaaaccacacacttaccagaatgttcctgctgctgtcattgcccccaaggactggcctgacagaggaacagcccttgccgtaagtgggatggagagaacagttctagggctctctgcttcatcccagcaacacaccaggactggaaagaaccccccgctgcacccccaagcagagtccacccaagcaaacaacttgttaagctgggctttcncagagttctcaacggctgagcaacttcattttttgaaagctc

SEQ ID NO: 142230 - DNA, 512 bp, Homo Sapiens
  misc_feature (128)..(259): n is a, c, g, or t
  misc_feature (371)..(464): n is a, c, g, or t
  misc_feature (466)..(467): n is a, c, g, or t
  misc_feature (473)..(473): n is a, c, g, or t
tttccttccacctttctttaaaatgaaatttttcataataaacatttgggaggtgaggggaaagtccgctatagcagaccaatcgcaatttgctgaaccacaccgagtcacaaagacaaagaactctnnnnnnnnnnnnnnnnnnnnnnnnnnnnnnnnnnnnnnnnnnnnnnnnnnnnnnnnnnnnnnnnnnnnnnnnnnnnnnnnnnnnnnnnnnnnnnnnnnnnnnnnnnnnnnnnnnnnnnnnnnnnnnnnnnnnccattatcttgagagtgagttatttcaggagtaggctcatgataaaagaatgagtttggcctcctttcttctatgcagtgcactctctttccacgttatgagtcagcaaaannnnnnnnnnnnnnnnnnnnnnnnnnnnnnnnnnnnnnnnnnnnnnnnnnnnnnnnnnnnnnnnnnnnnnnnnnnnnnnnnnnnnnnnnnnnnngnngggtgnttctgttatagcagcataaaatggaccaagacaaccctc

SEQ ID NO: 142231 - DNA, 1083 bp, Homo Sapiens
  misc_feature (442)..(454): n is a, c, g, or t
gaaattttgccaagaaggatggctcatgaaatatttccagtacgggaagaggcaataagatcctctaagagaatgagaaagtaggggtgtctaaatggtaaagatgggtgtgttgcacgtgtgttagaaggatctcagttgagtgaaggtttgcactgctacatctaagttaatgtaaatatgtagcactctgacaggtctaccgtgttgctgaatgtagtatatttccaaagtttgcaagtcttcctgtattgtacaaagatgctgctgcttgataatatgtatagcaatccagattagtatgttattaaattttattttcttacctgtatttttatgctttttacctgtcctcaaaatattacacccctgttggaattagatttatatttataaatggtcagaaatctttttaagtgtctctttttacacataggttgannnnnnnnnnnnnaagagaaatgatgtattcttgaaacatttgttactcattccaggaaacaaaaacccatataataaaacccccactcagagcctgttagtcacctctctagaagatggcatctcaggagaaggaatggctttgtggaagaaggaatcacctttttcttgctcaagaattatgctgacttcagccctgagcctggatctggtcactgagaatcatcaagtgtctagatcctccccccaaaataactaatttagtaggtgattttgattttaaaaaattgacaccaaaaccctgcctgcattgtaatggaattcgaaaagaattcatgttcacagaactcaacgttcaggctaatatttacagaagggaccaaatctaaatcctggtaggtaactcctgtatgctttatccaaaggacacccacagttttccagcatagatataaccaaggatgaattgattccttcaaagaactgggaggcacggatattgcattttttgtttacatccagtagccaagacgcctcagtgagccagtcttgggcagaggctgtcacatttaggcagattggaagttggtatgttctaattctcactctggactacagtgaggctgaatttatcatgtcaaa

SEQ ID NO: 142232 - DNA, 516 bp, Homo Sapiens
ttttttagaaaattttcttgagaactttattcagcaaaaaaatcctccaaatgattcaaacaggactgtatactcttcctctctctccacgggtgtatatgtgtgtatacatatagatattatactagcaatttagaaaatttcctgagcctcctgtctcctttctacttatattttaactaaaggttacagagaaatagctggagcagtttcaaaagcctgtctccaataacatatcagcaattgaggctgggaggcagtattctcttcccacttcctgaggcttttaaatataattatgctaatttttgcctttgcctcctgattcaactggagtctttgagttcaccactcaaaagctttccttaaccagagtcacctgataaggtgagtcagaagtctgcagaatcacttccaatgacgaaagcctgactgtttcccagcctcaaaaaggatacagcctagtagtaatgtgaatcatgactggtagaggggactgagcctgacgttgaacgg

SEQ ID NO: 142233 - DNA, 813 bp, Homo Sapiens
gattcttctccctgatacctttcactagaaggaatagttggctcataattagagttcaggataataatggggttgggaggtaatgagccccttgtcactgaaggtattcaagcagaggctgaagaattcttgaaatgaggatgggaaggttggacaagctaaccctcaactctgagattctctgaggataggattcttggtttctgcagggtactgtttcaggagagcagggaggagacatggctgggctactcacactccacacggtatttctccatctcctgcacctccgcaatggactcgcgcaggtcggatgtaaagcgcagccggtcctggaggctgggggcattgaagatgatgaggacttttcgctccccaccaggtactgcagacagcaacttgatcccaaactggtaatatgaattctggaagagctgcatgtgcatttccacgagggggaaagactgacggaaactgtacgtcaccaaagatcttcttcttctggaaaatttaggagaccacaaggagatcatagaagaggaagacctcccgctgatgcaaccctagcctctgggggcggtttggatctggcacctcgtagagctggcagcatcaaaccagccgactgtgaaggagagacaggactggttactttccaacaatcatgcgctccacactctgcacctgagacacatggtcattgttggtgcgcaatacatgcccatggatgatctggtagatacatcacatgatgtactatggagagtctttactattgtcatctcatctcatgtacttgatgaagtcatctag

SEQ ID NO: 142234 - DNA, 337 bp, Homo Sapiens
  misc_feature (302)..(302): n is a, c, g, or t
ttttttaaagtgctctgttatctttattagtgtccactccaattcagtaaaaataatcaatatgagagtctatatttcttcacaagcattatcgacagatcttatgatcaaagatcacttggaaggcacagtgttgagatcctttcacagttgtggttacaattacgttcacaagctacacctgccatgagagaatacttggcaccagattatttgccagcaagcaggctacaggcccaatacataagcttggcctcatgggcattatgctcttatctggaagtaactggcctagacccttntttttacaacacatacttgagcgcttttcacacat

SEQ ID NO: 142235 - DNA, 435 bp, Homo Sapiens
aaagaaagacgtatagctgtcattgtaccacaccagaagctcggtgcccctagggatatctatacaggctcggtagaatatattcgacctgtactgaactactgttagattctgttctccgcagtgccttgcacatcgggatatacctccatccagctcgacttaactaggttccccaccatcaataaagtgctgtagtgtcccatcctggtcatatatctcccagagatgctgcgtgttcctcacggtgcctgcctgcaccttctctgggggcagaagcacgccttggaaaggtccaatccaggtgccttgctggatcctctgcgccgcgcagatgccgtaggccaggccgggcacagtactggtgcagaggcacacctcgcgaggcaggtcccgcagccactccggcagctccggcgggggcgcggcggccgc

SEQ ID NO: 142236 - DNA, 613 bp, Homo Sapiens
tcagttctgaaggctggtaaaagcactgggagcagtggccgcattggtagggtctgtcggggttctgcgtgcacacgtgcatctgtaagaggatccgctgggtgaaagtcttatagcactgcccacatttccaaagatgccagtcactgaactccgagtggagctggcttgtggaagttgggcttgccaggactcgctggtttttcacgttgatttgattaaatcctgattcaatgggcccagacttatccagaagagagaagttcctgctgcacggagtctgggggaaaacaacggagcgctgctgggtggtaggggcgagtttgctgcttttgttgaagggctgcagggcgtcttgtctgcacatggcttccattaccgttgaagggacatttactcccagagatgctgcgtgttcctcacggcgcctgcctgcaccttctctgggggcagaagcacgccttggaaaggtccaatccaggtgccttgctggatcctctgcgccgcgcagatgccgtaggccaggccgggcacagtactggtgcagaggcacacctcgcgaggcaggtcccgcagccactccggcagctccggcgggggcgcggcggccgca

SEQ ID NO: 142237 - DNA, 796 bp, Homo Sapiens
ttttttatttgttgatgaaatatttattgagtgttccagatgttctcattcagtgccttggatggggactccgtagttcatgtttagatagtattggattacatgactgagctctccccagtggctctttagtacctggagctagaggtaagtcagatgtggcccctgcctgtgttcaccatcttacaaaaaaagagttggagctgtgacacatttttgaccaaagagatctatctggaagtcgactgggatttcctggaaagcagcttcttctcaatcctcctaactggtgagtgggacgtcaacagctgtcttataactttgtctgatctctaattccctaaatttatgtggaatcatgcacagatgcgctggaaaccagcctggaaaagcctggcattttaattgatcccagagcttcttgcctcacggctcctgctgtgatgaagtctgctacttgttccaaagattctccgcctggttgcctagccacggcagcctggccaatcaaggtgttcgtatgcagcgaaggaagtaaccaatcaattttttaatttccttctgtaaacgggagtgaatcggggtggatttgaaatctcattagtcaaaacttgccttgttgatccaaaatgaacctcccaaaacatcaccatcgtcatgccacacatcaagtcagaaatcttcatttgttttctcatggcttccagaagagtctgcattaatacattatcatgttttttgggggtgtagctaaattctgtcttcttaaaaaatagataaataaaaaataaccttc

SEQ ID NO: 142238 - DNA, 469 bp, Homo Sapiens
  misc_feature (262)..(262): n is a, c, g, or t
tttgctaatacattactgtatttaaaatttttgctttattaatattgtgaggttgtgttgagatttactttttgtgctgtcttcatcaggtctggtattaatgtcattctgcctattagtcatccttggatttagagttcagtagctcagtccaggctgcacacactgagccagcacatggtctttccttcttgcatcagagtctggcttccctccctgttgcaggtctgcagagtagagcatgttgattgctctgtggggngtgtggctctgccactggctcccttgtgtgactcacttctcttccatgaatttgggggtctttcacctttcttgaaaatcagatcagccatgttagaatctcattcccgtccttgacaacgattgtctggagctgtgcagctgctgtcccctgtcaatgaggcaggttccctctaggtcccgagcatgccacagcagccttcttcac

SEQ ID NO: 142239 - DNA, 600 bp, Homo Sapiens
ccttaagtaatagtacttttaataaaattaagttcttaatagcacatttaatacattaaccctcccccttcttggtttctctgcattttgtgcaacatcactttgacttgattattcttgggtctgttttatttcccgcttttattttgcttttgaaatctttttccttggtggatttgtacgtgtcttcactagatgcctcaaattaagtctgaccacaatcctactctactttctacagtggagagaccatcctccctgccccagggctgtctccacccacccccccttccccacccgcaccctcgagtggggaaggggaagccctccccaccccagacgctaccatcccaaactagcggggtttctaggacaaaaagagcagggggaatctgtccctaggtggggcgagaagagtaaattgggtagagggagatgtgtttggggtctagggccagggagggggatggcagagtcattggtgtaatgaagcaggctcctcctgccaaaaggagagccaaggggcccctccaaccccttggataggaggggaaggcccagtgattgcaagctggggttggtagaaggcaagtgctttcc

SEQ ID NO: 142240 - DNA, 492 bp, Homo Sapiens
tttgaactttgcattatgaattttatttttatatctacataagcatgagggaaagaactgtattttcagataattaaatccagaagagttacaaattttcattcgtcccaaagattttgtctgggtatttcttccttagctgtcgtcttgcagacaccatcgaagcatagatgatgcagccccaggagattaaaacgatggcaagcagcaacactgaataaatccagtccagcgtgcgacgacttactggcttcatggtaaggaggcggcagcagtccgcgggagctggcgggagctgcgggccttacagtaacctcccaggcggtggctgccaggcgccagcagccatcttttagccgggcacgagcgcccgcccactcgcttcgtgcagcgctgtcgctggcctcttccgcccggagttggggggcggtatcacgtgatcggcggccttgcccgcccgccataatgtatcagtcaagcaacaagtgtttg

SEQ ID NO: 142241 - DNA, 452 bp, Homo Sapiens
ttttagagtgacacttgtttattcacggaagataagtatagattgttttctcatgggagcctgagaagcatcttcagggagggagtcggggagtaggcccaaagaattgacttatttggcaatttcagcaaggacccggagctgtttcttgatccttggctgccagggccctatgacctgtggcctatgttttcgtggtttcgagcagcacggtgggaaagcaggcgttttcttttggcctactttggtgatggactttgcaataaacaaggggttcagctttgcaagtcgaaagtcttgaatagttaactcttctgggttctcaggctctttctggaaccttgtgggctctgccttcacattggtcttaggtgcctcatatacagagagaaccttgtttttcagcttgttttggatccagggatcaattgaggcacaaaggattaatgttt

SEQ ID NO: 142242 - DNA, 730 bp, Homo Sapiens
tcttaacactactgtagacttagggttggcctgcagaggcccacagtttttctccaaaatggtcaaagagaatagaataaattagttttgcttttcctggtgtaaatctgctgcattgaaggtttgttcagctgatagtgaccttaggaacaagagccctgggttggtgcgcacctgcatcccaaaggcctgggaacgtttggggcaattttatatagcagtacaaccataattcctttactcatcactgactttcatgaaatggaatgttaaactacctgttcattcttatttgttttcataccagaaaaaggaatgatgtcctaaagggcagggtggggagagcaggtcgagtgatgataaacaaaacaacaaaacgttaagtttcattgagccattcctctgaattactgagcaagtgccctactcactgtgtagtggaaactttggccagctgagaaggcagctaacccttttcaggccagtaggataaaggttggataaggaaataatcaagtcaaagacttaatctacctccccaaggaacctatattatgagttaagacagttttcttatctggattggatccattgagtctaaatgagaataacatggttctaattatgacaagcatagtaattttctcacatccattacattttagatttgagactttgattggtgagtggccatttttaaatattctgttaggccaggtgtgatggctca

SEQ ID NO: 142243 - DNA, 432 bp, Homo Sapiens
gcttgcattgggctttttaattattattcagtatttcaagtagacagaaaagtacagaggataatacaacaaatatccaggtacccaccacccagcatttttacatagtagcatttgatgttttgaaataagacataaaacattccaaataccctatcaccgaggatcctgcatcctcttcttttcccagaagtgaacatttctctgaatttgatgcttattatgcccatgcatgttgttatacttttactacatattttatgtagctacagcataatatgctatgtttactttatatagtgacctcatactatacatatcctcatgcaattttttagactctgtttgagaattatatattttgattcaggtagcttaagtttattttagctactcagtagtaatgtattctattaatctactaatatatat

SEQ ID NO: 142244 - DNA, 425 bp, Homo Sapiens
tttttttgaagcaatgaaagggcagatttattgaagcaaagtacactccacagagtggacgcccggcttatgtaaagggctcaagagcgctgattacaatgttctttagggttttaagctattaataaaataatttagcaacacccctaggtgccctttagatgcctccaattggttacaccctatgaaggacttacccaggatgaaacaaaaggctgaagtggaaacttctgttttgttataacaggagtgaggatgtggcctatatgctgtctagagctggctgcacctgctgttcttttgcttatgccttaaccgttgtttaccctaattccctattctcctctctcaaaatgatttcagaggcactgtaagggaacaaaatggccttgcagagtgggcgtccgagtgtacctttgaagagt

SEQ ID NO: 142245 - DNA, 1167 bp, Homo Sapiens
  misc_feature (22)..(22): n is a, c, g, or t
  misc_feature (49)..(49): n is a, c, g, or t
ataagccgcttcgtgcttctcncagcatttgcgaaatgggccagcggcntgaccccgcggcagaactgcccgcgggccatggatggggcttggctgatggtcagcatatccagcccagtcctcagcctctccagcctcttgcgaccacagccagagcctcagcaggagcctgttctcatcaccatggcaacagtggtactgactgtcctcacccacacccctgcccctcgagtgagactgggacaagatgctctgctggacttgagctttgcctacatgccccccacctccgaggccgcctcatctctggctccgggtccccctccctttgggctagagtggctacgctagcacctgtggtaagggacatctgctcctgttctgctactcctgggctgcatggccagatgccagcagcccaagaaggggccgtggcattgctgcttgggatgatgatgagccatggggcccatggaccggaaatgggaccttctggctgcctagagttcaaccctttcaggagggcaccttatctggccaccatacacctgccatacctgcaaggacaggtcaccctggagcttgctgtgtacaaaccccccaaagtgtccctgatgccagcaacccttgcacgggccgccccaggggaggcacccccggaattgctctgccttgtgtcccacttctacccttctgggggcctggaggtggagtgggaactccggggtggcccagggggccgctctcagaaggccgaggggcagaggtggctctcggccctgcgccaccattccgatggctctgtcagcctctctgggcacttgcagccgcccccagtcaccactgagcagcatggggcacgctatgcctgtcgaattcgccatcccagcctgcctgcctcggggcgcagcgctgaggtcaccctggaggtagcaggtctttcagggccctcccttgaggacagcgtaggccttttcctgtctgcctttcttcgtgcttgggctcgtcaaggcactgggctgggctgcggtcgacctgtccacctgcaaggattgaaagagagaaagcagagtgagggcactcactgccatcctgtggaggccaccgtcatctctggccgaaggttctgtggtagctccctaaagtaataccctatcatctgctcct

SEQ ID NO: 142246 - DNA, 1082 bp, Homo Sapiens
ttttttaaagattggaaaagatgtaatatacaagcaataatggtgagcaatgaatccagtaaaacctaaatctaagttaatggaaatgatgtggttgttgcaaacctctaatgcagtttatgaagaaagaatttttgtaatagaagagacattatgcaagaacaaatttaataataagctgtatctataattccagactttttttccctgcaaaacctgggaaacaagagggatgaaggaatataaacatcctaaaagcctcatattgttgaaggagactttgaaattcttggcgttgatagatacatgctcagatatttattaaacatttacagataccaaccagcaaaataaaaagggaattggaacttctgtacctcccttttcttttatcatgtgggaaagtctcaaagccctggcactgggagctgctcagaaggcaagggccacatgtgcccccagcttccccccacccccagcacagggccaggaagccactgctggtggctccctgtctgctgcctcccgagcagtaggtcccagcgaggtggggtggtaataggttgggctgggagcagattagcaaaccctctcctccccgcaaggaaataaccaggccagataagactagccataaaacaaaacaagggctgatgtagaaaaggattggatcataagacacgagcaagccatagcatcactcattacacagagctgagctttactgctcccagcactacagtcctgggcctgacaccagcccaggcatcggagaaccaggtgccacccccaaaaaacagtgtcacagaactaaacattatccacactgccccaggtgacacagacccaggcacccaggagaaaatagagaaattaggatcctagtcacaaaggtcacagggactttggtggcccctggtcacatgtgtgaaatcttggcaatgtgtaggaatcagtgagtgcgcgctgagtgtgtgtttgtctgaaattagaaaatacccaagtgtgggcctgagtctccctccctaccccagggcccagacttgcccacccagggccctaaggcaggtgttggcggccgc

SEQ ID NO: 142247 - DNA, 431 bp, Homo Sapiens
tttaaggaaaaatagaaaactttattttacaattctccagaaaaaaatcacttatattttgccaaaattactttatacagtaaattatatattaagtagacattattaagttaaatagtggtttcaaatgttggtaaatatgtctttagttgcaaaatttcagagacaggctgcactttatcctgatagaagtcaagcccagtgagaagttctacatcacggacccgggcaatgtgagctgtaaatctttcttcaacccaaagagcttctggtttaccttcaggacagctctccacgttggtaggtcggtgagggatgataaagggtaggacatccagccacccagggcagttttccggtgtgtggctcttgtttttacaactggtcagcaccacaaagtagtgtgttgggatgggatcatcagtgttggt

SEQ ID NO: 142248 - DNA, 464 bp, Homo Sapiens
  misc_feature (239)..(247): n is a, c, g, or t
ttttgaatagcacatagcctggtctgtggcatttatttgttgcttaatacaggtttgtgtactttccttaaaagcccttgaatgatgtataactttatagggataggataacagagtttggacatatttgtagaaggaaatgactttaaacatcttgacaattatgtgagtgagagattatttgcagtttgctaacatttcctaaagctgtggtgtgtgagatacagtaacacacacannnnnnnnnaaaagcaaccaaagcaaaggaattttaactaactgtagtctatcaaggcagcatggttttgaaggagcaaggctggctgtaacaattattgtggtgacattttgataaataaatccttaggggggagtgtttctgagggttgagctgcctcttcttctaaaggtggtgttagcagtgtcatctccagcctttctgaagagagacatagaagattatg

SEQ ID NO: 142249 - DNA, 449 bp, Homo Sapiens
  misc_feature (244)..(244): n is a, c, g, or t
tttttaaagtagtagacccactttatttattttcatataaatcatattgtggcagaaattttcatagcccgagaccaacttctggagtttttcttatctgtgagattgttcctgttgtgtatgagctgttttgcagagatcaagaatccctgctcaagtgtgatccatcttcatcagtgaagtcatatgctgcgaggacttctgagatactgtctgctgccacatgaccactaagcagatggtntttgtgcctcttgcatgggttctgtgggtacttcagtgaccagggaccaccatctgtcccctgtggttccagacatcaggcaggagaaaaagttggggccatgtgtcagcgtcccagctggggctcaccatgggaagtgggattagggaggattattccagttctcttctttgagttcaggtttttatatggttatttcagcgtg

SEQ ID NO: 142250 - DNA, 372 bp, Homo Sapiens
tttgcaggccttggcttttgttgagatcaaagctgtgggctccccggcctctcagggaggcggtggcgggggggcctgattctgcactcagcccggcctcccaggtacaagtggctgactggagtctaagcaggctgcaagggcacggccatgcttctattgcttctgcccctccctcggaacctcctcctcctccctttccccatcacattctcccgaggcccaggcctgggcgctgggccgctgcctgggccaccccatgtggcagggccactgccgggggccgagcccctcctgctcaggctgcctcctcggccatcctgcccctcctgtacccagtcctggcactcgggatccctatggcctctccag

SEQ ID NO: 142251 - DNA, 467 bp, Homo Sapiens
tttttgcttaaaggtacaaagtatatttggagaatgccctgcttcacctgcatgttaatggaaatggcaatgaaagcctttttcaggggattgcagaggttcaggaacctatgaactcctttttcttgtgatgggtattcttgcataaaacagtgccttctgctgaggtgagttagacctgggatagatttcctggttgagtggcacaagtcatttgaggacagagtttggagcatttgtaggagtggcacaggacccaggattggctggactgaagggagtgttgctagagcagattatttaggcactgggggcatcacagaagatcaggccttcctcctcagtagaaggaggctgagcctcagggtcctctgttgtcttctgtgttgtagctccccacacatgatctttggtgacagttggactcttctcaatgttttttgtcctgtcttgggtcactgtctcag

SEQ ID NO: 142252 - DNA, 687 bp, Homo Sapiens
ttttttttcctctgccttacaggatgcctcttaatacgcttgccatcttttccccttgcactttttgttagtagatgtttagaatatgaaaactaaatggaatattagtctaagcaaattgcatttggaaaactaaatctgccggaaaagaacaaattacaccctacagctcctgtacacccatcctgagaccagacctaaatcaaacatttttttaaagaagtcgtagtttggttttagttgtaaatctgctcatctacattagcacaatttctgacaacttgaaaataaattatagaagtgaccccaaagttccagagaattggctccgtgtcccattttttcttccttgttcctggtttgtcattctgttcatttctcttcttggatttgagaaaggaatctgttgactcagcagcccagggctgcggttctttctctctgggatccctgctcattagcttcctatgcgtggctttcttccctgctggctctgggctataacctctcctctcatcctcttcagggaatggagaaaatttgcttataactgtgatctaaacataatcatgcaataggtaccctaaaaatactcaaggaaggaagtacaaaggacagactaccaattgataggacgtcttcttggatttcatgattgatacattagatttctttactctgggcaaa

SEQ ID NO: 142253 - DNA, 533 bp, Homo Sapiens
  misc_feature (443)..(451): n is a, c, g, or t
gaattctcaaaacagtagtgcatgcttatacaccagtacaccattagcttcctggataattttgtttatgtgagtttttaaataggcattcccaccacatcccactcccaaaaagaagtgttcacttaaggaatatccatattcatatggtcaattagacagaaaactcctgatttgaaaaggagtatgggaagtttggttttttgaggggtagcaggatagggcagggcagctgttgaaacacaacagagcagacagagcacataggactgatgggattgagtatggaaaatgaaaaatagaaacagcatggagtgcttaaaattaaagggaagaagttgagatggcaattagtaactcctcttcggcaagcagaagttaacagacatgaggaggtgatgacctcccaaatatcaaaaactcctggggtaagctgcatgtgnnnnnnnnnggatttagtgatctttaacaatatttgttaactatttgactctgtacacaacattgcattaaacagaaagtagaattttaaa

SEQ ID NO: 142254 - DNA, 456 bp, Homo Sapiens
  misc_feature (224)..(224): n is a, c, g, or t
  misc_feature (295)..(295): n is a, c, g, or t
agatgaactgatttgaatttattttcattaaaaaaccttcacaatgtggctgggtgccagtggctcacacctgttctttagatgagggtgttcttctgaatggccctgagggtctccttttcacctatccactctcataggctcccttgcttttcactctcacctgtagtcttctttgggctgtagatcctgcatgtccagctcacctccacatctcacaggcnaagtgtccaaaagggaactcaccacccttttcctggaaagttgctcttccttctattttctttacctttgnttggtggcaccatcgctcacccaaactcccaaggaagaaccagggaaccgtcttagctgactactgtccccatccatcagtccaatgagtccccagtccagtcaattccaccttctaatttcctctcatctgtcctttcagcaactctcatctttaatctg

SEQ ID NO: 142255 - DNA, 481 bp, Homo Sapiens
aaagccccccaaatgattaaaaaggaaaatcccctaagtttatcaaaatcctctattattccaaattacaaaaattcctttttaccaggacttgaaggcacaccaacactgaccttaaccgttgggggaattactgaatgtttagttacacacagagatagcatgctacatgcctggctgtcttaccttggggatctgcctttttgtaagcatttccagcatccacaaagctggtagcagagtcatgtttgctctgaagctgcatgtggagcttggctgcctgacaaaatgcgtttcctgcagcactccaatttttagccatcttgaacatatttgcagctctggtatacatttcacaagcctcttctattcttgtgtttcctccaaacagccctcggaggaaggagtgggaggccttgactcgcttctcggcctccgccatcagctgtactgcctcacgctccttccccgcaatgtccat

SEQ ID NO: 142256 - DNA, 618 bp, Homo Sapiens
ttttgctgcacatcgcgtcgtttgtttaccgggtcaggttggaagccttagagccgaggctcccgagtctcggggacggtcctgtttgggcttcagggagggccagcgccacacactggcctctgacccacagctgcccggagggggtcaggcagcaggtcatggcggtaggactcaggttggacgggagcattttccggtgcaccttctgtgacatgcggtaactgaccctttccgggtccctgacgtccagttgctactgtccggtcaccatcagccattggccatccacctgcaccaccagttcctccggggcgaagccgtgggcatccagcttcatttggaaaccgtctctggcatggtcattgtcctcctgagccgctggactgtccctgagcagccgcaccggcattgtggccacccggttccgttcagcaaggcccacgctgggacaccgggatgccacccggctctcgttggagaaggtgttaccgactctctgcatccgagtcagcaactaactgctgtcaaagggcgcgaggctcccagcgcagagctaggcgcacggacgcccggagaggagggacctcgcgcggcctacccgagctcagctccgct

SEQ ID NO: 142257 - DNA, 459 bp, Homo Sapiens
tttttatagtaaagaataagtttaattaactaaggccagccaagtggaagaactggagttattactaaaatcagttttgctgagaactcagaagccagagtttttatggataatttggtgggcagggggctagggaatggatgctgctgcttggttggggatgaaatcataggggtgtggaaaacagtcttcatgcattgagtcggcctctgggtgtgcgccacaggaccagctgagttatgcatcatgggtccgggtaggatcagttggttaccagaatgcaaaagtcatgacagcctggggtaggtttccactttaacattctgaccaaaattctcaactcgatgcagtcagagtctgcgcaacctgggacctcgagccaagaaatcctcaagtgaccttacttggcaaaaccaacaaaacaaccaaatacaggtctcaagcgatttacagctcggt

SEQ ID NO: 142258 - DNA, 543 bp, Homo Sapiens
acggctacatggacgccactatcgccccgcaccgtatcccccccgagatgccccagtacggggaggagaaccacatcttcgagttgatgcagaacatgctggagcaactcctgatccaccagcccgaagatcccatccccttcatgatccagcacttgcatagagacaacgacaatgtgcccaggattgtaatattaggtccacccgcctcagggaaaacaacaatagcaatgtggctctgcaaacatctgaacagcagtctcctcaccctggagaacctgatcttaaatgagttttcctatacggcccccgaaggcagaaggctttatctgcaaaggaaggcatttcccagtggtttttgaaatacttcctaactgcctttttgccaagcactattctgcagtgctgtgggagagtcaaagatgagtttcttctccttaccccagaagcttccagccagtgaggagactgatggtcccataaaactaagcacaagccagggtatgggagccagggaaccttcaataaagcaattaatcggtg

SEQ ID NO: 142259 - DNA, 1121 bp, Homo Sapiens
ggtagccacccagccttttgggagccagtcctggtggtccaaggccttggtcaagcaccttcaggagaaggctgttcaggaactcccattttcctttacaaagaaagggcgggatgacctcccccaaacgtggtcctatttgcccacagctttctttcagcagtgccccacagcagacattgacaagccctgtatttctggcccaggaggggcggcttgcagacttttcccactgcccacaggcccgagcagcagcacccctcggggtgaacggggcattagtacgatggttgctttggccataggtcagagcctggtagaagacgtccacacatggctggtcagcactgatgactttgaggattttggggtaggagggaatgaccctgacgatgttcctatgatactccagcagtttctgagccgtctccagctctgagatgtcctctggcaccatgagacggttctggatttcagattcgggtggccagtcaaaggtggtgtgataaatctctccagtttgagggtcgattctcttccccaagtttctctcgatcaggaccgtgtctggagcactcagcacaatgacgtgtctgggtgtgatccccagggtctggatcctcagagcctgctcacgcgtctcagggatgccatccagaatccagccctgcttgatgcaatcctcttcagccaggcgttcctgaatcagctggacgagcagcgcgctgggaactgtcttcctttgcagataaagccttctggcttcggtggccgtataggaaaactcatttaagatcaggttctccagggtgaggagactgctgttcagatgtttgcagagccacattgctattgttgttttccctgaggcgggtggacctaatattacaatcctgggcacattgtcgttgtctctatgcaagtgctggatcatgaaggggatgggatcttcgggctggtggatcaggagttgctccagcatgttctgcatcaactcgaagatgtggttctcctccccgtactggggcatctcgggggggatacggtgcggggcgatagtggcgtccatgtagccgtctcggctcgccgctccctagtaaccgcgtcgctaggccgccgcg

SEQ ID NO: 142260 - DNA, 387 bp, Homo Sapiens
tttttttaattcttataattttattctcgtgcaaatctgaatttggaaaagaaaaaacagagttctgtatttgtatttttgtaggcaaaattccaggatctggttcagtaaagttttcacatcagctttgtcagatctcaattgagctgcagcctctggagcaagtgggatgccctgcctgtccattcatggttgcctaagccataggaaagcagaaacactttttctcttccatcctaggttcagtgtctgggaccctacaaattaaactgatcacagacaagttaacaagaaaaataacaattaattatgtacatacacatggagattcacaaagaaatgtgatgcaaagaggcaattaggatttggggtgtatatcttagacta

SEQ ID NO: 142261 - DNA, 474 bp, Homo Sapiens
ttttttccctgaaacttgatctttatttaatctagggttctaggattggattgatgctgatccttggtcccattaacatgttactgtggctttagaagacttataaactagtacttagcataagaatagtatcacagacaaaaggaacacgtgttacattaccaaaataaccttttataaacctgtaagtaacatattgtagtgtcaattttatatattacataatgaaaacatttctttatttaaatatagccctctaggtacatattatctaataatgcttttttacgttgcatacaaaaatatctttgagttgactaaatatcacctatagatatttattgcataatggttaaaataatcaattttaacatagcagagtatttattactttgtcagagagtgcttattttgaacttgggtaattaactcagaaaagagtattctttttttctcagcattagttatgatcag

SEQ ID NO: 142262 - DNA, 410 bp, Homo Sapiens
ttttttgaggcatcaaaagtttgctttattgacacttataaatctaaataaatatggaaccaatagcaaaacatttaaaaagtatgttggtaaaggaagtcctacaagtgtttcctgttgttaaaactatccgagttttctgttgcaacaaacaggacaatgttttaatcaaactgtgactgtgttcatttcaggtttcctacatgaagaattgtcaatactacgctccctcaactatattcaaccaaggatctgcgtgaaactttttctaaggtaccatctcaaatatattcaaccacggaacttgcgtgtaactttttctaaggtaccatctcaaatcacaaggcctgggattgggaaaattgttttactttactaaagaccactgtaactcaataaacgaacttaga

SEQ ID NO: 142263 - DNA, 456 bp, Homo Sapiens
aaagaaaacaataattattcattcttttactcatgcataaccaaacaaaatgatcaattatagtaagaatagggattagtatagtatattttactgctcacccattgtggaggataatttatttttattttcagtcacaatttcccttttactcagatttaataacatcctttctcagggacacctcaaatcttggggctgatttatatgccagcagaagtcatagaccagaggtgcttccactttaacatacactagtatcacctgctgggcttgttaaaacagattactggacaccatccccagagattctgatttagtagatcagatgtgaggtctgagaacttgcatttccagtaagtaccgggtgacgttgatgctgctggtctgggaccacacttagagaaccactagcatagaagagtcactatctccacaattctgtgaggctcactt

SEQ ID NO: 142264 - DNA, 501 bp, Homo Sapiens
ctttacttttaaattttaacttttaaaatctatttcatttcttagttatgcatctcataatcagactccatgctttttaaagacagagataatatcttctctattctattctacttcctccatttcaccatttatacaaagtcattcaaaaaggctgattcatgccttcctgcctcttggctatggccctccccatctactctttaaactttaatctataacttttcatcagttttgttccctatctagaaaacattttcttctgtttgctaatctttgtccctcacaatttttgaaatccatctcatcactgaaatactttcttcttcaagtacttttttatttttcttcaacttctcttgatttgacctcagtgctttgaattcactggtgctacaatatgtaactgtggttaattgccttgtaaattttgcgtgtctgtatacttttataccaacttattgtaggctctttgaggtcaggtatgtatttctttcccat

SEQ ID NO: 142265 - DNA, 396 bp, Homo Sapiens
  misc_feature (230)..(287): n is a, c, g, or t
tgcggccgcggagctccgggtgccgccgcgtccccagcgccccggccggcccctctgggcggcctgcgggggcggcgcagttgcgaaactgagtgcctgtgtagatcatcctagaatacctgtgtggtgctgtccttcctcaagactacctcattctcactggctcggagactcctgcctgctgaggagagtggtagaggcacagaagatgatgaggctgttgaactgtnnnnnnnnnnnnnnnnnnnnnnnnnnnnnnnnnnnnnnnnnnnnnnnnnnnnnnnnnngcttgaaaaacaaggaaagctttctctcctgcaaccattggagggaccctggcccagctggcactttgatttcagcccaggaaagtgattttgagcttctgaccccaga

SEQ ID NO: 142266 - DNA, 403 bp, Homo Sapiens
tttttctcttatggttggtttattttatatttacaatctatttttacatttgtttcagtacaaagtgcagtagtttcctggagatgcagtagcaaattaccacaaactgggggagcataaaaacaacaaaaattttcctctcatagttctgggggtcagaagctcaaaatcactttcactgggctgaaatcaaagtgccagctgggccagggtccctccaatggttgcaggagagaaagctttccttgtttttcaagctgttggtggcttcaggtgttccttggcttgtgaccacgtcactctaatctatgcctccacagttcaacagcctcatcatcttctgtgcctctaccactctcttttctggaagctggaaagtccaaggtcaagtcaccgtcagact

SEQ ID NO: 142267 - DNA, 290 bp, Homo Sapiens
tttttgggttcaaaccactttattgttgggaatggggtggcaaagcagcaaggacgatgacatccgacgtcctcggctgggagctacaagaacgagagtgatagatcagcgggtgtgcgcgcgcccgcccgccagccccctcccagctccgctcgggcaggctcagactccagttcgcatcacccgcgtcagcagtctaacacgtgctttaattggaaatgtcatcacagcaggccggcccccctacgcctccctgctcccgagccacgacctccggggcccacccagcc

SEQ ID NO: 142268 - DNA, 939 bp, Homo Sapiens
  misc_feature (677)..(702): n is a, c, g, or t
  misc_feature (743)..(827): n is a, c, g, or t
aaccgcgacaagaagggtgtggaataacccgaggcgggattattaaagggtttctatcacccgcccctctgtttgaaggggttttccccatcgtgcggcgcaggaaatccctttataggtgatctcaaccacccttttcttccaacataaattgcgacccaggcccgggggcttaatattttaaatattccggaggttcgcgtttgggacaccccctggtggtgataggacccacaactaatgggcccctccagaaaccccccttttggggattttttaagaaaacccttggtgtttccccccccggcgtgttttttaatatggggggggaatcccccagccctttatttcttggccccgggttttcctctggggaacccgtttatggccccatgttcccctttccttatggggcccccgcgccccaaaggaaatgttttagaaaagttttttagggcgcgggggcgccccccaaggaatttgtaagttccggtttttgctttccacatcaaaaaaacctttttcccccttacatgaatttaaaacccgtgtttttaacaaataaggttgggttgttcacgaaaattttctaaggcctttaacaaaggtggccctcctttcaagttttttccccgttaactatttttcccgcccatgcctttttggccagtttcccnnnnnnnnnnnnnnnnnnnnnnnnnnccttgttggaattttagaggccgaggcggcccgacaagttnnnnnnnnnnnnnnnnnnnnnnnnnnnnnnnnnnnnnnnnnnnnnnnnnnnnnnnnnnnnnnnnnnnnnnnnnnnnnnnnnnnnngggttcaaaccactttattgacgggaatggggtggcaaagcagcaaggacgatgacatccgacgtcctcggctgggagctgacctcccggaacctgcaggcgctgaaagccc

SEQ ID NO: 142269 - DNA, 638 bp, Homo Sapiens
cctcctgagatcctacaatggtcaattttattacaaagaactgtatcaaaatatacaagtctgtttaagaacaaccaagaaatgcagctgtttaagggacaaatgagaatcaaccgttagagagcaggcagcctctccccgccgctgtccactgcaggagacggcatcctcagggccacattttccacgggacatccttctgaataatttaaagggtaagtccggcacattacaggtcttcgcgggagggcagctgtgtcgggctttctccttctgtggcttcagcctctgccggcggcacacaggcatcttccgtttcttcgaagccgtcaggacacacacagacgtagctccctggagtattgtagcagttttcgtttttcctcacacaggttttttctgctagtgagcactcgtccacatctgcacactgtccgtgctccctcgcgtagccagagatacactctttacagtttcctgggccttcccctgtgcagcccacacagctggagtcacactcttcgcacgtgtaggagccgttggcgttcttacagaactgcgcagcgctgcagggaggcggtttgggccgcacacttttccacatccacacaggcgcccttgttcagaacccagcccac

SEQ ID NO: 142270 - DNA, 624 bp, Homo Sapiens
ttttttgaaatatctaatcaaaatcttttattgaatttaatcagaagtatacagttttcgggatttttttccattgtaagagtagtatacaagtgaaaagttctgtgacatatatctggaccaactttctgaatttgcaaaatgaataacaaatatacaattctcattttatccagtgactttggccaacacgtaaaaaatacatcattccttttgatctcctgtggatccctatagttatttcaagtaaagaataagaaagataaacaatgcatcaaactacagagcaacaaagagatttatagcagaaacactgattaaaatgatgaccatcccaaactgtggaagcagcagtttgcccgaggatgcagaaggatggcttttgggacctggaacaggaactggacctggagcaggtatttgggtgggttcaaggattttcacaccatggtcttcaagcttctggtttttctcaccatggtcttcaagcttccagtttttctcactatggtcttcaagcttctggtttttctcacccaggttgtagacatagatgggttgaaaatattctagggtctcaatacagttgtccggttttagtccacctagaaatgcacactcata

SEQ ID NO: 142271 - DNA, 388 bp, Homo Sapiens
atctttccagaacatttttgtatatataaatatagtccagctattttcaatgctatacagtgaaatttataaatataacatgttgaatggcaatttttctcaagaaaaatgacagttcaaagcatttgccattgaattttttataaatacaaatgtagtcccataaacacactatcttataaattagaagcaaaattagtgccctgcaattttgatctttatattacacaggaattgcatgactgctcatttttaatgctaacatccattttgaatcttcatcaaactgtatatcttccttttccctggctatgtcattttatgtagaatttttattatacttctgaggatgctttattggtgaattacattaaatccatctagaaag

SEQ ID NO: 142272 - DNA, 401 bp, Homo Sapiens
tttttttgcctgttcaaacttgtatttattttctaagaggtcgggatgagggcatggggatggggatgcataacttgggtttcgggaggagccacagaccttggggagaaggatggagcctcctgccctcagtcgtgctgctagtaggggtgattcagggtgtgctccatgatggtccgaagcgccatccacgtctcctgggccgtggggatgatctgtgtggccggcagcaggaagccatactgcccagtgtcccggagctcaaagctgaaggcgtacttgatgccactgtcataggcccagtcgacggtgatcccactggccacatagagggtggtgctgatgctgccaaaaatgtactcgatcccatggaccttatacaaggcctccaccgcatcctt

SEQ ID NO: 142273 - DNA, 625 bp, Homo Sapiens
  misc_feature (484)..(484): n is a, c, g, or t
tttgcttttttttaaatatattctgatttgcacatgtaaaataatgcacacttatgaaagaaagtctgaactcctacggtgaccttgacaagtccacgtcaattcctaaaacaggcaatggtaaaaatactgaatgatgttgtaccacatatagcctgacaaaaatgcaaaagactgtatgagaaatatccacaagttgctgagggtcatctccctggaaacagcttccttatggcccttggaaggtggaaaagctcctgtttcataaaaatgtgataagaggtcttctttttcaacaaaccgctgatagagccaagtggtaaggtcatcagtctccaggggtacatctttaattggaaagatcctgtaatgacatgtgtgactgttggtttcctgtatccaaggatccaggtttgaatatctataggttcagctttgggataagctatcgttgtatctattatccactggaggccttttgatntgctggctaattctttagcatcttctcctgctggacttccatttttcttgttgtgctaacaagtgcattcaaataattttttgttggcccagactttgccagaagaacatttgaaagaatggccaaagtaattttcttggc

SEQ ID NO: 142274 - DNA, 291 bp, Homo Sapiens
gactatcaaatgtcctttaatttcacagacaacaatatgatgcatactgtgtaagagcacacaatagttttgcagtacaattttaaactgtatacaaattggaatatagatgttaaacgctggtgtactgacagtatttttgaattttagataaactgcatacaaaatttacaatgcaaatattagccaatctgaaaacgtcccataatataaaaatgatactttgagatgcaaattttactaaactatataaacatttaaaataatcattaaaaactcaacattagaatt

SEQ ID NO: 142275 - DNA, 447 bp, Homo Sapiens
aaatatttttaactgagattttattatgttaacatttgtttctcattccacatcatcttcttcagatccatttttttctcgttcttcatctgtctgcaatttggcacacttagcttgactacgagcctggcagtcctcctggtatttaaatagctgttcaggcatgacattgctaacagccagtttcagtttttggagaggttctcttaaacgatcatcctggacattgagatgtaacttcttcagacgttttactagtgtttctttattgcatggcacaaaagcttcaaggtgggagtagacaccactgcggatgacagggcctagttcttgtagctgtaactcaatgtcaagaagaatattattcatatcctgtgttaagaattttttccttccttcttcatcaaaaagtttggcagctacacgaaggtcttcgatacgtttttc

SEQ ID NO: 142276 - DNA, 801 bp, Homo Sapiens
  misc_feature (67)..(93): n is a, c, g, or t
  misc_feature (116)..(125): n is a, c, g, or t
  misc_feature (614)..(614): n is a, c, g, or t
cggccagtgcctagctaaaattaaccctcaactaaagggaataagcttgcggccgcatacgcggtcnnnnnnnnnnnnnnnnnnnnnnnnnnnataaatatgttgatttcttgtcnnnnnnnnnnatttcttactttcccatattaggggtgatagccaaaggggttctggtaagagaaagggggacaaacagaactggtaaagaggcccccctggctccaggcctgtccatcaggaagtaaattttacagggcaccaagctttgccccctaaaatcccttaggtgttctttgttcatgcaggcaggtttctgccgcatttgatgtggaggcagtgaagggcttgccctgctggcctctcatcccccttcttcccacaacccttgggcagggctggactcagtaattttgaggaaattgaagatgccatcttcccctgtgagtgacatgtctttaatttttttaaaaaactactatttgaaaattggagggggaagaatgggaagggagttattgccacatatgttaaatatgggttggggtgcttgtatatgtatcttcctcaatttccccataaatgaggtatctttttgtcacaccaaaatcaaggggtanggagagggaggaggttgcaaaaagccagatgtgggggaaaagtaacatcaacactgtcccatcctcagccctgaactagctaccatctgatcccctcagacattctcaggattttacaagactgtcagagtggggaacccctcccattaaagatccgggcaggactggggacaggttggaagtgtga

SEQ ID NO: 142277 - DNA, 1725 bp, Homo Sapiens
  misc_feature (1096)..(1096): n is a, c, g, or t
  misc_feature (1513)..(1513): n is a, c, g, or t
  misc_feature (1560)..(1560): n is a, c, g, or t
  misc_feature (1623)..(1623): n is a, c, g, or t
gataacctaactgactttagtggtggtcagaggtcttagtcggccttgtcattaatacctgtccatgcttctcttcaagcctgctccgatatatatccttgatgaggtagatgcagccttggatctttctcatacacaaaacattggacagatgctgcgtactcatttcacacattctcagttcattgtggtgtcactaaaagaaggtatgttcaccaatgcaaacgttcttttcaaaaccaagtttgtggatggtgtttctacagtagccagatttactcaatgtcaaaatggaaagatttcaaaggaagcaaaatccaaggcaaaaccacccaaaggagcacatgtggaagtttaaactacaaagttatttcttcatcttgacctgtttttttaaatgtaaacttttaaggacttgagataactaatttgtttatatacaaaaattaatgttactgtgttacttaacccatgttttctctttatataatcacttatcgcttacaaatgagcatatattcctcatctcttaactagtctaattatggtccaattattgtggttgtgattttatgcatatcatcaaatgtttttttcttatgcgggtcttttatatattagggatcctgagatacccgattctatatgtcaaagctaatatacaaaaaagcagattaaattacatgatagatgtacccgccaaacaaagggaaccgccgcgaaagccgacaacgagcgagacacgcaccggccgtagtaagtattggtcgcgcgccctccgcccctcaaaaacttttcaaaaccgttcatttgggccgggcggcccccggtgggaaagcggaacagggtcctaacgcgggttcccgagggaaaacccgcggcaccggaatcaagggcctgggaattcccgcacaccaaaaaaaagacgcccccggcgggcacaacgataaccgtggtctcggaaacacaatacccccgaacgcgggaagtccctggaggaggtgccgttcgtcgcgggacattctccgccccggcgcaggagaaacggtcccgagaggccgcacgatctctcgcgatatagttctaccagaaattnattaagtgcccgccgcctgcgatcgtctggtgtgtgtcgagcgaggtacccctgtcgccggcgacacaaaaataaaccgtgcgggtatagcgcgggcaaaaatcctcgcacccaccccttgatacacgagtgcagcgacttctttctcccgatcgccccccggtggcaacaataatggacggggcggaaaaacgctcacggtcccccaccctacataaggttgggcgctcgctctttgccgccgcgtgccaccccccccttttataaatcaccccgcaccgcacaagccggcgggggcgctgccgcttgatcatcccccccctgttgtttttggcgcccccttttccgcgccgctaacgcataaatttctctctgcgcccgccgctcgtaccgggcgaaaacagatatccggggggntgtataagacaagaagaaccgctgcgcgccgccactaatatgggcgncccacacgtgctgtatggcgcgtaccgaaagaccccggcggggggaaagtatcttccccccgncgtccggttgatctacggcgctttccactgcagcagaccacccacctgtttttcctcgcacaagataaacaggtctactgatcgggggacaccaagagcggc

SEQ ID NO: 142278 - DNA, 659 bp, Homo Sapiens
ttttgaaggaagccacggtgtgttttaataaaacagtgtctcccagttaagtggtgggacaaacaggaaccaccgggtggatcgtcggccgtgcccacccgcctcaggctaacctcgaggacgctggtctgattgtccctgtgtctctcctgggcagttctgcctggtgtctaaccgtgggcctccctgctttgttcagccctccccccacgtagggtactcgaggagggtggtctgattgtccctgtgctgtctcctgggcagttctgcacctggtgtctcccctgatgaggggtccttgctttgttcaggcctctccccacttacgggtctgggtaggggggtcagacctgggctcagaggatggcacctcacatcaaagggacccaccttgacaaccagacccttccctccccgtggggtttcgaggtctggattccccacaagccataatcgcaaaaggctgggtttgcctcctccgagcagccccttgaacacgggcagtgtgtccccctcctcaagagggtgcacacggtgatggccgggccaggccctagcagcagcaggagttcctgctgggacgagggaggggtctttgggtgagcctggggagcctcaactgttagcagtcgaatcctctttctaataaaatctcacat

SEQ ID NO: 142279 - DNA, 497 bp, Homo Sapiens
ttttgctgtttcagtatgtttaagtggctctgaaaagagcctttgggttagaaatgacgtttacttagcaggcttacttggagctggtgtacttagtgacagccttggtgccctcagacacagcatgtttagccagctctcccggcagtagcaagcgcactgctgtctgaatctctctggaagaaatggtggagcgcttgctgtagtgagccaaacgtgatgcctcgctcgctatacgctcaaagatatcagtgacgaaggaattcataatgctcatagctttcgaagagatgccagtgtccggatggacctgctttagcactttgtagatgtaaatagaataactctccttacgggtcctcttgcgctttttgccttcctttttctggggtcttaacgacagctttcttaaagcccttcttggaaatggtagcacctttagatgacacctccggcatagctaccacacacttctgcagcgttacacggttcttttc

SEQ ID NO: 142280 - DNA, 377 bp, Homo Sapiens
tcatttctctcccttcccgtatttaacagcttgcacctcagtttctttatgtaacagcttgcacctcatgggacaacacaacccgtgtggcagaatttttgtgaagagtcaatgaaatagtgtatgtgatcgctcgagcagtgaccggtacggaggtgctgaagagatgctgcttgttactttctttctaggtaccacagagtccgtgttcacacagtgtaaatgccatctgtgggaatttaggacactgtcactagagacacagtagtttaaatcacagacgtaattaagaaaacccaatatactataattcagaaaatccaaatctgcaaaccaaatgcaaattattctctttgcagaaggattcttctattaaa

SEQ ID NO: 142281 - DNA, 465 bp, Homo Sapiens
tttttaacatccaggagatattctaatacttcttattttccaagtacacacaaattgggggtagggggaagggctaagatgcttaatagtgggcgtaccagttgtggataaatatcaaaaagggaatcctaacatgaagtataagtgggattttcaccaaaaccctatccttccccagactccagtgacagtttaacggtcagctgcatcaaggcttgtgtactgtgcagtcttaaaaggcaccactcctgtccatctcggtgaaattgatggtggagcaaaagggagtttaggtggttccggtctggggagaagacgtgcagggtttcagatgcgaaagtcgcacccaaccgcttcactcgggctctaggccatccgcaggggccctgcttccttccacctgcgagctttttctgcagaatgcgggaagccgccgccgccgccacaaaggagggggcggaggca

SEQ ID NO: 142282 - DNA, 499 bp, Homo Sapiens
ttttaggtaactaaagattttataaataatgagatataatgaaccagagtccaaatgattgtaagaagaactatgatgccactgataaaatcaagggactctgggaaaacagctattaatagcttggtgaggaagtttggacatcttgaatctgatgtgggacattcaagctgaagggctgggtaggcaactgaaaatgcaaaaactggacctcaagtaagaaggcagtgaaatgctgagtatggagatctctctttatgctgaatagcttccttctcccaccctaatcttccctacgttttctccaacctgctccacagcctagaagccaggtttggaccatccagtacatcaagctgaactttcttgtcttctggttttcagtagagctcagccaaaggcaagcaccggcaacagactgaaggggtgaaggagaacatagttgaggtgtctctcctggctccttgttttggatctggctggtcccggctcaatggaa

SEQ ID NO: 142283 - DNA, 399 bp, Homo Sapiens
agtcaggccctggactgggataaacttgtgccagcacttttcacttatgctttcaagaccttgatcagaataggcagaactagacagctctttccaagagcagcttagcagctcaaactggaaaagcttacccaagccagagttttggagtgaacctgaaaatgtagaattctttctctgcctccttgactcctactatctcttatttgaagggataattcctgccaacctgatcggagccccattttagccctactcaagacagaaaagaaaggctggcatagttttatttcccccaccccgaccacctactccctggttttttaggtataactgaccagttttgcatttaatttgtcttgtttggtcttgtcttttcatacaatattttattgaatt

SEQ ID NO: 142284 - DNA, 512 bp, Homo Sapiens
ccccacggaggaatttgagctggagccattcttgggggcaggagccggcggcgagaggaacagggaaccgggagtgctgctctgcttctctgcggcgccgccagacatggtcggttcgctggagagaggcgagcgggctcggattcgtgaacgaaaagggcgtgaagggccgagccgcccgcgcagaggtctgcagggcaccgcggccgggcgggttcgcgccgacccggacgacgcctcactcagcaccgacaagccgcaacgagggacaggcggaccgctgggcccagctgcggcgggggctggcaccgaggctgctgcggctcacgaggagggctcgaaggcgggcgattcgggagctgagccacgggggttagcgccgcacggtccgcatccatcctgcggcgagcggcggccgggcgggcggtggcagcagaggcgccgcagtcatgaggggagggccaggggccggcaccgagtcgaggcggatgcggcggacgcggctcccactg

SEQ ID NO: 142285 - DNA, 467 bp, Homo Sapiens
  misc_feature (451)..(451): n is a, c, g, or t
ttttttacttaactagttatcttgagtaagtaatgatgcggctgatgggaaaggggaagctacaggccagacaagtggactctcaatcacaagcacgccatggagcagggagccagggccctgaatgtggaagaccagccagactcaggtatatggagggaacatccttactgtccagcctctcctgatctctgttggcaccttagcccagccaatcctgtaccacgtgcacagggaacctgcctgcctaggttttttccacaggaagctccctggtcctgggtggagtctgagcccaccaggcctttcacacccaagagctcagggtgaggcctggggaggaaggcagggacccaccagctcacggtccccaacaaggtgccactgagaaggctgggtaaaggctgtggggatagatagctcttgcggcaggcctggcgactgataagtnccgggcagcaccctaa

SEQ ID NO: 142286 - DNA, 397 bp, Homo Sapiens
gactgagacttcttcccacgatttctgtttttgcttctccaaggaaaatggcagctcccgagcagccgcttgcgatatcaaggggatgcacgagctcctcctcgctttccccgcctcggggcgaccgaacccttctggtcaggcacctgccggctgagcttactgctgaggagaaagaggacttgctgaagtacttcggggctcagtctgtgcgggtcctgtcagataaggggcgactgaaacatacagcttttgccacattccctaatgaaaaagcagctataaaggcattgacaagactccatcaactgaaacttttaggtcatactttagtcgttgaatttgcaaaagagcaagatcgagttcactccccatgtcccacttcaggttctgaaaa

SEQ ID NO: 142287 - DNA, 476 bp, Homo Sapiens
  misc_feature (454)..(454): n is a, c, g, or t
ctcgcttcaccttcaggacaactctatactacgtaccgtgaccgtcctcctatactgggaaaccgagcacagaaagcttaagcgcctggcgcgtggtgggcgctttcctactcactttctgggaccacgcacctgtaagcttaggtctgggaataaaaacccgagcaggggcccctagcgccgcgccccggcaggacacaggtctccgcagcgcccgtgcgcgccccctgaggcgctgtgatcggaggaaaccgaggccccggggccgaggcgaccctgccccatcttcccggccgcgccgcttcctcgcggtccgcctccagccctgccggaccccagcagcccgcgcaccgcgactcggccaggagcaggatcccgggcccgaccgcagcccgcgagagaccgcaccgagtccgcgcccactgccgcccaacacgtacctgaggcgcacagnacacaacgcttgcctcggatcc

SEQ ID NO: 142288 - DNA, 422 bp, Homo Sapiens
ttttaaatcaacataccaagagtatttatttttcaaagagatgattgtgaccgtggatggcagaaataatgtcttgttaaaatgactcaattccttttaggtaattgcaagggcggctggtttcttcaagcattcagatgagctcctctagaagcttttcacagggcaacgaaactgctttggtgcctccttcagggctaagaccatgatttggattcaccctgccttaaaggagaaaagttggaagcagcaggaggcatctgtagagaagtggtgaagtgaacatctctctaggtcccttgttttgtaaccagattttaatcagtgaggaattcacaggtgggagggctgctgttaggctgtcttccttgctgagcattgacaagcaatgaaatagttgaggcgtagcagcaagaaaggag

SEQ ID NO: 142289 - DNA, 1665 bp, Homo Sapiens
  misc_feature (153)..(163): n is a, c, g, or t
  misc_feature (1566)..(1600): n is a, c, g, or t
  misc_feature (1607)..(1607): n is a, c, g, or t
tttctgcaagaacattaacattacacagtagagtttatatctgtattaaatgttcagatatttaaatgagcaccaaacactacaaagtgcaaccaacatggttctattaaaaactctctttgactatggcattcaaggacagcaatacaatcnnnnnnnnnnnaacaaagcaactaatataaaaatctgcaaatgccatatattcatatctaggctattcttctcatataggcatgtcattagatagactttctttctattctttcctgaggtatttttttgtggtttacttttattgtactgctggatgcattatttttgatcatcctttcctaaaatgatttaaagacctgcaaataattttattgcataggacactattgatgacacatagaatgggagctgcaagtatgtggcattggaacaagccttacaaatattgcattttaagaatacacacattttttacagtttgtctcttttaaaaaatttgaagttatagctacgacttaactacgtacagtgaagcattttaggaatgttaagtgattaaagaagaagatgaatgatacaaagaaaagaagccaccattcttgccagctatatattgtattccttcaaaagcaactatacatgctgccttcagttcatagttaaatatttctagtaatctgttttgggagaacaaatgtctttcaaggtttcaagttcctctataagcttcttgttctggacttccagcactgcaactcggctctccagacattttacatattctttctttcgacgtcgacattctttggcagcttccctgttaaaaagcagaagcaaagggcaaacaagcattttttgcatgctattgacaaacagatcaaagtaagctcggtaagtgtgatcacggctgcattccacatcctggaacaacattcccaaattcaatttcaaacactaatccacaactggattcttaagggtcacacgtgtccttcccacaagtccacatggcaataagtaggactgctgcatctcctgccttgattagagtaaacaaggtccaagtcaaagacagttactctactttatggcaataaagatctttgagggccttgagttcctcaatgagagtcttgttttggttttcaagcacagccacacgattttcaagacatttgacatattctttcttcttcctgcgacactcccgggcagcttccctgtttttcattagcctcagctctcgtttgcgtgttgcttcttctgccagctgctggggactgtgcaacttccgggcgatgcagccatcaccactccctgtggcaaagcagcagtaggagctcggatctggtaagttggcatgtcaccagtggcagcactaagctggccagacaactcctgagttctgttcatgcattacagtttcatgacgtgtttccctcttcaagcagacaccacttcaaagaaatgttaaagtagggctaacagaaaagctattcagtctaaaaggcagcttggagccccggccgtaatggccgaattcccgggcatatgtccggtaccgtcgactgnnnnnnnnnnnnnnnnnnnnnnnnnnnnnnnnnnncgccgcnttcctcgctcactactcgctggcgctcgtcgttcggctctgacaggcggccccattga

SEQ ID NO: 142290 - DNA, 1326 bp, Homo Sapiens
cggtccggaattcccgggatcgcaagctgctcccgctggtcaccctgtgtgacgggaacccacgtcggccgagtccggtcctccgccatctggagctgctggacgagtttgccagggagaacattgactccctgtacaacgtcaacctcagcaaaggcagagccgccctctccgccactgtcccccgccacgagccccccttccacctggaccgggagatccgtctgcagaggctgagccactcgggcagccgggtcagagtggggttcagactgtgcaacagcacgggcggcgactgcttttaccgaggctacacgtcaggcgtggcggctgtccaggactggtaccacttccactatgtggatatcctggccctgctgcccgcggcatgggaggacagccacgggagccaggacggccacttcgtcctctcctgcagttacgatggcctggactgccaggcccgacagttccggaccttccaccaccccacctacggcagctgctacacggtcgatggcgtctggacagctcagcgccccggcatcacccacggagtcggcctggtcctcagggttgagcagcagcctcacctccctctgctgtccacgctggccggcatcagggtcatggttcacggccgtaaccacacgcccttcctggggcaccacagcttcagcgtccggtcagggacggaggccaccatcagcatccgaggggacgaggtgcacgggctcgggagcccctacggccactgcaccgccggcggggaaggcgtggaggtggagctgctacacacacctcctacaccaggcctgcctggtgtcctgcttccagcagctgatggtggagacctgctcctgtggctactacctccaccctctgccggcggggggctgagtactgcagctctgcccggcaccctgcctggggacactgcttctaccgcctctaccaggacctggagacccaccggctcccctggtacctcccgctgccccaggccctgcagggagtctgcattcaagctctccactgggacctccaggtggccttccgccaagtcagctggatggactctggccacgctaggtgaacaggggctgccgcatcagagccacagacagaggagcagcctggccaaaatcaacatcgtctaccaggagctcaactaccgctcagtggaggaggcgcccgtgtactcggtgccgcagctgctctcggccatgggcagcctctgcagcctgtggtttggggcctccgtcctctccctcctggagctcctggagctgctgctcgatgcttctgccctcaccctggtgctag

SEQ ID NO: 142291 - DNA, 444 bp, Homo Sapiens
tttttgaagatttactcacaatttaatagtaatcacatgtctgggaaaatggaagggttagaaatattttccacatcttttttggtagtcacctgcattctgataaatgctacaacctattcatcactgagtgttttgtttgctgttgctgcctgtaggatgatatattcttgagctgttgacatctagctgtattatctgctttggccaatgaaatgagagctcaagtcacctgtgccacctaggaggaaaagctttaagcgccattttatggcttcaccattctcatgtttccttctgccatgaaaacagtaacgtctcagaggccaggtgctctacagcgtgggtctcaccatgaagaagtggagcatagcccacagccaaccctcaatggatgtgttgttgaaagccattgaagtgatggggtcatatgttactgcaaca

SEQ ID NO: 142292 - DNA, 407 bp, Homo Sapiens
ttttttagggttagtgtctgtttaattttataagaaactgcccaactgttttccaaaatgcttgtgtcattttatgccccaccgtaactgtagggcagttccaattgttccatctcttggttatctaaagctgcataacaaattactacacatgtagagacttgaaagaacatgcttgatgacccacagtttctgcaggtcaggaatcttggcatgggttacctgggcccaaggtttcagagtctttcatgaggctgcaattaagggcaagacttatctgaggctggagtggagaaggattcactcctaagctcttgggactgttgtcaggattcacttccttgtgcactgttggaactcagttccttgccagatgttgcctggtggtcacactcaattctttgttt

SEQ ID NO: 142293 - DNA, 711 bp, Homo Sapiens
  misc_feature (11)..(11): n is a, c, g, or t
tttgaagatcnataattttaatttgcactttctttaaatacattcagttgacattcatgttccatatactcaaagtagcaaataaacttctgacaggcagacacagcaatttgcttcctgtcatacccaggcagctgtcttagcaatgcatcatcttgattaatagccacaacagagtgacagaagcattgctgtttagcattctccaccttttgtgattcattagcagcattctttgatttgttggcatgaatcatggtaactgagccagcaagttccttcctgctgaatatgtgctcggcctcccaggagcaaggttacataaagtgcccaagattggagagccacattttttatagcctctgtcagcatcactacattggtcaaggcagctaaagaagcaaaagaaggcattcctatatcaatctcagaatgttatccagatgacacatttatcagccatctccaaactcagcattcctccaactggaaaaatgatgtttagaacacacctagttgacacacagccttcctttgtagccttctttctagggaccatgaccttggtaaaaggccatttgattgttgggcaaggctaacaaaaagtagttagatacaaacaaaaatcattcttttaactactgtagtctaaggccattttgtttgtttatgaattgtcaatgatacctgagaaagaaatttcagcagtag

SEQ ID NO: 142294 - DNA, 262 bp, Homo Sapiens
cccaaagctacttttcaacacttcactttcctgatcaaaaacgtctacttaaattttccagatatttagtgaatttctgctgtgagccatgatctctgctagcccactgggaagaggagtgctggttcatgacccgtcatctgcatggtggtgcaggaagctcttctttctcttcgtacatgaggtattcaactagctcctagttaataaacctcaaaacccccttttaaataactttggaataatccgctccatactttag

SEQ ID NO: 142295 - DNA, 665 bp, Homo Sapiens
cagcccatatttttaaagtaaagactaaagtagagaagttttatttaaaaaaacagaacatttacaagacaccagttattttgtgccccatatgtcattaaaaaagtttactttacctttattattatttccctaggctagtcaagcagcaaaccattaatcggtcggagaaaccttcatgacatatgcccgactggctcttcgccacccacttgaaggacactacccaatcgatggaagcctttaatcgcacagccctccctattagcggactattggcggatgcagacatgttctactcgagcagttaccaaggaccactttactgcgatcaggattccaacgaccacctaatttcgtatctttcaactcttttcgaccggacctcttattcggaagcgttacaggaagacaggtctcaacttagggatcagatcacgttatcaacgctctgggatcgctgcaacctggcacttcaaggaagtgcaccgataacgtctagaccggcaaacacagatctagaggtggccaactgatcactgtaggagctgactggcaaagtcaaccaggcccaaccaagagtgaccaagacaacgattaggataacccacaggcactcctcgtcataaggccaacgacacagacaggctggcaaataaagggtt

SEQ ID NO: 142296 - DNA, 632 bp, Homo Sapiens
  misc_feature (550)..(550): n is a, c, g, or t
tttttttgagcataaagttatttttttattagtaacagtatgagcactaaaatatatgtccaaagcatgttttaaagcagactgtaaatgttacctgctggcacatttaaccagttctttgctggtttgggactacaggaggcattttcaagccttaaagggaatgccctctgcagcgggatgtgctgacggtcaagaccacgttcgaactgtgccgtcagagcctccagaaaagagaatctccccgtcgtgagaaaacacaaccgtgtgtgcctcgttttcgtggcccatcaatttgtgaatctccccagatttaagatctagcaaatggataacaccattgccacttgcctgagctaaaactcgacctgatgaatcaaaattcacctcattgccaggacttggacctatatcgatggacacaattggtaacagcttccgaaagtcccacagctttgtaaccccacaggcatcacaggatgctatcatgtgaccagttctggaggctgggaagtcccagagcatggcaccatcatttcatgaaggcctntgtgccctggatcaaaaatggcatcattgatagaatgcatgtgaccataaagtgactgctcacatataccctgtcttgcatc

SEQ ID NO: 142297 - DNA, 659 bp, Homo Sapiens
  misc_feature (61)..(70): n is a, c, g, or t
  misc_feature (409)..(418): n is a, c, g, or t
ttttgaaagaaattttttttaataacctttattgtctataggaagagaaattcaaatgacnnnnnnnnnnccacaggacctagagaagtgcctggaactcggttcagcacaggtgtgaggcctgatttcctcttgtgatcaactcacagtgtgctggcaagacctgccaatccactcctctgggagcccatctgtcactatgcggaggtgtcactacaagaaaatggtcagggtcactttgctgttgtcttcatatggctgcaagtcttttctttagtgagtgcaagaagacttgattcagtctaccctgaaatagggtctttggttcttttgtcttcaattttgctgttcaagaattttttatttcaaattgcaacttccttggattttgcagatacatatatcatcnnnnnnnnnnactagcaatttacaagagtatcactttatcaatactttactgctcatgcttctcttctttccaaagtcagcctctctaggaagccattacctgtccttgtgatttgatttatcaaggggaatggttaaacatcggaattgcttcagagcctcttctgagccactgtagaacagctgaggtagagatgcagtaatacataaataaataaatagagtcttatttggtggtggcttgccggttt

SEQ ID NO: 142298 - DNA, 524 bp, Homo Sapiens
tagaaatttaattgttatggctgaaattcctcctagttgtctgatagaatgcccctgaatgggaactctaggtcccaaggcctgaagggttgagaacagacagctgtaactttgaattttgttggctttcagtggtcatgctacctacccatactcgtactctcagaccttttattagtagccttgctttctatagagcatgcaccaaatccagtgagtccatgtggagagagcactgtgtgcgcagcggcagcagcacagacgtccatgaggaaaactcccagtgatgatctgacatttacaattaccccacatggaaatttaggggtttctgaatcaagcttaatgtttacagtttccaaatagccattttgcagtgtatagtttccttacaaaactaccccgcattcagttttcacattatctgcaagctgaaacttatttttaagttttgtgtacaagttgactgctgtaaagatatatatttttgggtcagtttttttccttcattaacttggtggtag

SEQ ID NO: 142299 - DNA, 469 bp, Homo Sapiens
tttgaaagcacatcttaatgtatttttattttctaggtggagacgtttggtaactgagaatcttttcaaggaggagaatccaaaaagccttctgctgctatctaaggctgcttagctccacagatccgtgaacagcacgcccagagtacagagaacgcggcaaaaccaacgcgaagaatccactccaggcagtctgagaaacccgggaggtggcgccacggctggagggcaggaggatggcggcgttccaaaaggcacccgctgtcacagacctcggtgtcctgctgtctgtcccagggatggagaggactgctccagggaagctgctggagcctgagtctgtcgggttcctctgcctgccccacctcttctacgggtgcctcttgctgcttctgtgtccccggccaactgaactcagtgggcttcgctgtacttggttccaaggtgctctggactccaggagagagtc

SEQ ID NO: 142300 - DNA, 643 bp, Homo Sapiens
ttttttccaaacaaaacaagatttttaatgtgataatggattgcctatttcacatgttaaattgctctatgcagggagatttcacaatccaggatccatagccatgttgttgtaagtaggatttcaacttacatttagcttcttgataggaggcagacatacacttagctgcatgatatgtaccagcttcaagtaattcttttttagcttctttggcaagcaggttaaaccgacttaacattgcagccttacaaagccgacttgccattgacataccacttttaaatggggaactttcagtgatcttcccactcaggccatccacaatctccaaagaaacatctccttgtgcccaattcagactcagaaatttatattccaagttcatttgaaggggatatgcagagggtactaaactaatatgaggtctgttgactaagtaaaacattggaagttttgaagtgagtgcatcatcaacacgttgctttatagcgatttctaagcctctggtatcactgcaattcccatcaccaataagtatactgctgatgtaaactggctgtataaaatgactcagcaatgctccctgtacaccaagcacttcccatctggtcaatttgtcacttgaggacatacctgctat

SEQ ID NO: 142301 - DNA, 462 bp, Homo Sapiens
ttttacagcatcacactataatactagcttgcttctaaaagtggtaaccagctctgaatggtgtagaatgactcagcagcatgcatttctggcaatactgaggactagatatccttaagtttttctgttaaagaaaatcccctagataatatattaaaagtctccttgaaatattttttgtctactaactctttgagtaatacaccgagtttggggcctctcacggtgttggcttttctcaaatgtttgttcgtctttgaattctctgttcatctccgtatttaagaactcttgtcctgcttgttctccctatcatctcctgcctctgatgatactgaatttagtgaatagatctagagagtggacggaggcaggcaggactaattctgggagctgtcttgtatgttggtggacctttatgagcattaacatgaactatcacatcaccagtacccacgttca

SEQ ID NO: 142302 - DNA, 433 bp, Homo Sapiens
acacttgatcaatctgtgtatttgaggtccttacagtcatgggggatgggagagagaagggagccatctgcttggccatggtttggaaggttttggttgcagagggggtcagctgtcatccaacgtgcgtggctggcactggcaggcaggggtggtgggagggtgctctgagcagagaggacagcaagagtgaaggcatggggtcagagccgacaggtgtgttctgtgacaatttgcaggcagctaggaggaggctggtcctgagtgccaggagaggctgttgtcctgatgcaggggtctgtggaggttctttaggtgtgcagagctgtctttctggaagttgtatggagggcgggcctctgtgcctgaagaaggatgagaggagaggcattcctgaggcaggctgcccagtggaggtcacccgttggagtga

SEQ ID NO: 142303 - DNA, 894 bp, Homo Sapiens
tttgatagcagaatattttaattgtgatattagttaccttttacctttgttcactcccacttatttattggtctttaatattgtttggtattatatttttgttattgttaaatattcactgttggactttttgtttattttgagacagatgtcggcagtgagcactggacttagccaccagcttgccaagtctaaggtcgatcagatggctcctgccttgacatgtctaaggtcgaccagatggctctagctggcgccaggaccattcaggtccagcagaggtatgtgatagtgattccctgtggcttccatctcccctgtctcgcctgggtggctttcccatcttggcctctggcgtccctgggactactcagaccttcttcctctgttttccttctaagcccacttttagtttgtttccacggtactcagaatggtttgctgttttcttcttttctctatttttctatgctccttcctgcacgatgaagttgatcttttagatttctgtcacactctagccttggaaatcaattaaatttgtttctttaaaatgtcgcagtaaaattgctcctccagacagatgtccacggagattctgtcctgctgcgtccgcctttcacagaactgaggttgttcctacaccagtttcagaagcgtgtaggcacgctttattacagtggcagcagcgtccctgtgcgaggtctaacccaggtgtgggccctgcagccagcccgggggtccaatgggtcctcctatggagcacaggaagaatcgtggcaggccagagatagacaaaaggtggcttttaaaagggaagtgtcaggttaccagggactgggtacttttacacgcggaccttcggccctgcccatagaaaggggcagcactgcg

SEQ ID NO: 142304 - DNA, 464 bp, Homo Sapiens
catcccaagcaaaggtccctcctctacggagcccctccacgcgtccactgcggttccgccgtgccaaggggagcttggctgttcacgggcctcacctgctagcgagaagatagcttggccgggcggctgatctcaccttgtaattctgacactgtgtctcccgggcttgtcggcttcatgacttgtgcccaaagtttgatttctcgcagaccaggaggacccattggacccccgggctggctgcagggcccacacctgggttagacctcgcacagggacgctgctgccactgtaataaagcgtgcctacacgcttctgaaactggtgtaggaacaacctcagttctgtgaaaggcggacgcagcaggacagaatctccgtggacatctgtctggaggagcaattttactgcgacattttaaagaaacaaatttaattgatttccaagggtgaagtgtaaccaaa

SEQ ID NO: 142305 - DNA, 672 bp, Homo Sapiens
tttgtcatcagatttcaactccttctatcagcatttttcctgaccagcaatcacaataacacaaaatgaaataaagaggggcttcacttgtttttaaaagcatttatagaaatcaagtcagagagacaaaatatttttcagagggtaacttcagaacaatctctcttccttggtaactgcagaagatgggcatctgaactcttccaagtaccaaaattactgtcacaaaaataatgaatttaaaaatagggcaaactttgagaagactacaacaatgcagtcaacactgagacaggttcccccagagaaaaaccttctgcttcagtgggcccctgcagaacaagttgctggctaagaaatttcaagagggtaaaggaggatctctccatagcccaatattaagaacgcagggccaggagaaggtagccatgattcctcctccctcatgctcaccaactataagtaggaatactggctgatcttggtaggactcagcgggtatccagtgtaaattgttgagcctcgggaagacccaatgtaggattgggtggcaaacttgtgttggtactgagccggggccacgctggcagaagtgaggaggctgggcccaacactgacagggaccctgtgcaccaaagtgctagggtgagtggtataggctgcagcatgcct

SEQ ID NO: 142306 - DNA, 634 bp, Homo Sapiens
ttttcattttgtgactagtttatttcacttagcagtgtcgtcttcaaggttcattctagttgtagcatgtgatccttaaaaggatcagtttaaatctttaaaaggatttccttcccgttaaggcttaatagcattccattgtgtgtgtgtatcgcattttgtttgtccattcatccatccatggacacttgggttgtttacacctcttggcttttgcaaataattctgcagtgaacatgggagtgcacatacctctttgagatccggatttcaattcttttggttacatactcaggcatgggattgcaggaagactgtcatctctctcatcttactcaacaggctgcttctccccagtgtacatacagacttgagtctttcttatctcttttttccttctgcagcctgaagcttttgcagtttcgccatcagttctttggcggggttaaagatgccgccggttggctggtcacagatgtagcagcgcggggtggcccggaagtgctccagcgcgcagctctcgcagaaataatgcctgcacttggtgacgactgggtttttggaaggcctggcgacatatgaaacacctgaatggtatttcctcttcctcgcttcccacttcatgggtttcgtc

SEQ ID NO: 142307 - DNA, 374 bp, Homo Sapiens
tttcacaggttggccaggtttttattggagagtcaggagttactttccttccctcgtccctgcctcccccactcaaagaaccccactccagtgggtcttgtccttcatctgcccctaggaactccccatccccagctacacaggcactcagggagagcgcacatgctgtgtgggcagacagccccaggccaggtaggcagtgagctccctcaaatcctcccacccccaggactcaggagggaggggcaggagaggtgtgggcccggtgtgcagtcctcaggcggcctcctgagctcgcagccagccaggccttgtgcctccaggatggatggtgtgatgaggcacatgccccgtagcctttcccttccggaggg

SEQ ID NO: 142308 - DNA, 739 bp, Homo Sapiens
agatgatgagctctgttatggacatgctgagtgtgaaaagcctgtgggatatccatatatttatattaagataattgaatataggaaactagagctaagaagagagaaacttgagggaaatatggatttgaaagttaccagtatgttgggaccacagcagagaatatgaagattatatagcaaaatagaggtcaaggaagtaggaggagaattaagacaagtgaatgagtttcaagaaagggtatatagtctaaaagtagtctgagaacaagaaacagccctctccatctccagtttccgcatctccagtttctggcaaccactctcttccttagctccctaaagcctaggaatgctaatggagcacattttatgctggttctacacacgtctttatgatagcacccctacaccctgtccacacctttgtaaatattctctttatcaaattatcccagtttgagtatatcattgattcctgctggaacccatataatgaagttatattttaccctatggtgagtatggggagacacataggaattgtaagaaagagagatactgatcagatttgcttttcagaaagattattggtgatgattcgaagaatagattagagaggtgtaatactggaagcaaggagaagaagaagtaggaaacttgcacaaggaccaaagaagatacaggcttaaaatgggctgggaggagtagagagggatttaaatatattagtgatgtt

SEQ ID NO: 142309 - DNA, 461 bp, Homo Sapiens
ttttgtgtttttggaagactacagtttgctttattcagaaataaaatatgttccaaaattccaaaggaatattccaaaatatgccaaacctctctcaacctctcttttcccccacccttccaatgagttagtttggattttgaaatatattgacatgtagccagaagcctggtgattttacctgggaaataaattctttatcacttcacttttctttctgataccgcactatgcttgagaggatgaccagctgcccatccaaaacagacaaggcaaaggtctctgggccccagggtgatgagtttgcctttcccccagggttgctgtggctctcagaaggcagcagagactggtgggtggacagtcatatgctgtgaggttggtcactggccccactggtcccaggactcaatcacataatcaggtgaggatgagaatggcttattcccacgggctctggg

SEQ ID NO: 142310 - DNA, 799 bp, Homo Sapiens
  misc_feature (472)..(472): n is a, c, g, or t
tttcagttactttggttggttttaattcttatctaaaggtgtcgagtactttcaaaagagctatattccgagttgcctacaaaatcttttgttttattatagagtggaatggatcaagacaaattaggttttattaatgaaacagttcattccccaccggcgcatttcttgtgaacctaagaaaagcgaggggctgagcgatcgtttgtcgtggtcttcttcagtttcacgccccttcggatggcgttcagcatgtcttctccttgtggagtatcccttgggctcaggtctgcagggtcactctctggaatctggcctggggagacagtggcacttgggggttcccgttcctggtcttcagcttcactttctggaattgcctgtctgtgctcctcagggatactgggcttcgggcctggaagtggagggttaacggaagcttggccgctccacattgaggagggcatgctgntgacaccttgggggccctcacccacagatggcgactcagggctgtgctccccccgctcttctggcccatctggaggggctggcaacacccctgggaggtctgggacggttggggtcttgacagggatcacgggtgtcttgatggggatgggaccagctccaatggttccccggcggacagaaggcttgggtggaggggtccggttcgatagttgcaaccccctggagtgaccattacaaggtcccagggtggttggggagctcagccagtgaggctgaacgccttggcttggaacatccgtcggtaggacttgcttatgtcgccctc

SEQ ID NO: 142311 - DNA, 484 bp, Homo Sapiens
ttttgcactaatattctgctcgtgttgggagggattctttgcaaaggtttgtaggagagaaccatgagggatggtacaggaatccaggttaaaagcaatgaggccaacaccacccctccctcgacctagagggatgctgggcgaggttaccagaaagaaggagagttgcgaagagcagaccaccttgagacaatcaccttccatccagggtcacagtcaccagctggggtgacctcatagggagggaggcaggagattaaattttctgacctcgctctcttctgtccctccagtttcctgctggaactcgccattgcccatatccagccagaatccacagggcacgtagcatattgatgtaatccatacaagttcaccatggtcaagagcagggtggagcgtgaatgggaagggatcccacacacagactgcccttgtgctcatctagggccacagggaaggcggtcgtcaccgaagaaggtct

SEQ ID NO: 142312 - DNA, 741 bp, Homo Sapiens
tttgtgattaatggatcgtttttatttctcgcgaagcggtttggcactccctcgggctcctccaggccacacggacacacacggacataagcacacaggtactaggataacagccaggccccaagcttagtccgcggggatttgtgggggaaggaggggggtgcctggcctccccgagtggcctttgaggaagaagaggccgcagccgatggagatcggtcggtgaagctccggggccaagcccctcccttccctccacgacccagcgcccaggctcatatggcctggtcctgcctccgtctcaggctgagctcgcgggctgctgccaggaaggctgccccggtgagcagctcggcgatgaagctgatccagcccagggccagggaccagccgaagctgatgtccacctggtccaggagggccttctcctccaagagacacagcgcctcccggaaggcggcggctgaatacgctatgtagacgctgatcccagcgagggtcaccatggtgagaagttggcggctcgattcgctgactgtcacgttctccagcctgaaggggttcatcagcggtgtgcacgggctctgcacccggcaggtccgccagaggccggagtgggagctcagaggctcgggctggctgcgattgatggaccccagcaggtcctgcgcccccgggccagtcctctccagccgctcggtgtcaatgatataccagaagtccgtgccgatggcggccgca

SEQ ID NO: 142313 - DNA, 589 bp, Homo Sapiens
ctgcctccgtctcaggctgagctcgcgggctgctgccaggaaggctgccccggtgagcagctcggcgatgaagctgatccagcccagggccagggaccagccgaagctgatgtccacctggtccaggagggccttctcctccaagagacacagcgcctcccggaaggcggcggctgaatacgctatgtagacgctgatcccagcgagggtcaccatggctccaaagaggaagagaattccagtgagcaggaggaggaggtaggcttggaggaggaagctcagaaaccccgtcatccccccaaaaaccatcaggatcaggctgagcggcagcagaatcacaaatgtcccatgcatggtgagaagttgccggctcgattcgctgactgtcacgttctccagcctgaaggggttcatcagcggtgtgcacgggctctgcacccggcaggtccgccagaggccggagtgggagctcagaggctcgggctggctgcgattgatggaccccagcaggtcctgcgcccccgggccagtcctctccagccgctcggtgtcaatgatataccagaagtccgtgccgatggcggccgca

SEQ ID NO: 142314 - DNA, 493 bp, Homo Sapiens
ggcacgaggctgatgctaatattttaataaacattcttcccaattcatatagctattcacatatatgtatagattctatttttcataaccatgataatatcatatgatatcatatggtgtgaagctacaatctggttttatccgccattctgttttataccaggaacttctttccatgacggcaaagccctgcagaagttttccattctattgattgactgttaataattcaccattgacatccatggagctatcaaaaagcagtgagaagttgccggctcgattcgctgactgtcacgttctccagcctgaaggggttcatcagcggtgtgcacgggctctgcacccggcaggtccgccagaggccggagtgggagctcagaggctcgggctggctgcgattgatggaccccagcaggtcctgcgcccccgggccagtcctctccagccgctcggtgtcaatgatataccagaagtccgccgatggcggccc

SEQ ID NO: 142315 - DNA, 530 bp, Homo Sapiens
  misc_feature (447)..(455): n is a, c, g, or t
tcagaacagagtcctgtattctacaatggatggattggaagacttgaggatccagtctctttcctttatagataattagactcaggcagaaactcagagctctcagggctttgctgtgctgtgctgtgtcatgccgtcctggggcccggggaaccaccctgagcactttgtggagtgtgtccttgctcaggcttttgccttgggattgaaccgaagctgctcagttccttccacttacctcctctctgtctgatcttccttttcccagagcctcagtgcttgatgctcagtgctcaggagatgtcctttgctccatccttcagaggggcagttgtgtagttatgctgccgggtgagcacagacacacatactttctcccctagctgggaccatcccacagggggtgctcaatatgcatgcctcatgaaagcatagactgtccatttnnnnnnnnntcaggtactcatggtattacaatatgccaggggttggacaaatggattttttacccttttttaaaaaagttatgt

SEQ ID NO: 142316 - DNA, 484 bp, Homo Sapiens
aggccagccccgagcttgcccagcggtgctccaggcagggaggggccaggcccgccagccaggcgaaggcgcaggcagcgcgcgcggggcgccgtaggcaccgggccaggcgggcagccgccctgggcccgggaccgcgtacgaagccgcagcggcacacgctgatgagcgcggcgaagaccaccgccgcataggtggacacgtagtaggtggccccggccgcgtggcaggcggcctccgggccaggcccaggtagtaggtgagccacagctgcagcgtgagcgtgaagaactcatcaaccagagccaggttgaacaggtagagaagcagggcctggcccaggcgcccgccgctgcggatgaacattgccagggccgccacgttggctggcagccccaggcccagtgccaaggcataggccgcgggcaccacgatgaagcgagcagggtcatcccagaggctgcagccgccaacacccaggtcc

SEQ ID NO: 142317 - DNA, 503 bp, Homo Sapiens
ttttccttcttattggaacatttattggggagaatcaagattctcaacaaggagtgaattattttgtggggggaaattttcctccctgtaaatgctttggaagcattttctgtccagttaggaaaggcacatcactaaacacagggcttttagcactggttgggacggctggacacaccaggctgacctgacgccggcaagtggggtttggatgtggcacaggcttcctgtggggcatggattggggatggctttgacacagtatcttccccttaaatgcctcaactttctggggctgtctgtccttgtctatgatctgtctaatccttgtaggataattctggccaacaaagatagcttgttggctgcaagatttggtacgtgtcactttgcaggagggagccctgtagttgcagggacagccctggacaggctctgctctgacatgcacttctgggttgtgctgagctttcccaagccccactgggaaggaaaggggctct

SEQ ID NO: 142318 - DNA, 509 bp, Homo Sapiens
aggtaggagataactgcatttcttttacgagcatagttccttttggattctggcaacatctttttgggtagtctagtattgtttcctaggaaattaaaaatcaatcccaatccctgtgggtggaagaaaatgggaatattcacttccaaatgttattaggggtgggaacgaacatttcttatatttcattctcttttaggctttattcttgtttctaaaagttataattggtattcatattagcagcaacaatcctaatttctgtaagttaaaatgactcaggactgatgaaaataacatttgtggtaaggaatatggagtccacaggtggtaataagtgtctatcaattttggcaattcacaatcttatttaagaggttaattggtatgaaatagccaatagtatgaaaagatctcagtcggctgaaggaagctgagtcagcccatcagtatgcagtggaaagagggctttcatggctggaaaatttcccatgacttcagagtgaaag

SEQ ID NO: 142319 - DNA, 566 bp, Homo Sapiens
tgcggccgcggctgctctcggacttgccccgccaggcagacgcgcgagtaggccgcggagtaggcggatcggcagcctggatctcggggctggggggtctgagatggatcttgcgtctggccccggaggcaggggctgcagaggccgcccggcggacttgggctgcccgggtggcagaagcggctggggcagtgggagcccctgcgtctggcgcagctggggcgacatgggctgcccgggtctcagcagccgcaggggcggggggagcctcaggggccgccccggcatctggatcggctggggcgtcaggggccgccccggagtcgggatcggctggggcgtcagggggccgccccggagtctagatctgctggggcggcaagggctgcctcgtagtctggatcggctgcgaatgccacggagtcaggatcagctgttgctgtcctagattcgtgatcttctgtggttgcccggagtgaggatggtgatgaggctgtatgggctagtctgacagtgtgatgcggtaatgatggcctggacgctagggaagcgatcaccggagaggg

SEQ ID NO: 142320 - DNA, 479 bp, Homo Sapiens
tttttacaggatgaatcttttatatggaaaaatctgagttaacatcactcccgtggtgtttgtagttcttacagggaaactccagtgccttttgagccgcttgttcgtcctagtgaacactgtctgttttgtctcttggtgctgctatgtctgaccttcatgaagtgctccttggtctgtatcctccttttaggttagaggcaggaagagtgaggggaatttcagccacagaagagtttgcgtgtgtgtcattttatcctctggtgacttttcctcttcgcagcagtgatcccagaaaacaggaaaaactgctatgatcacaatcagtttttaatgtaaagaaaagctgatgatggtttttcattgacacggcaaattcaggatttggggcctggggatgaagctgacggtctgtgaaagtgcaggcagccagctccttggatgaggtccaagtccaaaagcccatctgtttcttcagc

SEQ ID NO: 142321 - DNA, 829 bp, Homo Sapiens
ttttttaaagtcacatatattttattatattatatactcaaaagaaagtattttgaagtattactcaaattaaaataacagtgtgggctttattgaagccaaatttactagcaaacaaaaatagtaataaatgtctgtatctgaattctttcagtatcttgattctaaaatccacataatgttcatctcttagtatcttcaattttctaattttatcttattatattcaacttctgctcttccgggtacatccctatgatccatcatattacgtttttgaagaagccagatcctgtttctatattgtatagctaatccatggctatgcagtagctgaactgctctgtcaatctctgggcacttaaaaggagtttgggagtgcccaaatgatttaactaaaacatattgtctttgagtataaattgaaagacatttatttatattttatattgaatggtatttcaaatgttggtgtataattttgtgttttagccgatgattgaatagttgtttctttaaaaactttggtccatgtgaggattaaattatctttaaaatgatatgattgttcatgttcttgaagagtagactttggaactgatcagttcatgatgttggagtcattcagtcaatctttgtgtggaccagttagggttacttggctcaccggcttctgctggcttacttcttgtctcttctttgactgtcttgcaaaaacacatcctcagtggcggggagctgggcagagaagcccacatggataagggaagttagtcccatcatctgcacagtaatgggtggttgttgatggctctcccggaggaaggca

SEQ ID NO: 142322 - DNA, 550 bp, Homo Sapiens
ttttaatgctttcagagcctttatttgcaaatcccaactttccagactatccccaaagggaacgttctttctttctcttgttttctgcttgatccaaggggcagcctcgccttcaatgcagtccagctgagtgaagctaaggtattttctgagccaacaaagatgatttcaggctctatggctcgaggcatttccctggatgaaataacacttcaaaaagacttaaggccacttgtgtctctctcttgggccacagactttcagtaattccaagagcaaagctccttatacaaggacacagacagtacgggagccttggaagccagggctggctgccccttgccccagcttggctctgggcaaaccagccaggcaccaaaagcgacttccctgacatggagttggcagcagttcaagcaggaccttaatcaccaaggagactgagcacccttcaggagccagcatgtgaatctcaatgtccacatgaagatgtggtagatggggctgcagcgacctcgggcagggaaaccactgaacaccgggctccagc

SEQ ID NO: 142323 - DNA, 1198 bp, Homo Sapiens
tcatgctcttcacgtacatgagcaggttggtgatcccatttttaatgtcttcattacacatgtggatccatttctgcagcgtgtctttcaggtattcctgactgatgggatgtgcaagggttcggagtgttggctggaactcgacgatggatgctggcaggtgtttaaaccagctgcagagtttcatctcttcctgcaggacaccagtgccctttccggcaggatgctggcctgtgatggtctccagagtagagaagagcaagccacatggcagggctggatctggcagcagtccttctggcaaagtgtagaaaagggcatgagcttgcttcagagtggtggccagcaactccactaatgagcaaatctgagccttgataccagcaccatggtgtggctggttgagaagtttctgaatagttgcctttctggccagcaggaagtctgtgagggcttggcgaggagaactctcttctaagagcattatagagcacagggcctcggccacagcttggtcagacacaccttggcatttgagcaacatcttgctttcatgcagaatagttgaccggaagtggctggcggctgccacctgccggatgagtataggaaaccgggagaggacgggactgtatcgggaactagaagaatccagctggagcaggctgtggaggtggcagcagagcaggtagagctgtgtggcgtggagacactgagaggcttccatcgagctccagatcttctccggaatttctaagagtagcttgatctgggcagccatgctgtagaacttctcttgggatggctgctgtggctgctgggcccgcggtggccggggcgcggccgagccggcctggcggaggcgggcgcagtactggtcggtggccttcacggcgtccactagccccacggcgcagcggcgcatctggccgatggtgtcggccgcctcgatcaggtcgcggtaccgttcgcccaccatctgccgcagctcctccttcttgtgctcgatctcggcccgaacctggcgctccagcccgcggatctcctccgctccatgcgtctcgaaaagagccgcagggtcgcgcagatccagccgcttcagcgcgggtgaggttgccgcggtggccatggtgcactcgtcagcccccgcctcgtgccgaattcggcgcgccgtgacttcatactctctcgcccctaa

SEQ ID NO: 142324 - DNA, 400 bp, Homo Sapiens
ttttctttttctctgctttctgagtgtgtttatggggtttcttggcttataggtcaggggtcaaaccgatgacccctggcccccgagagacgttgtctttcccagaggtttgtgcttttctgtggtgggtgggctggtctcactgccaccaactgccagtgctcctccaaggctcggggcccatgctggggcccgggggccttctcaggctccacagtcactggagggaggctctggaccaggaagcagggaggcagggttacagtctataagatggaagaaccttggggacactggaaggtcatctggaatcggcacacgcggagggaccgggaagccgcatcatcgtgtgcccttttaccgggctggttcctctcgggagggtggtcttcaggcctgc

SEQ ID NO: 142325 - DNA, 596 bp, Homo Sapiens
  misc_feature (215)..(228): n is a, c, g, or t
ttttatcagacctgatcttgaattttatatgctttatttcatttaatcccaaatcaattttgtaaggtaggaattattattatgaccaatttatagctcaggaaactagatcgtgaaaagatgaaatacttggccaaggtcacagaactgattcaatgcagaattaggactaaaaacatcgtctgctgaggttagactcagctcctcttcttaannnnnnnnnnnnnngacaatggcacttcaaagttaatggcattttgtccattttcctgagaagaaaacaaggtttagatagcataagtgactttccccttactgacaactgggaaaagccaaagttttgatccaactatgtatctgggttcatactgagtcacagaaaactacttgctatttttctagctatggagtatcaatatggtgtgttggatttcccttcaagggagtacactcaatgaactgcattcaacttggggaaaaaagaaaagactaatagccagaactgagtgcaaaaaagtgacatgaggaagtttgtgataagactacttttctcataggtgcatgccttcccttcagttgactggtctccatgtgtc

SEQ ID NO: 142326 - DNA, 914 bp, Homo Sapiens
gggcaacacacgaaggacccacagaaaacgtctgttacagctagaacggctgcacgaccaaaagaggaagatagtcttgggacccttgcatggtgtttcaaagggtggtgaagaactaaggtagaagaatacatgttcacttccagtgaacaagagcatgttcccaaactcaattttgggtcgcccacccttcactccaaatcatcaacaacataataacttctttaccctgtcacctactgtttattcacaccagcagcttatagatgcacaattcaactttcagaatgcagacttgtctagagctgtgtcattacagcagctgacatatggaaatgtcagtccaatacagacctcagcttccccattatttcgaggaaggaagagattaagcgatgaaaaaaaccttcctcttgacggtaaacggcaacgtttccattcaccccaccaagagccaactgtagttaaccagatagtgcctttatcaggtgaacgaagatactcaatgccaccattgtttcatacacattatgtaccagatatagtcagatgtgttccaccttttcgagaaattgcatttttagaacctagagaaatcacactgcctgaggccaaagataaggtaataataatgtagatattagttttgccttttgggaatttagtataaataatgtattaatcaaaaatatttaatatcctggattaagtagaacgtgcctttttttgttgcaatgtttaaagtactattcagcctaattttctgtccaaacattactttgatttttgttagctattcttttaatagaaatgcagccatcagggaaatcagattttccctgatatatgaaaattttattagaacccagacactttctgagtttagagaactgtcttgttacttgtttttactg

SEQ ID NO: 142327 - DNA, 471 bp, Homo Sapiens
  misc_feature (101)..(101): n is a, c, g, or t
  misc_feature (148)..(158): n is a, c, g, or t
  misc_feature (253)..(253): n is a, c, g, or t
gaaaccgagcaccccctttttattttaggggtgtttcgtggatttccattttcctgtgtggtgtcccaaaatcccggggcaccagcttgtgtcttttgtcncctatttgttatgtcaaacccgattctgcgatgcatatctaagtggnnnnnnnnnnnctttagtgaatgctttctttattttacttcgccgttccccacaactctgtgtcaagttgatagagatattcgtttgggaatagtcaggatttttnattacacgtaaccacctacatgattctggaggtcttcttagtgttccaagaaccagatgtttttcccaccacaggacaaagatgagaacctccacgctgaggaaagaattttcaggtccgcaaagagtgaccgccttccagaggagagcggatcgaccactgtgtcagcgccctaaaagtcaacatctgagtcctcagcttctgaccccggggtcagg

SEQ ID NO: 142328 - DNA, 397 bp, Homo Sapiens
  misc_feature (229)..(250): n is a, c, g, or t
tttacttttggttgctgttaccatcaacatctgttttattaccgaagacaattagtacacagacatgaactgttcttaaacagaacagtcttaaaatgtctgtacatatctgtctggtccatcaaattacaaagccaagattacagaatctatatagtctaatgctgacaacttctattttaaaaaacaagactttactttcttctgccccctaagtgataggtttaannnnnnnnnnnnnnnnnnnnnngtttccaaagtgcagcagtgtctctttcagtctacaataagattcctagggcagctttatcaaattttgccaattcaaagttcaaggacattacaagttagtcctggctttgtcatatctacttagtccatccgacacctgaatcat

SEQ ID NO: 142329 - DNA, 560 bp, Homo Sapiens
tctacattgcagggcacacgcgaaacagatgattttggcactgatatatttgacagtggcataggaactgaccttgatccagtagcctgagtgtgactgattgttatatggttgccatgaagaggtgactggcgatctttctccttactgtgacgactactctgtttactgcgttgtagttgctgcctcagtttggcgatctcttttagttgatcagcactcccccatgacgcagaacgctgatgtgacctcttttctgcaccctcttctgcccaacagctaggtgtctgagtagctttgtctttcatgcatgaagggtagtgaacatgaggatcccgtggccactgtcctgtgaggtaaggtcctgttattgtatccaaagaggaggttcgccttattgtactagaggtccgaacttgctgagattttgccttgtccgctctgcacacgggcgagccggggctccgtctctcaggtgagctgctcctccggtggctctctggggaccgtctcgggcggcccttggcccgcggcgcctgctcggccggggctgcggccgc

SEQ ID NO: 142330 - DNA, 575 bp, Homo Sapiens
agtggagctcttcgaccatctggtatgtccaacggcttggatacttcttccttcccattattttctttaatgaataccttttctaattcaggacttattccttctacattgcagggcacacgcgaaacagatgattttggcactgatatatttgacagtggcataggaactgaccttgatccagtagcctgagtgtgactgattgttatatggttgccatgaagaggtgactggcgatctttctccttactgtgacgactactctgtttactgcgttgtagttgctgcctcagtttggcgatctgagtagctttgtctttcatgcatgaagggtagtgaacatgaggatcccgtggccactgtcctgtgaggtaaggtcctgttattgtatccaaagaggaggttcgccttattgtactagaggtccgaacttgctgagattttgccttgtccgctctgcacacgggcgagccggggctccgtctctcaggtgagctgctcctccggtggctctctggggaccgtctcgggcggcccttggcccgcggcgcgtgctcggccggggctgcggccgc

SEQ ID NO: 142331 - DNA, 565 bp, Homo Sapiens
ttttgctgtttttgagatttatttttgaaaattagtggaggatgtcgatcctccagtaaagcaaagcatttgtaaactggttgtaatcatttgttttcgttatgaaagtactgccaaagtgtattttgtgaactgcaaccgggtagttcagaacacaggctttggagctgaggcttcaattctaattccaccgccaacttgggagcccttggacacattcctttacttctctttggttcctgtcacatacgcactcaaagaatgctggctcacattacagaacccaaaggcttatttatccttttcgtttataagggtattaaaacgcgttttctatttaggatgggtttattacggctgcaacccaaggagcatctgtacttttaagaggaactgggcacagcaaaacagcatcttcctagtctaacagtgagactacattcacagaggacacatttcatcaagaacgacttaacacgcccagatatctcatattatgcccctgcggtaaggcaaatcaagtatgaagacacacactccctgttttcttcagcactgagatcac

SEQ ID NO: 142332 - DNA, 516 bp, Homo Sapiens
tattaaaaataagattttgcaactgcgttggcataaggaaaagtatattaatattgcatattaaaacatgttcttcagcctaaagctttacttatttttttctgattttaaaacaaatcaaaacattttcatgggccccaaaagactatggtccctggcactgggcctgcggtgcttaatgcagaagtctaccctgcgtgtctgatatttcttctgggaaataaagagctagtgagaccctccatcttttgccacagtgcttctctctactctctctcgtggtcctacttattctggtcccccacggctgcctagtctttctggtccttgaagtctaggactgtcactcactgattgccaactctttcccaggcgcactcccaccccaaggacaccccttgtgattgctgtggaataggcatagccaccgcaaatatatcgttacttatatattctcctttcccctgctttggaagaagaaccgtaagcatttattaaaaatgactgagaagctga

SEQ ID NO: 142333 - DNA, 506 bp, Homo Sapiens
gacttcatttattatataaggaacctaactcaaattggcttaagcaattaataaatgtttattgttacattgttgtaatgtggctggaaatccagaagtcatacaaattgtcaggattggttgatacagtggcttaatgctatcaccaaggaccaactctccattccctttgatgttggtggcatcttcagacttgctgcaaaggtgactgtagcagtttgaggtgtcactgtctgaggaagagggactgttttttcctccatcatttttaggattgaagaaccttttctcacagttctcttttggaggctgtccagggggcttctactcacatctcatggccattcctcggccgcagcgagggctggcttccccctgccgcagtgctgcgtgccgtcgccgcacgtccggggcagctggggccgggcgccgcggcctccgcagatggaggtacaaaaacatcggccacggcgaggagccatgactgaggcggcggcggccgccaa

SEQ ID NO: 142334 - DNA, 543 bp, Homo Sapiens
tggttttatcactttttggtgaaacatacatatatatacataaatagaacacatgtttttatatcatttattgacctgaggccaaattctactcgattttctactttccccctactaagagatccagaaaagctattaacattagagaataaagtattacttcttctggaatcctttctacatacccctttgtactctgggaaggtttgaatgtgaccaggaaggaggagatatcaacacaggctaagttaattaacgaaaaacagcattctgactaacctatagttgaatttacaaaatacacttcaaagctatggcctggtacagggggaggatgagatactgcacatatttttctctctcagccttatcaggctaccatgggaaagctatagacagagatatattattcttcaccataaaaagcctgcaaaccccattttaattagccccaaagaactgtgccctaaaatgtaaaatgaaataaaaatctctggataacatagacgactgtgtgaagtgaatgccatcagttagagagac

SEQ ID NO: 142335 - DNA, 213 bp, Homo Sapiens
tttccagggatgccagattctactagaacattttctatgtcttttattttttagttccttattcctagcattattataaagaaaataggccaggcacagtagtgctttgagagaccaaggcagcaggatcacttggggtggcaggatcccttggggccaggagtttgaggtctgtcttgggcaaggtagcaagaccctatctctatgaaatga

SEQ ID NO: 142336 - DNA, 297 bp, Homo Sapiens
agcacatcactgaaaactgtatttctgttccaccttcagtcattaatttcaattgagaaatgtttctattcacatacaatgatgagaataaataattacaagaaggctagagaccacaaaaatagaaaaatgactctctggaatcttgcatttgttttctattgatgaaggaagcagtcggcatgctattttgacagccggtattacaagaacaagatactgctcagcagtgtttcaaaaatactggcaaataaagttgttttctgcctgttattttccccccacatccaatcctga

SEQ ID NO: 142337 - DNA, 274 bp, Homo Sapiens
gcctgcattcacaattacttttcacaaaggtgttggaaatggcatttttattttacacagatagttgcacatatatagagaaaattaggaaagtccatttttaactctaaagggaacttttttctctaaaacttacttgtaaagctactgatacagatgggccgcatggttaggggaaagctcctctgtgaaaagagcatgtttattcctcttgtacattttcctcttttaactgctattaaacaagaaagcctacatacctattcaaaagcca

SEQ ID NO: 142338 - DNA, 1389 bp, Homo Sapiens
  misc_feature (811)..(811): n is a, c, g, or t
  misc_feature (989)..(989): n is a, c, g, or t
  misc_feature (1102)..(1102): n is a, c, g, or t
  misc_feature (1112)..(1112): n is a, c, g, or t
  misc_feature (1130)..(1130): n is a, c, g, or t
  misc_feature (1142)..(1142): n is a, c, g, or t
  misc_feature (1247)..(1247): n is a, c, g, or t
tttttaatcagaagttatgaagaacaaaaagaaaaaataaacacagaagcaagtgcaataccacctctcttctccctctctcttagggtttcctttgtagcctatgtttggtgtctcttttgacctttaccccttcacctcctcctctcttcttctgattcccctcccccccttttttaaagagtttttctcctttctcaaggggagttaaactagcttttgagacttattgcaaagcattttgtatatgtaatatattgtaagtaaatatttgtgtaacggagatatactactgtaagttttgtactgtactggctgaaagtctgttataaataaacatgagtaatttaacaccaggacctgcaagaggcgacgctccactggacaaactcctcgcaaacgcaaatatgccaatcgccacgattcacgaaatgaacctgaacctcggaacctcctgtgctgcaagagcctttgggttcccggcatcgccctgtggcgcgatctccatcccgtcctcgccggtccgccctcgcccgggacggacctgcatacaagcgcgaagtacgagtattcatgaaacgatgttccgcttacttcgccgccgccgggctccccctctatacgaggtgggagcctactgttacggtccaaattcccccaattcctaggggaccatcccgcggaaacgtgctttggcaagcagcccttgcgccggggcgagtccactgtcatcgtccccctagaatgccacgcacgcacccattctctgtaatccacactgccggcccccttccccacattaccaatacgntcctccccgaaactcttcccctctatgatggcgggctgcgtccttctgcggtaaaaccccgagggacgcgcaacacacacacggcgcccaccgtctgttatccccacctctttggtacccctctttccgcagaagcacgccttgtgagccttctccggtacgccgccagtgtctgtantaataagaattgctagccacacccatgctcgttgacagcgctgcggaacccgccacactatagttggctaacaccggcgctgccgggccatagatgatataagccccgcccgntcacacaagncggaggttataggtgcgngagactcactcntcaccgctcccattgcgcgcgcggctcggccgcctccccccaacacttatcccacgctcccccgccgcctccctacttataccccccgtgaccctgggcatacgntttccgcgacgctcaaacaacaaagctctgactcagaggaaattaacccaccacagcgcccccgcggatcgaacggtcacgaaggctttacatgatcagcgcatcggccgcggcgacgcagcctgtgatcgagaccacgcgg

SEQ ID NO: 142339 - DNA, 476 bp, Homo Sapiens
tttttggtggccatccataatgaacacacgagaggcctttggataatttctggtagcctgggactccttgggaaaaacaaaggaggtgtcacagactcattgggaaaaacaaaggaggtgtcacagactccgttttgggaaaaaacctgtttttatcttgaaaccccaggaattaaaagcagatggatccctctcaaaatcaaatgctctgttctgttttgtattgtgttatctgatggttttgagtttggggggtatcagaaattactttgcattttgagacagctttgctgtgaaataactaggtaggaaatatactttaagggatggctaatagtagttatggagggatactttgactccgcacacttggaacagagaagcatgctttgctttgtttttcagagtcaaggaaacttttcttttgagctatttatagcttgtagcaattgagtaaagcatactgctgtgaacaa

SEQ ID NO: 142340 - DNA, 484 bp, Homo Sapiens
  misc_feature (19)..(19): n is a, c, g, or t
tttgggggtcctaggatgncttggagaggtggcaggtgaggtactaggagaaaaacacaacagacggagagaaatggtttgcttgctgtccaagagcaacgttccttttctccaggtgacttcatagctttaaattgttgctgtttaaaaagagagtggcttggagcaaagttagaagttgccgctcctgtttgcttctgacaggttatatgcccgcgccccccaaccaagggcacaatcactttggttgggtgtacacctgctctctctgttccccaagcctgggccctgtctgagcttggaggtggagcctcagggacgtcctggctcagaagatgtcctggccctcttccccaccagtccccaagcaggaatggcagaccccctctcaaacacagactcttgtcctttttctctgctttctgagtgtgtttatggggtatcttggcttataggtcagggtcaaaccgatgacccctggccc

SEQ ID NO: 142341 - DNA, 424 bp, Homo Sapiens
ttttgatgctgacagctctccagcccaggaaaggtttattggctaagcaactgtagaaggtggagtgggaaaggcacaggcctcggggctgcctccagcctgagtttgggctgggaccggggctaacccaagctgtgatggggatccaggccctagtggagctggacgccgagttctgggacacaggaagctccatctccagccagctactggggagggccggaaggtgtccctttccccacctggcctggcctggcctggcgtgacctggaagaaactggggcactggaaggagactcaccctgtaccctgcacagggccatgggtcacagcccccagggactggaaggatcaggtgtcctagaaggacctggacagttcaggaaaggggagggaagactcctttcccagcccctctcgcctt

SEQ ID NO: 142342 - DNA, 639 bp, Homo Sapiens
tttctctctaaaaagtaaatgaaatcgcatgagtaagtgcagaatgcggaaggtgtctatatcagagtcagtttgactacattgacaacagtctccacagagttttcttctgaccttttattttcatcttgatttttcacaagatgcaccatcaaggttttgggttttcgtacagcgaagcagggaccatggaaatggattcattggggaacagagtttgagtggcttctcggctgtgcccttttcttgcttcgcttcggaggaagctatttcccttgcacttcttagctggccagtcttagatccacccgcaccttttaatgcaggatccatttgggctgaggtcagtatcctccagccactgtagacctgcctcgctacaccaacacttacaccaccagcaagcgccatcctcttcccccagcccactccactccagggcactctcacctgatgcctagttccagattccggactgtcacaggaaactacccttattagaactcatccaccctgccgctgtgagtgctgaggctcggccgagtctccgttcctcccttcgagttctccattcctcagttggtgaacggggctggtgcacccctcatagccatccatacagctaacttgcctcgtgcc

SEQ ID NO: 142343 - DNA, 469 bp, Homo Sapiens
  misc_feature (29)..(29): n is a, c, g, or t
  misc_feature (360)..(379): n is a, c, g, or t
ttcttttttttatagacataaactgactntaatcaaactgaaggtttactcttggcatccggcatctttcaccctaaaaattagcaaaaactgttgaaacaaggcacagttttttccccatatttgttacgtcgtggctccagttacaaaaaaattttaatgaaaacgttaaacataaaaatagaagtttgagattttaaaaagtgtataaaaagccccacaaaacttgtcaacgttgttccttattctacaaaatagcaccagtaagaagagtaaaaggtgttaaaaaccattatgacagcatttctgaaatgcagcttgtctgaattcccgttctccctaaaaacgacttcttatggnnnnnnnnnnnnnnnnnnnntctccaaagggagcaccgagctttgcagttttccctgtcatctctcagatgtggggaaggtatgagaaatgtatgtctgtccctgactgc

SEQ ID NO: 142344 - DNA, 455 bp, Homo Sapiens
ttttttttagataaacatatttttaatggaatacctttaaaaatgcaaatcaatgcacaaagaaaacgcccatgttgaacaaaatggtgacaattgtgccttctcttcaacaccaccccaccctccagaagtttccttcaagccgtaccttcaggtgaaggtcagcgcacactggccacccgggaccacattttccagaatcctttggcggtcccgcgatgctctcgtggtcagcagctctcattgggttgcagaggagaaacttgtccgtgtcactggggcatcttaacagtcggctcctaagcttggttgtgtgcgccgcacaccgtccgcgcacgcctgaggctgggatgccgcgctgcctcgccggcgatctgtctgagttttcttcctcctggggtttcttcctgctggtggaccctccgcgaatcccggcctccggagaccgtcctggt

SEQ ID NO: 142345 - DNA, 919 bp, Homo Sapiens
  misc_feature (626)..(626): n is a, c, g, or t
ccacccaatgggagaggctgatactcaacatgcaaaccttgtgttttatttctccaggcgaagggatgttggaagacattctggaaggggtggggtgtgaagatttacaaataatctttgaatatctgcttcatgataggtcttggaggtgccttgtgggtgtggctttggggggatggttacgaggaaattgtggatattaaggaagtcaggaaaggaaaagatcagtcacaattcaacaattcagagaaagctcctaagggactttctggctgcttgatgcccagaggccaggccctcacttcgtattaaggctcaggactgtggatagagaatttaaaggggcaccaaaaaaaacattaaaatagataaacatatttttaatggaatacctttaaaaatgcaaatcaatgcacaaagaaaacgcccatgttgaacaaaatggtgacaattgtgccttctcttcaacaccaccccaccctccagaagtttccttcaagccgtaccttcaggtgaaggtcagcgcacactggccacccgggaccacattttccagaatcctttggcggtcccgcgatgctctcgtggtcagcagctctcattgggttgcagaggagaaacttgtnccgtgtcactggggcatcttaacagtcggctcctaagcttggttgtgtgcgctgtgcagatgtgagaggcacaccgtgtgggcgaacccgactgcttgcctgcctctctagctccaaaactacaatccccagaggcctctgcggtcacttccactacccaccctacacaccttctgtgtgtcgcgttaatgtcagaagcacttctgtttggtggccccggctggttaggctggttggcacccagggaggcacccaggtcttccccacacctctgcacctcattacctgaccgg

SEQ ID NO: 142346 - DNA, 1700 bp, Homo Sapiens
  misc_feature (1083)..(1083): n is a, c, g, or t
  misc_feature (1086)..(1086): n is a, c, g, or t
  misc_feature (1120)..(1120): n is a, c, g, or t
  misc_feature (1572)..(1580): n is a, c, g, or t
caggtcttttggctaaaaaggctgttgaagctggtctgcgtgttaaaccttatataaggaacaagtttatctccaggcagtgggatggttacacattacctcagttcaagtggagtattaccatatctaagtaagcttggatttgaaatcgttggctatggatgttcaacttgtgtgggaaatacagcacccttatcagacgcagttttaaatgcagtaaaacagggtgatttggttacctgtggaattttatctggaaacaaaaattttgaaggtcgtctttgtgattgtgttcgtgccaattatcttgcctctccacccttagtggtagcttatgccatagcaggcacagtgaatatagatttccagacagaacctttaggtactgaccccaccggcaagaacatttacctgcatgatatttggcctagtcgagaagaagttcatcgagtagaggaagaacatgttatactatccatgtttaaagcattaaaagataaaatagaaatggggaataaacggtggaattccttagaagcaccggattcagtttgtttccatgggacttaaagtctacttatatcagatgcccttcattttttgataaacttaccaaagagccaattgcactccaggctattgaaaatgcccatgtcttattatatttgggagactctgtcacaacagatcatatatcacctgcaggaagtatcgctaggaatagtgctgccgttaagtatttgacaaacagaggccttacccctcgtgaattcaactcttacggagctcgaagaggtaatgatgctgtaatgacaagaggcacttttgcaaatatcaagctttttaataagtttattggaaaaccagctcctaaaacaattcattttccatcaggacagacgctagatgtatttgaggctgcagagctgtaccagaaagaaggtatcccactgattattttagcaggaaagaaatatggttcaggaaactccagagactgggctgccaaaggaccgtatttactgggtgtgaaagctgttttggctgaaagttatgaaaaatacacaaagatcatttgattgnatntggcatagctccacttcagttccttccaggaganaatgcagattccttgggcctctccggtagagaaacattttctttaacatttcctgaagaactgtctcctggaattacattgaatatacagacaagcactggaaaagtattcagcgtgattgcttcgtttgaagatgatgtggaaataacattatacaaacatggaggattattaaactttgtggcacgaaaattctcatagtatctacttaccatagatacctttcataactggtaactgcaaagccttttgtgctggacccaggaatccttaccatggagcagcagatagtcccagtatactcacttatctcatccatggatgtaaatgatgatgaatcaacatagtaactgaaatgaaatcttcttgattttaaataatatacgaatggtgctattaatattgctaaaatcaacgtgtgaagtgtgttgtggaagagacctgtaagtatnnnnnnnnncgatattttatcagaccattttgtaaataaaggcagaatttgtgttgaagattcttatatgaataaccttcctggatttgtttagttttgcaccaataaaactgtgaaatactgttaaaa

SEQ ID NO: 142347 - DNA, 863 bp, Homo Sapiens
  misc_feature (52)..(52): n is a, c, g, or t
  misc_feature (128)..(128): n is a, c, g, or t
  misc_feature (207)..(247): n is a, c, g, or t
  misc_feature (354)..(356): n is a, c, g, or t
gaccggggggcgcgcatacggtcgcacttggccgcaaccggatgaagtggtncggggcgtgcgcactcacaagaggagaacggccacaggtggccccgcgccggggggggcgcaggccccccgagagngattctccctgcgtttagtagtggcgggggggcgccaactgcaaagtcaacgggcccgccgccgccacgcagcgagatnnnnnnnnnnnnnnnnnnnnnnnnnnnnnnnnnnnnnnnnnaggaaggtgctagaacgacgtaaagtggcgagcgcggttggagcgtatttatttgtctgggggaggagaagagagggattgacgatagagggttggtgtggtgttgnnnttttcattcttgaccaagccactttaatttgtaactttaatgtgcaatatgaagtcgataatccttgaaattctcacctggctcttgtacagagtgaggctgagtctacaccttcagtcttcatcatcaggagggatacctaattcttcatctgtccactgggaaggatcaggatacggaaagtgacccagcacctcttctgagtcatgccaaaagcgccagagaatccagaaccacatgagtccgctgaagaactcgctctggaacacctgggatctggtcagctgggggaactgtctataccggggctcaatgtgcacaccaccaccggcatgacggactccaccatctccagcagtccgtgcgcagccgcttctgaaaaggcggcctccaacgcgagcgaaagacgccagccgagtcagagcggacatactcgctcccgtccgccccgcggtccccagccgcctcgcccctgcctacttcgcttccccggcgctccgccccccc

SEQ ID NO: 142348 - DNA, 432 bp, Homo Sapiens
attgctttctgtttgttagtttttcttctaacagtcaggcccctcttctgcaggtttgctgcagtttgctggaggtccactccagaccttgtttacctgagtatcaccagggaaggctgcagaacagcaaagattgccgcctgctccttcctctggaagcttcatcccagaggggcacctgatgccagccagagcttccctgtatgaggtttatgtcaaccccttttgagaggtctctcccagtcaggagacaggggggcgagggacccacttgaggaggcaatgtgtcccttagcagagctcgagtgctgtgctggaagaaccctccttgtcaagatctactgctctcttcagagccggcaggcaggaatgtttaagtctgctgaaactgtgcccacagccatccctttccccaggtgctctgtcacagga

SEQ ID NO: 142349 - DNA, 541 bp, Homo Sapiens
tgttttatcacaccacccttctgagaacatatagaagatgagtcctcatctttctcacagtcttcatctatctcacatacattcttaggcatcttttctggtctcaaagatttacatggcaccattcgaaagtccccagagaagtcctcatcctctgtagtttaccacgtgccaatctgtgctctaggttttaatccactctttaataaatactctctgggccctcttttcagcatcttctggtacagtagactgcaccgttctgcgttgacgacctatcaccgagatagatatatcttccattgggaacataagcagatctcggagggggtcgctgtaaatctgggtttttctttgggcaataacattctcatagtccaggggctcaacaactttggccttttccagcaccacggagccccgcacggcctcagacacgctctgccggagctcagccgccgtgccaggcttgctgagccgtttggtgaatttgcgcacttcggccatggcagcgacggcggacgggtctcggcgggcgggc

SEQ ID NO: 142350 - DNA, 496 bp, Homo Sapiens
ttaagtgtgatggaacataagtccattaaaaccaaaggggaatgatttctcttcaaaggcacttggcatgttgttctggcataaacataacattgagaagtcccttgctgatctccctaatttcactccctttccggatgagtggacagtggaagataaagtcctatttgaacaagcctttagttttcatggaaagagctttcacaggattcagcaaatggtatggtaattttaatcttactgtggttcatatgtgaatgatatcttaagctactattaaacacttcctaattattaaatacaaaaacattcttcaatttaattttaaaaactatttgtaagtaggtatatttatatacaatcctgttttctgcaaccactcttacatgacagttatgtgctattgcattatagtaaattagcctttattttgacttaaataacatgtaataatatacatgtaataagagttatttcgtatgtttattgttccagg

SEQ ID NO: 142351 - DNA, 1011 bp, Homo Sapiens
agatgactccatgtcagttgcctcaggatggtgttggctgcattgggactacaggaaactgctaccacatcttcctgggttaaatacatgcccttaggtggacggcacttagaacgctgagaatgacggcgatgttgtaaactctgatactctcttcttccaagtccaatcttgctagtttggacaggttgttcagtattaccctcttttttggcttcttttttgggatcataatcactatcattcccatccattggatgtgtttcttctacatcatcatcactgtcagcctgattatgtctattagctagtttacgagcctggcgatccatcaaacttgtcctagagcgagtttttttccaagaatagtaatattttacaaggcttgcaattgtcttgtctggaagcatttgctgaatcctgtgaaagctctttccatgaaaactaaaggcttgttcaaataggactttatcttccactgtccactcatccggaaagggagtgaaattagggagatcagcaagggacttctcaatgttatgtttatgccagaacaacatgccaagtgcctgttccacattgtagccatgcttttcctttgcaattgcaatgtattcatccaatttggcatctgggatactgtgatatggagaccatacaagcatccctccattgtctttatctgtgtactttgtagcacctggatcaaattcagggatccgagcttggtattcggctccgactctcatcccaacatcgtgctcgtcgtcgctgctgcagccgctctcgggctctgagtagtgcagcccgccgttggtggacgaggcgccgctgccgccgccagcctgccgggctcttggcgctgccgttggccgatcggttcttccccagtaactcgggccctttctccatcatgccgggcatggtagaacaggggagggggaaaggtgaggggaagaggcaggcgtcagggtgaaggcggagatggcttagagcgcgggcgggagggaa

SEQ ID NO: 142352 - DNA, 434 bp, Homo Sapiens
tttttgatggttaattctgcagaatggcattttatttaacagacagcatggacttcatacatatccattatcagtgccttgaaaaccaaacaactttaaaagttagcagcagtttctgcaagtacaaaaatacacatttattacataacatatggtagtaaaatttgtcaagatatattatacaaactcaaagcattttagataaagcatcagtctaatatattatagattgatggagtataataaaatgacatatagtctgtcttcaaatcatacaatataatactttacagcaatattaacaaactattcacattaagaattacaggagtatctaagggaacacagatagtaggaatggttattaaaaaacctcagcaactattttcttctatgcttcaaattgggtgaatgattttttacctgctaacatg

SEQ ID NO: 142353 - DNA, 594 bp, Homo Sapiens
ttttttcagctatgacaatcacatgcatttttagtaggacgaaaaaagaaaagagaaataaaacagatctcattaacagaaagcaatgactgggaaaaatcacagtcgacttccatttatatcccatgggtcgaaattgtgtgatacggccacttcttctttatttcagagaaggaaagaaaacaagtgaccttgtttaatctccttgtcacctgcaccttccagtctttgcaatctgaaaaacacattccactagtcatgaacatcctcttgactgtacatatgctccaccttaaccttgtatctcctccaggtatttccatgctgatttgttctggtctgacatctcctttgtgtgccaggatttaagttaacctttcatgcttttataacagatgctatatacgctgtagtcaggcatttggttaattgcttctctgatggagagaccatcttcagttgcaaaggatttaaaaagattcaggaaatcaacaataggtaaattatgagaggatcagagtcttccctgacatgacataagatagatggaacactagctgatctcaactgctagaccagtgtacactcctttca

SEQ ID NO: 142354 - DNA, 555 bp, Homo Sapiens
ttttggtgatctctgtgcagaaatatcttgcagcagtgcggagcctttggttttgagttgcaaatccaattcatgcagaactcctgtcactcctgtcctcagctcttccatttgttccaatccagacatgagactacgtttgaataattcagaccctgctagtataatgagattcttgtagttctccaacatcacatctctgtagagatctctctgggcttgatccaacaaagtccactcctcctgggtaaagtccacagccacatcctcaaaggtcactaagtgctgagaagaatccatcagtaatccatcagtaacccagccactagccttggcttctcgatgttcctgtcatgaagacagaaagtgtcctggaaaaaatgacctggtcgcagaggctggtgctggggaaaccgttggttcagctgcggttcctgggaagggggtgccgctctgatcacgcgcacttctgattcccctctcggggctcggaagcggctgagggctctggacccggtctccgaggcgtgaggcggtgggagggtcggcggccgc

SEQ ID NO: 142355 - DNA, 570 bp, Homo Sapiens
tttttcatacacagatattttattctgatagtcatctaaacaaaaactgaattctgtgtaaatattcaacatgcgagtctcatttatggacgacgtgcctacttgtgagacctctctgtgagtaagcatattttgaataggtttagaatgttccccaagttcatgaaactcagaaactctctcctgaagggtggcttctcttgggcatagacaaggagaaccttgtctccaggttcttcccattgtggggtggctcttccatctcatggcctccctgactcgtgctgcggagaaccggcaatcatcctcctgcatcttactctcttccggccagcagattgttttccccaactttattccgctttgcagctatctttttggtgctacatggtcttctggtctggtcgcaaaggctggtgcaggggaaaccgttggttcagctgcggttcctgggaagggggtgccgctctgatcacgcgcacttctgattcccctctcggggctcggaagcggctgagggctctggacccggtctccgaggcgtgaggcggtgggagggtcggcggccgc

SEQ ID NO: 142356 - DNA, 635 bp, Homo Sapiens
tttgtggtgtattaacttaaatttatttctcacagttctgggagctgggaacttcaagatcaaggtgccagtagacttggggtctggtgagggcccacttctgttcataaagacagtgctttcttgctgtgtcctcacatgggaaaagtacaaggcatctctgtgggtccttttccatgcagcccattcatgagggttccatcctcatgacctaatcacttctcaaaggccctatctccaaataccatcacatttgggatttgtgaatgttgtaggggacgtaaaccttcagttcatagcagctttctcagctatattcaaaataccctacatattttagaaattctctatttcaaaacagtttatgggccactttacctcagatttccggtatctcccaaggacgatcatcttcctttcaggggtttcttaaaaggtgtattacttagacaggataattattaagacaagggtaaggtcttgcaccagcaattaagaaatactttgcctacccatttgtgtctaaacttcttccagatcatgaagctctttgagattatgatgaaagttagagactatcttttatttgtttagtcatttagtaagtattttttaggccaggcacagtggctcat

SEQ ID NO: 142357 - DNA, 642 bp, Homo Sapiens
caaaaacatggcaactgcagactcatctctgtcaagcattccatcatggtcaatatcactcaactcccaaactcttccaaggatatccacaggtaacttagagttgagcaacactggtttcactttatcaccagacagaaatccattcactgggcttaaactatcaaatattgcatcatatttggccttatcttcaggttttacagcccatgggagctcagctgcagaggttccactgattagcaaaggactactggtatcatgaaatcttggtggaggaacagccaggttcaaactacttagtgaaacttccaatccattctgggcacatgccacaagacgcaaagcaacaaagaattcttgtttgttcaggatacctttgccatctgtgtcggctaaatcccaaatctttccaagtatcaagtctggaagccctgattttttcaggaaagcagcagcatcagaagccaacacccttccagtattgcctgtatcaacctgtctatagtatttttcatatacaggattcccacttgataactgtgtcagagagagctgggccgccgcagccatggtgtttccatcatgcaagggaggggaaggaagacgggctgactggggaacggggcggggaggaggcgg

SEQ ID NO: 142358 - DNA, 496 bp, Homo Sapiens
tttatgtagaatgaaaacttttttctggaaccctaaaagtgtcgtgggtcctgggggctacgcctcctgtgcctcctgggggtcagtctgctcactccaccgtacattcgggattactcgccgcagcacggtttgggagagccagaactgggcaaagcccagctgtgcagggataatcagggcatctgtgatggagttctttgaggcgttacaaagccaactagctgtgcttgtattagggtggagagatgttgaaagataaatccacaggttaaaataaaccccgaccctgagctcactttatcgttattcgatccgaggggtcgatctggagcatcaagggcagaagattcctgaaggtttccacatccgggatctgcttctcctccattgtcttcaggacggccttcaggctgcctgggctctggcggagggacttccgcagatgcatggcttctgtgccctccacaccagcctggggcttgtgcatgagaca

SEQ ID NO: 142359 - DNA, 860 bp, Homo Sapiens
  misc_feature (91)..(91): n is a, c, g, or t
  misc_feature (130)..(130): n is a, c, g, or t
tagaatgctggtacctccggccatttttaataaggaattatcttcctggcttgagaggcattcagacacgtaacaagaggaacaacctcancaatcacttgcagtcccctagagcaggacatttcccagntctaatcatgctaaatttttactaacttgaccttgtaagctaaggccagcaacatctaagtttttctgaacctcatccccaggacagagtccatactcctaagcctgaagacatccaaatgccatctctgagagttcataataagcccccaaacttcttattgaagactaaatgagatgattttgaggaaatgctttaaccgtgtttcgctcattaaataatagctaatattattattttactatgaattggaatattttcagtaactttaaaacattatggggccctgcctacataagattgtattgttctcttaatcaccaaagcaaaatcttgtagctccattgtaagagaaaaggacagttcttagagctttgggcttagtaggtgatatgatttgaatatatggccccaccaaatctcatgttgaattgtaatccccagtgttggaggtggggcctggtgggaggtgtttggggcggtggggggggcagatccctcatgggtttgtgctacctttgcaatagagagtgagtttttctgagatctggtcatttaaaagtgtgtggtgcctccaccgctccatcttgctcctgctctggccatgtgacttgtttgctcccccttcaccttcctgaagcctccccagaagccaagcagataccagcaccatgcttcctataaagcctgcagaactgtgagccaattaaacctcttttctttatccatt

SEQ ID NO: 142360 - DNA, 574 bp, Homo Sapiens
ttttttttaaaacaaggaaagaaagcatttaatctgcgtaaatgagaggagataggaatgtgggtagaagtatctgttttcactctgccttgtagtgctgccaagccacgacagtgtttgagcggaggctgcaagaggcagggaagtggagcaggtggatgggccgctggcttccaaggaaaaccagccttcagtttcactcagtggcctccttgaactgagaggcattagagggtcaggcagggtaatgacagccctccatagtcattgtggtcttgggggtctcagctctggtcattaaatctcaggggtagtccagcccggggttcttgttcttaatgttgctctttctgccacaggagacaaagccttcgctgagcaggctgccttgctgggtccttgcagagcttccagacttgcagtgtgggtggtggctagctctggcgtcttctgagtgcagcagcatcttctttggggtgggccaggatgtctctgagcatatccacttcagatccagatagctggggttgctggtgctcttggagacatctctggtacatttgctgaatgctta

SEQ ID NO: 142361 - DNA, 458 bp, Homo Sapiens
ttttaagttggttttccaaaccttgcctcaggactttattggatctttcaaagcaaggagaccaatgagtgtgtattttctccagcacatgggctcaccctggacttgaatcccaacccaggggagtctggaccacagggccctgcacctgcatgctggctacgccctgcctcgggagaaggccagcaagcgctgccctctgttggcgttgtggggcccatcttcgagcatctgctctccggcaatgtggccattgttctccatccagaaggccctctcttcctcccagagggcattctcttcctcccagagggacgttttatcttcccacagggctttctccccctcaaggagggctctttcctctacccacagggccttttcttcctcccacagggccttgtcctcctgaagaaggttccggtctctttcccataaggcattgtcctctttccaga

SEQ ID NO: 142362 - DNA, 293 bp, Homo Sapiens
gcaaattattgtagttgctattatttttgttttgtcttttaacccttcctaacaacgaaggttaaaccataagtggtttatgtcccacaatcactgcattagagtatgttgaatttgcctggacacttactttttcctgtgggttttatatcttcagatttttttcatgttacccagtagcatccttttctctcagtatgacaaactctcttcacctttttttgcaaggcagatctggttacagggaattccctcagcttttgtttgagaatgccttcagatttccttcattt

SEQ ID NO: 142363 - DNA, 779 bp, Homo Sapiens
ccctggggtctgtgtttgtgtctctcttcccccagtcagtctaaccctcccgcttaatgctgagaaagggggaccctgtggttcccctggacaccttggtggtctcagccacgctcaacaagtgagtcttggctccccccagtacccttctggtgcaggaagcagcggagaaaactagtagttcagagctaagaaaaaccagacaccttgaagcgaagtgtgaaagtggagccccacgcctggaaatgactgttcttgtggccacagaaaacagcatttagaaaagattaaaaatagaggtgattgtcacagccttgcttggtcctttagcagtatgagcgcaggaaactgacttattctcaccggaaggatttttctttatttaaatggttttccaggaagcctgtcccctccccccgcacgggtgggggcagggttggaggcccatgctgtacataaatcatgttctcggtgttgaaccagttgactcagcttggaaagtggggcctgctgctttagggggagcccggcagtgctcctgagtgtgcctttaaaccgaaaaccttcagacttgatttgaacaggaatgtgttttccgaagtggagattcaagcttgtaattcctgccccatcaggatctcccaatccaccctccttatgaaatggggtcaagggaagggtccccaggagggaaggttggttgtagtctggtgtagggcctagttcatggacagtcagtgctgaaaggggctccagggtcaggcctttggcccaggact

SEQ ID NO: 142364 - DNA, 260 bp, Homo Sapiens
attcccaaatacatagctccaacccccaacttcccccagactttagatctgtattggtattacctactggacatctctatggacagttccgtatagactcaactcatctgcccaaccaagtatgttcctcctgaattcctctcctggttacttcatcacaatctacataggctcaccagctagaaacatttatgagcttacattccttcttcccatatcttatcagcatatcatatccatttcactccaacactctgtct

SEQ ID NO: 142365 - DNA, 717 bp, Homo Sapiens
tttgagatttctgtaaaacagttttaaaaatacagctattttaaaagatcgcacaattaatacactgaaataaagcccagacatgcaacttgttacatccatcaccatttttgaaaggacagttcctgaggttggactcaccggcccaagtactaccccctccccaggtctccggcggcaactgtaagtcaaaagccctcaggcattattgcagcgtcccacattgtttgaggttccaggaagtcgctgctacgctcacttgtaagtcttcgtgctgttgtaaaaattgaggtcgtggttttccacgcgatttggctggcgaagagaccacgaagccaccccccacgttttcaactgagtaaatatctaaatatttttgcttgctatccagatcctgggttcgaagtctttgggattagaaacttccaagcccatttcagaggcttcctagtccttgggaggagtgtcttttaaagcacctgccagccttaagttcgcgtgctttcggaaaggggccgacagggtgcgtctcaggggagccttttgaaatgtggattgagaattgtgtgagtgtctctaggaacctccattaactccacttttcctgagtgtagctccgagcctggccacagcggatgctaccacaagccaggcgcagccgggcctcgggagaaagccggtagcccgagagggtagagggcgctccgggagccaaac

SEQ ID NO: 142366 - DNA, 451 bp, Homo Sapiens
  misc_feature (199)..(199): n is a, c, g, or t
ccgtcgccgggggcagtccgccgtagggattcggctaactagagcccgaggtcggcacccctgagctggggccgaacgggggtccagggctgatgcggggtgggggagaggcgttgcattaaatgcgatgagtgggtttggggggaggcctgcggagacaaaagcagcaggtggggtagccggggagcaggggctcccnttaccacccaggtgccaagggggaatcctggaagtgtcccgaagccttctttaatgaaaatctaggggactggaggctggttttactttccctttacttttggggggcgaggttgcaactgtgatgctttgtgggcaaacctaacttacggataggccgggggtctcaattctccctccaggggattgcctctggggctcccggctgccctgcgggattccccgaaggagccagcgccggggccagggaggg

SEQ ID NO: 142367 - DNA, 541 bp, Homo Sapiens
atgaggttagatttgtagctaaaggttttcctacattcaccacactcatgacgcactcctccagtgtgacgtctctggtggtgaatgaattcagatttatggataaaggctttctcacgatcactgcattcataaggcctttctccagtgtgaattatcttgtgtaagattaggtggcactttttgctaaaggattcctcacattcactacactcaaacatcttttgtccagtgtgaatttgctggtgctgaacaagtgtgttcttgcaagtgaaggctttctcacatttgctacactcataaagccctccttcagaacagacactctgatgctgaacaagtgtgtgtttgtggcttgaagcttttctgtattcaccccacttgtaataactttttgcattgaaaaatgcctgtatatgcttgctgctgctactgtgtggctcctcaccactgggagtggcttcgtgttggagtaggtccgtgggggctgggaaggcctccccacaggtgaaataattcaacacatggaatctgcaaaaaa

SEQ ID NO: 142368 - DNA, 645 bp, Homo Sapiens
  misc_feature (198)..(248): n is a, c, g, or t
ttttcagcttattttaacacatttaattttttattgaaaagttacattttaatatcttaattacaacatgatagataatttatattcattgtagaagttagaaaatttggataagcaaaaagaaaacaatcacctgtaaaactacactcagaaataaccatttaacaatttggcacatatccttccagacataatatnnnnnnnnnnnnnnnnnnnnnnnnnnnnnnnnnnnnnnnnnnnnnnnnnnnctcacttacatataccaagacatcctttcatgtctttatattattctatcatcattttcatggctgagaaggcagtaccccactgtagggatggaccctaacaatcactgtgaaacatttaggttgtttacaattttaccatataatgatcaatagtactggctctagagtcacactggttggattcaagtcctggccctaacacttaactaactcaggtaccttgagcaagcaacctcatttctctatgcctgttttttcttctgaaaagcagaaatagtactacccacttcatatgattaccgtggggcttaaaggcattaatacacagcttttataatcaacaatactgcatctagtatgctcacaattaaatattcacacacatctttactac

SEQ ID NO: 142369 - DNA, 654 bp, Homo Sapiens
atggtggatggagtgatatatttctctactcaattgatattacttctagaataaggaatcaaacaaaaaattacaaaacactacatgcatttacaaattctcatgtacaatttctacaaacttgcttaaaatgcagagtataaaacccaaatttctcagcttatgctaacacatttaattttttattgaaaagttacatcttaatatcttaattacaacatgatagataatttatattcattgtagaagttagaaaatttggataagcaaaaagaaaacaatcacctgtaaaactacactcagaaataaccatttaacaatttggcacatatccttccagacataatatatttttgggtttttttaccaaaatggaatcatgtttttaaatttattttttctcacttacatataccaagacatcctttcatgtctttatattattctatcatcattttcatggctgagaaggcagtaccccactgtagggatggaccctaacaatcactgtgaaacatttaggttgtttacaattttaccatataatgatcaatagtactggctctagagtcacactggttggattcaagtcctggccctaacacttaactaacttaggtaccttgagcaagcaacctcatttctctatgcctg

SEQ ID NO: 142370 - DNA, 311 bp, Homo Sapiens
gggtatatatttacatttatttgatttcaactagcaagagactaagactgatgtttgtttgtttgttttaccttcaaagtcttagtcttaaattgacaagggcacaaaaaaagtgaaattaaaataattttaacaaaagggaaagcatttgacagtgtttaaaagacagacaaatcaagcaaaactcaatgtggcttaaggtaaaaaatacaactaggtattaaacaatttgtaaaaacttacaaagaaaatttagctttcaagaaaaattaggcagatttccttctgccaaagtgaacaggtccttgagg

SEQ ID NO: 142371 - DNA, 952 bp, Homo Sapiens
cccggccagcacacgcgcacagccgccacgccaccctcgctgggccgtcgggcagcacacacacgcgcggctgccgtgggccggcccacacagggtcgggggcagggaggcggcgcagccacccatcacgagctagataaatacacgccgtgcgtacaaacaccccccaccgtgcatgcccccgagtcacacacaggaccacaccacagcaacgtgctcatcctgccacccagtaccgcccccgaaagggacgtacataagaaccgcatacagaaaatagcggaccacgctggcgagacacgtcggcaacctccaccagaaaaaacgcctgagggcctccaccttacatactcccagcccctcctcactgccgtctccagggtgaaggttcgccccactcgtttgcttcgtctcatcttcggaacttaaacacacctcttcacataggaacacctgcacagtactgcgtgtccccctatgtctcaatactggtgtacaacttggaggtgggtggcttcgtccagagctgaccaccctgacatagatccatggcacctaagagtaaccgttcccacgtttttaacaagacatttattctcagccgcaggaaatcacgaaccgacccctccatcttcatttacattgccaagggaaacgtagcaggctgcaggaacccagcacagcagtgaagggccgcagcctaggcaccgtcacccacgtttccctcgcacgtcccaggtcctctcgagcagcacaggacgggtgtggagcaaacccactcacccttgcccatcccttcccacaaacttgccagcgatgcctagaacagcacaggtgtcctttctcagattgtgcccccactccccttccccattcctggcagaagaaaatgcaaaagatcttctgaatatttgcccatttcggaaagccacaccatcaccacataaacttc

SEQ ID NO: 142372 - DNA, 505 bp, Homo Sapiens
gcggccgccgccgcttccggggactctttgtcgccgcctggttgttgtcgttaccgctgccgccaccgccgcctcctcctggggactttctccgcctcttttcggcgctgccactgtcactgctgctgctgcagcctccgataccgtttaacagcctttgcagcaggtcagagaagcgctgcatttcagcagccgcggcctcatcgtcatcgtcccctctccacaggccgccgctatccgagcctccgccagacgaggagagaggccccggcgagctaagcccggggtccaggtgccagtccggttgcctggggtccaggagatccgccagttccagcccagacagaaagtccatatcctccgtctcttcccccgggaggctggcgatcgcctcctcctccatctcctcgggggagggcgcgctcacggccacgccgccgcggctccccctcccggcttcccactctccttcgtcgccaaactgctgcttgcggccgggagatcc

SEQ ID NO: 142373 - DNA, 560 bp, Homo Sapiens
tttttcacaagtatcttaaattatttattgaatcctaactatgtgtactcatatttggtatgtagctcaagataagatgaagagaaatggtccttgatttcaagagaaggttttcttacatacttcagtataatcagaggagtctttggtgtcagaatctgaatgcaggcaaagacctcctttatagcttcaacattcttctcatttcacaggattggaactatagattttcaaagctaattgtcagtgactatcaaagtacggatcctgaagatggggctcaagagctgctaggagtcaatggggagtgcccacaggacagacttcaccatactttaaccagagaagatacatttgaattgaatgtcctttaaaaagagggtgtccctatctttgaatagaaaagaccatccttattgggctcatgtcagctttcactggcagattgagagttccagttgtcagaggtctaaggaattatgactccctccaaacagctccatgactgctcccttttcctcatccttcataccctcatggtctggtcataatttcgcaat

SEQ ID NO: 142374 - DNA, 553 bp, Homo Sapiens
ccacctactgtgggaaatctttgggacttcaagtcttgaggtaacagaacttggttgcagctattatttacagtagatccctgtgggatgttttaattgaaccattatttttagtttagtcatttttaacctcaccaacttaactggagttagtattgtgaaagttttcagtgtttaataagcatcaaagtagcatattttgactctcggaaattcactagactatctgtttctgctgttacctgattatgccatctagttgattaggaaaacagtttttaggtccttgaggcagtgcagttgcatttatgacagtagtttatctgaatttttataaggataatttaatgggttaaaaaatgtggatttaatgaggaccttcataatttttccatacttgaccacagatgaaagggaatttttacttcacattggtatgcgaagtagtgcctgctggtaccacttatatttttgttaggaccagtaggaggcaccaacatccatggtgtaacctacaccaaacctaacttttttcagctttcatcttttcaaa

SEQ ID NO: 142375 - DNA, 473 bp, Homo Sapiens
tttattccttaaaacatcgctttattgaccgtgcacagttattaacaattcacatttcactttatctactgagtggaagagcatttattctttcattaaaaagttaagccctccggggcagcagcaggaatgcagaaccttcttcctataaatggcattgcccagtgactgtgaagtgcttctctattaatacaaaaaggataaataagacaaatggacttctccctccctccatcatctccctccctgctaatatgctcttcttattttataaaatgccattaagcaaacagttcccacactgatacttccatcaaccaaaaggggaatgtcaacatttatttggcaccactgaattcagaacatccttagggctctgtacaagtgacaaaatgagtatcaggccatggtcatttccttaggaagatgctttatgggaagagagggtggaaaatcatgagggcatcagtcag

SEQ ID NO: 142376 - DNA, 424 bp, Homo Sapiens
  misc_feature (208)..(226): n is a, c, g, or t
atgctttggggaatgcaatgtatgatttgctagctctctcaccacttaactcactgtgaggataaatatgcatgctttttgtaattaactggtgctttgaaaatcttttttaagggagaaaaatcttcaaccaaagttatgctcatccagacaagctgacctttgagttaatttcagcacaactcattcttcagtgcctcatgactgnnnnnnnnnnnnnnnnnnncgaaagcatcttcacaatgaagcttccagatagcaccgttttgctaaaagatacattctcattgttttccaacagtgatggcttccacataaggttaaacaaactaggtgcttgtaaataatttattacagtttactctatcgcatttctgtaacatgaaatgcatgcccttcttcaggggaagactgtggtcaagtt

SEQ ID NO: 142377 - DNA, 698 bp, Homo Sapiens
tttattggtgaaacataatgtttttaatttcacacctcacagagcacagttgaatgcttcataacgacataaacaaaagttaggctaagcactgcagacgagttgggagggcaaagatagcttcccctgtggtctgcactccaggtttgcgagggaatatgtaactaacaaactgcttggctaaggccacagaaatgtgtttcctggtgttttggctgctgacgccagtcttctctgacaaagatgtgttaacactgggtgcaacaaactgaatctctttcctaagatcagtcaggaaaattcatgtcttatttcttcctggatttctttttggtggtgtcataagcacggatgacttcttcctgactaacagctccgtgttcttcttgagaaaaagcatacccatgcgggacgccctgctgcagggagctgccccggaacagcgtcgggggcgtcttccggcccagcctcttgatcaggcggtcgcgctcgttcagcctctttccattgctatcccgcagcaccggttttcccaggactcgagacttggtttccagctcctgcacctcctccagcaatgtctttttgcaggtgtgcttggctgctctccatgccacatcttcaatcaaaccggcagtaggaaccagaaataatcccaaccagaagtgtgcggagctcaggaccatagttggctggct

SEQ ID NO: 142378 - DNA, 1876 bp, Homo Sapiens
cagccgtgagccaccgagcccagcccctccttaaaacagtttctaatcagatccgttattttacccaaatgggttgagggaacaaaaaccaaccctcatcaccctatttggtgaaaataaatataaaaaaagatgatcctctcttaaagggtcaccttccttcaggggtttgtaaggctcagcactttaaaaagcttgaacagaagtccggtattgccactgtggactgtttttgaggcaagttccctaatgtggacagccccacacctaagagcagcagatctaacttggaacgtctcaaccatgggttaaaatcagacgggatgaaagaacacctgcagtgactctcaacagctacggaagtctcacattgcagggctgactgatgaggtgctggcttcttattctccggccctctttcctaagcaatgtttgtcagggaataccaggtccgcttcctgaaatgccagggcccctctaggaccttatcattccacagccacatcagtaataggaaaaccaccaatggctacctggaggtggcaccaacttggaaagggaaggctgggcaggggtttggacactaagcccatgagctgtttggacaacttcaatctctggaattgagtttaaatttctgtaaacaactttaaagtcaactctagagagacattttgtgtgactggtccaaataaaacagcacatttaatgaggtcatattcttcttaaactttttaagagaagcaaaaacaatggaaaagccattaaaatttacacaaagaccattaaaactctactagtgtcaattaaaacaaagccaataaaacatgaacaacttcaaagttaccatcactttccacactgttctacagttataggaatatattcaagcaccatattgataataggtaggtaaacgatgaagtcctactttggcggtctgacccacgctcacacaaacgaggagcttcctagtcaagatgcccccagtccttggcaatgtgcctgcttcctgggcattgctcagtggcaatggaagagccaataaatcaaatcgctggtggaatattttactttgaaatggagtgatgtttggttaataatttgagatccactaatcctaaatggggtgacccatttaaaatggcctctgtgtaaattcacagttcattaaatagagtctggtttgaacaggtcattatgtagttagtatataagtaatggattgagcaaggatggctggggatacccatggggacacactggctgagtctggtggctttcataacactgtcaagctttcttttaatgtgagattcatttaaatcaccaacttaaatttaggtggttttgcttagtaacctcttttggtttacagtagaaaatgcagtgcaaaattttaaatgaggaatattccatttacattaatttaaaacttatgaagctgttttaactggcccatctaaatgtgttaattaacatcatgatggtttcttatttttcacactttgttactctgatcattaacagtgatggaaaagctaaattaagttaatggggaacggattataaattcttaaaggacttcttagtttgttttcaactggaaaatatatagagaaagatgaaggggcatttttgcctctactcatcaatttttggtaccaatttcttaaaaaccagatggtttaaagaaaatttttccaaaattatgttaacattctgctcagacatggctgctaaaaaaatagcatatacacatatcatactgaacagcttctgcagtgcctgtaactctcacgacgcgtgggtcgacgatatcccgggattccggaccggtaccagcctgctttttttaaccctggttatatgtcct

SEQ ID NO: 142379 - DNA, 764 bp, Homo Sapiens
  misc_feature (303)..(311): n is a, c, g, or t
ttctacttagaggactggggggagatactctattctttctactacatagaactgaaaaccatagacaaaatatatcaagcaactatcagaagactctgaaaaattcagaaaagaagtaagactacacagagacctcagtactcaaggtatggcttcgaagccattccttgctctgcactaagacaagcagaggggccatcctacttttctccacaaacaaagcatctgtggaaattgctcttagcaccccccgacttctaactactaagtgaagggataattgtgacagataatattgccagnnnnnnnnncaacctctttttgtatgaaaatctgaacagctccatgagtggtccatataagaaactgcatagaatgttctgtaaacaagaagatataatgctaaatggatatgtccctaccatggaacttccaaatgcttgaagcaaaaatggcaaaacattgtcatttttcagcgtcccattgctgagttgttttaatctcttttgatgtgatttgccattgtagtggatttgtgcttgagcggctgaattcagctgaatgttacatacattgcacaaagtaaagttggtatgtttcttttctctttctggtttttcttcaaagtcatcaggtattaattcagcctcactctcgccatcgtgtacacaggtgaaatcgcggctgggctgagctttcggcgcccccaggagcttttctctccttcctcccaccgagctcttcattctcctgctggcggccgc

SEQ ID NO: 142380 - DNA, 393 bp, Homo Sapiens
ttttgtggttggacaatccttcgaattattagtttctgatcccagactgtgcaaatgaatagacatgagttatacagagtagactgaagaaaatcagggtgacaaatattcaaccattaactctccaaaaaaccactgactttagccccacataaaaagattcagatatattttgacagagattttgctcccagagattaaagtaagatcccagggcaaagagaggagtgggagaggcatgcagaaatcatgtgggagagaaaccccaagccctcactagagcctgcatgactactatgcccagatccagggcactgcggagaagctaaggcagagctgagttgatcctctcgttgtcatcctgcgggttcatcagtacattctttcctcgtg

SEQ ID NO: 142381 - DNA, 412 bp, Homo Sapiens
  misc_feature (360)..(360): n is a, c, g, or t
tactgtgttaagtacgtttatttgaatgatcccaatcaatccctgcttatgagctaagtacgacatattattacccccattttactagtgaggaactcaggctctgcaggtgaagtcacttgtcctgggtcacggagcaatccaagcctaactccagatttctcttcttagctatgccatatggactctcggaactcagtgggactcaaagtttgaggaaggtgtttgatgaaggaaatgaaccccttgcctgaaaaatatcagattctcgagcacgaaataccagtccctcacccccgccaccctgatctaattcactcctactgccatatgggaaatagaatgctcagaaggaaagcnggcttgtctggcagtcacccggcctagactctaaaggcaggctcctatctcg

SEQ ID NO: 142382 - DNA, 881 bp, Homo Sapiens
  misc_feature (193)..(193): n is a, c, g, or t
  misc_feature (208)..(208): n is a, c, g, or t
  misc_feature (215)..(215): n is a, c, g, or t
tgccagcaagagccgatctgtgcatgcattccatggctagcatttagattgcagggtggctcgcagcctctgtccggaagagtagctctctccatcatcatattagacatcagggccaatccacggtcgcgggggttgggctgtctgggctcccacatactgtgtattgctgatgcatgtgctgccccccgcntatgtgtctgagtcnggcctcntctgatcggctggacagaccgaagctcaggatgccaaggcctgaggctgtccttcacggaccacaggaatacggagtggcgggcgggcagagatcgggtgaagtccgaggcgagtggagaactgtggctgagacgtgggctctccagggagccaaggccactcccggggcccctcaggggctgtgtttgtcaggagaccgtggtggtctttatcctcccgccgggctgcgtgcacgtccagcctgaccggttgattaacaagtcgcagccttccccctccagacacggaagcatgtcacaccactgcttggtcttgatgattcttgcgtccacacaggcgggccgggctctcgtggtgccggcgattctggccccctttctacacggcacagcgggcggtctgccgggcgatccgtcctccgaggctggctgctgtcccggtccaaggtcacaatctcacaggtgccggcggccagctgaccttctttgaggaactgcgcgtggatcactaggacgaggaagcagcagagcgcggcccctgccagtgcccagagcgccttcaggagctgcatcgcggagtcccaactcggccgacgcccccgaagtcgcgcagcgaaggtccaggcgccgcatcagcgccccgccgggtgcagcctccgcggccgc

SEQ ID NO: 142383 - DNA, 352 bp, Homo Sapiens
  misc_feature (143)..(143): n is a, c, g, or t
caatgtgggaatagccttcttttatttaggaagtaatgtgaagtcagtttcatgaatagatcttactttaagcattcattgaggtttttggcaagaatagagtacggtatatgaagtgttttcctaatctccctgacaccagnaataatctagggctcattagagatgtcaaagatctgttctagtttcttaacctaaaacaagagtgttttagttccattttataggcggggagtctgagccaaacatgttatgtcacttttcaagtctccatagcacagaagtcttctgtctcaccatcctgactttcccagctcatagggactgtcaaaggcagcagctctggccggct

SEQ ID NO: 142384 - DNA, 494 bp, Homo Sapiens
ttttttttgttgggagtataaaaataggacttttttccttatcacatcaattatcaaagaaacagtacgtaacaaaaatacaaagctctggtggatttttttgtcttttgtcccccccaccaccacttctacccaacagccccttgccagggagcccttggctgaagcctggacgctgtccctgaggtgaccccagggctcaggagaaacggtggtccaggtctctctgggggctagcagagtatgagtaggccttgcccaataccaagcggtcccggagcagcttgaagaaggcatagtagttgctgaagaggatgagggccagcgagatggtctggtgccacttttcagaggacattagggagtacagctgatagacaatgacagcgccctccagcagcaggaggatgttgaggatccgcaggggtttgctgaaaaagaaatggaagcggaagtgggagacgtcagaggggatagccacgttgtagtggcta

SEQ ID NO: 142385 - DNA, 554 bp, Homo Sapiens
gcggccgcagggcagtgggcggtggcttctcctgcagcggcagcacgcgcagcagcagctccagggcgcgcgggtactggccggcccgcaggcagccgaaagcctcgcgcagctccggccgcgtgaggaagtccaggaactcccgggagcggcgcacgcagcggatggcgtagagcaggcccaggtactcctgcagggcgcgccgacgctcacagatcatctcctcagcgaagttcccagtcaggtgcttcctgggaaactccacgtcttcgatctcctccctgaacgtcttcagcagcgctttctggagcttcgcgaagtcggaatagcgccgttccaggacggccttgttgttgtcaaagctcccagtctggatgacgatgatttggtacaccacaaacttagagacttttctctcctcgatgcgagctgaagcgatctcaaagagcagtttgacgtgcttccagcggcatttctggttctgccagtactgctgaagctcccgcgtggtcatgctggagttggaggctcaggccactgtgtgtgtctaagtg

SEQ ID NO: 142386 - DNA, 779 bp, Homo Sapiens
gagcagctgctgcaagatgccttcactaggctcagggacatgcggctatcaatcacggggaccttggcagagagcattgtggctcaggctttggcaggcctgagtgcagcccgggatcagctggtggagagtctggctcagcaggcaacagtgacaatgccccctgccctaccagcaccggatggaggtgagcccagcctccttgagcctggggaattggaaggtcttttcttccccgaggagaaggaagaggagaaggagaaggatgacagtcctccacagaaatggcctgagctcagccacggtcttcacctggtccccttcattcacagtgctgctgaggaagcggagccggagcccgagctggcggctccgggagaagatgcagagccgcaggcggggccgtccgcgcgcggctctccgagccctgccgcccctgggcccccggccggcccgctgccccgcatggacctgccactggcggggcagcccctgcgccatccgacccgggcccggccgcggccgcgccgccagcaccaccaccgcccgccgccggggggcccccaggtacccccagccttgccgcaggaagggaatgggctcagtgcccgcgtggacgagggcgtggaggaattcttctccaaaaggctgatccagcaggatcgcctctgggcccccgaggaggacccggccactgaggggggcgccactcctgtcccccgtacactgcgaaagaagctgggcaccctctttgccttcaagaagcctcgttcaacgcg

SEQ ID NO: 142387 - DNA, 552 bp, Homo Sapiens
ttttggctctcattccgtttatcatcagtggcacaatttcaagtgaagtttgtgcaaaaagactctcttcattcaacgatgtgcacagaagaggggaatcccaagagtctatttgctacctttatggcaggcttcgagatcagagtgtcctcccgcagccaaaatggcctctttgtccaatgtccaccacactcctggcccagatccctgaagtcagtcggtgtcacgtgcattcagcatgctaggtttatttatttaaatatgcgaagctcctcctgcaggtgccccaggattgtgcccccatgagttttgggtgcccagtttcatgttgagcagcagagggcgatctgctgcaccttgcccaggtccatcagcagctgcttgatacaatgcttgagctgcggaagcctggccagcggctcagggggctccagttccccagtgtagtccagccagctctccaacacatccaactccttctcaatggagtccatcctgttgcgtaacttcatcctgaagagattccactatgggtcagcaggttaaactgcc

SEQ ID NO: 142388 - DNA, 607 bp, Homo Sapiens
ttattgggagaagtgagtgcttccactttattattctttttgagaaatcttgtggacatttttggacctgtgtttttccacgtagaataagcttgtgtatgttattatgttcattttccgatccatgaacatgggaagtctctccatttattcagatgttccttgatatttttcatcagcattttgtaatgttcatcctgcatcctttctcagggacagggccttgaggtggtccaggctgctggacacagctccaagatggatctaccaaggggctctcctggggtggagagcataaaggatgaaaaggccgcaggcctctggacaggtccgccggagactctaaaactcagggagggaaaaagagcaggagtggtccatcgcagggtcacccctggtactgcccgtggcagggctcacaaacaccccacagcctctttcccccaggaagcaggttaagatgaagaaaattaggcaggcagctaccgggcggtgcctggctcgcggctcatggctcacagtggaggatggacactgctgttatttcccctgccctggtacctgggccgtgccagacatatcagcacttggcggcagtttcactttg

SEQ ID NO: 142389 - DNA, 440 bp, Homo Sapiens
  misc_feature (399)..(399): n is a, c, g, or t
  misc_feature (419)..(420): n is a, c, g, or t
tttttttggcttaaaataacaaggtttattccttgctcaatctgagtgtccatcgcacctggccatgggctctgctccctgcctccctcccctggacctaggctgccggaggagcagcccgtcttcacttgctgtgggatgtcagggcgctgggagcagatgctgctgctcccctacgccgggacagctcacgtctcattggccagagtagtcacatgaccccacccaggcactgggaagccaggaagtgagtcctactgtgcgtcctcagggcagatagtacaactcttcggtcagcagcacggggaatgctccagcgaggattaggaaggaaaccagacttttgatttccctgactccagactttgcgggaagaatgctcattgaaggaagatttgnggagttgagagaggggtaanngaaagtggagcttgattatc

SEQ ID NO: 142390 - DNA, 544 bp, Homo Sapiens
aactggggaggctgtgaaggaagagctgcattaaggagggtgaggagcgtgtggttctgtatcatggcagccccaatggatccaggggatgcctccaaaaaatacatgcttcccttcccttaatctgtactgttgggattgttaccccctccaaattagctgccttatttcaaaagtcagtgaaattactgcacttgatgagggtcacaaaaaataccacttgattgtttctttagttgagaatgctgggattcagactcgaatagtggatagatacacacaaatgcaaggacttttttgtttactccagatttggggtttattttgagtggcatgcttcaaatagttcataaagatccttgcattaaatttctgaaccatttcttcaaacttcttagtgtgtttagacaaggagaacaaaaattgaaaccaaagccctttctgttattttttcaatgaaggtgagaaagaaataccatacaattttctttgtgaaattactgtttattttcatcaacatttaccaagtgccattgacatttat

SEQ ID NO: 142391 - DNA, 481 bp, Homo Sapiens
aaaactctgaaaacaaatacttttaactcactaagttttagcatgagtaccattgatgggtatcatttctatcttctggcaagaacagtattttattggtccctaaattatttaaagattctcataaactctcatcaaagtgatttacttatgagagctggaagcaacccaaactatggctaagtgtttaaaacattataaaagtaaataaattaattttactacagcacaaacagatgtcaaaaaacagaccactggaagtcaaaaaacaaatagcgctttgccccgaaaacatctgatcttaatctgtcaaaaattaccactgcactgccttttgctatgccatctttaacaccgccaagagtcactaccccttgttatttctccttccctcaaataatttacaggtaagaatttataggatagggagatttatccctatcttacctagggatagatattaaagtcagtgaataggata

SEQ ID NO: 142392 - DNA, 521 bp, Homo Sapiens
taccattatgtgaaatcccaaattctgaagaccactgggaagtacccgttaggaataatgtcatgtaccacttatggaaaaggagctatccagacctagatccagagcaaaccatgcttcctgctgctcagagcatccaatcagcacagaatcttctattctttgtgcatcctgtccaaatttacccaggagcctttccaactctaagaaacagaaaggggaagggagaaaagcaaaacacaagggtttctattaaatcactacagccatattagactcacagaaaatcatctacttcagcttaaagtgggtatacttggcttccaactgcagctaattagctatgtaaccttggtctaaccatttaacctctccaggcctgttttctcattagcagtctgaggactttagaccaaagaaggaattcttgtataacattgtattactctatggctgtatcatgaaaggaaaatatcccctagttagtaagatgcatgatagttaacttattaagtcattga

SEQ ID NO: 142393 - DNA, 303 bp, Homo Sapiens
ggaaataccggtctcacagtcacgccttttatacttttgagaatgaatttctcaactgtcttatccctcgatctgttattaactatgctaaaaatatttcctggctttgagtagcattgtagaaggtcctcttccattttctgattttcatagatgatcttccattaaaaaaagacgctggcatgtttctgctgtagaaaaaaggaagcaaagggatagttacaactccttctactcttctcccccagaaaaacctttcgaggcctcaccaatagatggcttgctttctcctccaatcaccag

SEQ ID NO: 142394 - DNA, 594 bp, Homo Sapiens
acattccacaaaatgggacagctggtaatttaggtttacattactaaatataaatggctagattttggctaacacttagcagaagcattaagcaaacatggataaattcataaaacaaatgatgaaaaaagcagattgttcttggagtacttctttaaacacttaaccttaaaacacctggtccttagtgagagaacgtcctttattcagtagatcttaacagtacaaggtatagtaagtcctaaaacctttaaaaaattttggcagttgaatccagtagtgctccttgattcaaggaatgaaggtttgtatttcttgcctgctctattcacgaaggactgttaaaagtctccttaaagatttttaaaaatgattcctatagttgctaggtgtcttgttacttcagaaataaaggcttcatactgagaaactgaaggacacttttctctcacttggcccacatgtcatgtagtgggtaatagaattaggagctttgttgctccctagacctgctttttgaatttctgctttcttgtactttgtccacattagatgctgcagtggtgttgctgtcagagcagctggtggtgaatc

SEQ ID NO: 142395 - DNA, 496 bp, Homo Sapiens
ggtttgctgagttcaaagctgcggggtgggggagtcttccctggcattcagcagccctggggttgcatttctctttaaagggctatttaggaaaacacaaggaacggattttaaaaagaagacagaaagaaatccagctcccagcttgcagcagcactgagaggttgtacattctaaaggacctggtcatttacagcaaagcctatggagggataattcccatttcagccgcatccaccttaacaaatgtggatcccactgctggcttcttagaactgtacagcaaagcctgtggggggataattcccatttcagccgcatccaccttaaacgtggatcccactgctggcgtcttagaactggagcggtgtctgctaaccagcctgctggaccctctgtctataggtaccgggtggtgacctgcaaatccagccttggagaatgaccgtccgaatctgcagcctgacacctcgccacctcggctttgaaaatggca

SEQ ID NO: 142396 - DNA, 635 bp, Homo Sapiens
  misc_feature (503)..(524): n is a, c, g, or t
ttttatcttacactattaacactttattgaaaatatttctattgaaaagaactctggaaacacataaaaatatttggtaagaaaacaaaagcacatctttactaccagtgtgaattactacctgacaattatcaacttctcaaataagaacattaacctacttgtgattgaagaaagaattatcctgtctatggatgacataagcaacttggccaggacagaaccaatggatgaaaccacatataaatccaatttggccagttaacttatgtaagtgaaatgaaacagttaactttattcattaatatgatcaaaacattatctttacttccaagatctgcaaaaacttaattatccaaataatttaagtttggaatttatatatttttcaatacataaagggtaaggaaactcttatacagtaatgagacggaaagaaaacaacagcttcccgtgaaaaagacctaatgtagtcaaatataaaaataagtacagtagcctcnnnnnnnnnnnnnnnnnnnnnngagacggagtctcactctgtcgcctaggttggagtccaggtgctagagagaatgagctagaaagacgaggtgggggtctgaaaacgggatgcctgaaatggagattttgaa

SEQ ID NO: 142397 - DNA, 298 bp, Homo Sapiens
tttcgattgtaactgtcaggctttatttcctcggttgggtggtgggtgcacgatattcattaaaatattctctgtgcctctttgcatgcctggaatatttcatgattttgaaggtagtaaggtttcataaatcaataagagcagaaagttgaaagtgaagctctagaattgcctgctgttcagaagcttcggcagttgggtaattccgatgcgtaatgagctacttgaatgaattacggcccaaactcagccaagattcacggacggctttcattttgttccagttttggattttaaa

SEQ ID NO: 142398 - DNA, 602 bp, Homo Sapiens
gtgtttcagtgaaattttatttagttacaaaaacagatcgtaggtcagattttgcgcacagagtgttatttgctgacccctgagttaggtcacaatagcaaagagacctcaatagctcacttaagccagtcaaagttcatgtctctcatacttaaagaatctcagtatagagttcagagctgatcgaacaatttggtggtgtcaggaaccctggaaaaattcttcttcttgctggcaagtcttaatgtaagaccctcaactcattttcccagctatctgctctagctccatttatcagctttgaatttcagccagtaagaatgggaatgcaaggaaatgggggacagaccaattttctttaacagcgaagtcagaagttgttcacattgcttttctccacacatggctggtcactcatcaatcacagggccacctctagttgatggccctgcctggacagagatcttgggtctccactccagctaatcaacattccactgagacagcattttcatttctccagaacatgaatctagagggaaacgaatgtggtcaggtccggcttccaaatgcagcattgtgcagctgcgtgaaggtcagtc

SEQ ID NO: 142399 - DNA, 478 bp, Homo Sapiens
tttagtgtagatgtggcagccagcagtagggaaggagagacctgcccatagccactttattcccccaccaacacacacccccaggccccagatccaaatggcatctcagctgggtgcttgggcctcactggagttgagcctccgaagctggctgaggctggccaagcggagtttgagtagtgtctcctcctgcgtgcggagcgtgctgtgccaggatgcgcagggattcactctgcagcacgctcaggtagacagccaggagtgcgagcactaggcaagtgagcaccagcagcgcgagcagcagcaggaaccctcctcgtctgtacacagggctgcagccagcctgggcacacagtgacggcggcaaaacgcccagcagctcatcccacggtcgtgcctcttcagttagataggggcgcagtgtgcctgctccactatgtaggtcgctgatggactccacctggtgcaggcatacctc

SEQ ID NO: 142400 - DNA, 483 bp, Homo Sapiens
  misc_feature (26)..(26): n is a, c, g, or t
acaggctgctccgaagtgcctctccntacatcgctccaggaatgactcccctacacccgttccccgcaaaaaaaagttggcccaagatccaggcgtcccaaggatcagcccaggtccccatccgacgcgggccagggggtgctgctctggcagctccggagccccggcaaagagcaacctgcagggaggcgccacgcgcggttcccactacccgccagagacccggtccatggggccaaacggaggggcctgtgcgggtcgacacccccaagccctgtcgcgccccccccgccgcctaccgtatgggaccggcggaggagaaggcgcggtcgcgggctccctgaggcagcgtgttccgtcccgggaggaaagtttgtgccatacagaggaggcggcgcggggaggacttgggcgccggtgggtggaggcgtgggcggtggcgccgcgtggtcgtgtgtctgtccctccggcgatcggtgcgtc

SEQ ID NO: 142401 - DNA, 1065 bp, Homo Sapiens
aaaagggtgaagatctccattttccctgagagtggctcttcatgcacctccaaggggtgctctccggtccatccagtgtcttgctcaccccctgtggtgaaagttctccaccatctccctctccggagggtgagctgggctgcttggcgaggggcacctcccctctggggcctgagctgggctctgggctttggtttctcccagccggagcactgcacacatccccagtccccggtttctcattctccagtgacgcgtgatccccacgtgcgttttttgcatctctggcatcctcggtgctgttggcagtagacaccggagcactgctgcctgccgagttcacagaggaatggtactgaggtataacaccaacgaatttcaggccctggcttgcagcctcctggattttcttaatgaactctgggatgagtttctggtctgtcgggtggtctaaggaggaacagcaatctaattccaagatgtagccttcattgtgaagatcagttttctgagatctgtcggttttcttgatcaggatggctctaaagatgtgctccaggggcgtcttctcccgctcatgggtgggctgcacgaaggggtgcagggccgccagcgagaagccctgctggtacagctccaggagctgggcgggcaggtcacgcagggaggccagcctcactgctgaggacccagggagctccgcagcactcagagtcgtgaactccaggaagcggtattcataggacacatctatcttggtttccacctgaggcctcttcaaagttgaataaatattcccaggccgtttttcatcacgtttctctaacttgttcaatccgcaacccatttcagcagcgtatgggaccggcggaggagaaggcgcggtcgcgggctccctgaggcagcgtgttccgtcccgggaggaaagtttgtgccatacagaggaggcggcgcggggaggacttgggcgccggtgggtggaggcgtgggcggtggcgccgcgtggtcgtgtgtctgtccctccggcgatcggtgcgtctgtccctcgccggagcccgcggccgc

SEQ ID NO: 142402 - DNA, 443 bp, Homo Sapiens
aagtaaacatttgttcatgtgtatatgtgttagattaccttgtaaaacatattccttattgtgggttacaggccaaaaaaagtgtttgtttttgtttttaaaaatctacagttcagattttccttagaaaatggggaaaaaaggaatgttagaaagatctgactgcctatgaactagtgaaggattttagaggaagtaccaggctattttagagatctgatactggtttcagaaaggtaatcttaaggcaaagggtaggaaataaagttatgttgttagtagaaatgtcaaatacggttaaagttgtgaggaggaattattttcctagtggacctacatttgttgtgtgtagatctgtgactattactgatctgttgtagcacattttccaatctaaaatgtccgatacagcacaataataaacatggggcagaataaaaaaa

SEQ ID NO: 142403 - DNA, 311 bp, Homo Sapiens
ttttcaaactccagttaaactttatttgcaaacacagatggcggccacaatttgccacctgctggtgtagaacgtgtttttccacggttttgccaagaaatagtgtccaactgttaccaccatctcccttttttccccgattttcctgttggtggcttttaagtcccccgtccctgctttgccatgagagcagggactcccagtgtccctggcgccctgcagcttccatagccattcggggtgtgcgtgggtgctctgctcccagggtttcctgggaggccagagtctactgtggatgactcgccccctca

SEQ ID NO: 142404 - DNA, 447 bp, Homo Sapiens
tttcgaaaatattgccaacatttattgaagagacttttttcttcttttcttgcttgagatattttacgtttgaagacaatcaactcttcatctcacctgctggtccattcagccaactttttttccccctctgtcgccagcccagggctgggaagatagaggtgctgctgcagagggagttccatgactcacccctgcttccagtttttaaaaagggctgagtctgtcgggttgagtacttcccttccatcacggcaggcagtcacttttcccaagtcagcgtggacttgggcaagaccagtaggctggtcacgctctaatttagtaatgatgatactttgctgttataaattttctctggggacttgcggggatggaagagcctttactttgtcttaaattctatgtacgtgtaattaatcaaaacattgattaatacccctttgc

SEQ ID NO: 142405 - DNA, 432 bp, Homo Sapiens
  misc_feature (227)..(227): n is a, c, g, or t
tttttaatgttagcataattggatttatttcttactcatgcaaattccaaaatatatttcttggtaaataagagcttctctttcaagtagtaattcattccaaacttctgccatcttgtgctctgccatcttcaagcctgtggcttcttaggttgtgagttcctctgcttcaagtcagaagcaacatatgagtatttccgagttggagcattgagagctaccttggngagtacacatatcactataactgcatttcactggctcagactcgctgtaagatgacttctatagaggcttgaaaactgctctgtatgccccatgttgaagatggcagcttgttgactgaagtacccaaaacatcttaacactgcttgtcactgatttttggttcctgtgacagtgcttttctgtgtgcaaacagttaagatttgg

SEQ ID NO: 142406 - DNA, 297 bp, Homo Sapiens
tttgctgatgattctgtagaaattttatttcattttatgttgggatctagcattgtgggtggataggaagagttgatgttgaagatatgtgccttaaatgcttctcttgatttctgtagcattttcttcctctggggccttcaggaatctggcagctgaagcgttaggtctaccaggcactctttttatccatccttcccatccatccatttatccactcaacacttaggtactgaaccacttactgtatgccagacacagttctaacagctaaggattaagcagtgaagaaaatag

SEQ ID NO: 142407 - DNA, 178 bp, Homo Sapiens
ttttttaagacttaacgtcattgtatttattaggttctgaaacaatacacattcacatccttttgaatacagtacatttggcacaataacgtttacaatgaaataacactaatgaatggcaagagattaaaattacatccagaaaggaaaaaaatgtacaaataaagcatcacaatac

SEQ ID NO: 142408 - DNA, 559 bp, Homo Sapiens
tttttacggactgagcagcatttattacacaatgtgagaaggcctgtttgctagacagaccaacaaaaatcaagcctatactgcagtgtaaagtttgcttcatgttgtgtagttcagggtcgtagccatttttttgttgttgtttcgttgatgaaatttacttctctgtttttcattctttgctgctttcattggattactggagaatgcctttgtgcctttaaccagaagccctcttttcttatttttgattccaacaatactaagagcactcgatagtttattagtaaggctttcaagccttagtcatcattccacaatctacagtgagggcctccattcttgagatgagatggtaaagatgttgttcctttgaacatttcttgctcctttatttcactgaagcctccatcatcagttagctgaagtgggtgactctttaagtggcaaatagcatttgattttgttaaataaatcccatttattttcaccatagagtcccccatcataactgtttctttggattccactgtcttctttgagtcggagggaggaaggg

SEQ ID NO: 142409 - DNA, 505 bp, Homo Sapiens
  misc_feature (460)..(460): n is a, c, g, or t
  misc_feature (481)..(481): n is a, c, g, or t
ttttgtttgtttgtttgtgttttacccttttctaattcacgcaaaatcggtacaatccttgtattccaaaagacttcgtctacttctatttctgcgtcctcttcttgcaggtcagcttttgggactgctttggtttgcagcctgctcaggtctgagctactggggcatgatgaggccctcgcatgtctcttcccctggtcccctccattcttgagatgagatggtaaagatgttgttcctttgaacatttcttgctcctttatttcactgaagcctccatcatcagttagctgaagtgggtgactctttaagtggcaaatagcatttgattttgttaaataaatcccatttattttcaccatagagtcccccatcataactgtttctttggattccactgtcttctttgagtcggagggaggaagggatctgtccggcaaaaaggcccgctgggaggcanccctgaataagcgagccctgncgttgcttactcttctaatcttcg

SEQ ID NO: 142410 - DNA, 493 bp, Homo Sapiens
ttttagtgtatttatcttgggcaaattctgtcttgtctcggaatgttgtactattttcaattaactgctgaactatttcctctcctttaatgcccttgtccttcaaagcttttatgtcatcttgagtaagtttctgagatttcccatcatcaactatatttcgattatcagtgcccgcttctttagtctctgcagtaggctcttccctcttcttcttgggctgtagacttcctccactggtcacttcaaatgcagttccataactatggccaatgacgttatccaggtagaaccactgtttttcgaaagttactttttttctccgctggacttgtactgctttaaacacatcttcacgtttcagcaccacgaagtcgccgtcgcggatgcggtggtctccgggatgctgtggttgtgggcccggctgctcccctgagccctccatgacgctcagccggtcgccgtgctccacggcgtcccgcccctcctcccc

SEQ ID NO: 142411 - DNA, 389 bp, Homo Sapiens
tttacagtgtagacacggaacatttttattatcacggaggtgtccactggacagccctatatacagacctttcccccttaatctttgcaatagttctttgaggtagtttatcagttagaatgtattggactgctggtaacaaaaaaccccagttggaaatggcttgataattcctttcttgctctgagagtccagaaaacaagttgtttccaggaccagcacagtcagtgaggttattaaggacttagggactttccctctcagtgtttgcttctctcacttgatgtgtcagccttcatgtcgtctagtttcctgtaaaatggttgtagcattttggctggcaacagcatctctcatatttgttcaagaaactacaaagtgatgggcca

SEQ ID NO: 142412 - DNA, 496 bp, Homo Sapiens
tttgctgtctgcagaaccctgagttgattgccacatcctccagcctgcaaattggtccagcagtctacgctaccttattgttgagtcaactcattctgctattgtaggcctatgacaatccactgggtttcaattcagtatccaaactgcataaaaactcaaggcacctttgtaaaattaagccttcttctttctgaccatgctgtgctacatttctgtgaatgaatcctaaagttgatgcatggcataatccatttggatgtcaaaagactaatattacctcagtcttatatttttggaaaaaattctaacttcctccagacaaatgaatgcctccgacagactaaggagaagccgtaataatggcatttttatctacatcctcatcttcaattttgttgtctgatgagttcaaagcttgtgctctcttcacttcacctccaggaccttggtctggaaaggtccttgaggtctggaagattagcaggagagagac

SEQ ID NO: 142413 - DNA, 371 bp, Homo Sapiens
ttttgtggctgtgaaatactttatttgtcttcagattggtctggcttatacatggattgaacctcagttagggcagcaccatcttctgtgaaattcactgtgacagtatcacgtcttaagtaactatatccccaagatatttcatttctcttgagccctgcatatcctgaggatctagtcactatccaccagtctttttatacaggttcttgagcaaatgtttatgtaatcatgcatttgtattgagaattattggaaagccatgaaagtgaaagtagaaagaccatttcgaagataattgtgacaattcagaggagagatagcaaaagcctccctgtcttagtttgtgctgctgtaagaatatgcttgat

SEQ ID NO: 142414 - DNA, 447 bp, Homo Sapiens
ttgcaaatgttttacttttacttaagagaatctttgcgggagaattaaaaccaattaattcccaccactggccaagagctcatgctgtaattatccaagacagaatagctcaacagaaaaccaagtcatgcaattctgagcacttgtccttgggatgccactttggggctcccatatctgaaatcattttgttctcagtccacctgtgtgacatttctgtcctgctcagccacgggttcacaataatcaggggaatgacccaagggattcacttcttccaagcagccgatgcctttggaagttatgttgacattgcttgtttaaacctagggcaagaaatcctttctctgccagacctgactcttcaggcacactcctcagtttggagacgtgacttgccatgtagtactgagagggaaaacaggccagaaacagccttgttgaaaa

SEQ ID NO: 142415 - DNA, 543 bp, Homo Sapiens
  misc_feature (431)..(465): n is a, c, g, or t
tttgtcttttgtcaagtttattatggttggtttgctcagctcttaggaaagagggtttggagacagacccgttaggccaggaaaatttaggcccacaagtcccggtggagctgttctgatggagttgttctaatggtgcttcctctcctgcagaacttgagcaatcagtccgatgacccaggagatgaccccggcagagcagcttgccacttattagaactgggcttcatgagaggctcttaggacactggaaatttcaagttaatatcctgaataggctttcttcctgtgaaaattttgcaggcattgtccacgatggatggaggaaaagagggaaggcaagagaccaagctaggattgactccaatattctctgccaccctgtcccaacaccaactcccataacctaaaagggggtggaggtgggaatnnnnnnnnnnnnnnnnnnnnnnnnnnnnnnnnnnnaactaaatcatccaagctcttacgtgggttctaggaggaataggccatccatgccacaaatagtcccactgattccct

SEQ ID NO: 142416 - DNA, 539 bp, Homo Sapiens
  misc_feature (396)..(396): n is a, c, g, or t
  misc_feature (521)..(521): n is a, c, g, or t
tttcaacatactaatgtgtttattgagataccaaaatccaaaggcagctagtacatcagtctattttaaaaggttaaggacctagattgctgccctctagtttgctggtctatactgacatcattggtgcccaaacaaagagcattttgctttatgagggcctaggtaagcataaggtgccacgtgtgaatatctactgtgctagaaacagaacatggccaaggagtaaagaattagaaaggtaagatgtagcttttaggtttcctgggtctatagtcagcaatagaaggatcacacaagctgagaagttgaaatacaaagttgccataagatactatcaggtcactgctaactgcaaatggcttcaacaccatgttatgcctaaaaggagcatanaacctcaaaggcccacacaatttctgtaggtaaaagtatcttcttcttttctgttagactcaaaaacttttgggactaattccttctaaaaaatcatgccctgtattcagaagagagggacatangattatttctgttttctt

SEQ ID NO: 142417 - DNA, 522 bp, Homo Sapiens
ttttattttcacataccatagtttatttaatgactcccccactgatgggcactgggggtgtccagtctttccattacaaacaatgttgccgtatcatcacacagatgtgaactcccaggactttggtgggctttttttgaccatgagtggtagaaacatggttccaccagccaaacgtgtgcacacaccatgctgcaactgctgggccacctgtctgtcctcccaacaggacacaagcttcatgggggcagggactgtcctcattccccatcgtgggctcaatggcacatgacaggtgcttgattaataaacactttggaaggactgagtaccatggttacagcacaggcgtaccagctccccagagccacagtgccatgctttgcaagtatttactgtagatgatcccactcacactctcaaaacaggcattcagcatcaagcacagctaggctcccactctccactgtggagcgaatgccgaggcgaggttaggaaggcgcggctcctgcggtctacctc

SEQ ID NO: 142418 - DNA, 440 bp, Homo Sapiens
tttttaaagtggtgaaaaccaattttattcagtaattactaacagtaggggaaagagcagcgttccatttcaatgcagagataattgagcagcttaaagagagaataagggagggggaaagagccggaatacatgcaaaacatttcaaagtctgtcagtataaaagtgattagatcagctgcgtcagctagctggcgattatcactgaagtcaggattctaccctcccaccaagaatgggagatagcaaccttccagatgattaaatttcaaaggaatggctttcaggtccttaagaaagatactcctgaattgtaggagagaacacatacgtgtcaaggggacagaggaaggactcacaattgtaagctctttttttgtaaatgctccaagaaagggggtcaagggcctatggccaggtggggcagtgtgagttttctc

SEQ ID NO: 142419 - DNA, 456 bp, Homo Sapiens
  misc_feature (334)..(334): n is a, c, g, or t
  misc_feature (390)..(390): n is a, c, g, or t
tttgcatagaaagggagtatttattaccccacaattgtcttcttttagctagtggtcaaaacattcagaaaacttcaaagagctgcatgcttagggagaggaggtacaagggaagctgtgggtgtgactttgtgatggagcggaccagggaggagaaatggttgggattccctttggttcttgcttttgctctgggaaatcactgaactgccctgaggaaaagtggctcctggtgtagtgaactccaatgctcctataagtgtttaccatcagcaaagaaccagtgcctgcttctgagtaccctagttctacctagaatggactgcaggcatgncaggtgggctgaaatttgttcactagtaatattacttctactgcctttggggcagntgggtctagggttgcagtgggatgtggggggacaaacaaataccattcatcttctggctaccctat

SEQ ID NO: 142420 - DNA, 377 bp, Homo Sapiens
agactactgtatagtgttggttaaaactcaccattctattttcttgactatcttcccgccatttctctgatgtatccttatccttattctccacttgaaattttacttttaaagatcaaactcttaaacttctttcaggtttttcctttagaattaatagctgtcccttccgttttcccatggtatttggtactttgttatttgtagcagttaccatgctttattagaacattcttctgtgagggacaagttcctgaaaatctgcatggtaaatacgggaagtacggttgagtaacatatgtaataatcttatgtaaaagtagtcatgggaactgaagttctgagtgaaagccctcatacctgtgcatttaattaaa

SEQ ID NO: 142421 - DNA, 401 bp, Homo Sapiens
cccgataattttgctattcaaattggagaagggtggaaatttcccagtacgtggaaaccggacacttgaaggcctggagcaattttctgaaaaattttattgcagctgttatagcaccttgagttgtaaggagaaagctgatgtaaaagacactgatgctgttgatgtgtgtattgctgatggtgtctgtatagatgcttttctaaaacctcccatggagacagaagaacctcaaattttctacaatgcttcaccctccacactatctgccacaatgttcattgttagtattttgtttcttatcatttcttctgtagcgagtttgtaattgcgcaggttagctgaaatgaacaatatgtccatcttaaagtgtgctttttcgactaattaaatctttgaaa

SEQ ID NO: 142422 - DNA, 702 bp, Homo Sapiens
taaagagtcactgattttatttttaaaaatattttaagtgtaatctcacagttctaacaggttgggggatgaggtctaaattaccaatctgaaaggtagaggagatagaataaacactgtagccaacagcgtttgtacagacagaagaatgcccaaagcagaagcagggtgtgcaaccccgaggattagatgattccagattaaaaaatccaggtttgcatctttcacaattgaagccttcgacattgtctttgcaaacacatcttcctgtttcaacattacattcatctatgctgccagagggatcacaagagcatggcctgcatcctgcttcagtgagagaatggaatccaggctggcaacggtcacatttgtcccccatcaactcctggcttacagctgcatctgccgtaactatcacactgtgtgcttagagagcccacaggactacagtggcatgaagagcaggcttcattgttgccaaggcggaagaagttctctcggcacctctcacagtgggcgccatctgtgttatcctggcagttggtacagtggcccccatggccagtggaacgatagagttcagggtcgaagtagcattcctgggatcgaccattgcaatcacagggcaggcattcactggcactttccgcagttgccctcctccacggccggtcattgaagaaaggaagacacttttca

SEQ ID NO: 142423 - DNA, 1052 bp, Homo Sapiens
tccaggtctctctgtgtccatagcagggtcgcacagcacacgatggactgtatggtccaagattaggagtttctcttctgtaacctgagaggcacgatctcacaaaactgccctccatatcccacaggacaggtgcaggactccacccaagttgcagggactccaggcccaggacgagcacttgccagggtgacatcatccaaatatccagcactcctctcactgtatgtcccacgtatcttgatagaggtcaagttgtttaggagcttctgaaattcagaaggggtaagagcaggcctccaagggtaatctgttgcttcatggagcctgaagacatacttcacagtggtctcacttggataggaagttgccctgagcgatcaagggtgcagatactcttaagccagctccctcaagcacaaggtcttctgcagagaggcgagtatctcgcctgtccagtcgaaaggagacggagaggttctgaccataactcaacacctgcttgcccaagaactttgcaggagcaatgaagtaccgaggaaagtagctgtctgagatcacggcgatatcttgcctctcagaggaccactcgagagatgcttcagagccatctctctgttccgcacgccacccatcctcatcaatctgaaaggtagaggagatagaataaacactgtagccaacagcgtttgtacagacagaagaatgcccaaagcagaagcagggtgtgcaaccccgaggattagatgattccagattaaaaaatccaggtttgcatctttcacaattgaagccttcgacatggtctttgcaaacacatcttcctgtttcaatattacattcatctatgctgccagagggatcacaagagcatggcctgcatcctgcttcagtgagagaatggaatccaggctggcaacggtcacatttgtcccccatcactcctggcttacagctgcatctgccgtaactatcacactgtgtgcttagagagcccacaggactacagtggcatgaagagcaggcttcatttgttgccaaggcggaagaag

SEQ ID NO: 142424 - DNA, 1105 bp, Homo Sapiens
ctggtaccggtccggaattcccgggatatcgtcgacccacgcgtccgcgagggtgagtcggcgccggccgctaccgcacttcgggcgctcgtccctcatttctctgtggtgaatggcgacgggatggagcgcgaggggagcggcggcagcggcgggtcggccgggctcctgcagcagatcctgagcctgaaggttgtgccgcgggtgggcaacgggaccctgtgccccaactctacttccctctgctccttcccagagatgtggtatggtgtattcctgtgggcactggtgtcttctctcttctttcatgtccctgctggattactggccctcttcaccctcagacatcacaaatatggtgcagctattgctggagtttaccgagcagcagggaaggaaatgataccatttgaagccctcacactgggcactggacagacattttgcgtcttggtggtctcctttttacggattttagctactctatagcatacatccttatgctgagatgttgaacttaaactttatggaatcctccaaaagaatacattatggagtgtagtgttttcttagttcttcaaagggaagcaacttggatgaacaggaacatgaaggacaacacatctcagccttttcttcattttgaagctcctagaattgaagacttatgtggactcctattgttctcaaccaaaacaagtcttttggctttcttttttgtagatatttaatttaagcagttttcatgtgtacctttacccaagccaagtcaacagtgtctctggggtggcatcctttgcactgaaatttacagtattctgtgagatgtcgcatattttgaagaaaccgtggaagatactggtttatttcaaatgagcagagtatgttgtattaaaatcttatctaatcttgattaaaatttggcaaactcttttctttgctacatcttagtgacaataaatgccaaataggttttggttgagtatagttttgaaaacaaatttggtgaaataaagcaggaaaaaaaatttaagtataactcaagtagtggctttggttccactgtttataaataaaaagtagataacaatgcataatgtgaaaa

SEQ ID NO: 142425 - DNA, 890 bp, Homo Sapiens
  misc_feature (778)..(812): n is a, c, g, or t
gatttctgcttaaagtgaattattctaccatataggaagccgttaagacttgttttggttgagaacaataggagtccacataagtcttcaattctaggagcttcgaaatgaagaaaaggctgaggtgtgttgtccttcatgttcctgttcatccaagttgcttccctttgaagaactaagaagacactacactccataatgtattcttttggaggattccataaagtttaagttcaacatctcagcataaggatgtatgctatagagtagctaaaatccgtaaaaaggagaccaccaagacgcaaaatgtctgtccagtgcccagtgtgagggcttcaaatggtatcatttccgttccctgctgctcggtaaactccagcaatagctgcacttgtcaagattccagcagtaattggtcccacgatgcccatcaacaggatgcttacagacatgaacctaccatatttgtgatgtctgagggtgaagagggccagtaatccagcagggacatgaaagaagagagaagacaccagtgcccacaggaatacaccataccacatctctgcggccgctctctgcatctcacgcccagcgggactccggggctccgcctcagggaccgccgaagaagtgatggggaaaggggctccgggcgagcagcacggcccccctcccggaggacagcttcccacgccgccagcaggctgcgcacccgggaccccgcccccccggccgtaatggccgaattcccgggcatatgtccggtaccgtcgactgnnnnnnnnnnnnnnnnnnnnnnnnnnnnnnnnnnncgccgcttcctcgctaactagctcgctgcgctcggtcgttcgaactgtagagcgatgcgccatatgtggtcagatagt

SEQ ID NO: 142426 - DNA, 502 bp, Homo Sapiens
  misc_feature (409)..(409): n is a, c, g, or t
  misc_feature (460)..(461): n is a, c, g, or t
ttttacagtatatcacggttttatcacacaaccccggacagtaaaacacacagtggtgagaaatatacagatcaccgatcctttcaaattcggttgcagagacttgaaaggtctgtatgaggacattagaaaggaactgctcatatcaacaacagaacttcaggaaatgtctgagtactactttgatggaaaaggaaaagcctttcgaccaattattggggtgctaatggcccgagcatgtaatatccatcataacaactcccgatccgatgtccaattttcacaagctgattgctgagaaggttctaggcggcgtctgttaaaaagcattgctgtctgttaatttgacatgtgcaagccagccaccgcgccatagccttaattgcagaaatgatccacactgctagtnctggttcacatggacgttattgacataccaagttctctatacacttttgtnnctcgtttggagaattaacatggcagcatcgtctaatttgat

SEQ ID NO: 142427 - DNA, 936 bp, Homo Sapiens
ttcatcagcgtatttgaggatgcaggtgagccgggaggagcctctgagttcctcttcaaccagatcctggtggagctgcgggatgatatacgagaccaggtttgggtgggctggcgaagggtggcactgattctggggtagggtggcagatgtcaagtgctgactcctccccatccttctccaggtgaaggaaatgtccctcatctggcagctctctagtaagggccaaatactccaaatcagggaggcaaaaacctcgtgcccaggacaaggaggctgggtgggtgggactgtactgagcagtttgtccatcacaagggtgtgatctgcagcagatgtcaataggaatgtgaggtagggcgtagtgttaggcagagtgtggactagagggtgagacaagaaacaggcagatttcctggccagttgtcctctgggtggggagacaaagttcgggactttcaccaacctgttcttctgattagcgatggggatgggcatcaggacaccaaggacaactgcccacagctgccaaatagctcccagctggactctgataacgatggacttggagatgagtgtgatggggatgatgacaatgatggcatcccagattatgtgcctcctggtcccgataactgccgcctggtacccaatcccaatcagaaggactcagatggtaagcctgcggacccagagcacgttagactggtgttgcctttgcccaggtggaggcagcaagccctgttgggaagtgaggaagggcaaggtggggaaagatgtcaggaatgcaggcccaacagatggtattgttgcctaatggcagtggccagggccttcctgagcacccagcctcactctgcccaggcaatggcgttggtgatgtgtgtgaggatgactttgacaatgatgctgtggtcgacccccttttccagagct

SEQ ID NO: 142428 - DNA, 474 bp, Homo Sapiens
accataggccaacagagattttgagaaacacattgaaggatctgttaacacttgatatacccaataaaagcagtggttgtgccagtgctgatctgtcttgatgtgaatgtgaacaatgggaacctgagctgagcaggtaaataatcatgtagtacagtcaccgtcttcagtgtttgagatgactagcagggtaaaccacgctgtgtctaagatgcagtgttaattctgtttgaagtaaaaatatgcaagcgtggtactggatattttggcacgcaatcttgcgaaatttctcattgatgagattctgacataggaactacatttgagtaagaatcatagctcaatacagcatgatttcaggaaagtcgactaagataaaagtgtttctgaggctgaacagcaagaatcttttgctaagagttagaatagattgacaagaacctaaaatcagaagttgcaattctgctgagatac

SEQ ID NO: 142429 - DNA, 470 bp, Homo Sapiens
  misc_feature (398)..(398): n is a, c, g, or t
cctttttttccatgttatttattcacattcaactagctacatgagggggataagcaaattaataggagctttttggggaggcagaggtatggatggaagggtgggattaaaacaaaataattttcagtggttaagtggaagatttacaaatatccattaaaaaagtaccctctggataaaataatcagaaataaaataaattagccacttctgatcactgcattccccaaagtctctgaaaatggtttgcactttagactgtcatgatttgcagatatttacatgacgcaggtttccaacacagaaaaatgaagactaacactgagtaacagattagtacaatgcagaggaaaatagagcaaatgaaaatagctatcatctggtagcaaaaatagatntatgccggtgttaatatcaaaataaagacattcaaacaaattatgccaatacattggaactattattcctaa

SEQ ID NO: 142430 - DNA, 520 bp, Homo Sapiens
ggcacgagggaaaacgtacgaaaaagggcatgcgaccgccaagcagaggcttgggaaaattttgaaaattcatcggaacgggaaactactcctttaagatttggaaagccaggatccttcattccgctcaggacccccggagccccgcgaaaacatctgcctcccaggagggtgccgagctgcctcaccagggaggccttgcctcttcccggctgccatctccccaacaagcgtctgtcccttcagccggcagagcgagcccagcgtggcccctcaatttgaaaatggacgtcttttctcaagttgctaagagtgatctgttccagaaaagcggccctgcaagtttgaggaccgcttattccactttaaggacagccttcaggccccctgagcgtgggtgtgattgcagggcctctgcagctctgctgagagcatgagtccttcaaggaagacagagtgagccagtgctcaccagccccagagtcagagctggccacaggctggcagcctccaggggctt

SEQ ID NO: 142431 - DNA, 539 bp, Homo Sapiens
ttgaagccgctagaaactgaacaaagactgggttggccgaaatacagctctgaagcctcataaaattcaaaaaagaattactcctcttacgcggatacagtcagttttttccaccgaaggaattgctgcggcacattactgttccttgtgttgagaatatgctgtaagagctgtgtcgagataccagtttttatattcttgtaccttcgactgctgcagaactcccccagcaagaagttcttccacaagtgtccccaaattgtggaagaggctcgctcgcttctgaggaaacgttagggaacaagaaatgggatggcgaatctggactcaaaagtcttgctgtcccagatccagcagggcactacattcattactggagtagagaagcacagcaattatttgttgtacagaaaggctgtcggtgtcatccattttgcttaagtaatccccattacaagtgtttatttcttgtacttaccctcaagtatgtacaaatgcaaatatctaccctgtattacaataatctttccactttcaaa

SEQ ID NO: 142432 - DNA, 537 bp, Homo Sapiens
tactttatttcgggtaacatcaccccctgttgctaggaacgcacttaccccaaaatctgctatttgtactgaaccatcctcacccagaagaatattaccagctttcaaatccctgtgaatctgaccgtttctgtgtagatagtctaagccttccaaaacctctttaagaattgttgctattattgcctcttccagaactccattcttgtgttctcctcggttgacaatgtattttatgatatccaacattgaacctccacttagtaatttcatgaccagccaaagttcatctttgaccacaaaagaggtgtaataggtcactacgttgggatggctgcactgactcatggcttgaatttcttttaatagttcatccatactggtctggcatttttccaagttgatccgttttattgctacacgttcttgcctgggtttgcatagggctgcctgaaccacagcagtagctccactgccgataacctcctgcagctcgtacgcgtccctgcagatgggccagccgacagcctgtgccgc

SEQ ID NO: 142433 - DNA, 419 bp, Homo Sapiens
tttagaatgctattagccggtgctttttattttttatagcccttctttctcataaaacttggtgatattctccaaaggacatttacaagtatttttctaattttgtagaggctggcaaatggagactttccccctcgtcgggcatcgtcaaaatgatagttggaaagtatacaaaacaatgaatacctggcggcaaatgtatgggggtgggcaggttcatcagctgagaggttacagcacatcagacaggatgaatggaagcatgttcacagaggaaacagtgggggaagcggtccaggcttgagcatttgctgggtgatgctgcagtgcaggtaggattgtcatgctgattaaaacctggacacacttgcagcttggtgttggtaaggagggcagaagggaaagagtaattgcaagag

SEQ ID NO: 142434 - DNA, 517 bp, Homo Sapiens
  misc_feature (376)..(430): n is a, c, g, or t
gctcctcggaattctttattcctgaacaagggaaggaggcttggccagggggagggaggggcactacttgtacagtggccttgactcgaggctcaatgtgtgacaggtaaggaaagggcagcaggtgaagtccccagggctgaggttcttagcctggagtccagggatgggtttcattcagggagtccagtggctcctgaaattgcttggggtttttgagtctacgtcagttatctgttttcctagggaaggtccgtaaccttcatcagattttccaagggcttcgtgtctccaaagagctaagaagcaccgctcagaaggaaaatgaagcctgcaggtttcattcacatctggaagaaggttttgcctctagaannnnnnnnnnnnnnnnnnnnnnnnnnnnnnnnnnnnnnnnnnnnnnnnnnnnnnnaactctagccaagtggtggaccaggcgggagcagagaagccagctctccacacaggcatcgtcctaccaccagtggcagagagtggg

SEQ ID NO: 142435 - DNA, 370 bp, Homo Sapiens
ttaaaactagattcattccatttattaaaccctgcattcaactatactgggaaaatggatgtgttcacaacaatacttttaagaaaactctttccagatagcatgttcaaggacagaggcaaatccaaggtttttactttaggcttatccctctcacaaaataactcagccatgatgttcacggtgttgatgcctcctcttctatcttcggaatcccttcttggctgatgaccaagtagacataagatctttacaaactgacacagtccagattttattctgtgcttaactggaacaccaagagcatttttccctgtacgtcaatagttctcaaagtgcagtctaaggaaccatagaggtcatggagatc

SEQ ID NO: 142436 - DNA, 825 bp, Homo Sapiens
  misc_feature (58)..(540): n is a, c, g, or t
  misc_feature (558)..(578): n is a, c, g, or t
gaacgcctgtatcttttagtccgtcgggtttcccacctctgacatggcttcgattttnnnnnnnnnnnnnnnnnnnnnnnnnnnnnnnnnnnnnnnnnnnnnnnnnnnnnnnnnnnnnnnnnnnnnnnnnnnnnnnnnnnnnnnnnnnnnnnnnnnnnnnnnnnnnnnnnnnnnnnnnnnnnnnnnnnnnnnnnnnnnnnnnnnnnnnnnnnnnnnnnnnnnnnnnnnnnnnnnnnnnnnnnnnnnnnnnnnnnnnnnnnnnnnnnnnnnnnnnnnnnnnnnnnnnnnnnnnnnnnnnnnnnnnnnnnnnnnnnnnnnnnnnnnnnnnnnnnnnnnnnnnnnnnnnnnnnnnnnnnnnnnnnnnnnnnnnnnnnnnnnnnnnnnnnnnnnnnnnnnnnnnnnnnnnnnnnnnnnnnnnnnnnnnnnnnnnnnnnnnnnnnnnnnnnnnnnnnnnnnnnnnnnnnnnnnnnnnnnnnnnnnnnnnnnnnnnnnnnnnnnnnnnnnnnnnnnnnnnnnnnnnnnnnnnnnnnnnnnnnnnnnaagaattcggaacgaggnnnnnnnnnnnnnnnnnnnnncggggtgagacgggtttattgtgcacatttacacagcgtcagcagcgtctgggctggcagcggccatgctcctgtggtcgggctgctctacaagggcgttcacttttcttcaccacactatgtacagtcagtgctccaaggtgatgggctacagtgctgcatcagtgagtctgtacacacatttttacataaattacacacgactcatacatgaaaaatagagcctaagggcctgtattttaatgag

SEQ ID NO: 142437 - DNA, 519 bp, Homo Sapiens
acagaccacagacactagtatattctaatatttggaaagacaactggctttggagatcagcagccttggaattacatctcagcttcaccacttactggctgtaggagccaatcatcaaatagataaagtaagttgaccatctataaagtggggataacaactgagatattttctagcaggagactaagtagttatccttggctgctcaaacctgcttcggatgccctggggaaattgggatgtgaccaggtggatcttctttggctgtcacccacccaatgactggaatgcctgtttggactggcttgtccgcccttgaacacgcaaatcctagtttccccattctcctatattcggtgacaattaggttgactgtgcagggtgagctggattttgtaagaggaaggaattttaccgaagaattcccctgcgttgttaccaacttggttacagttgcttcaagagtgtagctattcctgcatttgtggcctcaagggctaaagtgggacaacgctggta

SEQ ID NO: 142438 - DNA, 408 bp, Homo Sapiens
ccttctcggcgctgccgcgggggagccctacccggcgcggtgtgcactgcctggccgtgtgcgccgtatgcccgccctcggcgcccctcgccccgcggcgcccggcgtggaccgggtcgcgccccgacgccagcccccgccaggcagacaaagccggggccggggaggtttgccccgcgccgacggtggccgtgacactgactccagtctgcaagtaacttttcctcttttgcctcttctctttctcccctgttccagtgaacccagcatatggggtggtgtaacacacacaaggagtcctaattcaatttgggttccgtaatttcccccaggcatctttaggtcccttggaggtggcactgatgggtatggccaagtgttagtgttatgtatgggatggtgtccacc

SEQ ID NO: 142439 - DNA, 445 bp, Homo Sapiens
ttttctcatttaaattgtttattatttatttccatggaattttgtttttctttattaagaccaaaaatgtgtttctcattaaaaaatggcaacttttatgggccattagtggcctgtgagttcacgaatttgcagtgtgtctgaactgttcacagagtctacacttgtaatctgaggagccttcctactcctcctcatcgtcagagggctcatttggagacatgactgagagggaggccaacagagcgtagtaacagatattgtacaaagacattacactaccattatctgagtaaaccagactactaagaatccctgtgccttccatccaggtagtagccgaagatgtaaatgtgacattcccagaggtgccctcccaacttgggccatttggttcctgagggggcccatttcccaggggatgcctagtggcactcttcttgga

SEQ ID NO: 142440 - DNA, 569 bp, Homo Sapiens
  misc_feature (488)..(488): n is a, c, g, or t
  misc_feature (522)..(522): n is a, c, g, or t
  misc_feature (526)..(526): n is a, c, g, or t
  misc_feature (530)..(530): n is a, c, g, or t
tttgtttgtgaagaagtcatattttatattgatgagggtgctgttagaaaatgttgatggatggcttcggtcactcatgctagtctaaccagaggggcctgtgacggtgtctgcttctctttcaggattcccagttgtttctgtgtcaggcactaagcaatctggcggcttttggtccaaatgggtattttagttgtctttttgcaccttttaatccctcttcgaagagtcaagttcaaatgctggaaaccgtgatgtctctggtcccaggacatcagagagaaagtgaatagcgccagccatgccttcaaagagcgaatagggtctgtcaggaatgcggcacccgtgtgctccgtaatctagacaccactctgcaaacttgcaagctcggtggaggtactttttatcctgcttgagacggtaaagggacaggaaggaatatccgttgccaggagtcccatggcatatcccgtagcccttccgagcanacctcgctgccaatcacatcgctacactcatggncctntcangtactttctcctcttaagaccttgtacgctgcctcgtgc

SEQ ID NO: 142441 - DNA, 350 bp, Homo Sapiens
gcggccgctccaacatcagaatgagctcagaactgtcggagcacagtggagcaagtgattcattctccctcagggatctgggggcggcttcagagaggaggcagcggatgatctgggccttgaaggatgcactgggggacaaagatagggcctgctttgttcagggagaatgagtcacttgggggctagagacaggtagccagatactcatggggggtcctgaatggctgaggggtgtgctctgtcctcagtagggcacggggaaaatgtggaggacctgggaaaaggaaggtggctggaggaggagggtgagctcgctcactctatctatgggagactagagtggagtt

SEQ ID NO: 142442 - DNA, 603 bp, Homo Sapiens
tgtatcactgccttgaggcgcactttttataatcaagcctcatcttgctggtatcatgggaactccagcctgctatctttcatgaagtttcatctcctaaaaagcttacccagcctgagcttggggacctgtgcagaggaaactaagaaaaatgcactcatcaactccttctcccagtgaacgcccgagatctttctccagatgcttcagcctgtctggccttcttatcatatgtgcagcacatcatgtctcagcaacagtgtggtgaggtccttaggtgtcccaagaacaactcagggagcacgggagggtctgcagttgggaccccacaactatacagctatagggtaggaggcttccttttcattggtcctgaatgaatacaaatcgctcagaaagcattttggtggcacagaaaggggatgtatttgtgttgagatcttattttattttgtatttatttatcttctttgacttgcacagcactattgggggtgggggaagcagggtagtgggagacgaaggcagaagcaagagtcaaactcagaatgactgagttgaattcactgtctagtcagcaatgcctgcttctgagtttggccc

SEQ ID NO: 142443 - DNA, 576 bp, Homo Sapiens
cttgggaaattcaatattgttaagatgctagttctccccaaattgctctataaattctatgcaatgtcaaccaaaatctctgcttttaaaaaaattgacaaactgattctaaaattcctataaatgccaaaagcctagaataatgaaagcagttttgaaaaagaaggagaagttggacaagtacaaattttgagacttattataaaggtaaaataatccagaaaaatgtggtattgacataggatacatatatagatcaatggaacagagtagagagaccaaaaatagattcaatgtatagggtgaattgatttttgacaaaagtggcaaaatactttaatggggaggatggtagtcttttcaacaagtgatgctagaacattgagttctagcaccagtagaactagaatgtggaaaaagtgaactttgggcatatcatgttgaaaaataactcaaaatggatcacagacctaagcacaagaactgaaaatataaaacctccagaagaaaacataggagaaaatccttgcaaccatggaatgagcaaagatttttcagggcccccagtgcatgaaa

SEQ ID NO: 142444 - DNA, 557 bp, Homo Sapiens
tgcaggagactgcgagccctgcagaactgctagctgcgggggagagggcaggggtcgggcgcctgtggcggagccgggctggggccagggcaggtaggctgaccagcggcgggagaagccggcggagggcgggatcgcgcctcctgacatgttgggggtatccctggccgggccgggccggggctaagagcggcgctgcgggccggggtcggggtcgggtcgcggtccgcccccgctgtccctccgtcctgccctgtcgaggacgtgcgttccgcactcggccgcctccagagggagcgagggaagcggctagaggatcggggagaaggagcattcgccggaggctggaggaggctgacccgcgtccccgcccagcctgctcctatgcggtacttgaaggatggcgaagaggtcgcgcaggtgggtggcacccctttcgcccaggcctgtcggcgccgtctcggctcagattctctttcctatcccgctgccccctcccgccataaggccctccctggcgagggcagaggtttttcttcccgcgtccccgcggccgc

SEQ ID NO: 142445 - DNA, 456 bp, Homo Sapiens
tttaaatgaataacatactttatttaatggaatagagccaacatattatcattgcaatacacaaaggaaaagttattagtgagatattttacattattttttgaagtaggtatttgaaatctggtatatattttatacattgagcacatctcaattcagactaggcatgtatgaagtactcaacagacattggtggctcctggataccatatgggacagccagtgccattctcatccttgatatttgtttctaccctcacatgtacctcttaatttcttttatagctggttcaaaaaacatattgcacctctctaccaaagtcatagcagctcactcaacagctgtttgttcctgcgcataaagagagtgtggaaaagctggaagaaatcatcctcttcctttaagtgctttatattgttcatattttctctttgtgttttctttctattctgaga

SEQ ID NO: 142446 - DNA, 518 bp, Homo Sapiens
gcggccgcggccacaacatcctgcgccagacgcgcagcgagcgctgccactgccgcttccactggtgctgtttcgtggtctgcgaagagtgccgcatcaccgagtgggtcagcgtctgcaagtgagcggcccggggtcccctgggccctgatcgaggtcccctcctggagcctggccctctgaggcttacggtcttggcaaggcagcatcgccttggctcttgggaagaggagattggaccacatgatcttataggaacccctcagctctgaggtctgtgatcgccggacagtccaggcctgtctgaaccccaccactcacttctgtgggctctaggactgactgggttcttcctccctccccgaagcccagacagttcagttgggctgggggttgctccacaccctaaaacaagcctcagccaggcaacccgtcagtctgtctccatcctttcaccccttccctggagatgggaggtggggaatgaatggaagctgacgggcagagagaggaggatt

SEQ ID NO: 142447 - DNA, 630 bp, Homo Sapiens
caggatggagccccgcagggtgatgagctcgcgggtcgtgaagatgatcctgtactggtactgaggtccgtgctccttgtggtcttccagcttctcccgcttaatgctcacagccactggccccagcttctcatccacgccgaagtaattggcatgttctttgcccacgaagtaatcctggtagtagcgggcgcccaggtccacatgctcgatgctgtactgccggggccgactctgcgtccgctgctgctccttgggaacttccaacaccgagatgctggcgttggtgcggtaggcgctcagggcgggctctgccaggtggccctcgccgctgctcggggagcccacggaagcccgggagaagctcacgttgcgctcacactcgcccccgatctcattgcggaagtgcgggcagctgagcagcaggtcgttgctgttgtcatcgccgaggtcctgctccaagttctccttgcagtttaggtcctctgtgctggtgaaggccgggtccaggcctccgaggctgtgggcccgcgaggccgtgagggaggccatggccgaggcggcggaagcggccgaagcacccgtggtggtgttccgccgctgcgacaccgacaccctgttggcggccgc

SEQ ID NO: 142448 - DNA, 901 bp, Homo Sapiens
  misc_feature (41)..(60): n is a, c, g, or t
gaggcctgggtggcgaattcggcacgaggctagtctcgagnnnnnnnnnnnnnnnnnnnnacatggattttcttttttaatagtaaagcatcatttattggtcccgttattcccgacaccaaacccatctccactttacagttgaggaaactgaggctcagggagtctacaaatcctggccaaggacagtggcagaggcgctatctgtctccaaagcccaggtgtggcccttctgcttggagctcaggctctgtgatgggagtctctggtctgccccactggaggaggcaggagaggcagggactggggaggatggaaggctcacccgcacagccagtgcgaagatgcagcgtcggcagaaccaaggtgtgagcaggggctggtcagcactgcccgctatggggatgtggcactgctggtggtaacccaggccacacttcccgcagatgaggatctcattcagcggccctgatgtcttccctaggcagatgttgcacttgggctcctctcctggaacaccggcatgctgtatgtccttccataggacccagtatttggaattatcttcgaaagtcacgaggcagctttgcttagagctgctgaccctcttgatcttccccgaggtagtacaggccatctgtccaccggcacagcacatactggccctccgtcagtttggacatcaagtctttgaagttgttcttgaccttcgccagggcccccttgttgggggggtggctggtgggcaccataggagtcccgagtccctggatccagagctcgattctccatcagcttcccctgacacgcgaggctgcgtgtccgccggtcccacttggagtctggccaccaggcgcattggtggcggaggcggctgcgctcggcccgcggctgcccgccc

SEQ ID NO: 142449 - DNA, 667 bp, Homo Sapiens
tttttcttttccaaatgttatgttttattacatagacacacataaatgttctgttttatactttaacacgccatacctagcaacatatctcacacacagaagagaatcgttagtacccatttgacaggaatctttaatgttttcactttttcagggtttaaggagtaacagcatcctaacacccagaaatgccacagtgacctaccatgaggcaaatatcaccagcctacttaaaaaaccaactattgatataataattaacttctgatatactcaataacaagtaactatatttttcaaaatattagtatctattgaaacaacaaaatattacctaattctgacttagctttcctatacagagaagactgcacttagaaattttttgtctgcttacaaaaacttacctacataaaccagtttagccacttttccagtaagatttcaaagtaatattcatttcctttttcctgtagcccagaaacagctaagtgattaagagtcattttagacttcctgtagttcccatgcaactttttagcactgccaatataccagcacctgtacttactgccggctttcctggtgtgggaggcaaagatggttctagtagggcccagatttttctaccccagaaattcactttaggtgtagatttctaatttct

SEQ ID NO: 142450 - DNA, 670 bp, Homo Sapiens
ttttttttaagggtcaaacactggatttagaacagtcacatgacaaaaaacatcaactggaaaagggtcgccagagtgcagtcagcacatgttttgtgggcctgtttatgctcaggattgtcttggaaagtccaaagcaccagaaaggtgtagcatgtgcattaagggcactgctggctgccagttgtcaagctcctcaacctcttgtatctcatttttcaaactgttggccttctccttcacccagaaaggcaagttgggaatttgtggaagaggctcaagtggaataaatgtatcaaatttcttttcataaggcactattgaaaaattcactggtgggagcattgatcctgctttgtggaagcctttactctgttctgggtacatatatggattgtcgcctggagttaactttgggattccattcctgggatcaatatcgtatttctttctcccaaagcacttgtccaccgtcctctctgatagagacctcttgttgccgaagaaactccattaaagagcactgcttttccacgggggaaggaggggggttgctgtaaacctgggtaaaaagtcactcaggaagatgccttctttgtttgcacataagcaggtgaattcttgaggattattcctttggactatggcgcaccttctaaaggaggatcaa

SEQ ID NO: 142451 - DNA, 169 bp, Homo Sapiens
tttttcatctttaaagacatatttatttttaattcttaggtctacacatgttttctgttaataagttggaatcttaagattgtattcacttctttatttattttaaaaaatactcagttctcctgaaacaatggtgcctttgaaaatgagggggctaatagaatagaag

SEQ ID NO: 142452 - DNA, 1212 bp, Homo Sapiens
tctggtggtgctcacgcagctggctcctctgttgtatctctcctcagctcgtgtggtgcccttcgtgtggcgtttgcgtgttcggtcggccgcttactgcggggctgtctttatgtctgagtttcggggctgccgccgtgttgtttgcgggcgtggtgtttgcggcgcttggtctgtgtggtcgcccgctggtgttgggccccccttgtgtccccctgtgggcctcttttggtatcatcgcgcggttgctgcctttggcggggatcacctcgtgccccccatgtgggcatgcgtgtgcggcttcgcccccttgcatggtcatcgtgtcggatggtgtcctactttgtggccaagcttttctgttgccggtgccacgttcacggcacgggttctgttcctggtcgtagctgttgtggcttctggtcattgggttatcgcatcttccccatcacaaagggtgcagacaagacattgcgcacagcgcgtttgtattctctgtgtgtggttcacacgcgggagtcgcttcgcggactcgttgtggttggccgaccgtggaggagtgtgtgggcctttgttgtcggtggtggtagagatcaaactcgtgcgatgatgactcttattgtcgaccccgtgacgtgtacgctggtgaccatgacgacagaaggcaggctctgggatcctaggattttagttacttgtggcaagcttccctcggacgtacatcagccacattacaaatgtatgatgcgcacgctgggagaagctaccccttatcccagggacatctcggaaacgcgtgcctttgctttgtcctgtgtaggacgccgccttaggtaattagttgattcagggttgttggtggcgtccatttgaagtctcttcccaggctcacaagcaggacaggttctccagggtagggagatgtgcctaggacacagaagagctgcccctcgcctgtccactcctgtcaaatacttctgttctccgcaacccattttgttgccccaaaaagtatttttctatgcggtggttgagactcttagactggagttgcccatttgtcttctttctaaggcaccttcttgttcttcatttcatgtcctcacacctcatgtcatgactctttcggctgcttttctcccagccaaactgagcgaggggcttttgtaccagtgtttctgtcactggcctattgagagcctgccagcgtca

SEQ ID NO: 142453 - DNA, 443 bp, Homo Sapiens
ttttttttaagttactttaaggctttatttgttaagttactgcatagagttgcaaaagcatcgacaacatatttcctcaaaatgtagagtttacaagttttctgagctccctgaagtttgcaatctattccagtctcagtgtcctctaattttacatcaatcttctaatgatctagattgcccattgcatgcagctatcttttcatgtttgatttggttaaaggaaaaatcggctttcctttgtgaaaatgcatattgttagcgaattgtgaaattgtgaggaattgggctgtaattactgaatattggctctccatgaacatgttgctaaaacgtgggaagatgtgccagagaaattgtctctctcctcagtagtccatcgttacagcaacaattgtggaaatcagatgagatgtggaaccatttttgattgccttaaatgg

SEQ ID NO: 142454 - DNA, 664 bp, Homo Sapiens
ttttatcctttaacagatgcagctctttattttaaaaatcagtataatcatagtccacctgattcgaaatgcattctgtggaaattcaatgttacttaagtaaacagctagtggaacagtaataattatagctacaggcatttatggagcacctatcccgtgccaggcactgtcagatgtcctttaaatacctgatctcaattaaccctcaccacaaccaagaatgattaattctccaaggtcacagtgctgataagaggaatttaagcccagattccttttactacaaagcttgaagctctttcccctgtttgccacaacagctttcatcctaggcaaagtggccaggacccgagcatggtttccacctgctgttgtagccgtgctctcccaccagatgacgcaatcaccaggttagacttgatctcgagggaaccagaggaggttgtaattcactacacccacaaacagatttaactgagcaaattactcaacagccagagttgaggtaactacaaagctgtgatgaagggctcccattgtaaaaattcaaataattttttaaaacacaagaatacttattaaatgcctattctgtttccagcattcttttaggaactgaagaagacattggatggactatataaacattcagcacagaagg

SEQ ID NO: 142455 - DNA, 470 bp, Homo Sapiens
attttaatttttaatgtttgtgagtacatagtaggtgtatttatttatggggtatatgagatgttttgatacaggcttacaatgcataataatcacatcagggtcaacagggtatctatcacctcatgcatttatcctttgtgtttcaaatgatccaattatattcttttagttaattttaaatgaagttaaattattttttactacagtcactctgttgtactagccaaatcctaggtcttatttgttctaatttttttgtgcccactcgccatcccctcttcccacccccgccccactgctacctttcccagcctttgataatcatccttctactctttatgcccatgagttgaattgttttaatttttagctctcacaggtaagtgagaacatgcgatgtttgtctttctggcttatttcacttaacataatgacctccatttccatctatgttgtttcaaatgaca

SEQ ID NO: 142456 - DNA, 668 bp, Homo Sapiens
  misc_feature (456)..(466): n is a, c, g, or t
agaatttttttaaggagaagtcattcttagcactacaataattgtaccagtaattgaggaaaccaagacaatcttcacctgaataatagagggtctgagaactgtcagccttttgccattcaaaaacatttatgtccaacctgaaaaaaaagcatcaataaaacctatcccaagcattcaaaatagtcctttccaaatgttatttattttaaagtcaatcagctcttttagaaacagattctggtctggctgaaaactcccacaacaaatttactcatccagtgggtaatatttaatgccccccatgggcagagcacacaaatcttcagataaacaatactgaattgattcagcacagattgttcagatttgaatgaccagggagttgtatttgcacatgcaagaacactaagaatctcccagtcctcaactaagaaacccttcaagctatgatgnnnnnnnnnnnggggtcttcatttttccaagagggggtggaggtggggatcactttttagctaaaagctatctctcacttcaaaattcttgtctttttctttgtggacaaacaccagtagtctatcacttggagatcttttaatatctcccatcatttaaaacatccacgagagtttgaagatttgtgttgattgccagatacagaagccccg

SEQ ID NO: 142457 - DNA, 340 bp, Homo Sapiens
tcacgctttctgaggaggagagcatggcgcgggcctcggcgaagcacttccgtcagcctcgggcggaggatcgtcttagtagctggccagacctggaggagagcgggcggtctttgcgggcctcaggagataggtggccgcccggcccctttccccgcctgcccggataggtgcgtgcagacccaccaaagaaaagcggtcgctgcgggacccccagtcccacctcggccgcgctgtgggatggctgcgcccccagggcttcctgcgtctccaggaagccgggagtggcgccctctgcggggtggggtgctcccgggccgaactccggacaggtgagggg

SEQ ID NO: 142458 - DNA, 398 bp, Homo Sapiens
  misc_feature (45)..(104): n is a, c, g, or t
  misc_feature (111)..(249): n is a, c, g, or t
agaccctccccattagggccccaacttccccaatatctattgtannnnnnnnnnnnnnnnnnnnnnnnnnnnnnnnnnnnnnnnnnnnnnnnnnnnnnnnnnnncattctnnnnnnnnnnnnnnnnnnnnnnnnnnnnnnnnnnnnnnnnnnnnnnnnnnnnnnnnnnnnnnnnnnnnnnnnnnnnnnnnnnnnnnnnnnnnnnnnnnnnnnnnnnnnnnnnnnnnnnnnnnnnnnnnnnnnnnnnnnngaggtggctcacgcctgcaactttgggagcactttgggattacaggcacgagccacacacctggcttatttcctggaattctttaagtgaaaggcatggttaaacattatggcatcagtgaggtagtggtgtggggttttttgttgttg

SEQ ID NO: 142459 - DNA, 603 bp, Homo Sapiens
ttaatgttgctggttattgtttcattgcaattttttccacggtactttcaaaaccaaagaaagatttaatatctaaacttgcagactgttcaaaacgggtccaatcttcattttcagggtgaacggtatagcaattggaaaatgtttcattatgaccctcaatgtgcaaagtacgttcccgagaattcagtgagtttcttttggacaaaataaaacgtaatcaacttcctgctatctttcttcatcagtcttggtgcatctacattcagcttgcagcgcctttcaatgacatgaacagccccatcttcactcttgaattcattcacagtgtcactggccatgaatgtctgaatcaaaggacacgttgggaacctcctttcataggcaggcataattaatttgaaggggtatttgtataccctccactggtgactggtatttttgcaccatgattgtaatacaacagcaatcctttcacacctgtcttgccaaggataatcattaagtatggtattttaagctgaatatggtgagaggatattaaaacttacaaaactgaatattctcaaggagcccaaagtctagttcttgtcagaatggctg

SEQ ID NO: 142460 - DNA, 951 bp, Homo Sapiens
ctgggccatcttctggatgcgtcggcccttgagcctgctgtgttctggtggatgttgagattcttttgaagagggtcgtgattggtaggcggctctccgccggggcacaaaggtgtatgccttcttcgttctatttggcgatggtagtatttcggatgatttcctttcctgttgttgatgttgctggtatattgtttcattgcaattttttccactgtactttcaaaaccaaagaaagatttaatatctaaacttgcagactgttcaaaacaggtccaatcttcattttcagggtgaacggtgtagcagcaatgctcattaatgatgacccgattggaaaacgtttcattataagcctcaatgtgcaaagtacgttcccgagaattcagtgagtttttctggacaaaataaacataatcaactcctgcaatcttcttcagcagtctgggtgcatctacatccagcttgcagcgcctttcaatgacatgaatagccccatcttcgctcttgaattcattcacagtgtcactgcccacgaacatcggaatcaaaggacatgtagggaacctcctttcataggcagccataattaattcaaaggggtatttgtacaccctcactggggactggtatttctgcaccatgattgcaatacaacagcaaccctctcacacctgtcttgttgaggataatcattaagaatggtactttatgctgaacatggtgagaggatattcaaacatacaaaactgaatatcctcaaggagcccgaagtctagctcttgtcagaaaggccgggcctgggacacggggtggcgaggggcgctcataccggcggctccgcggggcagtctcggttccactgctccgcgaccgtagctcgaccgccggttccgcctcgtgccgcctcgtgccgaattcggcgcgccgtcgacttcatactctctcgcc

SEQ ID NO: 142461 - DNA, 685 bp, Homo Sapiens
  misc_feature (472)..(472): n is a, c, g, or t
gagttcattttctgaagacaatgtaaaccaacattcctttaataagccccacagaaaactgcttttcccttgagacaaacgtccttggcaaaaaggtgaagtcaataaatggctacccaaaataagagtcccacccccaaatctcaggtggagatattattacacccgtctcataaaactttcaagtccctatactatgcaaagagtctcataactgaccacaggattcttctaacatttgacaactttagtgtagaaattggtttctagagttccatctcttcttctgtgctagtagctgtctccaaactattataaagagacatccctgttggccgaggttccgaaaacagttcagttctctgagggaaggcagtgccagcagctacatgcttagcttggctctctcctgtatagttcttagtattagaggatggctttggcttatcagaaaggagttcagggaggggtntccagagaacaagctccatggaaggacggctcatagactcaatcattttctttgtaaaaacttcatcaaattccctcttcaaacctgttttcatggtatcagaaaggacaagactggggagatggttaacatttctgtcagcttcaacttcttcatcttcatcaattatcctgtcctcaatctcctgaagcttccttcgggcaacttcacact

SEQ ID NO: 142462 - DNA, 599 bp, Homo Sapiens
aaacatcacaatataaaatgttaactggtgatgtagtaaaccaacatgataatttgtcttatttgccttactagcattaccaccatataggcacttttccacgtagtcaaattatgaacagcatttttctataaggcatattccatgcacatcatttacagaaaggtaaattaaaaaatagaaaagattatggagcatgaaatccgcgtgcatgtaatgtaagcatatgttttatatgtatttttctctctgtacagaataataaatatcactatatctgatgcaagtaattcacttccaggattgtgcatattaagcgatcagactaatcccatcattaaattattatcttgcacttatcattaagactccattaccatgtatgtgatatatacaggacatgttccatgtaacatgattttccgctttacaaaatgggtctgatttctgtgtttttacagagctgaacaagtcagcaaagcatctacaaaatgcctctgatttgtataaatacactggtgtgtaaacacaatgaagattttgaagtgggcagtcatttcaacttcagtgagtactattccttgcctcatctccatgct

SEQ ID NO: 142463 - DNA, 464 bp, Homo Sapiens
  misc_feature (54)..(54): n is a, c, g, or t
aggaaaaggggtgaacactttaattactcctgagagccccaaccggcagaaacncaaacaggccaggcagaacccccgcagacccccgcagaccccatggacccacggtgcagaggcccgacggcaaaaagcacagggtaggtgggtgtgggggcaccagcagggacaggaggctgactgtggggacaggatgtctgggtccccaggctttgactgtggggacaggtgtctgggtcccccaggctttctcgggcgtggggggactgccttgctggccctcccccacaaaggttagacgcaaagcagagcccccagtccctgccccttctcatcggggcagggtctcccgtggatgaactcccagctccctccaagtccctcatgatctccctccctccacccacctggctcaggcagggccaggcatgggggcctgtcgggctagtcggggctgtcgggctagt

SEQ ID NO: 142464 - DNA, 502 bp, Homo Sapiens
ggggccacgggctgtttattgatacacactaaacacaattttttcctaatcctagacccagcattttctgcattacactagcccaggggtcctttctgaaactacactgttcaagttacagacatatttaaatgtttaaatttaaaatgttaaatttaacattttaacatgtttaaatgttcatagacacatacaacctgcccttttacctttttgggaaatgaatgcagtaaatttacttagctttctgagggaaatgatagcctgaagggatgacgttttcaaataccccaaactccaactaagataacctggaacctattaaatggatatccaacattttgtactgaactctaagggtatgaacaccaggacaatggttattctgaggcacagaaaatacagccaaagcagcagctcagtatgtaccccgacagtgcctagaagagacttatgtgggagacaaagtttctggtcaggtgtatttgtatacttcatcagg

SEQ ID NO: 142465 - DNA, 629 bp, Homo Sapiens
tttacagctacatcactatttttaattgtaatatttctaaaatgtcatttaatctccttacacattgaagagaacaaacagtgggagtgtttattccttaagagagaataaactgcagagattaaaagtttccttcgagtgtatcatcttattaaaaagtacaaagtttcatgaactttcaacaagactgcaaaataaatatgccaggtaggttgagcctatccaagtgaaaaacagggttatttgacatttagtgagagtcaatgaaaatatgaattatttcaaaggaattcatgatccaggtaggaggatttagatcctacggtatgttagaataaagctagtttctagcagattctgttaacagctccagactagaggggacggagtgtgctgctttccattctcttctctacttctgtcactggggagaagatacacggatcacagctctgagaagtgtgcattaaagcacatttgctaggctgagcactggaatggtgtgggctggtgtgaaaatgaagcctacgtcttcttggaccctcccagagcccttcacctcaagggttagacatctctccttctctaaactaacagcagcactcaatccctacgctggaatggaattg

SEQ ID NO: 142466 - DNA, 582 bp, Homo Sapiens
tttaggttttcaatacactttaataaaatagtgaaaaataggtatctctaggatagtgaactatgggactacaaagggcaggacgatacattttacttggttaaattcgcttaatgcttactcctttctcaaagcgccaaccaagaatttggctactaaataaagaaaaaagctgttagtggctctttatccgccacgatagggtgctctgaaacccggtcctgcagacattcccttggcccacattttatagcttccttctcagtctcaaggcctgtagtctactgttcacactcgagcctctcgcaaaatacacaagctcaaaagctcatggcgttctccccatctggcattctcggccttagaatagcaaacgttagggcaccattaggttcatagttgccagacccttcattttcttttttaatctttaattttcttcttaacaaggaagacattccgcaaaaaaataaactccctcttttgagctcctttctctgaagatggtaactggaactctcattagtaaagaacctcgagttccagttgctttggacggagtttctcgcttagtattttgct

SEQ ID NO: 142467 - DNA, 232 bp, Homo Sapiens
aatttccaaattttaagtgttccctctttggggcaaattcttataaaaatgtttattgtaaagttatatattttgtctacgatgggattatgcacttcccaattgggattttacatctggatttttagtcattccaaaaaacacctaattattaaaacatttatagagtgcctactgtatgcatgagttgagttgcttctgaggtacattttgaatgacagcatattgtaag

SEQ ID NO: 142468 - DNA, 425 bp, Homo Sapiens
acgttgaggaagtccagcaggcgcaagcggccccacgcctcgaataccacctgcccgttgaggaagcggcggcaccagctcgtgccgaagcacgccgggcacttattgagctgcaggaagcgccggtcggtcagttcgttgcgctgccaagaggcgagcagcgacggcgagtgcagcaccatcagcaccaacaggctgcccagcgccgccagcttcagcgagcgggacaggcggcccagcttcgggggcaccaggcgccacataccgcccgcccgcccgcaacgggagggcgagggcacccccggggcgcccccgccgcgccaagacccggagagctaccggcaggaaccccgggcgagagaaggagctagcgcgcgggctggggcggagggcggagtaggtgtgtgagagaagaagacggggag

SEQ ID NO: 142469 - DNA, 1050 bp, Homo Sapiens
  misc_feature (897)..(897): n is a, c, g, or t
cactgcaagcttctccttggcttgtagctgccatcttttcctatgtttcttcacatggttttcactctgtctctttctgtatccaaatctctcctttttataaagttatcagtcatattggattggggcccaccctagtgacctcattttaaaattgattaactaggtcgtggagacacgtgaaggttggtgcggagttcgtctctgcaagcttggttgtcctgggatggattcctcctgctcttcctctgcggcgggtttgggtgcagtggacccgcagttgcagcattttcattgaggtagagactcaaaagcagcgcttccagcagctggtgcaccagatgactgaactttgttgggagaagtgcatggacaagcctgggccaaagttggacagtcgggctgaggcctgttttgtgaactgcgttgagcgcttcattgatacaagccagttcatcttgaatcgactggaacagacccagaaatccaagccagttttctcagaaagcctttctgactgatctcagcattacctctttggaaaaggaaggtagttcaagaaatgaagagctgttgatgggatgattgaagaaacagctatgagaggattggctcccatcttttgttactcttgggacatcctgtcatctgagaatgaacaaagaccaattttttgtgtgtgaagcttaagggtcatatgtttgcttgtattttttaatgctaatcttgtgaaaataattgacaggcgaaagaaaactctatttagatgcatattactgtacatgggactatgcttttctcaaagcccccattaactgctttcctataattttgatagtggggaccacataacgttaaaaaatctctcattgtgtgcgagtcatttctgatttcagnggggagatccttgtgttatcagaaagggcagaagtaggggaaggaataattgggtatcctttatctagtgtttgatggtcatgctggagaaaatatctgtagaagggtataaggtgaattcagtatctgaatctcctttcctattgatgattg

SEQ ID NO: 142470 - DNA, 437 bp, Homo Sapiens
gaacacctgtcacctcaagtgcctccagatcattttaagtctccggcagcatcagagcttaccccatggagcatcccgccccatcctcacttcttaccattttaaaacagctctcatgcacctcttgctacggctgcccctcacggactgggcccacaacatgctctctcagcggctccaggacattctctggttcttgggccgtggcctccagcaaaggtccctccatcatttcctcattggtaacaattttctgcccctgaccatcccaatccctaagacatttaggaatgctgagccggtcaatctcttccaacacctggtgctcaaccccaaggcacattcacaggcagtggaagagttccaaaaccttctgacccaggtgaaaactctgcctcatgccccactggctgcagcaccttgatgtaaagaccatt

SEQ ID NO: 142471 - DNA, 442 bp, Homo Sapiens
gacagagacagccattttgcttttcttttattctttggcagtgataggcgaaaaataatgggctggtagcaaagccattccctgggctgttgcttccactcagatctggctggtggagagactggcagcattacaggcaggcgcacaacttccagacctgggggctcaggggagtaggttggaggctgcattctagcaagccactggggctctgatctccatctttcccttccttgctgcagtgcacacaggaagacgtgtcttcagaagatgaagatgaggagatgcctgaggtaggcttgccccctgaggtggcattggctggaagctcttgcagtcagcaacattggtacccatatccagaactccagtctaaaactgattcatgccttgcatttgtagcgaggagaggagatgtaatgattcaggtttctcctttagg

SEQ ID NO: 142472 - DNA, 453 bp, Homo Sapiens
tttttggggtcagttcttgttttagtatgacttgggaagagggcttcagttgaagcccgtgccttgctggagagttgttcttcagatttctgatgttatcaaggaaatgggaccaagaggtcccctagctccctactggcctgaagctcttgatgctggtggctgccccagggtatagcttgggcacactctgggtagaagatgctgaggcctccacagtttcaccctcttgttcttcgggctgtaatgtttcgagatccttccttcaagtgctgaactgattgtaactgagtttccagagggacaagaggtttccctgtggttctgcttctcagggatggtgtgtggagtgattcctgtgtggccatccaaggaagctggctgggaactgcctctgatgggggaggccatctccccattcagctgccctgtttgtatctggaggaaatcagt

SEQ ID NO: 142473 - DNA, 364 bp, Homo Sapiens
atgagagaagagcagggcaggtggggtctaaagagctcagggtctcattatgtttctggtggcagctccttcgtgggtgggagtcccctctccccatagacgtgtgttgccttacgagaggcttgtgcctgcctgggtgtgtgacacagttactctgggttcagatttctatgttactgctagctggttgggagagtctgagggaatcatttcacctctctgtgaaatggagataactcaaggtcccttacctcatagagtccatgtgagaagtaaatgagggaaagcacagacattactcgctccgggggctgcacctccagaattgctgttgtcattattaccatgtgtctgacacattgat

SEQ ID NO: 142474 - DNA, 422 bp, Homo Sapiens
ttttttaaaaatttcttttcttattacaagaattccaagatgtgtcagagttgaccagaagcatagagaaaactacatagtcgagtacccaccaggggaatgtggtagaattggcagtctgttggtctctttgtaatgtcagattaaagaaatcacctggaggctgacattggccccttcccttcccaggaggcagatctggcctaaatacggagatgcgtacaaagaagacctaggatcacaatcgttcttagccatcaaactcttcttccaggtcctagagaaagtggccactctataccaaagccaaagaactgcagagtactcctcttggttggggtttcatattgctcttgcaattcagtttcctctcatctttgctgtcatttcgtgggtaccaacagccttggccaggtgtgaga

SEQ ID NO: 142475 - DNA, 387 bp, Homo Sapiens
cagttgatgcatatttttggggtacatgttataatttaatacattcatacaagttgtagagatcaaaccagtatacttggggtgtcttcatcatctgcacgatttgcctttatgctagaaacatttgaattactctcttatagctatttggaaatgtacaattgattattgtaaagtacagtcaccctactgctctctgaaacagtaagtcttattctgtcaaatcatgtatttgtacccattcatcaacttctcttatctctacctccccactgtgcctggcctggtacaaggtaatttctcattgtggtttgatttgcatttctctagttactatgttgagcaccttcccatgtactttttggttggttgtgtgtcttctctgga

SEQ ID NO: 142476 - DNA, 426 bp, Homo Sapiens
actatttcttactcaagtatgtttattgtttttttaaaaaagccttctagcactacagtaactgcgaaaccacccgttacttgccaaaataaaaagtaattataaaaataagtaaaacaataacaatgtgtttcgattctagttggacaccattgcctgctgaaagctcttgcagttgaatcttcctctctggacagatacttgtgtcaggaaatttttccttgcagagagacaattcagcttctccacaacttctgccctgctgtcttattctcgtcttggtgcccggcacaagtttgggcgcacaggaacctgtgatgctggccagagcatcgcgaccttaacctcagtttcttctttggcaaaatggagacatggtgaggattggagggaaggtttctaatgcctggcaccccatcggccagg

SEQ ID NO: 142477 - DNA, 453 bp, Homo Sapiens
accccccgttcgggcgccgacggttccgtttccggagtggagggcacgccaggggtgtctgaagctgagaccccgggctcgcagtcgccccatgaatttcgagttccgcaactgacgctactgggcggggcttcatggccagggcctcgctcaggcctaagtttccccacctgtgctcaatgcacaggtgcggtgccgcctccagggccggccgagaagagaggccgcacccgcacggggactgcatctcccagagcgccccgcgagcggccgagcggcgggactccatgccctagagtgccccgcgggcggccgggcggcgggactccatgtcctagagtgccccgcgggcggccgggcggcgggactccatgtcctagagtgccccgcgggcggccgggcggcgggactccatgtcctagagtgccccgcgggcggccgggcggcggccgc

SEQ ID NO: 142478 - DNA, 583 bp, Homo Sapiens
attacttaagtaaatatttatttccgatctaggaaatataagctaatcattacatttactttatcttaaattttattttttattgatacaaaatacttgtacatattttggggatacatgtaataatttaatacattcatataatttgtaaagatcaaatcagtgtaattgggatatctatcatcttaaatttttgtcttacgttatttcaattattctcttttagctattttgaaccatacaataggttattataaactatagtcaccctactgatttatcattatcaaactgtatatttctatccatcaatcaacctctcttcatccctcctctcctctccccttctcaacctctggtaaccaccaatctactctctgtcttcatgaggtcagtgctgggattacttgcatgagccactgtgccccgccaggatttcattcttttttatggctgaataatattccattgcatatcaatcacattttctttaaccattcatccactgatgggcacttaggttgattccatattttggctatttcaacaggacttcaataaacatgagaatgcagctatctct

SEQ ID NO: 142479 - DNA, 599 bp, Homo Sapiens
ttttttctttttctcagaaaaatgtatttgcaattcaaatgttcatataaaaagcataaattttaaaaagttcatagatgtgtttttagaagtgctatggttttgccattcactgcaattacattgcaaaatgtgcagggtggtccacactgcatcatcttatgcttttgtcacactgaagtcactctcatcacaacctcccccgagctgttatcttctgataagtcttcatggggcctcatccgattgaacaggtgcaataacacatagccacactgaaaccttggtgaggttaactgagttgggtggaccaagtttctgttccgcagagctgtcaatggcaaccacaaagtcctacttgtggaagactctccccggctgctttcttcgatgtctgtggctttgtcataatttaacacatcccagtgcaaattcacagctcgccagcgcttaaacactctgtaaactgcagctccttcatgaacaatgagacctggcaaggttgtttcattttaatggctataacatggtatctataacagcaaagttcacaggtccaggaacctctctcactgatccattttagcaggcacagctcc

SEQ ID NO: 142480 - DNA, 709 bp, Homo Sapiens
tttacgtaataataaaatacacaatacggtttattgtaagctccatatagccattgattctcaccgaatgctttcattggtttttgctgaattctgcatctgtagtcagcgtagggtcatcagggatgattgagcgtagacacaacatgaaggttgattgacattctgtttatattaatgaataaggcaaaagtgaaagcaaaaaatgtgcatcagagcttcacctgatagacaatgacatgagtgaattctttgttgaatccaataagggttttcaaatatcagaagcatgtaacctcaatgcttgtgctattcacaatgtcacagctacagacatgacgcacttttttggtttaatatgcattattagcatcctttccatcactttttaagcctggcaatcaacaaaacaataagtcaggccccagtttgaagcatttgtccatttttgtgatgccaatagttgcaccatggctgatttcaagctactagcgtgtggtcagagtgtggagatgggaagagatgggccctgtatcccatgacacaagtaggcacagggcgtctggccagtggaagtcccaggggcctgaggtgggtctgtctcacttccttacacgcacgcctccctggagcattcgccaagagaccttctgcacataagtctccacctcagagtctatttttaggaaatcaatataagacaacaggg

SEQ ID NO: 142481 - DNA, 185 bp, Homo Sapiens
gcacaaaaatttaaaggacatcctactagctagctattactactgcgttaagtaatcatttgaaggaagaattcacaaggagagcaggttataaaactaagcataataattattgcatttaactaaaaaaaatcaagtagttctgaattacacttgttttttgtcttagtaatgtgcatattcac

SEQ ID NO: 142482 - DNA, 475 bp, Homo Sapiens
ttttttgaaggcaccaaggaagaaatacctttattaggagtctaggcatgtcagaaaaacccagttcagtcacagaaaaggaggcaaatattggtacagagcaagaatccaagtgtgaaaataaaacctccatctaaatatcctaacagaaatgctgctgaatttagcccaggtgaaacttctgaaagctcctggtgaaatgagatttttgcataaagagagagctctccagcactgctgcatctgagcttcttataaagtgacaggtcttggccagcagtagaggaagagataaaggggatgtctcatcacccaagcaaggtcgtctgtgttcaagtgagagaagaaccttagggttttggacagagtaaactggggcagcagagggaaaatggctgaggaaacacaacgtctaggccgtgtgtggcataatgtggaggggtctgtgcagtctggtgtgagtgcatctccagga

SEQ ID NO: 142483 - DNA, 553 bp, Homo Sapiens
  misc_feature (30)..(30): n is a, c, g, or t
tagaaaaaggggtatgtcatgaatccatanaatatatgtaggtactagtctattttgtgatttgctaccataaaatatacacaaatctattatagaaagcaaatttattaaactttatgcaaagagaccatacatggcaccatttacagtagaaatatttaaaagtaatgatgcagtgttaaatcatagctgcataaaattaactgtagtacatactgttctattataataattttgtagccacctacagttgctattgcagtgagttcccctgctgtgagtattcgcttaaatgctgtgtgatgctaaggaatttgtgtatcaaagtaaaaagtgatctctttgggttctcctgtacatttcatcatgtttggtacaatacagtaaaccttgaatcacaccatagtgatgctggaagtgctcccaagaagcagagaaaagtaatgacagtacaagaaaaagttgaattgcctgacacataccatagattgaggtctgcagctgcagttgcccaccatttcaagataagtaaaccccatgtaagggccatagt

SEQ ID NO: 142484 - DNA, 429 bp, Homo Sapiens
taagggggccataccacctactctctccacccacaaaggctcgcctttgtggggaggataaaacctgcccaacctgcctcaccttggttattcgcattgcaaggagtcattaccatgggcaatatgggctcaggccactccttccagtttgctttccataaatgcaaactgtccctaccgtgagtcaggaatgactcctgactcacagtggggctgctgtaaacttggggatggttgagggaacacagacacagtcttccatgctccccaggtggtccagcctgctgcccagaagcaaaccatggcaggctcaccaccggttctatgccgcagggctgttgtaggacaggctgggctttctcctggactcaccttaccctgggctgacctttgcccctggtatccaataatggcctccactaaatcctg

SEQ ID NO: 142485 - DNA, 1572 bp, Homo Sapiens
  misc_feature (60)..(144): n is a, c, g, or t
ctggccgtggggcctgtctccggcttcctgttttcttttgcgtctctctccctttttcgnnnnnnnnnnnnnnnnnnnnnnnnnnnnnnnnnnnnnnnnnnnnnnnnnnnnnnnnnnnnnnnnnnnnnnnnnnnnnnnnnnnnnagtccggtccttccctccggcccacagtcattttccgtgactaattcctcctttcggtcacaaggtgaagtttgggcactgcaccccagagattactctgccacggggagaaggagcctggcgttcactgagtcaacaccactgggctggcacgtagcacctgccaatgactgaggtctgctggcccagccggtcgacaatctgatgggtgatgcgggagtctgtgacgtcataggtggccccaatgcacaaagatttgtcccaggacacttccccaccaaactcctgatgatgaaggccagggcctcacggggcacctctcggttcaggaagaacttcaggccctcaaaaagcttcttgtgcttctcctgcgcctccagctccttcctgcggtcttcctcctgcgctgacatctccccatcggtgggaaactcatccacctcggcctcctcctctgtggcaggcaccaccacgcgggccaggctggcactgagggctgccagtttctccatacaactctcggagtccaacgcgtaggtgccctcaccggcctttgcctctgcttgggcctgaccctcgagcttcgggggatagtggaggttgagcaactggtaaaggcggaagttgacaaagcccagcagcgtggtgtagaactcggtgaaggtggccatgaccctgtagtccacgtctgtcgggtggtcatgggagaaggcatagggagtgatccacacgatgggctgccccagtacctcggcctggtagtaaatgcctttgatggacaggaagaccttgcgcagggcacgggcagcgataatgtagtgcatgaactccacagtgagccggcggcacagctgaatggtctgcacgtggcacttgccagtccgcgggaaggtggaaaacaggaagcacatggagagggcatcgtccaggtcccgcagggcatcgatgaacgtgggataccgttccttgatgatgtggtcgagtttgtagttgggcttattgtcctttaaacgctctacagtgttccactcgctcttcccataagccttccggagcttccggacgaacaccttgtattcacggaacttgttgacaatgggttcgtggaggagaaacctgatgtctttgataaggtaaaacgttcgggctgctgtagaacccttgttaaccttcttcttgtgtttgggttcatggggataaatgcccttcagaatgcacagccgcctaaagtcagccaagctcagctggagcttcttccgggctttgttccgggtgatgtagttggtggccgagcctcgttcatacttcttcttctcaaggcctcccatcgctccacgttgaggagccgactagggccgcgcgtacaggcagctccacttcctcggacgcgtgggtcgacgatatcccgggaattccggaccggtacca

SEQ ID NO: 142486 - DNA, 632 bp, Homo Sapiens
tccatcttcatgcatacaattttatttttctcttttgggttaatttttaggctagtcctcgccaagtcagcctaaaaccaccagaaacaaacccagttgttgacttattccaatgagggaaaccacccagcagaggaactatagtgatctggctgaacaaagggaaaggttattaaagaattgaagggaagggtggagttaggtgaagtgtaaagcaagcagtgttttgaggcaagcaggctccaagtatcacagggctgtgtatgaagggtccgcttcaggtctggacggcaaagtggacctagagtcttgtttccttggaaacagaggctgacgataacgaaggctatcctccatggccacctcctccaggctgccttcgtgaccactgcagctgcagctcccgttccactccttgtcctgggctaggtgggcactaccaggggctccctttggtaaggagtaccgggtaggcacccggtcctgccaatccaccactggaacagctggggggacagcagacaggcacggtcggacagacttgacagatcaggcatcaggccctctgcgctggtcccgggctctttaagcaggaacgtgaatggcctcaagatgtctcacatggtcccact

SEQ ID NO: 142487 - DNA, 926 bp, Homo Sapiens
tttttagagagaaagacaaagatttattatagggaattggggcacacagttatagaggccgagaattcccaagatctcgagtcatcaagctgaggacccaggagacctgatgtgtacttccagcttgaatccaggagcctgagaaccaggagagctgatggatagtttcagtctgaggacctgcaggctcacaacccaaggaggaccaatgtttcaggccaagtctgaaggctgataaaactttccaaatagtcatagaatttggcagtcgtaacatcactgggcatttaatgactagggcttcatctctatgaagggggctgtgaagcctgctcgggagagaggaatgagggaccatctccttagagaagtgggtgggtagaaatcatttcttatacttggcaggggtggaggacagcctccatgagtcacgactcaggcgtttagggacttgtggcttgggtttttcccttctgcatattgtgtgtgtggtaggtagactttgcttctgggagcatctgcgggaaaccgctatttttggttcttatgagaggcaggaagagcgttcagtgagtactacctgggtgggtcttagtggtctatttcttggagtttagattagtttgctcttgagattccccctgggtgcatatggcctaactcagatgtgatatgatcaaaccttccctgtagctaagcagaaaaaaacaaaataaatttgaatttaaaaggggatgggtatgctcagtctgttttccctcttctttatcatgacttttggggatttcttgaatcttaaaaaattgaagtcttccaatggggaaaagtaagtaggcttttcctttctaagaagggtaatgcttaacatttgtgggattttggtgataagtttgctacaaaactactcctacagttcagagaaaatg

SEQ ID NO: 142488 - DNA, 374 bp, Homo Sapiens
  misc_feature (299)..(324): n is a, c, g, or t
gcacacctcttgtccccaggtttccctccctttgagcttttctttccctccctaacttctctggcctattgtcattgttgtttctttaaacttaaggagagaaaaacaaaaatgagattcctacactttgcctaattgagccactaccaggttttctggcagctgtggccacattatttgtgagatgatttttgatctctatgttcagagtgacttttgattctgattctttatgttttgtatggagcggcacttttatctgtgttttagcagaactgttcctctgtatcctttacggnnnnnnnnnnnnnnnnnnnnnnnnnnaaattatgcatagagtttttttgtgtgtatgaaattaaagcctttattaa

SEQ ID NO: 142489 - DNA, 603 bp, Homo Sapiens
ttttatattttaaaggtagtgtattagttagctcacattgccataacaaaatgtgacagactaggtggcttaaacaatagacttttgtttctttgaagttcttcagaaatctggaagtctgagattagggtaccagcatggtcagtttctggtgatgcttctgtttctggcttacaggctgctgccatctcactgtatgccctcataacaataatcacatttatttcccttagctcagcccttagattgacatcataaagggaggtgtctgaaatgaaatatttgactccagagagacatgtttcaatactcttcgtaaaatagcaaaagactccaggttaaacaccagtaggatgtaaaaagcaaatgggcctgaaagttattcttaatgtagaggaactctgtaattctgtaactcctgcctattttcacatttatgctctcagcaacccaaaactaacaatttttgtggacaagcggaagttgagcaaacgagctgaaggaagtgattacaccaccaatagctcttcggtcactcttgagacgctacatcatctagccgctgcttatttcattgacagggacagcacccttcggagactt

SEQ ID NO: 142490 - DNA, 416 bp, Homo Sapiens
  misc_feature (101)..(101): n is a, c, g, or t
tgccccaggaaggcttgtggacagagggagaagcatctcttcctctatgtctctttttatctaagaaaccagtttgaccagcatccttcccctcggctccncaggaggaatgcacggatcccttcgccttcccccatccctccatggttgactaaacccactaggatccactcttttgcgtggaaatgggttcaggcctcccacgaagagcatgaagatgccctctgttatgggttacattatgtcccctgcccccgagaccgtatgttgagtcctaaccctagtattgcagaacgtgaatttattaggagatagggtctttatggaggtcattaagttaaatgagggtgttagggtgggctggtgtcctgatataaaggggaaatttggggctgggtgtagtggctcacacatat

SEQ ID NO: 142491 - DNA, 364 bp, Homo Sapiens
ttttagggacataacatgtttattagcatcattaagtactagctgacatgcatagagcattgagtatgtgccaggcactgtgctaagcacttcacatacactatttcatggaatccccaccgtggccctataaggtgaaacttataaatatcaccattatatagatggggaaattgaggcttggagaggttaagttgtttgcctgaggtcacaaagctggtaagcagcagagctggaatccaaaccaacagaaattccatctagatacccgactcctcactgccgtctatccttggaaactagactagtctccaaggaaacatgaatctacattttctttcaactaataagagctctttcctta

SEQ ID NO: 142492 - DNA, 306 bp, Homo Sapiens
tttgaaatatgaaaggtatatgggctatgaagaaaaacaaagtggcgaaaagggacagagagggtagatgggatacatcttgcaaaagggaggtgtattagttttctgctgctaggtatcaaattatcacaaacttagtggcttaaaacaacacccactgtccagcctcagcttcaatgtgtgctgtgctcaggatcttacaaagctgcagtcaaggagtcagccagagctggtttcatctgaggctcagtttcctcttccaagctcatgtagttgttagcagaatgcatttcctcccaactgtgg

SEQ ID NO: 142493 - DNA, 539 bp, Homo Sapiens
cgagacggatattctggctctcaaaaaagggctgccttactgaaatcggggatcctagtgaactctatctttgctttgtctgaaaaataataaaaggggggttgggggagcggtggattcaagaaaagataaggtctacggatctatgggtctttgaccacacttggggggctgggctgacttctgcctttgtagttggttgaaacttattttccacctttcttctgctggtggcttcgtgaaacaacaccccctctttctctagagctcctgaatgtccacatgcaatgtctacaaaggctctgggcccgggaaatgtggatccatgcggcttgccgccatggaatgtttttcttgaaagcatccttgtctgcctggacccctgtgctcttcgcaactactcaagatgtggaggggacgagcaccagggggcaccagaccgagtaggaagccggactcgggagcagactgcagtttaaaagcctcagtccaaccggtggagagcgggaagcgctgaaaacgtacgcaaccgcatcaga

SEQ ID NO: 142494 - DNA, 834 bp, Homo Sapiens
  misc_feature (84)..(85): n is a, c, g, or t
  misc_feature (142)..(142): n is a, c, g, or t
cgttaaaaggggacaggaaattgctcggttgttggaaggcgtgagtcttgccgaagctctcggctgaataaagtccttccttcnntaactcggtgtctgaggggttttgtctgtagctcgtcctgctacagatgaaactgancactgatctcagatgcttctgaacatccttggcagttcacttcatatcagtacctcttaggaaaagaaatgctgccacatccaaaaggtgtaaaggttccaaggataactggatttggcaagtcactgaatacgctggtgtacacaccacctgaagggaggtcagaatagctctgacagacagctaggtgcccagaaggatagtaggtcagagaggagccatccaccagagcgtaatggaattttttcatgttggggtcagcctttttgacaattggcatctgaggcttcttctccagcagctccagccagaaactctgtgagcactgctgatccctgctctcctccacgccttccaggtcctcatagcggcgccggataagttgtttgttgacgccctcttttttttgctttgcttcttctattttgatttgaattatggctacttgtagtctcttcacagctatactggggactgtcttccacttcagaatttcccattttgagtaaggatgttgaaagatccaacacttagctcttgaggtgcattttgggtgggataactttcttcacaggttatcttttcccatctttccgttcaggtttcaactgatcaaagaaatagataggcccagagtcaaagggcttggctttggtaaattccttcattctgccatgagacctctggatcac

SEQ ID NO: 142495 - DNA, 409 bp, Homo Sapiens
ttttgtgtgtgcagctgtgtatatatgttttcatattacagatacaataggcaggtatcgtgataaggtgacttgtctggggggccacatgctctgcgtttcttcttgcccatcaaaccatatgctttataaaagtctatgattataaagactatggagggcttcctacatttgaattatggctacttgtagtctcttcacagctatactggggactgtcttccacttcagaatttcccattttgagtaaggatgttgaaagatccaacctatacttagctcttgaggtgcattttgggtgggataactttcttcacaggttatcttttcccatctttccgttcaggtttcaactgatcaaagaaatagatgggcccagagtcaaagggcttggctttggtaaattcct

SEQ ID NO: 142496 - DNA, 920 bp, Homo Sapiens
ctcggtcagtagctggatcctttgataatgaaggcattgctatttttgcacttcagttcacatactatttatgggtaagtgacatttaatgttttgctgccattattactcgtgacctttctcctgaaacactttaggctgtacgcagatttgtcttttacaaattatgtagttgcgtacagagatctgtattactgttcataatcaatttaataatggataacattttaaaatatgttaggcatctctcaagttatgtgtaaatatcctttttaaataagtcagaactccaaaagaagagctatcataaaacaatctgttgatatttttgtttctttgttttggggagataggtaagaaatagttacccaggaaagttgaagcatggtttgatggctaagaattttaaattgtttctgaaactagcattatttattttgctgctgccaggctatttaaacttaatgattttttcccctgtgtatgaaatatgatgctacttgggttcactttagagcttgcatttatttatgtatttattattttagctttagcttgtaattttccagtgatagaaattaccaaaatttgtgtgtgtcaatatgtttttgtatattttattaagtatatttttaggtagctaggtgaatggcagcataaattttctctttaataattattttatattgttcaaaactacttggctaatgagtatttttgctctagcatggaattctggaggagaaggttgcaatgtgatcagtatagacagtgtcttaatcttgagtttaaaagagaagaaagaaaaatacccattcaagtgaagatgataccaagcagtaggatgttgccagtgctgctgtacttatcaaaaagtgtttttaaaaactctttgtttattgtgtgcagctgaggagaaa

SEQ ID NO: 142497 - DNA, 511 bp, Homo Sapiens
ttttttatttcaaattatttttattcagggattgcttaagcttccaaatagcaaaaactgacccttacatatgtcaatgttaaaacaagtggatttcaaatattttgaaaataacattggttgctctacattgtttttcacttcgatgtttgtcttgtgtgaaaacagtcttgctaccattgacatattctcattatagacagcatatggagagcagtgttgccatagacatcggtaatatttggatcagcaccaaggtctagcagaatagtttcacatcttcttggcacattatagccttcgttagaggtgtcttgttttcactgtcacagatgttaagctggcattttctgtgcaccagaaaagttaccacttctgggcagccattggcacaggccaaatgtggaaccatccaccaaattgtctttttgaaaagtcatcagcaacttaactttaagcagaagtgtaaatatcactgctcctcatcttcacaaacttaggacagaaaacg

SEQ ID NO: 142498 - DNA, 690 bp, Homo Sapiens
  misc_feature (249)..(258): n is a, c, g, or t
gccctctacatttttactttaataactttgtttagaactgttatacctacttcagttgaaatttttattatttttgagagtctccttatccttattaatgcttttcactttaatatttgtaaggctaatactgatacagctatcctaaccaggtatatttgcttgttttattttccctaattctactttttgtctttctctgtccttgtactgtcttttgtaaactgtatatattgaacaaggtagacnnnnnnnnnnattaatctggtgagataggcaatttatatttattgtaaccatttattatatactatgccatttctttgctttttctatgctttttcttccttcttgcatttttgtggtctatcaaagttgggatttctaaagtgtttttcccttatttcagaatgtttcctctctactggtttgaaagttatattgtattgctattctttaaaggttatctgaaaattttctgttaagtacttagattaacaacatctaaagtcattcattatcttaacttccatcctaaagagtatcaggatcttggagcactcacactaacttctaagtgctcccggacactttccccacatatacatttcctgagttatgtaaaatgttgctagtattttaattacgctcttttttactccacagagtaaatacttcttaatatagaca

SEQ ID NO: 142499 - DNA, 546 bp, Homo Sapiens
  misc_feature (326)..(356): n is a, c, g, or t
  misc_feature (444)..(454): n is a, c, g, or t
cctcctattttaaattaaaaacccaaattatttgacccattcttctaagggtatatattgttcatacttcaagcatctgtcttcctctctaaagcctccctagtttcttcatctgtctacttaggagcaacttaaactagactataatctatcacagctcaaaaagaaaagagtacttactaaatgatcccaaattaaactcgtttaaaattaataagtcaaataaaattaataattccattcttcttagatagccagtaggaatagcagcttcttccaagcatgagagaatgggtgtgccttttatgcccaaatcaagaaatacnnnnnnnnnnnnnnnnnnnnnnnnnnnnnnntgtcatgaattttagtatcttattaatttctaattagattttaacttctaattttggtaagtagttcaaaataacaacaacaacaacnnnnnnnnnnncacctgaaactagtggaaaaaacttccacagctttataataccgtagcattctttacacaaaagtcaattcctaaaccctcaaattcagaac

SEQ ID NO: 142500 - DNA, 895 bp, Homo Sapiens
  misc_feature (53)..(101): n is a, c, g, or t
agctaaaattaccctcactaaagggaataagcttgcggccgcatacgcggtcnnnnnnnnnnnnnnnnnnnnnnnnnnnnnnnnnnnnnnnnnnnnnnnnnaggggaaaaaattccacagctttataataccgtagcattctttacacaaaagtcaattcctaaaccctcaaatttcagaacataaaaataaatttccatttacagatttcccccttccagttccaaaagtagttattctagagtaagtattcaacacataaaatttagctgaatcaaataaaaaacaatcaccaaatgcaaatatcaattccaaagcacagattttatatatactgctttcatatttcccttttgcttcttttctagataaaagcaggaaattgtaaatattcactaaaaaactcgaaccaagcacattggccttttcaagtaattcagaaaaggtagatcatcaagagaaactcctgagacacagcagtcttcagtgcattcacaagagcctctgactataagctttctctagttaaccgccagaagatggattacttgtgctatgcatgcagatgcactcaatttcctttaccagataagctacaaacactctactaccaaccaaacttgtcccttccatcaaaacatttttcatactctttagcagagtagtcacccctcctaggagaagctaattcaaatacactcattagcatctttggttacaagagcaatatagtgtgtagatgcagttaagagttctacatgggtaagtcacattgggtaaatcctaaggtagattaatggtactgattttccagctcttaaagtcacaattaagccaatcttttggaatttaacttttagggaggcctctcacggggcactcctgtatcacgcaa

SEQ ID NO: 142501 - DNA, 663 bp, Homo Sapiens
ttttttttattgtgtaaatacatttatttatagagtaaaaggcttagaaaagatctaatggaattgtctttaaatcaagccgatggaacaaagatgtgggcaacatttatggcataaatccaaacctcagcttcccctttttttctttatattatgtccacatgcatctttgactcgttggttgtgagttaaggtattattcttgttggaaaagaaaatgaggacatggcaaagaagtaccaggatcctctctaggtcagagttccgggagagattcaaactctagaaaaagtcaggatagcagctccaggttagaaaacaggttttccatcatccactgggttagctggttctccttccagactacttgagccttttcttttgtctaaccagatattcagtacctgaatctgctccaggacttctcgccgcatctccacagccatatggtatacatgatgatcagagtcattgtacattacagcattttggaacatcagcatcaggtctcgcaggaattgggccatggtgcgaatccgacccttagagagatttctcttcaggctatgttaagtccatgggtcttttcaccacatccttgtaccctgtggcctggctttcttacacaagcttcagaaatggactgctgaacctgtgactgcc

SEQ ID NO: 142502 - DNA, 460 bp, Homo Sapiens
aataagaatcatctattttaatatttgagaaaaacagaaatgtataaaggagaaaatttcaaaattaccacttgatatctagatgtattctttctctgcatgtgcttaatcatgcaaatacatacacacattgaatcttactttctatgatggcttgcagtctgggttttcatttgtacttgatttggtttaatccttatttcttgacagagatggttccatctcaagggtggagtaagtgaggtgacatagtaggtgggcatcctaacatatccgtatattcagctttggaatcagacactactgggttcaaatttgcacctgtcatgttcacgatcggtgtgaccttgggcctcattctgagcctaagtgtccttatttcagacttgtttgggaagttaaagataacttaggtgccaggtccctgctcaggccgtcgggaaatgggagctgtaacatc

SEQ ID NO: 142503 - DNA, 1396 bp, Homo Sapiens
ttttccagctcagaagagaattttaaatagtgggggcaagggatccaggcgtggagcttcttcagcaagagcagttcaaagtctctatccctatcccagataggccacttggcccagggcagggctgggtgtgtggtgggagcacctggagagggtgctgtcctctccactctgcccctgacccacggtagtgtggaaaacagcaggcttctctccccaccactggttaccagtgtctcgagtccaccagctcaggtcggaggctgagtttcttgaggctctcatagcccaccacaatgacaatggtggaaggtgtggctgagatgattctggccgagaggcccttcatgagggccccaaggcccttcttctgccatcagctgtctgaaggtcaggatgatggagttcttgccctcaacctgcacacgggttcgtatgacatccatgggattggtgaggatggaggcagtggctgcagccaggggcccccgagacagcttgaaagacaatgtgagggcactccttaggacacaggtgtgaagagctgttctgcatagaagtgatagaagggccaccagacagcactgtttgggatataggttagcgttgaagccacatagcctcgatagaagccgcgtagtccatcagcctgcaggatctgcctgatgatgtgccttggtttggccaaaggcaactaccgccttgtccctctgggttcccccgcacctgaaagcggcccattttctcacccttgcgttgcatcatcaggtgctgggagactacatcaatgggcactgtgatgctctgggccacaagggaggctgagccaccagccaccagtgatttgactgtgttactctggctgtagtcagctacaaacttccgggtgagctcataagtggtgacataacactggccagagatgagggtgaaggtattgaccaggaaccctcggtagaggccagtgataccatctgctcgcaggatcttgatgaaggcatcgaaggtcccatggtagaggctcttccccttctgaacttgcaaccgggtgcggatgagggtgaatgggtagacactgacacggatcatcattgtcattgccacaccaaacacgtagaacttcttcttgtccaggtgttcccactcgatgatctggatgttgcgtttgtcctccatggtgcctgaagaccttctcagactccggcggctccaccgcgtctgaggcgaactccaagcccggacctctaggccgcagcccccagtctatccgtcgttcccagcgaatgccgtctgccggtcgcatcttcctccatctcgacatcccgggaatgccgtaggggaattgaggtagtcatgcggaagcgttggtaataatcaaatatataaataaagttta

SEQ ID NO: 142504 - DNA, 389 bp, Homo Sapiens
  misc_feature (36)..(36): n is a, c, g, or t
ttaatagatagtaagtaatgtttattaagattctcnctcttatttgacccacagagcaggctaaataaataaatgtaagacaaatgagtatccaagtaatataatttacaatattgatttgttagtcatagattgaattttacaccctataagcaggtagatgacatagctgtggagattttcctcttgcaaagtaggcttgcagtctcagaaagtttgaactggggaacaggggctgtcatttgagtgtggctattcaaaagccatatgtactgctgagcaggcaggagagtttggtcttttgttttatgtctattaggcatttaaaatgttagaagatttttgaaccttcaacactttttgaatattctacatgtggccttttgaga

SEQ ID NO: 142505 - DNA, 733 bp, Homo Sapiens
ggatacctcatccattcattttattctttcaataaagttaattgagcacctactatgtgccaggcactgtttgaggcataaaaaatacaaagttgaacaatgacaatgacagaaacaaaattccggtcctcatggagtttacaatctagtggttctgacattaatcaaaccaatacatacaaaattacacgtgttaaatgctaagtagaggtacatgggtcaggtgagacgtataacaacgggtcttactctgtgacagaaattagggaatgtttccctgaggaagtgatgaactagctaagatctgaaagacaaataggaattaattaggcaattgggaagggatagatatttcaggccaaagaaacagcatgaacaaaagtcttatgctgaatgaagcactgtaattctcattccgaatacttaaaggacaatgaaggtattaagtaaaacatggtacatatgaggctaagtggcaacaagaataggtaacctctattgaggtgatgtgccagccactgttttaatctgagacagtaactattttaatgcttggaactatgctttagatagtggccctaatatatctgacctcataggtcaaatatatttggtcacataaaatatttccttttcatcattaaggacaataaaaagccattcgagcattttaagctaggggtgcaagtgcgggtaggtgggttgtctgattaaaattgaacttcgaacaaaa

SEQ ID NO: 142506 - DNA, 576 bp, Homo Sapiens
  misc_feature (470)..(479): n is a, c, g, or t
tctatatccctgtttagtttgttagttaccactcaagagcagcacagatattgtccactttatcccaaatcccagccagactttgttgtatgctgtgcttcattcatggggctgtgaactactgattatattctcccttttcctaatgtagaatgctttattctactgccatctttctgtctgcactgtttaattaggcttactgataacaactttaattctgaattttctttctcattcaggttctatttgtaattactaagacttaaagaatagtctggtgaagttactcgaagaattaaggaaggtttgagctaaaatgaactagagaccatctagtactttagtgtaaaatatgtttaatacaagtcgttaagtccttgtaagtgactattccaatgtttattctttgtttttggaagaatgcttggagttaccatgtttttaaatgtgaaatttcatctaaattnnnnnnnnnntctctgtgatgaggctgactcacccatttggtcaagattagtgctagctgatttgctgaacctttgcctacagaattaaagtactttctcaagtttt

SEQ ID NO: 142507 - DNA, 516 bp, Homo Sapiens
cactggttgggcattttaattcatgttaataaatcacaattatgtcagttttaccagattgtcctgtacaacttctaagatcgggatctgtgtgtttctacagaagttctagttttcaaatatagattgtaaggagccttcaattttctttagcgactactacctcagcaacaggaggcagcaaggggctgttcctgtggtggtttctgtttgcatttttgcaggagccataggaaactactgaaatgattgtgctgggtaaattaaggatctggcatcatacaaaatgaagccagaccactaatgcattacagtagttcttgaatacaaggtacaacaactgtttgaaaatatgggtagtttgcccaaaacaggaaaatttgtcttgggtgtaaaaactaaagaaaaaaggcattattcctagatctctcagtgaaatgaaaatggcctcttaagtgaacgtttttattgctaaaatataaaatgctagttagttattaattattaatcttcaaa

SEQ ID NO: 142508 - DNA, 409 bp, Homo Sapiens
ttttgagacagaattttaaaacaagtggtcacagtagcacagagaaaggggaagcccagaagggtaccatgagcacagccagggggtctggcctcgtctaaaggtcgggaggcttctggaatgggatgggtgagccgaggcttgcagtactgagcctaagttgccggctgaaggatgggagagaacatttcccacaaaggggaaggtgggacggccgggggtgtccaagatgagtctcccagcttagggtgttctggggagagtggaagctgggcctgcagatatgcctggctttcccctggcattttcttccatgttcctctattttattctggcccgtcttgtggtcataggtcacattttaaccccaggtatctgagatgtaaaaatatgtgcctttaggccaaac

SEQ ID NO: 142509 - DNA, 555 bp, Homo Sapiens
caggaacttgctatttttgactcaaactattgagaatatgtgtttatgatgctaattactcattttaatgtgtagattctcgtctttggggtattaggatgaaggaaaagaagaaagaagcagaaaggtgactgctctatgtaacagaaataagacctaatgtatgagttaagcataaagtcagtctactttatttgcagtcttaattgtaactgtcataattctttgcattggtacatttttaattattcttcctcttcctgttccttttttctgtccttttcagttatcctcaataaccactaggaacctctgcttctttctcctgaatttcttctttctcctacattgttccatatattaatcagttcagttagtgttgctcactttagatagtaaaagtatacacagaacagcaaaatgtcaggatatgtgaaatataaattgctttttgacagttttgccttatatccttgtataatgtgagacatcatatcctgaattctctgttttgttttgttgttttgaaacagagtgatactccgtctcaaaaaa

SEQ ID NO: 142510 - DNA, 281 bp, Homo Sapiens
ccaagttcaaagggcctgtggtaacaaagcaatatcctgttgaagcaccatgtcaggtacagagtcaaggtgctaaaagtgaagcaaccctgcacttccaggcagctaacagaaagagggaacaggcaaagacagcctttaatagccaggcactcagacaaccaagactaatgcctcaaagagctctacaatgcctcaattgtaaagctaatcagacaattcactagatgtaatttttgggttaactctcttcccttttctgggtattagtttttccactg

SEQ ID NO: 142511 - DNA, 775 bp, Homo Sapiens
  misc_feature (528)..(563): n is a, c, g, or t
tattttaaggtatctttaaatataaattgaaccccagaggcagaaaagtcatctacccaacaccggcacattttaaacatgattaggatttgtaggtcaaaatcccgtaacaaaaaagggaagtttttggttgtttccaaaacaaggaaagcatgttaaacagaatcttgtgacttaaacttcactcaagtgagcttaaaactggcataattttgataccaaaagtaagctgaataaccaatacaaaaaacagaactaactggagtttttctcccccaaaacatagtcccaaatccaaaacaacttatataagggatgcaagtaacagaaaaagtcaaataaaacaacagtggttcctgaatttaaaggaaggatgcccacttctctctctctcaagaggcagatggtcagtttttcttatcctttgtctttcttggtttgctgggccccagattgctgggcctgggactgtagtaactgagccgctgctttcttcttctggaagttgttcacctcctcctcaagctnnnnnnnnnnnnnnnnnnnnnnnnnnnnnnnnnnnnggtgtgtccgctttagaaggtcaaacttctcgtgaagctctttctctgcctccttagttcagcttctttcttcttcactctcataacaaacatgtgtctcatttctgcttctttcttctgcaggtcttccaggaattcatgcctttttgcatcatatgtcttctgaggactgaagggttgctgtcaaggtcagtggcctggaaacccatctc

SEQ ID NO: 142512 - DNA, 453 bp, Homo Sapiens
tttattttaaggtatctttaaatataaattgaaccccagaggcagaaaagtcatctacccaacaccggcacattttaaacatgattaggatttgtaggtcaaaatcccgtaacaaaaaagggaagtttttggttgtttccaaaacaaggaaagcatgttaaacagaatcttgtgacttaaacttcactcaagtgagcttaaaactggcataattttgataccaaaagtaagctgaataaccaatacaaaaaacagaactaactggagtttttctcccccaaaacatagtcccaaatccaaaacaacttatataagggatgcaagtaacagaaaaagtcaaataaaacaacagtggttcctgaatttaaaggaaggatgcccacttctctctctctcaagaggcagatggtcagctgaaaaataaaaacattgtatcaatagaacactccaaag

SEQ ID NO: 142513 - DNA, 808 bp, Homo Sapiens
gtttagatccataggctctttagtattgcataataatctggatatggcacttagaaggcagtttctgaaaaagttcgcaaatgagacgtctggatgaattgtagctacaactatggcttcaagaagctgctccagggatctctttctagtaagctggagaagatccttcagtcactgtgccctgattgtcttgcccatcttcatcatcatcttcgtcatctgcttctcctttctgaacacactcatttcttgttcgaaggtacaaatcccagagtttgcaagcggctttatattcaggagaatctggcttataataggactttgcattgttaaaaagaagctggaagtcagcagtcagcaaattaacatcatcatactcttccatttttagtttctgttggattttcatcaagtcaatgggctgagaaaccacttcataatagtctggttgatttcttcgctttggtgccctaatgaagagctcacagagaagtctgccctgttcatccttatagtctcggatggtattatagagttcatggcacacggcaataggatctacagttggaagattggaaagtctcctccttttcctgcttgggcctggtgttgacacagaatggtgcccatcatcaaagtccccgctgacactgctggaaggggaggtagctcttcttctcttggaacccatggaatccaacttcttccagccgctccgccgcctgcagccccggccgcggtcaccgaccgccgcgcctcgccccgtggccgccacggctgctgctaaagctcctccggccgcggccgc

SEQ ID NO: 142514 - DNA, 936 bp, Homo Sapiens
ttttttttgtagggggattaaagttcttgaccagagaaacatttagcaaaagaatgcacaaaacatcaagggaggggcgctcttctccttggaggaggaactgaggtcccacgctgatgggggcagataagcctggaattgaggacttccagctcccagatacttatgtactctccagcccatgctcagatggggctgcagaatggtcccatcaagtcctctatcaggaaataagtgtttctcaaagtgatttctagggcacatatacaattcggctgttaaatgtgtttgtaaaacagtgtagacaagacattagacaatgcagcttgcttatttgtgacttctcaggacctaagacgcaagggtcctttctgaaagttcatggggaattgtgaatggggttgttcccaaacaaatttggcccctgcaccctaggtcaggaagcaagtcccagagctgaggttctatggaattagaaggtggaaaaggccacattaagccctcctttggctttcagcattttttcccccatttcagatagaccgacaggcagacatgtgtcccctgctgtccacatcaggcagggctggtccaccacttcctcttcagggtgacaccttctcacatctcttgctgcaactccgggacacgaggtggtcgctgggagagggctcggaaggccctgggggtcctatcaggacgcagcactggggagacgtggaatctcctcttctcacccccacaagcctcgcccgcagcgtaattctttttatttttactttcgagccatgtaaggcatgcagatggggtaggagcgttcccgcgacacgttgccagcagcgcagcgccggcccgctcgtgtggccggagcccggggaggggacagggcacgcgccgcctgacccacctgccccaccgcccacggtcgcggccgca

SEQ ID NO: 142515 - DNA, 362 bp, Homo Sapiens
atgctttttctgtttgtagggaaattgctttctgaaaactactcccaataagatgtatacatcaaatgcaacttgattttactggctctttatctagagataactgatgcactgtcttctttcttagatacccttctgtaattcagcttggcatagtatgatgttttgagttcttattgagggtttggaaacatttgtcatcaattttatgtctactctattgaaaaagcaatatacaatgtattccatatttcttagctctgtgtctttgaggttttaaacctatattcagatagctgtttttagctacaattttgagtattcaccagaatttacaaattgccattttattaaatacaaaa

SEQ ID NO: 142516 - DNA, 556 bp, Homo Sapiens
  misc_feature (85)..(104): n is a, c, g, or t
gtgagccagttagacatgtgattttaatgacaaagtgggagaaaataaattggccaaaaaaattaacaaaatacatttttacagnnnnnnnnnnnnnnnnnnnnagttgttatcgatttgtctggtgttttaaggggaaagggaaaaggaaaggaggtaaattttttagcttccatgaacatttactttaagatgctgactgcatctcttggtgtaggttccagatgagataacaaactagtcttggatcatctgggcatctgatttctagaagccaatgattcactcacaagtagctctaggtatttattcttagttgtgaacactggattctgtgtggtcctggatggcaccaactgtagtttcctgttcaggcattccctgagggaccatattgtcttcaattacctgctcccttggaggggaccttgacactggagctttaaccaaattcagagggtcgccactgtcatcatctacttgcagaattgccacctctgtgggtgaatgcattccatatttctagctgtaatggccccaactccagggaactaca

SEQ ID NO: 142517 - DNA, 653 bp, Homo Sapiens
tttgtgagttcacactaggctcattggtttatatcatttgtttaacggttgtcacatggacatgtcaatgctagtttgactctaaatggttcaaccttacaatgggaatgttcttccttgttctctatcattggtccttttttggaggggaagggatgaaaggggctcctgaatcatcactgcttgaaacaaaagcaagatggctgggacaatgtcacagtttcatttacatggacaggtttctgtaagctttaggtacataccaaagggcatggtgtgagtaaatggggatcaaatgaggaccctttacttggagtgctgcaaggcaaaggtgcactttttgtaagttgcatacagcaagaggatagagcgcagcatctgtttgcacatagtgactgtcatctgaatctgaggctccttcagtccaatgggccactggtgctccctgctaatgattttgcaaaaggctgacttgtctgaaactctgaaagtcccggtccactttggtggctgagctgtgataaccctgccaaagacaaaatctactccactgaggcggatgggctggggcttcctgaccagtcctttgttgttcatcgtgcgcaactctgatgtgtggcatggtaacttgggactcactccagattccagga

SEQ ID NO: 142518 - DNA, 445 bp, Homo Sapiens
tttctcttcctcttcaggccactgctggagatgaattccagaagcaccactttcgtcttgagcgatgcttatttagtgcaatatcttccttctctcgttcaccttttcacacgctggtagtgatcttcttccttcaggtaccacacagggggccagcggtgccgctcgaagtattcctggttgtctgcagattttgatttgatttccttacggaacttggagcatacactgttgtagttggtgcagatgtggtgcaaacaccaggcggccaactggtgggcattgtgaaactgagccaattccaagtaagagagcacttctccgtcaatgcccacgccactcgtggcggctttggtcaactcctgaacggcatgctgttctgcaagtgcaaccaagtgtggcaggcaaaatctgtttgccaaggcaattaattccagcgggtcca

SEQ ID NO: 142519 - DNA, 461 bp, Homo Sapiens
aaaacttacatgaagtgaatttttattaacttctaagccatacattggtaagcattgttaaggaacttaggacactgacgtatgttagatttctaaattcagatagttttgtagacgagcaggaattagaagtgaaaatattccatctgggagcatattgttggttaatagttgattcctgatggttagtctgcaaagatgtaatagttcacatggatctttgtatcttgttgaaggaatgtaatcaaaccaatttgaaataattggatgtcttcctaaactcagctgtgtctttatttccttgactgaaatgacagaaagcactctggaacatagtaccaaacatgttttggcatcttcatggatgtcagccaattcacgatcaaccattactcttactctcgaagggtagagtactattgttaagacaatgttgatagggtttttttctctttctaaga

SEQ ID NO: 142520 - DNA, 480 bp, Homo Sapiens
ccttttttgaaattggataggaacactgacggtgctaaacataaatataaatacagagaccacaaatacagctaaaaatcttcacacagaaacggtcacagtttgtaaaatgccataatgacccccaggattctttaaatacaatttgcctgggctgggcatttgctggggcagaggggctaggcagggacagtcctggtcactctttctgcttctcctcttctgtctcttcccgcttttcctcttttccgcccaggctgtcggcggtggcccctccgccgccccccgagagagtggatgtgagattagattcttttttccacttcatccggcggttctggaaccagattttgatctgtcgctcggtcaggcaaagcgcgttggcgatctcgatgcgccggcgccgcgttaggtagcgcttgaagtgaaattccttctccagttccagggtctggtaccgcgagtagatctggcggccgc

SEQ ID NO: 142521 - DNA, 435 bp, Homo Sapiens
ttttttccagttgattattttttattctgattgatttttaggagttctttacataatctgggttctactcattgtgggttttgagggaaataccttttcccagtttatggcttgtcttttcattctcttgatgacgtcttttgatgtacattaaaaattatctttaatacagtgaaatcggctaatctagaaaaggattttttccttggactgttcatggcatcagtaaattaaaaagtagttactgtcaagttcactgcacataaaccagcattgttaaaagtggatctccatcattccatttcttttcctgcatttgtcagcatcgtttttcacactaaagatgaggagatccatattcctaagacatatacgcttggtctgtagagaccctcattgctctaaggcagtggttgccagttttttccttaaagg

SEQ ID NO: 142522 - DNA, 545 bp, Homo Sapiens
  misc_feature (304)..(312): n is a, c, g, or t
cgtgaaaaatatttaaaatatcttttaatgcgttataacatcctggagagaaatcaaatcaatgtgtttcaatgttacaacatagatttctcctcccctcccggataaagcactaatttatttaatttggttcagagcactgaatattccaagctacagcctcgtgggtaagagatagcattatcttaaacagtgttcggatttaacaaaggtcaacgtcttgtgcagtttacatagcatctactctcagtagcttttgcttcttgagctctacgtggctcctcagaagctgttaggcttaacnnnnnnnnntaaagtaaaatcagatacggtatggggccttgggacactgaaaccttcatccgtagaaaatcagttaagtcttcacaggctagaagagagggtgtgtgtgattagtaggcaaagcaaagaaagatcagtacaagttgtctggcagctggataaaaccttacacctgcgcaaaaataagcctccctcataagaaagcccaaagatgtccggggtcggggaggaggaaagtgtct

SEQ ID NO: 142523 - DNA, 450 bp, Homo Sapiens
ttccaaagtaattttatcaatttatatacttaaggagctttgaaaaaaatatccatacttcagcctcataccacaaactgaactggaatctctggataggcctaggaaaaaataattccttaattaggtcatttcatagcatcttgaaggttgagaatcatttatctaaagccttaaatctaaatccaattcttatcattaaagaagagtgtggcagtgatttggacacatgattaaaagcttttctaggaaacagtgttccaggtccttgaaggatctcccctgtttgctcagagttaacacagctaacgttttgcactgccccatgattgaacaatcagttcctactaacacaattcataaaggagcattaacactaagccctctttgtttttacaagagatttttctttaatatgctcagaaagtggctctttcagaaactggccca

SEQ ID NO: 142524 - DNA, 419 bp, Homo Sapiens
gcaagacgtgccccttcctacaatgttacatttttaatgatctggagaaaaccgttatcagcgttaacatcttctaattttactctaaacagacaaaagcaaaatatctcattaggcatcatctccgccaaggttcccactaggcaggaaaggatttttatctaaagtaattaccctttttagttaaatacactcaacagatgaaatttacagagagtgagagactgcagcactagacagcgaaggtgaaaaccaggaacgccgcgtctcgccgcccgcgggcccgccgggagactgcgggtccgtctcgcgggtggggcgccccggtccctctcgtttcctggaggccacaggtcacggcgacggcggtgaccgggagagcaggctgcgaggcgcgcctcatcgggccacagacaaac

SEQ ID NO: 142525 - DNA, 358 bp, Homo Sapiens
ttttttattagcaatcattgttttattcttcacagacagactgactttgaagaatgatttggatgggtcatagttcttccaataaaggaatcaagaggcgtacttaagtattctgttggtgactaactggatcagttcattaaatgtttgtttttgtaattgcaaagtattttcaagggtaatcactgacccagcattttttcctttgactcttcctcgctcttcaatttattcaaaactgagttagtgttagagacgataaaagctgtctggtgcctcctactcctgagccttttgtagggagggagaaggttctgtggctcaggtgggcttacttgcttgggttggtaaatgggga

SEQ ID NO: 142526 - DNA, 494 bp, Homo Sapiens
ttttcttgtctgaaatcaccttcttttaatgtcttaaaactctaggagttgcttatgtgctgtagcccagccaataagttctgacatcagtaattcagagggtctgctgagagaacatgacggcctgagaggggataagctgtcacttctccgcacttccgaagcatctctatatggaacgtttacctgttccggtctgatcatctttctcttgatcctgctttccgatcttgattggactgaagacagcgaggacagaggggtggggtcaacccggttaatgctcgaggagggagcgttcccactacatcaacagttttcctctcttcttaggcaggttagttcaaagctacaaaagaggccagatgtgaaggctgtaacatctgtcaccccatgatcaccaggattggtctgagtaactttgcttccttgggtggggatcgggggttctcctccttctgcaccgtcctacgttcccagaaagaggaaatcat

SEQ ID NO: 142527 - DNA, 1091 bp, Homo Sapiens
  misc_feature (979)..(1013): n is a, c, g, or t
ggagggaatttaaacatgttttattgtcagaggatgtcattagatgaaactccccatctcattacatagctcccacaaaatctttacaaaaaaattagcctcttggagaggcgtgaagttactgaaagagaaaacacgtcacattccaaatctgcaagttcttttaagtatgaactagcgtgcacgctggactacaaagtaattcgtggaagggattccctcatcacaggttacataatttcacccacaacatagaaaaggtttatattactaaaccactaggatcagtagaactgacaacgtaccagaatacgatctgaatatgcattaagcagttagggtcccgggtcaaattcttgcaaaaggaaagagatcactttctttctacctaaggcgggttctccgtagctgtccaggctggtggtcactagaccaagagcagctgcccaactacagagaagcaactccaactcccagtagcccctgcgcggaggcggggcggggatttgccaaggccccgaaatgccaacgcctgagctcgcggaggatggcgggaactggaagagcggcggtctgcagccctaccctcatacccttgcccccgcgacccggccccttctcaagccctctgcacggtacctgtccccaggactctctgttctctttcccgctgcagcatgggcggtactaccgggtctcagatggcagcgcgggggcgacgaccccggggctggggatgaggggaaacctggcctagcgggcatgcagcgccttgtcatgtcggcgccgctggcgacggcggcatgagccgtggctggagaagttgggtgcgtggttgccgtcttgctgctgggactccgggaggctgtcggagcagaggtgggcggcacccccttctctcttcatggcggttctctcttcggaagtccccggccgtaatggccgaattcccgggcatatgtccggtaccgtcgactgnnnnnnnnnnnnnnnnnnnnnnnnnnnnnnnnnnncggccgcttcctcgctcactactcgctgcgctcgtcgttcggctgtagagcgaggcgccatatgaggtcatatagtct

SEQ ID NO: 142528 - DNA, 293 bp, Homo Sapiens
cctataagcaatgccctgtggaccttcttatacgcgtgtcccaacgcacatgagtatgaactttgctcacatctataccaagacagagaatgtcagggtcacacagtacacacaggttggctagacagtgccaaagtgctttccaaagagctggggctaattcttactcctgccagaaggatattggatgtgccttgcccatcctcggtgatgtctagggttgtcactctggtgggcaaagatgcttgtactttctttaacctgctttgtctttcttgaggctctgtattaat

SEQ ID NO: 142529 - DNA, 491 bp, Homo Sapiens
cttgttattcgcgtcagcagtcactcatccaaagaccccaaagcttctagtgttctaaaggctcacactttctgtgacaggaatcttgattcccattcttctcaatcaagacctaccctgaatggatttggagtagtgtggtataatgggaaaaattcaagcttgggggccaggcagatccaggtttcaaacccatctctgccacttcttacctctgagacctttggcaaacattttgacttaattgagccttagtttcctcatctataaactggagatactagcaccaaccttccagaattgtgtggatttaataaaatcaaggacatagattttgtgagcacaggatacttagtccagttcctggcacataatgaacgcattatgtaaatataagtttctcttccttatttcctgaccaccatgaacctagctctagtttctggccactagtctccatgacaacaactgaggaagagcacccaaacaaa

SEQ ID NO: 142530 - DNA, 426 bp, Homo Sapiens
  misc_feature (216)..(313): n is a, c, g, or t
ttttcacctctccccaagttgtctgcagatgtgtgtttttatcttcattttacagatgaggaacccgaagcgtagagggttaagtaatttgcttgaggggacccagagtgggagatgatgggctcggattcaggcccaaggccatccccctcccagtgcctgctcaactccacagcatgtgctgagtccacacaccaggattcaaatccctgctcnnnnnnnnnnnnnnnnnnnnnnnnnnnnnnnnnnnnnnnnnnnnnnnnnnnnnnnnnnnnnnnnnnnnnnnnnnnnnnnnnnnnnnnnnnnnnnnnnnccaaattttgcgatgaagcatctgggtctgtgggttgcacagcggacagcgcagggccatttctttgccctcatacggagcagggcaacgagcagcacatcccgctttgatgc

SEQ ID NO: 142531 - DNA, 828 bp, Homo Sapiens
  misc_feature (761)..(761): n is a, c, g, or t
cctgcctcagtctccgagtgctagataacagagtgcatcacatgccggcaatttttgatttttagtagagagggtttcacatgtggtcaggctgttctgaactccgacctcaagtgaccgcctttgtcgcctcccaagtgctgggattacaggaagagccaccatcccagcccaagagtagagtttctttatactgacttggcctaaaaaaacagatttgcatggaggaaaaaaaacctagatttttagtaagactattttatatacttttttacattgatcaagtacattatttttaccaaacaacattgtttcccactacatccatggttatgtataaaaaaacgccattgtcaattaagatgttaaaaaattatttccataagagtattaaattctaatctatgattcacttaacttcctactttataaacactaggtaaagtaatctcacaagctgccaaagaacacatcccaagcagtaatcacagacgatgaagcaccttacaggacccctccaccctcaaacgcgcatgtccagagaagtattaatgccttaatagactactgaaggttaactatttacatcattctaaaaatattttaagctgtattacagtgctataaattctccttttaaggaaaaaagtaatagattgtttccttaccgtgtttgaaaggaaaaaaataatccatagtactaatggtctgccgattttttccctgaatttttaaactccacaaagcattattttgcaaanagttctttaccccaaagcagtgtcttctgtgttgatctctttgtaaaagactcctctggtcatccat

SEQ ID NO: 142532 - DNA, 572 bp, Homo Sapiens
  misc_feature (27)..(28): n is a, c, g, or t
acaagattaggggttggagaggggttnnggttttggagaagtctttcatcggtctcatttattgcaatattttctagctttgcatccagtacaacacaatgaagtattacagtgatttttatcattgcatcagcatatacaaatacagatcaaatgcaaataaagtgtgcttacagtggtgatccaaacataaaattgcaaagggaattctctttgaaagtgtaattatttttctccaatgtaccaggtatatatttttctctatgccaggtatacatatttgtcttcatcacatgtgacaaacatttgatgacttgtcactaagtaggattcatttccatagggcaactttgaaatgtgtggtccaaatacagcattccagcacatgacctcagcatcactgggttatagtcatgtacacaaagataaaccaactcgtatatgcgtgagtgcagcccatatacaaatctcactttcagaagccagaaggcaggtgttaatatgccagccttgccagggctcacattgaacttgacacagatctgagagtgtgactttctggaaagcatgct

SEQ ID NO: 142533 - DNA, 607 bp, Homo Sapiens
ttcccacctcccgggaatttgttgaatcttttttctgtgaaagccaggttctgtctccctcacgcctggttaattcccttctgctccttaactgtcatcgcatggggttaatgagaggaggagagaaaacgtctgtggtttcgttttccttcctggatttcgacaatgtggatgcgtccttgggggaaaggtgggctcgggatccaggcatagaccgtgcgggggcctctccaggagccagtgtgggggagtccagcgcagcagggccagggccaggtggggcagagtgaagacaccagggcaccgcggggccagtgagtttgttgcctcagttgagacaaagtctcagcaaatcatcagtgttcctcttctgtgaggtctttccacgcaccaggccagggtgtcatcaccagacccctccggtgctgaaggatctccccggaaaatagatattaattgcttttcaatcaatgtattccatgtgtatcaatatattccacatgtatcaatatattccacgtgtatcaatatattccacgtgtatcaatatattccacgtgtatcaatgcattccacgtgtatcaatgcattccccgtgtatcaatgc

SEQ ID NO: 142534 - DNA, 566 bp, Homo Sapiens
ttttcagagtgatcctattaggtttatgggaattccagaacaaaaaaggttttgcatggcatccaagatatagctaggacactacaatctgtctgagtaatagaataggacagcaacggttggcagtggggaccctaagatcagcctcccaggaacatagggacccccaagagctgtggacatcatcagacaggggacagagcatggcaggctagggggcctggacagaggccagggcagagccatgggtatcggcagctggaatagaggctgtcactccaggccagaaggggatggccacgtgtcaagtgaggccagtgagaacaaggacagctgggatgagactcccttccctgagggacaggagaggtgacaaacctgtcagaaacttagaccacgccctcagagaaggaaataagagttaaaggaagaatcctcaaattattgactttttgttgttgttacccaaaaaaggctgcgttttagactcatatgactgaattgacttgaattaagaagccttattatccattatcaagaaaaaaagagattgagatgcaccactt

SEQ ID NO: 142535 - DNA, 319 bp, Homo Sapiens
gacaatcacccagtcagtatttattaggcgcctactggggacggttggtcttcacgcaaatcaggcgaaaagggatagtgatgcgcgggccgttggggagacccggagcccgccgcggatcacgggaatttcgcgcctattttttgttggctgggtgttctcgccagtgattgggtcccggcaaggcgtgccggtgcgctcggctgcggctgctccgtcgacctttgcaggaccgggcggggcagggctcactcggctggcgtcccgggggatgggccaccagaagtttccgttggcccgggccccggcgggaggtgca

SEQ ID NO: 142536 - DNA, 312 bp, Homo Sapiens
tttcaagagactaattctttactgcatttagcttcatgtttttgatattttcaagagttcaagagagtaattctttactgcatttagcttcatgttttctgatgacctgtctgatgcaggatctaaatagccgtgcatgtatttacttattaaatggtggcctccatcaggctgagattcagctgttgaccctctctcccagcttccagtcactgcccttgcaagctttatttacaggtgatttactaagatgtgagccctggtctgccaggtttatctctcagggtcacagatggccctttttggaagaac

SEQ ID NO: 142537 - DNA, 448 bp, Homo Sapiens
  misc_feature (258)..(269): n is a, c, g, or t
aatctgttaagaaaccagaagattcagtgagaagcgtcagaagcatctccctaacatgagaaatgaaacttttgaaaacatcaccaaagttgttcctgtcttgtactacagggctctctctactgacttgagatctcaggagaaatcatgactcctttcgcctcacctggctgaaccacctggatgtctttccatcattctctgtctattattaccctatagaatgaccttctttcttatatgtgttcaggaagggcnnnnnnnnnnnntctcctagatgtatttttctctttttaaaaactgtaagtactcagaacaataccaagaaaaatacaaaagcaaagctttttatagctaattagaaacttccttgcaattctgaagtgtatgtgatattgtgtattgttacaataatacacaatattattaaagtatatgtgatattaaa

SEQ ID NO: 142538 - DNA, 488 bp, Homo Sapiens
tttttgagagaaactagtttaatgaggcaaaaaataaaaacatcttgtgattccaatccagctgtgtggatatatcctgccaaaaggtgtaggagttggagtagtaggggatgcgcatgaatgcaaatgcaaatgaatgtctagaggcccagatggactgcaggctatatcaggacgatccagtgtctgtgttctcattgtcatgctccagatgacacagtagctgtccctaccattgtacaccaagagagaggatgctgactgagtcatctctctcagattcttagataacgtatgtctctcttcactttcatagctcttgtgatgatacttggtaggttgcaaagtacagagtgcccagcgtgtggtcgcctcttgaaacagtttagccccttccctgtgaaacagatccaacctttctcatctgaagcatctggtggttctacagcctggtatccagccggagagggtcctgtgatgtccagtat

SEQ ID NO: 142539 - DNA, 480 bp, Homo Sapiens
tttttgttcccatttcaatttactttatttgaagctgagggcagaaatcaatattatttcacttgcaatacacttttttttgtataatccattgtgaatgaataggacatatataaagagatagagatttagaaagtctttctaatctaattttatatacaactaatattctttcaaatgggtaacaattttgatctggcacttcagtctatcaaaaatcaatgttgaaaatgcactgaatcataacttgaaatgagttctccaaagttttcaatttttaatatctgctaaagataactggctctttgacgcctacgttccctgaaattcccctgataaaatgagtaaccattattaagctccttcatcttgaagttgaaagccactttaagaatctatttgcccagaataggactcatacacatgcagggccttcttacacatgtagctcacgtattttttccttaacccctatatttg

SEQ ID NO: 142540 - DNA, 500 bp, Homo Sapiens
  misc_feature (389)..(447): n is a, c, g, or t
tatagggaacatctgttggttttgcccactctgcttccattctcccattttctagtaacgcccctcagtcttcctttggggaatactcccatagcccctcttagtccatgtggttcaaatgaggccgatgccacctccatccccacttccatcctgagaatggtgaagtgacttgctcagccacagagcatgggaaactcaagtttgcttcctaaccagctccctttcttcctcccagtatccaactgaagacagctctcccagctgaagacagctcccctccatgtgatgattcagaaacccaggctccttccgactcctggctgcactgttccttagggtcttgggcctcatgattatctgtattcaatactcagcattgagagaannnnnnnnnnnnnnnnnnnnnnnnnnnnnnnnnnnnnnnnnnnnnnnnnnnnnnnnnnntggtctgaggctgcagtaggtttctgtgcagcattgcagaatccacaccctct

SEQ ID NO: 142541 - DNA, 339 bp, Homo Sapiens
ttttggcttaaaacaacaatggtttagtatttgttgtgcttcctttgggtaaacttaatgagccttgtgtttcatgttatgctggctgcgtcactcatatgtttgcaagaggctgaaatattgactgttggaaacaggaaaagaaccttcagttttcttctacatgttcactctcttcatataataccccacattccagggtttctccattatcctctctccactggaggataatctcgactcccatgtagtctagagggttaccttgagtgttagggcttcacatatgagctttggggagcaacaaacactcaatccataatagtgcgcgccaaactt

SEQ ID NO: 142542 - DNA, 1333 bp, Homo Sapiens
  misc_feature (898)..(898): n is a, c, g, or t
  misc_feature (1043)..(1043): n is a, c, g, or t
  misc_feature (1180)..(1180): n is a, c, g, or t
tttctattaaaatactttatgaaatgatatgtaaaattattatacaggatgaattttattagtctctgcttttaaaagcttttaacaagaagtctgctgctagtcctggggacagggccccaatgagaaccttttgttccagaagtggaatctgttcccggactgtggggtgggtcctgaaatgctctaacacactttcctgaatgagattccacatccaaactttctgttgcttccgtcgtttggcagtcagctccccactggcaagcattaggtcctggaaatctttcattttatcccacatttcagagatcccctctccacttcgggcagaaatacgaattacctttggtttccagacttgtgaacgtttgcggagtaatttcattgccctcacatattccggttgtatccttcgagctggcacaatcaagtctccaccccctttggggggggctaccatgatctgccatatcgagcataagatttttgatcccgtggaggatcttacctcctggctgggaggagtacacaaacccccctggcaagcgtggtgcccgaagactacctccgacgggggtcaggtgcaacgagaccaatgtgcgggcgggcgggggcggggagtgccggttgggcgcagaaagcaacagacaaagccgaggcggggcgcgttttttgtcccggacgaagagctcgcccagctgtcctgtggcggacacgtgtcagtgaagacccacctcgccaaatattgcagacgggcctccgacacaccgcaaaagaaagaaaaccgcagcggccccggtgtcgtccggggtgtgggggcgggaggtaccgcgaaaaacgagcgcgcgaccctatggatgtgggacgcgctacaggaagggcggtctatgaactngagcctgagactacgtagatccgctgtgcaccacgatgcgatcctagtcgaccgaggaatgacgctcctagcgactggcttactctgcgacaggcaaggagcaacaggggtttgttttgtcctcccccaatcagcacgagcgacnaacggaaatcgaggctcggccgcccgcaaccaacacaaatccgcgtaaagacgcacgcctatcagacccctgtgcggggggggcggcggacttccgacgcccacacactcttcttatatacagccacccgctcgagngacgctgggagcggagattggggggcccgcacaagatcagagccggcgactgctaatccgacgcaggtgcggctccggattactgccaatggcggcacccggatcggccgacgcaccctcatactatctaagtacatgggcgtgtcccgcgca

SEQ ID NO: 142543 - DNA, 468 bp, Homo Sapiens
ttttttgcagttatacacattttcttattcagttaaataaccaaaataagagacttgagatggcaccctcatctcctagggtttgtcctcgtgttggagctattgggaattgatggaatttgagtagaatgaagtcccactgatgtgaagaggatggatttcttaataagcagttgggaaggaaaccccctggaacgtttgtccatttggtgtagacactttctgtgtgtcttgacacggagactttaaaggcgaatgataactgcagtagggagttggttcccgctgcgcagctttgcagtccttagaactgcttcatccatatagttcttccaatggtcccaggtcatcagtttcccttccgtggaaatgaaagtctttgacagtgagggtgaccagcttgttcaggcttctccaagctttgctagcttgtcttccatgagacagcattctcctcatttttcttct

SEQ ID NO: 142544 - DNA, 436 bp, Homo Sapiens
  misc_feature (425)..(425): n is a, c, g, or t
tttgcctgttcttttatttttttattacgggagtgagcaaccatgcccggctcggccttttatttttttattgtgagtgggtcttatggtgcagcctgtggtcccacgtgaacaccagtgctcccagcccccctgcacaactctcaaagtgacccaggtggatgggcaaattcagggtccccctacttcaaggggtaggagagactgaggatggactcaagagagagcggctgcggaggtgctaagaacctgcacctggaatctggagacatgggaggtccctgctggctctaacgcccctcctacccaggacccctcaggcagcaccctgcagcaggaagaaggaaagctagaccctggggaggactaacaaggcagctgctgctttctggatgggcaggtgcaggcctaacagtgtgtatcancatgtgaggct

SEQ ID NO: 142545 - DNA, 491 bp, Homo Sapiens; identical to SEQ ID NO: 58740

SEQ ID NO: 142546 - DNA, 395 bp, Homo Sapiens
tttgtaggaagaacgtttaacttttattcatttgctgcttgtgaacattgatgcttcgtgcctgttgggggggtggggcataggaggcctctttgcttctggaagggcggaatcacatctggttgccttttctctgtctttgtccatttcttcaggtttctttaaaattaattggaagagtcaataaacacgcctgccaattccctttacaccctaggaaagcagctcaccgtgcccttcagacctattcttgctgtttttccaagtactcccttacctgcctttgtcaattggcattctcgacaagttcgtcataacttctcaaagtgtcaacttttcctcttttcattgcccttgttaaagataatttaaaattagaaagtcacattcccagc

SEQ ID NO: 142547 - DNA, 1201 bp, Homo Sapiens
ggcacgaggctgcacgcctgcgacgactgtggtcgccgctttgcctacccctcactgctggccagccaccggcgcgtgcactcgggcgagcggccctatgcctgcgacctttgctccaagcgttttgctcagtggagccacctggcccagcaccagctgctgcacacgggggagaagcctttcccctgcctcgagtgtggccggtgcttccgccagaggtggtctctggctgtccacaagtgtagccccaaggccccaaactgtagccctagatctgctatcgggggctccagtcagaggggcaacgcccattagaaggggaaggactgcctacgttcatttcattttatggagggtcccagaaaagggaaggaggagccccaggtcatacagggcagagtcagaactaaacccgggtctcctgctgcacagagctgaactttgtatcttgcaatgcgctggctgcctccctgtgcgtgtctggaacagtcccattaggagaggtgacgtcatttgcttaaagttttccaagctaccctatcctaaaatagtttgtgtggatatcagggctaaaagttctccccatctattttaggggctgtctgcttttctagtctgtccacacagggattacctgtcatcttgcatgcaatcaggagaatctcataggggcaggaccttcccctactctgcctcttcctccatactaggttggaaaaatctggtttagcccactttttgcaacactcctgccaagtggtcttctacccattgcttgaaaatctctcttgacagggagctcactacctcacaaggcaggtcatttcattgtgggatctatagaaggttaagtaccacattctcctctaaaccttgcctacgacatgtttaatacttcatctacatagcagcccttcagataatcacaaccactttgcccccaagttttcaggttaagtagcatgaatttggtcattccttaaagacagggtttcaatttccacacatgatctctgcaaacaggcactgggttttcagtgtcctttttgaagggtcatataaaaataaggtaacaccacagtgccactacaccttctggggctggacttgtttcagcagctttggttgcactgaatttgggggagctgcatggtaccaggggtttattgggttgcagatatataaatgccctaaacttaaa

SEQ ID NO: 142548 - DNA, 538 bp, Homo Sapiens
tttgaatttttgtgttttaatgacagtcagtatatttgagtttaacaattacctaaaaatataaaatgctccatccatcaagaatgtaagtaaaaagggggaaaatcacaactgctgacgatcacgagataatccagcaagactgtttgtggctggtggctgtgtagaccgaatcctcaaaaacttttgatttctctgctcttctgctgtcagataaggcgagctttgttgccgggtgtactttctcctcagtgtatttttcagatctagaccgataagtttgctggcacatcactccaaatttccatgcaggttttcattatgagtaatcagggcctccgacttacagaagcagtgcatcttacacataaacacgcactgctgccaccaccgtctacgcccctcctttccacggctcatctccacctgactcatcacggcagaacttctgccacttcagtcatggtggaaaaaccttggagctcttaaaagaccagtgggtgaaatttggagaaaaggtctatttacgagcaacaga

SEQ ID NO: 142549 - DNA, 477 bp, Homo Sapiens
ctcagggaagacggttttatttattaagagtttttacggtagggaatcaggtactgctgtgaaggtggtggagacggaaacacccctgaacccttggggctgctcttgagcaaggcaggtgctagtgttatggcccctcagctctctggcctcggcttcgatgtgttcttctctgtgttctggcttgaatgcttgtggaggacttgagcttctccaatgtgctctagatgggaggagagacagcaggcatgagaggaccgggaaggtggggcccccacctgggagctgcaggtggatgtgtgagtgctgaggggaaggtctgattcaagcccagctcctgctctcagctctgctggtgaccgatgagggaatccaacctgagaggaatggatcgaatggaatccaacctctcttctttcaacattcaagtgacaaatatcaatgagatgcctactctgtgcctctctgccaggcact

SEQ ID NO: 142550 - DNA, 355 bp, Homo Sapiens
tttcagggaagacggttttatttagtaagagttttcacggtagggaatcaggtactgctgtgaaggtggtggagacagaaacacccctgaacccttggggctgctcttgagcaaggcaggtgcaagtgttagggcccctcagctctctgccctcggcttcgatgtcttcttctctgtgttctggcttgaatgcatctgtaggacttgagcttctccaatgtactagtatctgtctccactcctccccaggtgttttaatttgttgtctgtattcctccttgctgggatgtaagttccgtgacagcaggaacttgtctgaattcttcctcactgatccccagagttcagcacattg

SEQ ID NO: 142551 - DNA, 1368 bp, Homo Sapiens
  misc_feature (42)..(117): n is a, c, g, or t
  misc_feature (253)..(264): n is a, c, g, or t
  misc_feature (372)..(553): n is a, c, g, or t
  misc_feature (607)..(645): n is a, c, g, or t
  misc_feature (723)..(761): n is a, c, g, or t
  misc_feature (823)..(868): n is a, c, g, or t
ggggggaggggataaggacgcggacataaagagcgatatgtnnnnnnnnnnnnnnnnnnnnnnnnnnnnnnnnnnnnnnnnnnnnnnnnnnnnnnnnnnnnnnnnnnnnnnnnnnnnggcgggcgcgaacgggtgaagagagggatacgcgttagcctaaagggcgactagggcgcgcgcggtcaggcggggaacacgatgtagcgggcggagggggggatataggggcgggtaatgtcaggagatagaaaannnnnnnnnnnntaataaatcggacatgatgtgtctgcgccgcgaatgcggcggcggctagaggggggaggtccagataggctcgggcgctcgggaaatacggcatatggggtgtaaacnnnnnnnnnnnnnnnnnnnnnnnnnnnnnnnnnnnnnnnnnnnnnnnnnnnnnnnnnnnnnnnnnnnnnnnnnnnnnnnnnnnnnnnnnnnnnnnnnnnnnnnnnnnnnnnnnnnnnnnnnnnnnnnnnnnnnnnnnnnnnnnnnnnnnnnnnnnnnnnnnnnnnnnnnnnnnnnnnnnnnnaagaagggtaagcgggaaaagggtggacaggggaagcggttcggcgcaattgannnnnnnnnnnnnnnnnnnnnnnnnnnnnnnnnnnnnnncgaaagaagagggatcggggtagaggaggtgatacaaaaacccggaggcgacgggcgtatatgggcgagcgggacaannnnnnnnnnnnnnnnnnnnnnnnnnnnnnnnnnnnnnncgaaacggaggtgttgggaaaagtttgggaggaggaggcggggaggcaaagattttgttggnnnnnnnnnnnnnnnnnnnnnnnnnnnnnnnnnnnnnnnnnnnnnngagattgggtaggattgggggttagggttctctagggtcattgtctctttattgacgtaatccacatatctaacaaagagagcgacaaagcaacagcctatcagtgccaccgcagacgctgtgatcaccacgacgacaacggtcccggctgtgttgaccagaaagcccaggccacctccgaccaggatctgagccagctgcaccatgcatgtgagggtggcgcagtccatgcccttccctctcacgctgttgtctgggtcccctcctggggcctgctgcctctgcaaaggaagcacagaaccaccatttgacctacaaggaactgtcatttagggcacaggtcagcaaaatttttctgtgaccagccagatagtaaatacctttggcttcgtggattatacagccctggtcataactactcaactctgctgctgtagtgcaaaagcaggggcaatgtggagctgagttggctttccaatatatattgatggacattaaaa

SEQ ID NO: 142552 - DNA, 465 bp, Homo Sapiens
ggcagagtgaaattagggccccaagttttgattggcctttcacaattcctaaggctctgcgtatgtgtgtatatactacataggcctgtatggattagaaattgtacgtgtgtggcagggagcaggctccctcccgctgccacctcagaagtctgtgtccaagactctggtggacacccctggctccactggccactgaagcaagccaatggcagatcacatggaaagcctgctggccagactagaaactaacaaagctaacacactgtcactaaatgcatcaggcttccacacagggcagggcattctcaacacagggggaaagtctagcctgagctgagggttgctggagaggagcagtcacaggagataacttgtctcgtgccatcgtgttcaggtcccttccgtggccttccacaatcaggagccctcatctgtgggccagaaagacaggacagcgctggc

SEQ ID NO: 142553 - DNA, 358 bp, Homo Sapiens
agatgggaggaagattggaaaggaaaaatgaaaactgtctacgcagaagaccataaaagattgagacaatttttaaaagaaataggtagaagaatgtaccaggctcaatccttagaagattcactataataaagatgttaatattcatcaagttgttcttcagattccatataattccagtatagatttcagcagtgtgtgtaggaagagggaggtgaggtatgagaaaatggacaagctgtttctaaaatgtgtataggaacagaaaacgtaaagaactaaaacaatcttgaagaacaaagtgaagactttctctaccagacagcaagacgtttaggccagatgcagtggctcatac

SEQ ID NO: 142554 - DNA, 283 bp, Homo Sapiens
tttttagatttaaaaataaggcctttattaccacacaaaccagagcaatgtgaggcagccagttactaggtggtgacttggaggctggaaaaactaccaagtgttgtgtgaaaacaagaatttccatgaagggaagccttccacatcagcttccagcagaacccaggctgggcccttctggccaaaactggtcagatgtatgctgtaatcagtcagaaaagggaaggaattccccttaaaggctcagactgctcaaggaatttcctccaagggttgggagaac

SEQ ID NO: 142555 - DNA, 756 bp, Homo Sapiens
  misc_feature (200)..(267): n is a, c, g, or t
tttcccaataggggttcttttttatttaaaaatagatgatgtaagctagtttgttcaagatagattttgagacctgcaggaaacctggggaatgctgggccccagagtctgaagatcatttctcctgctcctgactagctcatctctgctctgctgggaggcaggtcctgccgtcgctatggagcaggtttggagggtcnnnnnnnnnnnnnnnnnnnnnnnnnnnnnnnnnnnnnnnnnnnnnnnnnnnnnnnnnnnnnnnnnnnntgtcgttcttttagtctgttttacggcaaatccaagaagcattctcgtgtaggagtgtcagagccacacggatgtttacacctgcgtcggggctgtagccctcatgccacagctgatcggcacagaagcggatggaaggggatgtctgtggcgtcaccctcttgaagattgatcattttactgccagctggctgaggttgcatcatgagcagggatgttagcttgggtgcaggagttagaagtagagaggtcaggatgatttttgttgattttgtacttgctaagtcactgtcttgcaaaggtcagctcctagtcctggcccctacattcggtcatatgtcacctgcttctgtacacttagacatgcctgcaaccttgccaggtctctgtagcacatggctggatttaacaacatcgtttctggtctaattctattctaaattcttttcatattctgcacatttgctgcagctgtaacttccagccact

SEQ ID NO: 142556 - DNA, 487 bp, Homo Sapiens
catcgccttcaccggcggcggcaacatcgtggtggccacggcggacggcagcagcgcgtcgcccgtgcagttctacaaggtgtgcgtgagcgtggtgagcgagaagtgccgtatcgacacggagatcctgccctccctgttcatgcgctgcaccaccgacctcaaccgcaaggacaagttccccgccatcacccacctcaagttcctggcccgggacatgtcggagcaggtgcttttgtgcgcgtccagccagaccagcagcatcgtggagtgctggtccctgcgcaaggagggactccccgtgaacaacatcttccagcagatctcccccgtggttggcgacaaacagcccacaattctcaaatggcggatcctatcggccaccaacgatctggaccgtgtgtcggccgtggcgctgcccaagctgcccatctcgctcaccaacaccgacctcaaggtggccagcgacacacagttctaccctggc

SEQ ID NO: 142557 - DNA, 474 bp, Homo Sapiens
atgggcagtcggtgcgcgctggcagtggcggtgctttgggcgttgttgtgtcagttctggagctctggggtgttcgaactgaagctgcagtagttcgtcaacaagaaggggctgctggggagccgcaactgctgccgcgggggcgcggggccaccgccgtgcgcctgccggaccttcttccgcgtgtgcctcaagcactaccaggccagggtgtcccccgagccgccctgcacttacggcagcgccgtcacccccgtgctgggcgtcgactccttcagtctgcccgacggcgggggcgccgactccgcgttcagcaaccccatccgcttccccttcggcttcacctggccgggcaccttctctctgattattgaagctctccacacagattctcctgatgacctcgcaacagaaaacccagaaagactcatcagccgcctggccacccagaggcacctgacggtgggcgaggag

SEQ ID NO: 142558 - DNA, 107 bp, Homo Sapiens
tttttttaaaaacccagtagttttatttcaaagtataaatttcaggcttgctggacaaaaccccactacaggtaacacttatacagacaccactctactatacattt

SEQ ID NO: 142559 - DNA, 498 bp, Homo Sapiens
tttactaagagggaaaaagcattttagtttaatgggtacaactgctgaggttttgaggcctccatcaagaaggaaaagagagcccagattgcaggtctgttgcgagtaagtgtgtctgcaggttgtattaggcatgtggtgatggtgatggggggttataggagcttacagtgaacttccatcactcctacccatcattgtctagttattttatcatccattgattcttctcttccggcagctctgaggaccgtagactaaactttattgttgcttgtgttggaaggcgactgttcagaggtagggaggggcaagatgagttgggaggagagcagaaaaagattgtggctgttttttcaacagcttcttcacccatgtgcacgtgcccggaatctgggaccccattcccctgccgggttctgacacccacgcgtgagttccgttccccgcccacccgggctcgcttgcagaaaccgggatgattctctgcccaatctt

SEQ ID NO: 142560 - DNA, 525 bp, Homo Sapiens
ggtggggtcatagaggtaagcttttttgtaaaatctctactcttcctgagagttttgagaaaaactggcaggaagaacttataatccccaaatagaagataccacgtctgttcaaaagcaggtattgctatagagcagcacccaggaaatatctgtgggtggcagccttggtatagaggtgtcctgtcttcatgagtgaagttacttgcctgattaggtgctggaaggtattggctccctgttttggtgtggactcatggcaagctggtgtttaagaggtcaggaggcctgctgatctttcaaaggacacccatgatgtctactcatagaaagggcaagtaacgtgttcattttggtcttgaatgtccaaactcaagggttggattttggccaattgaaatcagacatatgcgatcttgggtttttgcatggaaattaatgtaatgcttataaatgaaaaatgaaaacctttcaaccatttaagtccaacccaaaaataataaaaaaagaaacatactggccttg

SEQ ID NO: 142561 - DNA, 518 bp, Homo Sapiens
tgtagacttgcccacatcagtggggcccactaccatcactcggggacctcgctcttcttccttttccgcttgcctccgcatctgttccaaggctgtgtgagtgttgaggtaaagcaacataggagtgtccttggagacataagccacctcagtgcggccgctcagttgcacagaacagccatgccaagtgaaaacagccaccttggcaccagcatcaaaggtgaatttcttgtttcgggtcagctctgtgccaaagatctctgccatgccagtcaacaactccaactgaactgactgagatgcctccacctcaaagcgaagttctgtttctcgctctagttcaaatttagtggttggcttcttgtcatcattagcctcttctcccatctcttctgtgtagctgctgtgcctgcgcagccaggagcccaacaggtaaactcagaaggtcctcccgtgcagaatttaaacccaactacaagcggtttttggccggaccccccccggccttggggccgaat

SEQ ID NO: 142562 - DNA, 412 bp, Homo Sapiens
  misc_feature (237)..(328): n is a, c, g, or t
tttttttatgttaagtcacttttgagatatttattattagaaaccatccaacatgaaatatgaattattaaaatgtttttctccatgtttcaaaccagaaacagtaattcagaatgcaactagcatcctaatttttaaaatcaaaataagatgaccagattaataaaacttagcattcacagtattcaatctagaaaaaatataattaatagaatgttaaagccaaaagaacatttnnnnnnnnnnnnnnnnnnnnnnnnnnnnnnnnnnnnnnnnnnnnnnnnnnnnnnnnnnnnnnnnnnnnnnnnnnnnnnnnnnnnnnnnnnnntttgagattgagacttcttatgaaatatattttaacggcaattactcattaacaactgtgcattgagaatatttgaacatgttg

SEQ ID NO: 142563 - DNA, 421 bp, Homo Sapiens
catgggaacggccctggcagtgcaggggaagttcacagagccatttattgagccccacaaccgaccaaagggaagggcgtccaccaggctcaggccatggtccttgaggggccggcgctctctacttggcccacatgtgtcctgaggagttgtggcatgcccgctgccctggtcagagctggccgccatcttccagctgcatctgccgggccagcgtctgcccgatggccaccagggggctggctctgtaggccggactggccaacagctcctgaaaccgggtcctttcttcctcgagaagctgctgtctatgggctgcgctcatccggctgagctctgagggccggggcttgttgctctccctgctgcgggcttggcgccggctgccagcctcgagccccagcagctcgggcagggcatc

SEQ ID NO: 142564 - DNA, 362 bp, Homo Sapiens
ttttttttaaaatcagatttgacaatatttattacgattttttgtttctgtcattcatctaattggaaaagtgaaacagaggcaacagatcagacaaggggttttagataacaaagagtttggccatattgaatgacagctttaaacaatactgacagctgctcccaagcagtcttggtcaattgcattatattagaaaagaggctccaacttcagtccatagctagggtggtcagatctttttcacattcttcataaactcgttataaatatatcaataattatatcccgaagttgggattgagaaggtaacggtgggctgtggccagggagttgagtaaatactttatgcctttaaatgt

SEQ ID NO: 142565 - DNA, 781 bp, Homo Sapiens
tttttttactctgtgcatgtgagcatatgtttatgaacgtgtatataattagaatatctcacgcatggtgcatgccctggagcagaagcggcatcctgctggcctgtcctcctccatggccctccagcttaacccctgcctgggcatgctgatggccttgcagtcggagctccacaagctgtacgacgaggagacacagagctgggtctcaggcagcgcctgtgggggatctctgaaacttgaacactcaatgctgtgttttgtaaggttttccatatcctttttcagaaataatttcttggtctcaactttgattcatagtcttgcaggtgccttgtggatgttcaacagccattctttactcctgttcggaggcctctatgcaggtgccttgtggatgttcaacagccattctttactcctgttcggaggcctctatccaagcagggcagggctgacaaggagtccctagaccaagctttagtcaggctcctctgagccctttttgcttggccaggcctcctccatagcctgcgaacagcacttcagcaagaatccagctaagccagtttagtaacaatccccccactcttgatacttaacttcctcttagtaatttagcatcctttaactccttcacccacgcccgttagctataaatctccagctgctgttgtattggaagttgactattgcaatagtcttaaccagtccttcttgccctcgtgccgattcaacacccgcctcgctacctagcctaatgttggtggtgtctggggtt

SEQ ID NO: 142566 - DNA, 742 bp, Homo Sapiens
ttttagagtggttccatttagattaagtttaatccagtttcacattatttaagttcctatatttcaagagttaaaagtggtcaataaggacagaaacacagtttgctccaacgagataatttggatctccgggaagacacttgttttgccaggttttaggatcacccgacgaggagtcggatgattttagagcaaaagaccaaccgtcaggagtcatggacgcacagtgtggtaagcgcagctccacaggcttcaggaacttgaggccatggggaccacacatcaccaaaggactcagcagtgtttcacctttctctttatctaaaggtggaaggatgctgttgtcccggcagaccttgaaatagatttcctgctcaactccttcgggaatggctccttgagggataattatactaacaccagtttctatggaactcagcacgcccccattgctgttaaatatgcctcgggctgtggccaccacagtatgaccatcttcatcttcatcctcttccacagctgaaggactcacaggaatagctttaggcactgtgctgatattatttatttgatatttaggcttctctgcatggatagagaaagtttcaactccactgtcaaactcaggaggctgtgccaaactgtgcgatttcacaagagtttttggagaagtgggagtttttgaagacaagtcaggtttatgcggacgcgtgggtcgacgattccgaagaattccggaccg

SEQ ID NO: 142567 - DNA, 527 bp, Homo Sapiens
tttaaaatggtatgtgcttttattaaaacaaaacataacaacaacataatgctgttgcagaaacttggagatgctgcaaatgtaggtctgttctgcttgttggctttacctctctctcgttcctcccttcttcctcctcattcttcatctttcttcctcattctaagcagaacatttacaaaattcaggctttctgtagggtgaagagctgagcttcagttcttctctggggcagaatattagcaaggacagtgagcttagttttgactgattctggcatcttgtatgtgcctgcagggatgagagaattttggccatctttgcagataatccaccacagtccctccatgctgccttcatgcagcaggtaggtgagtactccacaggctttgccacccagaacagggaagccaaactgtcaatctcaagtccctaatctgtgacctgcttataattcttactccacagttatcatggtgaagaccaacgagatgatgaacatgtagcacatatctgtatcacgagaa

SEQ ID NO: 142568 - DNA, 455 bp, Homo Sapiens
attagctattagcaaattaaaactgcatgagatagcactacatacctttcagaacagctaaaatgaaaaatagtgccaacaccaaaagctggcaaggatgtagagtaactagaccactcataggttgctggtgaaaagacaaaaggttacagccgttctggaaagcggtttggtcatttcctatgaaactaaacatgcagttaccagcattttactcttgggtatttatcccagataaatgaaaatgtgttcacacaaaaacctgtatacgattgcttgtagcaacttttgtttataaaaaaaataatggtaacaacagaagtcttcttctagtgaatggttgatcaaactctgatgtacccgtaaaatagaacaccgctcatcaataaaaaagaaatggcctgttgatacatgccacacctggagggacctcaagggtattgtgcttgaccaaa

SEQ ID NO: 142569 - DNA, 807 bp, Homo Sapiens
taatcttagaaaaatgtcggaagggtaatttttaagtgtagtggtttgaagaacaaaccagtaagcgcacaaacctttgtgtattttagaatatatttgtcttcattctgcggagctcttgtgttgtaaaggtgcagaactacgtaaacaatagtgttgggcagacttacatagtacatctgaaatcagatactggtttattcgaccatatttctaagggcatttttccagtaaaattgttttattttttgagtagccttcctatagtggtacatgttacatcagttgcgcatatcttgattttacagaatctgtcttaagtaccaattttggtttttcaaatcaatgtttctgaaatttttgaacactgaaagtggttttaaatgaatattctgaatctagttctttagaatcctctttgaattgtgaaatgcaaaataatcgttagcagtttaacctgaaagatctttttacatgataaatgggggaggagaaagactgaacatgaaaatgttgaagaccctgatttgaaattgagtgtaaaggtctagatactgtaagttttagagtagctttagagacaaagctagtatcccacttggtgagatcaagtaacttgtggtttaaaatttaaagtaaccagtggccattttaacttcactaatttctcttggaggagctaatttttaattggctcatgattgtaaaacgatacttccggatggtaagggagatgttaagatgatttgtcttgaagaatggtaaactttttctttgtttattgcctgtcataaaaagagggaaagt

SEQ ID NO: 142570 - DNA, 495 bp, Homo Sapiens
tttacctttagcagagaaaacagcatcattttagaggcatagagaacaagtagcagttgcttcaccaggaatgaggcagcacacataggtaaatgtcatccctttccattcttaagagtccattatgttcgtaagagcaaaagagtagtgcagaaggccaaaattctaagtactaaagtttcaaaaccacagagatataaaaatatacataatccttggtctttgtatgtcactgcatgatctacttcatcacaaggattgtttcagcctcatagtatcagccctgctgccaaagctaccttaccttgagctcattctgtcctgcaacactttgaatttccttttcacaaacacacacctccccagaaagctaactctgaaactggtttgtaacacgaagagcagaaagccttcacttggattcattccttcctgtcaataacccctcctagtttgggtgttcccataggctgagggatgcccctcctgtaccct

SEQ ID NO: 142571 - DNA, 475 bp, Homo Sapiens
tttgtgttccaataaagctttatttacaaaagcagttggcaagccaggcctggcctcagggctatagtttgctaacccctgatctagaatattcttctactgattcatccatccacataggcagggtgtgtggagtaccaaacaatctcaggtctgttctctgatggtgttctcttcagatgtaggaagataatttttattatttaaaaaccaatcaatcaatagagtgaaacaactcaccaaaataccaatgtctctaggaaggaaattccaacactggatgcaccaaccacaatgatcttggcattgacagtaattttaggttccaatgttagttttctgtttgtatggtttaaagcataactcatctttagaaggaggaacctcaaaatcacacagcaaatgacacagcccagggaggggatgaaggctggggaagaaccacacagcccactgcacttccttgattgtttag

SEQ ID NO: 142572 - DNA, 831 bp, Homo Sapiens
  misc_feature (139)..(198): n is a, c, g, or t
  misc_feature (695)..(695): n is a, c, g, or t
  misc_feature (697)..(697): n is a, c, g, or t
ttttttttgctttgtcaaaatttgtatttattgtcaaaactttaccacatctcacacatttaaatgaaattagctctactgaaatttctgaccagaaaatcaactcatacccatgattacaaaagtaataaaggtgttnnnnnnnnnnnnnnnnnnnnnnnnnnnnnnnnnnnnnnnnnnnnnnnnnnnnnnnnnnnnaccggtattttcaaaacctggtgtatcagtaacttttagggaaaacttttgaaaaaaggactgcacacacgcaccctttcttccttctcgttctttgaaatggtaacaacagaaacgattcattctgcaggcattctgcgctagtcccacggacaggcgactaacaagagataaaaaggtgtgggtcccataggcggtacggtgttaccccttctggttggcgggtaccacgttgccggtcgggatacggacccattgcgattagcattaggagtggctgacccgagctttgtcaagttttgacgagaagggcggaccggtccttattgaagaggattaaggaatctaattcggtttcgcttaattagacacatttgtctaagcagccacggtctattcgcagcaaggggcggggaagacaaaccaacgccccagctcttttgcgtatctatcccccgcaactcagctctgggattagacgcaccctacgaagatcncncgggggtttccgggagcaaccgccgggggccgtcccccctttggcccccgcctcaaaactttttccggcaaaggggcccttttcccccgagacatttgggggggaacaaacttttgaggcttggtgttccccca

SEQ ID NO: 142573 - DNA, 2979 bp, Homo Sapiens
  misc_feature (97)..(133): n is a, c, g, or t
tacagccgcttcgtgaaaaaggacacccttaagaggatgggggccagccgtgttcaatggccaaaaggggtggttttcccctcccagcgagggcggnnnnnnnnnnnnnnnnnnnnnnnnnnnnnnnnnnnnngcggattgttcaagggttggccagcagggggccacgtccttttttaggagacaccccacagagcccacatgtgcacgcgtgtggcagtctcctgcaaccccagcaacgcgaaggccagaaacccggtgctggtggccacacctgggcgcctggacacggaagcccccagcacagtgaggcctttgagtgtggcttgtggtctgtcctgggttagagttgttaatatcacggaacataccatatagaacgttccagtcccgcctgacaccttcattcccaatggagaagaaatctacacaggcgtaagaccaggccatctgagacagggaatcccaggggcccctccgtctgagtggtcggcgtctgctgaacaaataccatgtctttcttcttcaaaggatcaaaggcctttaggacccacagctgaagaaggcgcctgctgccagcatgtccctcccccacggccaccacacacttcaagtttacaaaaataaatatttatcaacagtatatttgacaaaaaccacccccaatcgatggcagaaagcagtattttctagctggcactgaaacttaacctatttttttgagggagaaaaagactaaaatgtaagcactaacttcctccttctgcatcttccacagaagacccacttgtgggcattctctttctgtccgttatcagtgggtttacatccgaaggccggcggcaagacacttgaaccacaaacaccagacatgcaggtgtctcaatggcatgcagattatttaaagtgcatcacttgtgagaagcttctcaaatttctgactgtcataaccaggtgtcacctaaaatctgtcctgtaggccaagatgctacacgcagcgcccaggcagtcagaggtaagtgagcgcctcccgcctcagaaagcttttacagggccacgctcgccaggctttcctcgcccacgctgaacccacgtcctgggcacagcagctcccaagctgtcagcagtcggctggcagtgccaccacaccctctcggaatcatgcacagtgctgcctctatcacctctcaccccagcctcgcaaggcctgttgagaagagaagctccctgggaggacacccacggagctggcacgagcgcagcacggagagacggacggcagcctccgcgcgggcgcaaggacccggcttcagatgcccgctggctggcatcaggcagagcctggccacccgtgccaggcccccttcctcactccaggtgtgggttcattctgccttcaggccggagtctgtcacaaggctggctggacagtggccaggtgagccagggcaggaggccggccgcacaccatccacaggaagctgctcagctcaccagacccaagccctgggcaggggccaggctcacagcaaagcgcgttagggcaagggcgtgagttttcgtctgggaagttctaaaaaaaacccacagtgtgagggattgtgtgtgccttaaatcaacagctctattccaattacatcacatcacaaaatgccatgaatggaatcggaaggcgctccaccacctccaacaccctggcagaagcagctgctctctacagcaagagcattttccagaacggcatgagaaggagagacgcacgtcccagggacaggagagcgcgctgagacctcccagcacgagatgggaggggagcccccgccccgtcctggaccgccaggaaccgaaaacccacatgcacccaagaacaggtgtggacggggcggcacagaagtccacgggagggggcgacacgggtgctctttcacgggaatcttgttgggacagcattccttggggagcgccgggtcggcgtgtccaaagagcgggggcaaaacggcatcgaggcagaggctctatggctcctcccccatctgcagcagggagttgatggcggcatccttgttccctcgctgggcttccagcacggagcggatcacctcctggtccatgttggggaacatgtcctggatggctttcaggtcctcctcgctacagcggggctgggcgttcacggcggccgggggcagggccacgggcaccatgccggggctacagacagcgggcatccctgtgatgggcacatagccaacgccctgctggtacactgttggcatcaggaccacgggctggggtggcatcaccatggcagctggaagcagcgcgtaggacatgacgaggttgatcatgccctccttgtcgtccccctgcctcccgctcaggctgtaccacttgtcctccaccttgccctgcctcagggactccgggatggtgatgtgggtccaggcaatgcggtcgtccatggagaaggctctctcatcgaagatctcgagatagaaagagtccacgcctgggggcaccgtgcagtggatgaccttattccagcggggattcttggcgccattgtgtgccgtgggcgtctcgtacaccgcgtagcccaggcgcagtcggcagtaggggtccatgcgggtcatgccgtaattcttggccaactttgcctgtaccaccgtgatgttcagtcggcccacggtgcccactgcgcctccgtactgcagctgctgggccgcctgggcgtccagctggacctgccgctgctgctgtgtgggcgtgatgcggaggaagtcctgcgggagctcaccgatgtacaccggcccgcgctgagtgctgacggtggtcgccatggtgctgcggcggcccccgtggctcgccgacccgacagtgacgcgccgggcgacctcctgcgcccccgccggagcctgcgacggagacagttgtcacctcgaggccgccgcctcgtgccgattaaccccagcctctaca

SEQ ID NO: 142574 - DNA, 1003 bp, Homo Sapiens
  misc_feature (702)..(702): n is a, c, g, or t
  misc_feature (786)..(786): n is a, c, g, or t
  misc_feature (795)..(795): n is a, c, g, or t
  misc_feature (805)..(805): n is a, c, g, or t
ttttttttgtatgtgtcaatgttttatttaactcattactgaagaaaccagcaggaaaataaaagagctagttccatgaacatttgagaaatagagatgtatatagtcaatgggaaaagaatgccaaaataagattattaagttaaacataacaggaaataaaaccatatcacctttggggttaactcctctaccgggctataaaacaaaacaacttattcatttctgtaagttagcctctaaactttaagaacttcacagggctataaaccatttgcacctgcatcatttgtggattgtgactatactgtgacagctatgttatagtttccaaagaggtcagataagggtcaagcaggattattagaaaatactccagcatagaaaaaagtagccattcttttgccttttctcagattgggatccatttttctttcatattaggatctcctgttttccatttgccctgggttgcaatctttggatgcttcctccaactgctctataacttatccttgcctccagccccctttactatcaggagattctgtgtagtcatagtgaaggggtcaggccgatggaaggaggcgtaaacccttcacaatcttatgggggtggagggcaagaagggggatcctattgtgtggtgatatggcagactggagtgttttttctgttttcaccagtccaattttcttctgnactccttgatatttcactatgtaagtaggactctagttttcagtcacggtatataatttcccctgttacatttttgttgtgtantttcagcanggaatagtanagggagagagtaactgagtgcatttatagatttacaagttgtatctctatctcagatacatggatttctcatattcactcgtgcgattctggctcgaggcaatccctaatgagtcgataatcgatcagtcaactgttctgtgtgatgtatcgtcaattcaacacaagaccggacatatgtagctggggctatgatgcg

SEQ ID NO: 142575 - DNA, 494 bp, Homo Sapiens
ttttttttcacccttcagagctagagtttattgtaggagaggatggtatgtccacagagcctggggtaaagtttttagggtagcagaagccccactctaagggagacttaaggttgcaagatgtggactttccttctgatcagcagaagtcagctgggggactctccagcctggcatgcagagggttggctggtttcatggtgggttggttcatgagcagcctcctgttctatgaggcttttcaacagtttcacatccagctgcccgaggatttcaccgatcagaggacatacctggaccatcagcacagagagaaggatcaggccaggggctgactttctaccatgtgtgggagaactttttgcagattctctttgaggttgtagagaaactgattcatctttggtgggatagcctcagtgaggatggccacatggacactgctgggctctgcatcgcatttgcctatcaccagatccctccggccaaactcg

SEQ ID NO: 142576 - DNA, 699 bp, Homo Sapiens
  misc_feature (133)..(161): n is a, c, g, or t
tttggatgtctgttcatttttttatcagatattcattgagtacctagattgtaccagacattcatgggaggacggtgtaagggaaagactctggaatctggtgctctattgccatgtttctaatataaccagnnnnnnnnnnnnnnnnnnnnnnnnnnnnngtctgagctacccctttgatgatcactgacaatgatacttctggcatggggctgagtgaggactaaaagactgtggaaagtatactcaacacatacctcctggctttaatattgcctggattgctctgttctgttctgtgcctctacctttctttctagggctatcccaccaaagatgaatcagtttctctacacacctcaaagagaatctgcaaaaagttctcccacacatggtagaaagtcaggtatgtcctctgatcggtgaaatcctcgggcagctggatgtgaaactgttgaaaagcctcatagaacaggaggctgctcatgaaccaacccaccatgaaaccagccaaccctctgcatgccaggctggagagtcccccagctgacttctgctgatcagaaggaaagtccacatcttgcaaccttaagtctcccttagagtggggcttctgctaccctaaaaactttaccccaggctctgtggacataccatcctttcctaccataaactctagctctgaagggtgaaattaca

SEQ ID NO: 142577 - DNA, 233 bp, Homo Sapiens
aacaaaaaaccaaaatctaactgtaaaataggattactacttctacttaagtatctaggagaaaagatgctttttattctgcacatatactgtatttttgtatcccaacgcagttcattttaatgttatgaatatccattgtttttcctgatgaacaaaactgtaggctcattttggtgaaaatgttggtttttaaaaaatgcagattcacggccaggcgcggtggctcacac

SEQ ID NO: 142578 - DNA, 469 bp, Homo Sapiens
catctggtagttttgtaaattcaagcatagctccttctatggccttgagcccctcctttccctgcacagtagagaggggttggactttttttggattgtgtttgtattgtaattgtgtgtttttccagatgtgttttctagccacaggaagagatactcaaataagtctttcaacagtatctattatgctgacattcacacttgtttgtgttattttgtacgttttggaagccttctgtagttaagtattagttgagctaattccttactgtttttgtgtcatactttgttatggagcaacgtaatatgtgtatgttgttaactgaatcgatagaaatctaagaatcaacttggtctatatcatctgatgattcaggggctggtttggatcattgataaagtaaattattccctgttttacttaactccttagtggcagttttctagattcccattattggcttgcatc

SEQ ID NO: 142579 - DNA, 912 bp, Homo Sapiens
ttttttgcggagtttgtggtgcccgtagtcacaccacacacacatttatgggatgtcagacacacggccagggccgcacaccctggaagcagcagtctttgtgcccacctccatcccaaatggtccttgctgctcagagcataaatgtctgcccggcccagcatcccagagtcgaacaccctgacgagcaagtctatgccagggctacacacaggaagcccagggcctcccggatccacagggagcgcacgtgtatcctgtgtgagagagacagccagccagcctccaggagcacacggcctggcacctgtgtgttacgtctgtgcgtgctgcatttgattatctgggggtgcctggcacaccccaacgtgggtggcttctctgcatcaagacggggctatgagcctggagtggtgtctgagtgtctgaggaggtgtgggttcgtggccaggtatgctgtgtccatttgtagttcggaccttgtgatgtgtagtctgttgtgtccaggtctccttgtgcgggaggcagcaccagggtgagccccccacccaccgttcgtcccagtgaggccacgggcctgagcatcagagtggggagcgcagccccgtggtgcgattgcagtcactcagcgggggtggtcggcagtgggccaggcctatcatctgggcacatactgccctgggcagccccgtccagttgtggtcacgcagggcttggtccaccgtccggatgtagccattgatcaagtctttcatctccggggtgaagggctcagggtcgtgggagcgccggccgcgccgccggaagctgccctccttgttgttctccacgcagagcagccgctcctcgctcacagacacgttgaggaaggccaccctcgtgccgaattcacacacccaggcctcgacctag

SEQ ID NO: 142580 - DNA, 507 bp, Homo Sapiens
tttttaaacggttcctttgcctttttatttcgcaggccttcctctcaccccatacagttactgcccctttgactcctccgagaggcaaagctttttcaaagctctaacacctctcccctaccccagcaagttccccgtgcgagaccaatagaggatgccgctgttctaagagtgaagcaagctgtggactggatctcgccgagggagagagaattccttcctctggaaataaaataactgctgagattttaagttagctgtttcaagagcacttggccatcaccaagtgttacaaaccaagaatactcagcggccattcaacaagagttgccacaaagcattagagggttaactgtatctcctgttttactgttcaccgttttcagggtttgaccggttgtcccaaacatactgtagcttttgagtgcaaggactatgccattcttcgaccacaccaccagcagctcaaggtcctgaacagaacatatgtataatacacatactctg

SEQ ID NO: 142581 - DNA, 505 bp, Homo Sapiens
acgtttctgaaaaaagggcttacaattcttcagcttccatgaaacttagatattcttgaaccacactgttcctttcaagccacgctagtgctatctgacccgtcttaaatcaatccagatttaaaagccattcgaagagcggcggtaagctaatccggaaatgcaatggctatgaacactttcctgcgtccctcgaggagaactaagggtgtcgttttgtggaagatgactctggagcatcactttggtggtgaccaagactattaaagttcactgctgaatcacggcctttaccctgaccaccttgtgttgagcttttagaggtggggctggggctggacacacaaaccgaagtgtttcctgctagttcccaacaatcacccggttttactttcttggtcacacccatcactacctgaaattaccttgtttaactccgtttattgcccgtctctctccctagaacaccaaccacccggcgcagggcgcctgttgcacaaccccg

SEQ ID NO: 142582 - DNA, 438 bp, Homo Sapiens
ttttattattaagtattattatttttatcattgtgacccaaatgagtgctccaaagtttgctgcaggttcagtcctacccacttaagcaaaggcagacgtggcatagttcagcagggtcatgtcaatgatgcaatgatgtactgatgaactcaggaggcttcatgtggaagacatgtagctggttaccagagagccaggaaaagaagtctgcaaaagtgtgttcttgcttttaatgcttcagataagatcaccggaaggcccatgtgacagcagcatagatgaaggatcagagagaggccaaattggggtttggacatcatgaagaagctgttgtagtagtatgacaagaagtcttgggagcatagggtttagggatggttgattcagcagctcaacaacatcatcaggaccccaggttttctctgactcccgcggca

SEQ ID NO: 142583 - DNA, 433 bp, Homo Sapiens
tttttagtcttcatttcttcattagcaaaacatagggagaacatacatataggccttatttgtattgcaaagggccaaatgagacatacgtaaactgtgctgtaatcctaaagaatgacaataaagagccttttttgggctctcatccaacactacccatctattaactggtgtgtaaaatcactcagaggctttccttacaccaccaagtgtagtatgtttacacaaatagttacatgctttgtgtataaaggtataatgaattcattcacatatttgtttattctaaattcttaaatatcttgaaaaagtcacactcatcatgagtcttaattattctacctcagaaaaaatgagcccaaccaaagttttttgttttcactttagttctgagatacatgtgcagaatgtgtaggtgtgttacataagtata

SEQ ID NO: 142584 - DNA, 276 bp, Homo Sapiens
tttcgttttttggatggaggaactgggtggaggaaggaatgagagctgtcgactgtcagtggtagaagtagccccttccaaagtgacagctgatgaccagagaagcagctctttgagtaatactccccatgcatcagaagaatcttcaatggatgaggaacagtcaaaggcaatttcagaactggtcagcccagacatcttcatgcagtctcactcggaaaatgcaatttcagtcaaagaaattgtcactgaaattgagtccatcagtcaaggagt

SEQ ID NO: 142585 - DNA, 329 bp, Homo Sapiens
ttttatttcacgtggagggtttatttgggccacgtatgaggacggcatcctgggggacgtagattcaggtggctctgaacatatgctccagttagcagcagttacagtgggtttgaaagaaagaaagaaggggcaagttcccacactggttcattaaaataacataagctattgactggctgtagatggttctttgcatcacagattccaggagcatgaagataatgggtgaaggtcacattgtctaacttgtgtaacatttcttgtgatttttcagccagcagctctggcagcttgcgatttttgaggaattgatccacttgctctaa

SEQ ID NO: 142586 - DNA, 463 bp, Homo Sapiens
tttacacgtggagggtttatttgggccacgtttgaggacggcatcctgggggacgtagattcaggtggctctgaacatatgctccagttagcagcagttacagtgggtttgaaagaaagaaagaaggggcaagttcccacactggttcattaaaataacataagctattgactggctgtagatggttctttgcatcacagattccaggagcatgaagataatgggtgaaggtcacattgtctaacttgtgtaacatttcttgtgatttttcagccaggccaggcgcttgacatgtgggagcaatggcgtcttcctccttgtctctagatctcaccctggattcgtagtgagaagggcattctgagaaacttcactcccagcttcacctggtgttgcgtgcaggaaatgagtacctgcatcccgggttcacggtcgggatgcttcagagcccaagcacagtcag

SEQ ID NO: 142587 - DNA, 421 bp, Homo Sapiens
ttttgtagacaaagttgagctgttttattcctcagcctaggagctgagctctcagtggagggtcgggcaggagcttcccaccttctcagcacttcggttattgtggggtggaacctctgccataggacagagctagaaaccagagacccagtgttcccagtggcactggacccgggacagagcctccatccatgagtggggctccatggaagaagtgagtctctggctctcagtagctcttgttcagcactgaacctcagcatcatgtgctgtgtgcagggtcagagggccaacgtactgggtcctggggaagagtttcctctggtgggagttggtagaaggtgacctgtcttcttggctgcatctgtccgcagtggagtttacatcatgctgagcactgtggcacagcaaactggatctg

SEQ ID NO: 142588 - DNA, 833 bp, Homo Sapiens
  misc_feature (115)..(115): n is a, c, g, or t
caggtgttacagatccgggatctctaccgctgcttgcgagtggaagcgcttctcatccagcaccatcttaagggccacgtgctggtggactttgtgatcgtaggcattgacaccntgcccaaagctcccattcacaatgacattgaggacctcatacctgtaagccacgtgatcgtggggcacctgcacatatgatccctggtcatcatcatagccaccattgttgggcccacctgtcatgccctggcgcttcttagcatttagacccaagaaatatatttcagggtagctgaaaatctcatggtgttcgaaggctgtgagtttttgcatgtattgcttcattgcttgttcaggtgtcatgggggtggctttcaccttccccatgccttccatggactttagagaggtggagctcccctgccgtctatgaatgctgtccagctgccgctctggcaccactggcaagcccgttttgcccactgtttgtaagcccatttggttgtgtcgtgagcactgtccgcttgttactgttatcctcaaacaactgttgaacctggatctgtccgtgagcgtggctgccgacatgcaggtgatcattcattgtgtgcttactgccgccaatcgtgtgggctgcggcggcagcgttgctggcccggagaggcggcagggcgatgggggagggcgggccagtccccactccgctccgggtggcccctgcaccgagccccggggaagcctgaagctgacgaacggcgctgtccccacctcggccggtcgggtaggcggcgggagcggcggccgaaggtttcctggttaacatggccgctggagag

SEQ ID NO: 142589 - DNA, 405 bp, Homo Sapiens
accgccgatgaccacgatcacttcagctaggtccatgaatctccgcggccgggtccgcagcgcaccggcctcgcggcccaggatgaagcaggcgcgagcctcgggcagcagcgggcggcactcgcccgcaggcctgcagcagcttcgtccgccctccccccttctccaggaagtaagcgggcgccagtagcggcaggcgcacgtgctccagcaggcgtcgcagctggccgcggcgggccggcgcgtcgtggcgcacccagcgcatggccgcttcaaacacggcctcctcgcgcgccacgcccagcgcggggtccgccagcagcgccaccacctcgtcaggcgccagctccaggaagtcggcgtggcgcgccacctcggcgaaggcctgacgcaggacgcggccgc

SEQ ID NO: 142590 - DNA, 475 bp, Homo Sapiens
tttttttgaacaagtaaatagaattcatttattcggccaatgtttatggagtgcccactatataccaagcattgattgaggtcctgggaattcagtggtaggaaaaacaatcttcctgccctcatagcacttacatccattcctgtgggtgtagatacacaaataaatagtcaagtatttttagagagtaattagtgttactaagtgaataaataagtggggtaggatggcgactgttgggtgtattgatggtagggttgtcctgcagcccctgtctctctcccatcccaccttgtctctgcttcatcctactctgcagatacacattctctacttctctgtgtactcatctggtgaagacatctactccacagctctcagcccacatcttcctggttaaagaagccagaccggaattggccagcttgtggtggggaaacagcaccattcccacatgattagcattgtcacaaag

SEQ ID NO: 142591 - DNA, 489 bp, Homo Sapiens
  misc_feature (352)..(352): n is a, c, g, or t
  misc_feature (357)..(357): n is a, c, g, or t
  misc_feature (362)..(363): n is a, c, g, or t
  misc_feature (439)..(449): n is a, c, g, or t
  misc_feature (463)..(463): n is a, c, g, or t
tttcagataatagagaaagtttttaaataaactctttactttgaaataatttcagacttacaaacaagttgaagaaagagttcccatgtgcccttactcagcatcccaaacggtaacatgtgacataatcatagttcaagaatcaaaactggtgaattaacattgaccaatactgttaaactaagctacagaccttaaatgttaccaaatgtgtcagcaaatgttcgttttctggtccaggatccaatccaagaccccacagtttctttgattctgataccaattgagactcttctcatctctgacaggtcctcagtcttcctttgtctttcatgaccttgacacttttganagatncaggnntaggttattttgccagacagtctcaattcaagattgcctgggatgtttcttcatgattagattcagaattgtgccnnnnnnnnnnngccaggagacccangcagtgaccattgggccctcggcccc

SEQ ID NO: 142592 - DNA, 448 bp, Homo Sapiens
  misc_feature (101)..(101): n is a, c, g, or t
tgtaagatttaaatggagatgatctttatttgggttgacctacttgtgattatgtagtcaagatggcatgcattcagatatctcagttcaagaaacataanacatctgtatgtaggaagttaggttttgcaaatggtgatagaatgctaccacaaaacctaatggataacttatcctaagctaggattttatgggacaggaataatgaagatacaactaagaaaactcatggttgagtggtttcttctctctgaactattttattaatatagtactattttaaattatgaaatgtagaggaaaccattatccttagctttttcctaccctctccagtcacctccttcattgagaagggcatattaggcatccatctggataaatgacccctgagcaaggtgttagcccacctacccacattctactctgaacctggcataaactgaaa

SEQ ID NO: 142593 - DNA, 530 bp, Homo Sapiens
ttttttttacacaacacctggattttagtaaacatcagttattattattagcattcttccaagatctgcacacaaagtgagttacggctaatcagttgataaactcctagcagagcagaaggttatgtgtgttgtgatgtttaagtggtactgggaaactctggttgccttgaggttctgaaattctactgtatcagatgggttcctttaaacattgctctctctagggggtcctctttttaaaagtatgcaccttctggagggcatctcttcatccttgtgtggtttagtttatcaggtattttcctcacgatggcagcctgagaacaggggacgcccaagggctgggatttgtgtgctccggaagaaaacggggtgtagaagtggggcctctgaaagagggcgaaaaggcaaggaaaaggagaaatgttgcacagtcttatggtctgtcccctgccattctgttcccctgaggtgtcagagcagcttctctgtcttcccagggatgagtttacacagacattccctgt

SEQ ID NO: 142594 - DNA, 664 bp, Homo Sapiens
tatacaaaattagatctataatttaatgccattttggttaattaaaaatacatgtacactggacactactacatattacagaggatctatgcaaataaaaggaaacatcaaattcattaaaatgtttacctatgaggtaggggtaagaggttagatatgggagtaaggactggagataaaagggaccaaataaatcaagggagagagagagagctcggaggcaccaatgatgatcatataatgaactgagaagttcttaaccttttgtacctgaggtccagcatgaataacaataataataatgaattagatgtggtcatctgcatggaagttcactgtctaatgctaagagaattcccaaaacatataaaaatataaagcatggtgagtgttatgataaatagaaacctgtaagatctctggaggggcattttttgtgtgaacattgccatggaatgagtccaagtagagacagtaagtagttacaggcgcccaccacactgtgttgtaattatgtatagaaatatagatctgactccattatttggcaatggactctggagaatttgaacttggtcttttccttcacaaaatagggtgaataggacagtggatcaacagtcttggatccagactttctggattggaagctagccctactact

SEQ ID NO: 142595 - DNA, 333 bp, Homo Sapiens
  misc_feature (61)..(105): n is a, c, g, or t
cagtgctaacctaaaattaccctcactaaagggaataagcttgcggccgcatacgcggtcnnnnnnnnnnnnnnnnnnnnnnnnnnnnnnnnnnnnnnnnnnnnnctatagattatttacattttattctatatacttacaaaagtaatatcatagtttattgcaaatactcatatttactatgtcaaaaatcacatttttgcaactatatgcatactttggtgatattgcaggttcagttccagactaccaaaataaaacaaatgctgcaataaagcaagtcacacagattttttggtttcccagtgcatataagttatgtttacactcaag

SEQ ID NO: 142596 - DNA, 465 bp, Homo Sapiens
tttattgtttttacaagtgaaaactttatttgtccacaccaggattaccgaacagaaaaacaaaggtggtgagaagttggtatacatagcaccttatttacatgatggacttgaggaggcagttaatcctatggttgtgtatcacaacctttattagcaatgccatcttctcttcctcctcctacttgaatatcccttacggtcaacagcccacgggcttggcacacaccagcactaatgtgctccagagtctttcccctacttgttacatgacagtgccttacatgtctgaaagtgctcatacattcatctgttcctttgatcctcacaacacccctgtgaggtaggtaggacaattatgagtttcccactttataaatgaggaacctgagttatggaatgctggaaaagcttttctaagggggttcaagtagtaatggttggtctaccacataggcagattcc

SEQ ID NO: 142597 - DNA, 373 bp, Homo Sapiens
tgcggccgcgcgtctctccgcggggcctgtcgccaggccggccgttgtgcgtgagtgatgagggcagataagggcgcccataaatcgcgggtgtcagggcgaaaaactctctttattgtctgcgtgatggatgggcccggggacgagacaccaaatacttcgtatcgcctttaaatgggaacacattttccgcggccataattcatgttttttaaatagaaagtttgaaatgttgcctatatttcaccagccctgacatatttatgaatcgctccctgcatgcaaatatcattacttaaagcgccggggagagcgcgggggaggggaggaggcgcggttcccggggcgtgggggtggtgaaccggggaaatat

SEQ ID NO: 142598 - DNA, 845 bp, Homo Sapiens
  misc_feature (99)..(126): n is a, c, g, or t
  misc_feature (171)..(206): n is a, c, g, or t
ttttttttgactgatcataggaatttatttttaaataggtttcattagttcaagttagaatgacaataaatgtgaagacatgtttgtctgggatgtggnnnnnnnnnnnnnnnnnnnnnnnnnnnnattcagcaaagcgtactttttttcccaaaacataaaatcattcannnnnnnnnnnnnnnnnnnnnnnnnnnnnnnnnnnngtgcacatgccacaaagcaaaccaaacatagctcagttttcctactgataacatattttgtcttttaattttggcatgtggaagtcacagaaattcacagacttaatatgcacacccaaatattctaagtgcttatttagggagtatctttatttggaataaagaatttcgagttataaaactgatggcttatagaatgcagcttactaaattggtcttcgttcttacaaactggagtaatcttgtcctttgagagttgaaaatacatattcatctacatttctgcagcgagtggcccacagttaattttcatcactggtggggttggcagaatgttcactctcttctgctgctgtgctgtgtcttcgttgacttggaattgcaggaagcactcggtttgtccgcagaggttctccagatagaaatttttgatctggtaggggagctaggttgttccgagtgaaaggaagatccctgattttgtgtctgtttggggaaagatgctgaaaattttgtcctgatgatggattatgtagatggcgaaggtgtggtggcacggagacctcttggtgaccaggccggacactgagcaatctgtccagcagcttatcagaagaagacacagtccaaactttgtag

SEQ ID NO: 142599 - DNA, 510 bp, Homo Sapiens
  misc_feature (488)..(488): n is a, c, g, or t
caggacttgtttttatttcataaaaatcacaacatattttcacaacttagggtcatcatctttcttctactataaactaaacatttcattctttccaatttcttatttttggccaaattatgtatagataataaaagtcctgcagaagccaaaacatagagcctataaataaagtgcatgactttcattcattggaaacaaaaggtttagacgggttttgttcattacttatcttgaaatattagctatatagatgaatccggcaacaattaaaaacaaataattccatctaaactaaagatagttccttacttgatttgtttcactagaaactaaataaggagaaatatccaagtgtccattgtaggaatacagtgttctcacttctaggtgctcaccggcgtgatgaggatctggcactgtggtccatgtgacctggtttctggggtcacgggagcctggggcagtggctaaacatgggactttantccatactaaacatgggactct

SEQ ID NO: 142600 - DNA, 502 bp, Homo Sapiens
ctttagaaaagagagttttttgctttattttagggagctgaagagctttttttctgttggctggttctcagttgcttttagctcaaagtaatcaacatgtcaacatggcatattttggggtgacgtattctggtctcctacagtcatattttggggtgacgtattctggtctcctacagtcatattttggggtgacgtattctagtctcctacagtcatatttaggggtggcgtattctggtctcctacagtcatattttggggtggcgtattctggtctcctacagtcatattttggggtggcgtattctggtctcctacagtcatattttggggtgacgtattctggtctcctatagtcatatttaggggtggcgtattctggtctcctacagtcatactttggggtgatgtgtcctgagccccattgtttcctagtctgaaacttccccaagaagctccacggtacagaaactgggtgggtgtgttgtcccataatgct

SEQ ID NO: 142601 - DNA, 498 bp, Homo Sapiens
ccaccccacccccaacccccactgtcctgaccacctggagccaaaagcctcttttcctaggtccagagtcctctctccctctggccagagcctcagagtgggaaagggaatccctggccctcaaggaggttttctctcagccgccccctgcaatcccccaccgcctcaccctccttcagaactgacatggctcctgcctccctaccccggccccaacctctccagcctggactgaagcataagcacactgctctttctggagttctggagaggaagtgggaagaccgccctcccccatcagaacaggggttagaggagctctcagtcaagggaaagtatgaggaggaagagggacgcgcgcggggactgggctgggacttccggcctgtgaggcagggaatgcggcttttcggccagtcgtcctcgaggcaccccaaggatttcagggtcgaaggctcattccggggttccagccagtgtccgttgcgttgcggccgc

SEQ ID NO: 142602 - DNA, 579 bp, Homo Sapiens
  misc_feature (561)..(561): n is a, c, g, or t
tttaacagttaagcttcctttattgtcaacaaaatatacaaactaattttcaagaggataccttttgttctaagatatattcacactagcaagattttatttattttaaagataaacatcagcagataagccattttattttccagtttcagttttataatgtcactaaagtcattatcaaattttaaatgatcacatctataatcaaaggctgatactgtaaatattatacacagtaataacaactgtcttagaagagatatagaacaaagcttatttctgcctacacatatgatgacatctattgataagcttttaagaaatatgtcataccatatgacttcaaaagatgggaaaacaggtatattaaatgaatagcaatttaaaagacgctactttcatttcctagatttcagcattaatctaggattatatgattaatttttaatcataaaaagaattttaaactaacaaattaaaatatactacctataataaatgaaatatcacactaaaatgtgtttgagtctaagtgggaggaaaatccacatttatctgatntttagtatttaaattctt

SEQ ID NO: 142603 - DNA, 868 bp, Homo Sapiens
  misc_feature (103)..(103): n is a, c, g, or t
  misc_feature (158)..(158): n is a, c, g, or t
  misc_feature (260)..(260): n is a, c, g, or t
  misc_feature (269)..(270): n is a, c, g, or t
  misc_feature (284)..(284): n is a, c, g, or t
gagaattgctgtgttcctgtgaccctggggaaaaaggaattcctagattcaccttcaggacaaagattgacccggtagaaaataaaactgaggaaagaagaanatacgcacaacagaggggaagacattggctgagcctcacaaacattgcagatatncctatgtgactcagaatcaacacaagatcctgcctttgaacactgatgccgaaaatcaagaacatcctttaaactgaaaccatcagaacaaacatgtttaancaacacaanngttattattaatgnaaagcatttctaaaatgcttttttaaatgtgaaaaagcaacgaaagttttagttctgacaccaccagacaaatagctaggaaacagacacttctgtcttcacaacagtaaaaataaaacaaactgaaaatcagtaagttttgcgggcctatcagaaaactaagattgcaggaagagctgtcacacccaaatatgaagaaatagaagacttcagagagacaaaaccaagttctgcttatcagaagtagaagacactggagacatataaactcataagaacacttagaacacttacatggcaatgttaacaaattgctgtaatctgagtatggactatcttgagagtgataatcccttaagagcttcagtattagaggggcctgccacattcacggcctttatctacagttatctcaccagatactcacagtgaagatgcccttgtagctctggctggggcggaggaagagcaatccttgtgaattacctccagagtatgctctgtaaaacaggtttatttttccaggagaaaagacactaacagcgtcttctaatgtccatgaggtgatgaatgatgacccttat

SEQ ID NO: 142604 - DNA, 463 bp, Homo Sapiens
  misc_feature (76)..(85): n is a, c, g, or t
ctttcttccccctttctcacacacttgtatattattttgaggtggtgttcgcagagtttgaaaggagagagaattnnnnnnnnnngccgcaagcgtttcactcttttatttttataatccccttcaatttggggttaaaaaaaagacaagaaaacaggaaggaagagaaataaggaaatgagatgtggtaaaagaagctaaaaggtgccttttaaaagatcgttgctgtgaagtgaaaaaaatctccagagaaaccaaaaagcaccgccgagacctcttccgaaccaaaggagtttgtgtttgcttttagggaagaagaaagatcattcattcggaggaataacaaccaattaaaagacaaataaaaaaagtttggagtgggacgcagagcgagcgagaggagctgccggcgggcggtggggcgcggagcccgcactttcccggccgggtgagcggcggccgc

SEQ ID NO: 142605 - DNA, 1065 bp, Homo Sapiens
  misc_feature (213)..(223): n is a, c, g, or t
  misc_feature (470)..(500): n is a, c, g, or t
  misc_feature (539)..(562): n is a, c, g, or t
  misc_feature (569)..(596): n is a, c, g, or t
cgcgcttctcgaaactttctctccctctacttccccacgagcatccgtttatgattcccttctgttgtgcaccaccaccccccgtttgtgtggaaaaaaggtgcttcgtagagagacctcgggtcgcatgcccgaaactttcctctctttcttggagagaaaaaaattatttcgctgggtaggcctcctcctccccgggcgtttgtgtgcctnnnnnnnnnnnacaaaagggcgcgaacaattctttcttggagagcccctcgcatggatgtgccccctcttttttgcggggggccccaccctttctcccttcatgctttttataggcgggcttcatttggttctctcgcacagccgctcttgtcgcagacaagaacagtcgtgtcttttaatagtccctccttggggaggtcgattcactctcgtttgtggcagactattctcacacgcgcctcccccacaacatgttnnnnnnnnnnnnnnnnnnnnnnnnnnnnnnncacacacaataaaaagcgccgccctcctcggtttttagnnnnnnnnnnnnnnnnnnnnnnnnaacgcgnnnnnnnnnnnnnnnnnnnnnnnnnnnnggagggaggctgagaaacaagtcagtgctttattaacctggcaaaggggcagctaggcggcctgagcagcccctgccagaccctcctctgcactcctctgcctaagtcacggcccaagccctggacacgtaggagtgtaggcgggcaggggcaaggccaaggaaggggtggagttgtccaatgcagatgttaaggtccaacccgacttccttactgagtctaggtgtgggggcccccctctcaccccttcctccctgcacagctctggctcttcctggagtcaggaggctgtgtgtcccacatctgctgtggtctggaaggtgatcccatccccaggcaatggggaggccaggaagggccagagccagacaagggcccagcggggccccagggctgcctgcaggttgtggcagggacccaggtcataggagtgctggccccgagcccactcccatgtggtctggccccg

SEQ ID NO: 142606 - DNA, 540 bp, Homo Sapiens
tccacacagctgtgcaaaccctttattaaagcatcaatcaaaatacaggatggatcacatggttttctgtttttgctactgtaataccaacttatatgagtaacttgtttacaactttatttttaaaagtgaacattttacagttcacagaatcaccagattgacatttctgtcgagacatttttccattttccaattttaacaaaggacatccagaactactgaaatacaacaaacgaaatctaagtgcaagcatcttccttgattctcattgttagcagctctatggtgtctgagatatacatttggaggctattttattggctaaataaaaataatttatgccagaatattcttagaactatttactttctatttttacattctctagcttcaattttgattgtagtattcttagtatcagcctctttataaattctatctctaaaaaatctgttaaagatcattatcatcctcatatgatatcttcgtgaataaaagataaatgctcagtcctttggaaaatataataagcaattg

SEQ ID NO: 142607 - DNA, 521 bp, Homo Sapiens
ttttgaattcaatgctgattttatttcaactaaataaagcaatgcacaagtcacctgggcagtaagcttaactccaggagcaaaagccaagaaacaaggattctttttttctttaaattatccatcactacacatggctgtcttccatacctgctctcagaaaatgtgtgttaacaaatctcatgtaaagaaacacaggaaaagagaaaaaggggaaatgcaatttatctagtctgccagtgaaggtggtctctccatcttcttttctgtaaactgctccatcagcagggtccatttcgaatgattttaatattatgaccaccttccctgattttcatgcacagagtacattcattggcataagtggacatgtcactgccacacacagggttaaagtgtctgggacatcctggtaatctatactgagagcagtttggcgttctatattttgaaaacagaccaaattgagggatcagagaggctgaaaatctactttaacagagaaagcgctctagatggca

SEQ ID NO: 142608 - DNA, 533 bp, Homo Sapiens
ttttaaaattttctcgtgtcaaatattttatttctctcattaaataaggagggatctaacagtgatgttacaattcttgaattcaaaaaatacaaactcatagaaaaccaagagtgcctcaatgaattaccaacagatgcaaaatggactattacaagggcagtcagtaatccactgcatctgtgacacagttcatcttcatttctcaatggcagtcctgtgtccttgtcatccatctggatcctcaggatgcaggacttgagagcttcatggagggtgaacagctcaagaataaagcagtgatctactcttaatgttcaggcaccaaagttcctaaaaaagagccaagctctttcagctgacccagaaccaagggaactgctaggacgctggcatttcttgggcccattatgtggctgagtcagccaactaataactccagtctttggacaaggtttgggaggaccaacctgagaccccctcctagtggtggccttgctgtgctgtgagggaggagtggtgcttctctctct

SEQ ID NO: 142609 - DNA, 473 bp, Homo Sapiens
tttttttataacatttccatggctagtgacttttattagcgtgacctctgaaatttgattgacaagaggaaccattaatgtggaacaattctgaagtcgtggaattattacctggagctggtggaagtgaggctagacattctgttttattttcggtttctacttctctggttgccacgacagtggtttctggctgggatacttgtggtcttgttggcactccagctgtaaccaaggtggagcctgtttgcactccagtttcagaagtttctttgactcctgtggaagcagtgactgtggtaggaggtccaggagcagtggttttgtcagatgcttccttggaaggacctgagatggaagtttctgggattccagtgattccacttgataccacagtggttccttcttggctgctggtgactcccgttgatcctggggtattgcctgatgaaatttctgcttcagtggttcca

SEQ ID NO: 142610 - DNA, 442 bp, Homo Sapiens
tttagatattatagaggaggtttattaggggaattggcttacacagttatggaggctgagatgtcccacagcaggctgtcagcaagctggagaccttgagatgccagttgagtggctcagtccaagtctgaaggcctcagaaccaggaaagctgatgatgtagctctaagtttgcacaccaaatcctcaggacctgggaggtagctggggtggaagtcctataacacgctctttctcgggaaaccactacaggatatgtcctgccaaatcgatggagtaaatcaaggagaacaataaggaatccaagaaatagaggatccaatgcaacagaagcaaatggaatcctcaggatgatggtaagattctaaaaggacaggtacccagcaggccaggaatcccttctgtccagcctgaggcatctaagaaaagctgtaagggtctc

SEQ ID NO: 142611 - DNA, 505 bp, Homo Sapiens
agacctgggtttgaagtgttgaagttttgtatactttttcatttgtttatttctctattccctccttctcataactgccacccctcaggacttaagttctccataatgggcagtaccttctcaataatttatacctacgtgatagcgtgagaaagtctatttgcattttcaacattttcttaggaagaaccgaaatgcaattcccatttttatttttaataagcaaaagcataaatcttagaaaacctatgaaaaagaaatacttttatgttatccctaatcgtcccactaaatggaatgcctatgattagcttcattaagagttttatactgtgaagattttattagaagcaatatatgaaaattacttggattaatgtgttaatcttcctctttaaaatgctaatatccattttatgcacattaaagctcagtatgcattttctttgatgcatgcagtttctatcaattaaatataaagaatgaaacttagcaccaacttaaa

SEQ ID NO: 142612 - DNA, 1120 bp, Homo Sapiens
  misc_feature (647)..(647): n is a, c, g, or t
tttaggagtacacaatataaatgctttattgctagcacagaggtttctttttaagtaaattaaaagaaataaatcttcattttcacattttttgttgcagtccaaaggtaactagttggttagtggctatgtccacttggacacatgctacaggagggcagcattcacatggaagcactcagaaatacggcatctgtcagggctcacggcactgggctgctgaatgcactgtcgtttgtaaataacagcaagtggagactttaaaacatcatggatagataagagttataaatagaaaactggtacggttaagaagcagaagatcgttaaatacagaaggctatatatatgttgcccatattccacaaactctgggttatgtttggtacttttaaataaatgatctgcatttaggttagagactggattggatttgacagctggaaagatggaagaagggatggaagaaggaaaggaagctaacccttccccacatcaaactggtggagtcactggaaagcagaagaggagtatgtggatgggaagaaagggagcgggcctgctgtactccctgcaagctgtaggccatggcctgcccagtgaggggcaagaattgggtgtgacagaggagctcagttggagcacgncagtcctggcacaatggaacttggcaaatggaaaaggaaacccctaggcttggccagattttccaaggtcactgccacatagatacagggcacattatgatagatgtacagtgtgacagaccaaaatcacacctgcagcagttattggtgtagaggttcagaaggtacagattccaactacagaaataattcatttaataataattgttgcccaatattagaaactgaatgatgtctgcaaggcatccagcattatcaaattcttgggcctactcggattgttttttggttggttctaagaaaaactttggaaaagatcttatctagctatgaaaaacaacccactccttgccttattccagaataactgagaaggaatctaatacacacacaccccaaaactgcagcaagctcagaagcggtcccggccgtaatggccgaattcccgggcatatgtccggtaccgtcgactg

SEQ ID NO: 142613 - DNA, 425 bp, Homo Sapiens
  misc_feature (392)..(392): n is a, c, g, or t
ttttgctggtcctgaaaaaaggctttatttgagtctgaacgagaagtaaacatcaagcaaaacagaaagagaggcctgggctgggtgacaggttgcatcttcaagatgggcctcataagagaggcgtgacagtaactgggggctggggcaggtgggacactcaggtcatcaactgtctctccacggcttccttgggttcagccctgtcctctgtcatcctggagctgaacatggagcccatcctggaatgtctcagagacggcatgctcgagattccggaaatggaggcgtaggtgtagtaggattctgaggcaatgaggttgtttatcttccaccggatcatcgtgcagcccttcaccacgaggggccacaggaggcagaaggcgatgtanaagatcaccaggcccacaaacacgctagctgac

SEQ ID NO: 142614 - DNA, 942 bp, Homo Sapiens
  misc_feature (257)..(257): n is a, c, g, or t
ctccaaaaagggtggggggggaaaaaagggcttggtttttagaaaacccggatggggaattgaaagggatttccccggggaggttaagtttttaggggcctaatccccaaaccttgtttctcccaacaacaatcggggatcccattcctttgcaccctccccacatttttcatgcatcaggaagtgtttttagagcttccagaaccacgagtacttcatcacgtcctgaagcgctcacatccccccagcaagccgcntgcaccaggcctttctctagaagtcctgagactgagtactctccagaggttggaggtttttgcggagtttgtacattgtggttgagcgcttgtgtgaggaaagtcccgctggtgttgatctccatccaaggtcaagttatccagcttggcatgtgcttcctgctgtctcacaaagctgtcagcagacactcggagtttggctatacgagtgtcccacatatccttgaccagggtccggatttcgtctgccttcgggatgttgtctgaagcatgatttaacaggagcttcgtaagttccatgtagtaagggctgggcattggggtaaaagtttcttcctttcgttcatgatccctcatcttctccaacttttctacatccatccactctggagggagcaggcgacatttctgtctttgtttcaggttaatcgccagccacaggggcacttccacgggtaaaccagggttaaaaggccccaggtcccccccgatgaggtagatcttgtccagactgaagttggggataatggtaaccagctccttctcggcgaggaattcgacctcggcagcgtccatggcggcgcgagctgcaggccagagcctcacggtctcctcgggcccctcagcgtcccggaggagaccggacgcggggtcgacgatatcccgggaattccggaccggtacc

SEQ ID NO: 142615 - DNA, 1056 bp, Homo Sapiens
ttgtggatactctccaattttggcttggtggaccgcgtgccccccttggcccggagtaccccaatgtcaaggtaaacggccacgcctcggtatacctcgtccgacctgccagggaggctcacaggaccatgctcgcaggagatactgatacctagcttgttattctcaaagtggggggaaaggctggttctagaacagatgtggattgaaggatgtcccaggagctaagtttaaggactaatcacaacttgttctccgacacatcctgaagccattccttgcaccatcacacattgttcatgcatcagaagtgtttctagagctccagaaccacgagtacctcatcacgtcctgagcgctcacatcccccagcaagccgcctgcaccaggcctttctctagaagtcctgagactgagtactctccagaggctggaggtttgtgcggagtttgtacatgtggttgagcgcttgtgtgaggaaagtcccgctggtgttgatctccatcaaggtcaagttatccagcttggcatgtgcctcctgctgtctcacaaagctgtcagcagacactcggagtttggctatacgagtgtcccacatatccttgaccagggtccggatttcgtctgccttcgggatgttgtctgaagcatgatttaacaggagcttcgtaagttccatgtagtaagggctgggcattggggtaaaagtttcttcctttcgttcatgatccctcatcttctccaacttttctacatccatccactctggagggagcaggcgacatttctgtctttgtttcaggttaatcgccagccacaggggcacttccacgggtaaaccagggttaaaaggccccaggtcccccccgatgaggtagatcttgtccagactgaagttggggataatggtaaccagctccttctcggcgaggaattcgacctcggcagcgtccatggcggcgcgagctgcaggccagagcctcacggtctcctcgggcccctcagcgtcccggaggagacgccgcggccgccgttttcccgccacggcgagagccc

SEQ ID NO: 142616 - DNA, 1324 bp, Homo Sapiens
agtgtgtccgcgtttaccttttctgggggcccgccggcggcccaaaaggaaattgttcttaggaaagctttcttcgaggggccggaggccggaccgaacatgtttgttctggatataaccgggaggggcgaaatggagttggggtccatttttattgtggatcagggcttagaggataagcaccggtcagcattgttggctgcaccatctgccatccttctctgtgagccacctctgtgagagagtctaaattcagcccaagaaatgaggatcaagaaggggtaaaaagccgtggaccacatggccactcctgctgtatctacacctaccagtcactgaacacctgcccaagtgtgatggcttccatgcaggagacccaagtggctctgctagggagaatgacttatttacctaaggcttttttatttctcaaaagtggggggaaaaagggctggtttctagaaacagatgtggaattgaagaatgtcccagggagctaagttttaaggactaatcacaaacttgtttctccaacaacatcctgaatccattccttgcaccatcacacatttttcatgcatcagaagtgtttctagagctccagaaccacgagtacctcatcacgtcctgagcgctcacatcccccagcaagccgcctgcaccaggcctttctctagaagtcctgagactgagtactctccagaggctggaggttcgtgcggagtttgtacatgtggttgagcgcttgtgtgaggaaagtcccgctggtgttgatctccatcaaggtcaagttatccagcttggcatgtgcctcctgctgtctcacaaagctgtcagcagacactcggagtttggctatacgagtgtcccacatatccttgaccagggtccggatttcgtctgccttcgggatgttgtctgaagcatgatttaacaggagcttcgtaagttccatgtagtaagggctgggcattggggtaaaagtttcttcctttcgttcatgatccctcatcttctccaacttttctacatccatccactctggagggagcaggcgacatttctgtctttgtttcaggttaatcgccagccacaggggcacttccacgggtaaaccagggttaaaaggccccaggtcccccccgatgaggtagatcttgtccagactgaagttggggataatggtaaccagctccttctcggcgaggaattcgacctcggcagcgtccatggcggcgcgagctgcaggccagagcctcacggtctcctcgggcccctcagcgtcccgcctcgtgccaattaacacccagctcgacctacctat

SEQ ID NO: 142617 - DNA, 375 bp, Homo Sapiens
  misc_feature (308)..(320): n is a, c, g, or t
gtcatgatgactacttatttatttctattttatatgcggggaaacagctcagttattactcaaagccacacttaccaaagccagaggtaaactagtacaagtcttttgattcttagcattatattcaataaattcactaggtattctctaactgtacttttgatgggatattgaaatctttaaaggagaaattccatgttggaaccaagcaaagggtggaatttgacaaagcagcccaaccactttggcttacaaagtcctttatttagttcctaccctcttcatctgcatagtaaatcatagggttnnnnnnnnnnnnnaccacgaatagcagttaatcatggctattctccaaaaagctaggtgcaaattaac

SEQ ID NO: 142618 - DNA, 457 bp, Homo Sapiens
  misc_feature (67)..(89): n is a, c, g, or t
ccactcccccttttggagtgtgattttgctgggggtaagtgggcaactacagtgacggttagttgannnnnnnnnnnnnnnnnnnnnnncgattagatggctttctacatagaaaaagaaagactacacaggttctaaagagtgaaatggtgttcagtggcatttgttttacagcctctgaactgtaagcagaactgtcaagctcccaaggctcgtcctctctcagcaaccccgaagcccccttggctgcaagcactcagcgcccgtaacctctcctgcatgccccagccccaaggtgtccttttgcactccggaccccttggcctttgtcagaaaacgctctgcactgcactgtcccctcttgctgcacaagagtagcggccacagcaatgctcaccaggcttggttgcacacagccccctgccccaggtccaggcctacacacacatacaaaaaa

SEQ ID NO: 142619 - DNA, 371 bp, Homo Sapiens
tttttttccagtaaagactagaagattttatttccataattggcacatgcaggtaacagatcctcagaaaatatttgtacagtaattgaggacaaaacaggaaggcacctgaagcggttgggaaaggcttgccaagtcaaactgagtatgaaacggcacttgtatgtgtaagggtaatagcatttactgagtcatctacgatgtgccagttaccgagttaagtgcttcacatacatcaactcctttaattctggcaacaactctatataaactgtattgtcagtcctgtgttaatagatgaggcagagaaattaagaaacttattcaagctcctaacacttgaatcgagcagatctttcatgatcttagcc

SEQ ID NO: 142620 - DNA, 520 bp, Homo Sapiens
tcaatcttcattgaagaattttgtccaaaaatgtggacaatatgtgtcataaggattaatcaccataaaatagtccccaaaggaaattaaaggactgattagatagtactaaaataacaatcatacaaagtagaaagtggtgttataagagaaatgtagataaaatattgtaagaaactaaagtaggaagataatgttttgagttgtgggagatcagggaaggttttttggaaaaagtaacgtttaagctagatcttagagagacatgacttaatagaaaagtaggcaaaaaaatatgaataaccctttcagattacaggcaatacaaattatgataaatataaaaaaattctcacttcactagtaatcaagtaattgaattaaacaattggataccattttttcttcagcagactggcaaaacataagatgttaacaagggttttgagggtacagggaagagggtaggctcaaactatgctggtatcaatgtaaccaagatctcctttggagtacaatt

SEQ ID NO: 142621 - DNA, 434 bp, Homo Sapiens
  misc_feature (207)..(207): n is a, c, g, or t
ggaggactgcatcatcactgcctgccaggagggcctcatctgcacttgggcccggccgggcaaggcgttcacagacgaggagaccgaggcccagacaggggaaggaagttggcccaggtcacccagcaagtcagtggtagagggcatctcctcccaaccaggcaactccccgagtggcacagtggtgtgaagccatggatatcgggnccccccaaccccatgcccccagcctcctagccataaccctccctgctgacctcacagatcaacgtattaacaagactaaccatgatggatggactgctccagtccccccacctgcacaaaatttgggggccccccagactggcccggacacgggcgatgtaatagcccttgtggcctcagccttgtcccccacccactgccaagtacaatgacctcttcctctgaaa

SEQ ID NO: 142622 - DNA, 1540 bp, Homo Sapiens
ctagtcaaagcttttatttcacttttactcacaggatggtgggcaagtgtccaccagggcacataagaaactccagagtctcttaagcagataggctgcttgtagtgagacccaggcacaccaatcacttgatttatcgcatctacacatgacctgagaggggacaagaaatctctaagatttctgtgctcggtcctctaccattcttgcaatcacacttatattgcttctccttactggtgtgatggagctctctgaggagaccaaaaactccagatgttgaccacatggctgagttcgaagatgcagaggtggctgtggcccacagcctcaggaggtgacaatgttctgcacacagaaaacacctcatggaagtacggatatgcacatcaggagggcagaaatccacagtgctttttattgaaaaagacagtttctatcttttttaattagaggaaggggacaatgagttttctgctgccccatggggaggttttggctgaactcgaggtctggggaggggcgggcctttctgctggtgaacttgtgtgcccgacggagcaggaggcctcttctgaggctggtgctgaacacggtgtccaggaggcgggggacgatgactaggtgcctgggaacgatgaccaggtggtggaggaggatgttgggaagttgctggattctgaggggttgaagctggaatttgttggggcttccggcccctttcttcagtagctactctgtgggctcttgtctccagctcctcatcatttctccgactcctctgttttttccttttggtgatatagaaaacgagcagtgccacaaagaccatcaagaggctgcctcctccacatatgccaatgatgagatagatgtccagacctttctctggacagctgacaggctcgacactggattccttgctgactttgttccctgctgtgcacttgaattttgcactcaggttggtggtccacttgtgtttgatgaccctctgagaaagttttagatgtttcccatcttgatacaggtttaattcggggtcagttccattcattacctcacaggtcagggttgtgttgatacaagtccaggagatctttggttttgagaccctctcttgaatcttcaaatcaaatattttttccaacacattttttccttttgtatcatatattgataccttgtagatatcgtgatcatcggtcttcagatgcttaattttcagagttccatttttaaatagcttatatgtatctttttccttgaaagtctctttctcttttctgaattgtgcaatctttttcttgtgtgaagttttttcccattttatatcgtcaatatcatcactcatttgaaaactaggaatgtccaagttgatgtcctgacccaaggcaccccaggtttccaaggcatttgtaatctctttggagactgcacctttggaagaaacattgaaaatcagaaggaagctggctacaaatttacatggaaagctcatgttaggggtcgattccgggaattccggaccggtaccatc

SEQ ID NO: 142623 - DNA, 414 bp, Homo Sapiens
caggcatttctagcccctgagagcagtttcccaaagagcctgcagagggagcttcccaaggaccttgggtccttccagggttgacaccactcaccaccctctgtgagcctgggagttatggggtgaaaggtcccaacaagctcttctatctgcttgatgcaggaggcagcatccttggccagagtaatgggctctctgcctggacccctcccagccatcccacttctcttccttttgcagagaaaggtctggacatctatctcatcattggcatatgtggaggaggcagcctcttgatggtctttgtggcactgctcgttttctatatcaccaaaaggtaaatacagaggagtgcggagaaatgatgaggagctggatactagagcccacagagtagctactgtgtatggggcc

SEQ ID NO: 142624 - DNA, 458 bp, Homo Sapiens
ttttatcagtggaggagctttatattttgcttaacatctttgtgtgtacgagcctgtgtgcacgtatgtgtgagagagaaagcagactgacacacaaagggacttggccttgctggacgtttcttctttcccgaaattcttcatcctaggcttctgttagactatttccctggttgctgtgggctccattttaaagatgatgacatagaggtacagagaggtcaggtaactcactcaccccatgtcacacagctggtaagcagcagagttggaattcaaatccaagcattttgactcaagagctcacacttgacttctgggcacactgcttctctgagggcagtgcaaagcaaagcggcctgattgtcatctcagagaaaggggaaagtcctgtcaggggactcttgacgtgtgccaggcacggcgggccgcctgaacccacttcctcaatcagcctc

SEQ ID NO: 142625 - DNA, 499 bp, Homo Sapiens
tttgagctgttttttcatttatttagacatttaaaaaaatttttaacaacatttgtagttttcagtgtacacgtcttgcatatttttcttaaatttattcctaattattttttgatgctattggaaatgaaatttcttaatttttggattgttcattgcaagtgtatagaaatcctgctgatttgtgtgcactgatgtgtcctgcagccttgacgaactcacttattagttctgatcgttttttagtggatcacttaggattttctatatacattaacatgtgctgtagagatagttttgcattcgtttttcacaatctagatgctttttaattctctttctttcccaactgctctgaactagtacctcacatacaatgttgaatagaaaagccaagagcagacatttttgacttgtttctgaccttatgaggaaagcatccagattttcactattaagtgtgaggtctcttacgggattttcacagatgactttcaca

SEQ ID NO: 142626 - DNA, 480 bp, Homo Sapiens
aaggtacagcttttactgcagaactctagccatgagacagcagtacaaactcaccagtttataaaagagggctggatccaaattatttctgacaaaattggaaccattcacataaataaactttgtttatcccagtaggtaattcagtgaaggctgtgaactaaaattttgaataaagcagtttctatagcagtttgattttaaaaacttaccctttctttttttctccagtttcaagttttcaatgattacattttagctacaactggctgagctgtataagcaaaacaaaatctccaagtagctctgaatataccatagacagtgagtcttttctcaataccagtagcttaataataccagattcaaagcagacagaaaagagacaggggtgatggctcatgcctgtaatcccagcactttgtcgggggtgggaggattgcaggaatccaacctgggtaacatagaacccctctctat

SEQ ID NO: 142627 - DNA, 299 bp, Homo Sapiens
atggagttgctcatcaaattaaattttatttgatccatcaacattttatactattacattgttattagttgaaatgaatatgttattagcacataaaacttgttccctggcaagaaagattcatttgtatcacttttaatttcaggacacctagaaaagtatggattaactagaactatacaggactggattcctccagaaagaaagtatggtatcttttcccaagagcttagaatgtatactttttgcccttttctcccccactatggggggctggggagaagtatagattattagct

SEQ ID NO: 142628 - DNA, 420 bp, Homo Sapiens
ttttttgattcttcttggctttatttgagacgaagtcagccaagtgaaaaacacaaatacatgaattctgagcaaaggggtcagcagaagtgaaggcagagccacggtccatgcagagaatcataggtggtgttccatattccttccctggtggcaaaatggctctccacgaccttgtctgctcaggagctggtcaggatgctcaacgagctctttgccagatttgatcgactggcccatgtgagttgaatttaatttcctcctcgtcttttgcaggagtgagggacagaccaggcacagggaggtggactgtcaggagggacacagaggtcatggttctggggtgtctttaacgtcaaaatttggggattctttccttgtcctgggtagcatcatatttttattctttcagaagagaag

SEQ ID NO: 142629 - DNA, 474 bp, Homo Sapiens
ttttttttatccccaaatgttttattacatagtttaaaaacttataataaaagacaatcttatttatgtcatacaattcaaaactggtttcttcctgagaagtttcagtcaggaaaggttaaggaattaggcttttgttttttgttgttggtcatgtctgaaatttacccaagtccaacacattcctagattcaaccaacaaaaactactattttatcaagacactgattatacggtaagtttacaagtagaatacttcaatatttttgtccatactcagttcattttcagccaaaagacttaagagtctttgctctaggcagaatacacgatctatttttaagacagtcatcctctctaccccaatgcacaccagatccagaaaaatgtaatctcatatttttaaaacaaaaatctatttcaatacatgcaccgaaggttagaaaacaatctgcgatgaacttcattacccct

SEQ ID NO: 142630 - DNA, 530 bp, Homo Sapiens
tttactaaacaaagtgaatttattaagtaacaattcagctttcatttatcaacaatatgtaagtgctagattaaaatacctgatcaatatgagatgacaatggtgttctagtgaagacacagaaatccagtgatgaagccttatcatgagtaaatggatggtttccattagattttgtcaaatattgaatacagatatccattaatatctctgggctcgagggtcccaaataaaaaacactcgtaaagacagtcaagaggaaaaggaaaccatgagatatagagaatctggggtaaggcaagttcttgccatgcgcatcccctcttctgcttcatcagcaaattatctgcatgtttttcagagtgtatgttacttgtgtattttgaacctttttcactaataccatgctctgctatctaccaagtttccaatctgtgatggtctgttaggttacaataaatgtttcgatgacattaatgagctcatttgtgatcagtaaataggagcatgaactcagtgtaacatggagt

SEQ ID NO: 142631 - DNA, 362 bp, Homo Sapiens
ctccttctttttttgtaagaaaaggagaacacataaaaccccacccagaacaaactccactcggccctgaaagtatttacaatcacggccctgaaagtactgaaagtatttacaatcacgttacagttcattcactgctgcagaacctctctccagcgatcaaggtcgaagggagccgacgtcgccctctatcggctccctgctgcactagaagatattgactgagaatcctccatgtgccaagtactgttcaaaaacactgggaacccagcagggatgagccacaagtttccttgtctttacgaagctttcattctgagggagtggagagagacaagcaataaacaaccaatcaaaacaaa

SEQ ID NO: 142632 - DNA, 450 bp, Homo Sapiens
atttgtttgaatcaaagtgtttctggctaaggatcatttggctcttccagaaaaccggcttggtcaccatattgttcttttgatattgtcactctgagtctctgctttaccagttactggatcaaggataaacaagtttaatctgcagctgtctttgggactgtttcgtaagtcagattaagtaaaggcaggtttttaataactttaaaacaagttcatttataaggatactgagcctacttatgtttaaaaatctagactaaaatattgtttaaatccagtatttacaaacttatgcagagcctgtcagtcatggtttatgggaactgacatcccatttttttcgtcattcttctgttggttcattcagctgaagtctttgatactactagtcttcttctgccaatgggggcccttaagttgaagaaggcctgacatttatgaactgcc

SEQ ID NO: 142633 - DNA, 536 bp, Homo Sapiens
tggcctactcttttgcccatggcctggtgaagaatctgaaattctcctcacaaaatgcggctcagtccctatgaaatgctgtattgatgagcttttctcacaaatgacctcctacttgatcaggaaatggccaatttggtcaaatatataacttctttggctaaatatcaatgaaaccttaaaaacctacctgaaggatgtcacagagaaaagggaacagagttgtttcaaccaggagatctagtgttggtcaaatctctcccctctacctccccatctatggattctttgtgggaaggaccatactcggtaatcctctctgcctcccactgcagttaaggtggcaggagtggaatcttggattcaccacacccgagttaaattttggacaccccctgaggaatctgtgggactgtcagctcaggagtcccaagatcagccagactagcctcgatacacctgtgaactattggtagacttgcatctcctatttcggaaggaaacatcccagattaaaaaggctcctaccactgaaa

SEQ ID NO: 142634 - DNA, 723 bp, Homo Sapiens
  misc_feature (477)..(477): n is a, c, g, or t
tttttttaaaaataaagcctctttattggtacctgtaagctcaggtacaaggtgttcccacaagcacacaggctggcaaggcctcctgggcaaggggcaggcccagagcctgcgtttcttggcacagacacagagagaaatggaataaattatagttctgacactcagggacaatgtagaaattatgatgcaaaattaaacattagcaaacaaagggtataaaaaccctcaggagccacccctcgccaactggcctcagggcatgggcaggtgggccacgctgaagtgcagtgcccagaaagccctgagataatagtctggggcatggttcgcgccccgaggtaggccctttgccctctctgggcttcctgtttcctccttccccctcctacatccctgggcctggaataaagtctgtggcctttgggaagggggaagatggaacagagggcaggaagtggaggggacaggttgggncagaagggagttttggtcacagctgttcagcccaggctctccccctgcctagatgatgtccttggccagcacctgcccgcagagcaatctaggagccaggcagcagacatagatcacagagctcaaatccacacctagtctgcaccaaagcccaggcagggcaaggtgtaggactacaaggcaaaaggggctcttgagggcctgtgcccaccccacacctggcattacccaccatccgaagcagtg

SEQ ID NO: 142635 - DNA, 881 bp, Homo Sapiens
  misc_feature (240)..(318): n is a, c, g, or t
  misc_feature (869)..(869): n is a, c, g, or t
tttaattcttaaaacagacaacaatttattcaataacaactaggaacaattttttggaaagcagtacatgaaggtcaactcttccacttcaactaactgcctttcactcttttccttctcaatctttctccaaacaagtcctaaaagatccacagtgggctccacagcttttttagggctggtactttttttaggctccagttgctgatctttcttctgcagcttttcagctgtaagtgnnnnnnnnnnnnnnnnnnnnnnnnnnnnnnnnnnnnnnnnnnnnnnnnnnnnnnnnnnnnnnnnnnnnnnnnnnnnnnngtcaacagcagcttgcagagaaggagaggataccaaaggctgaagaggagcatcagaggaggaaatatttgtaatagctatggcatttttatcgtagtatttcttcttttcatatttatctctgatgaaaaattccactgctctgaaaacagataacttaaggaaaagcatgaattcagtgatatgtacacttccctttattcacgccactccacaaagttgggactctaaatttaattttcctactcctcaatctgtgctctctttcacattatttctgcaactacattctgtaaactacttttctttctcttaaagaagtctacctctttcaggaaattttctcactgaacaaaactcatccaaactaattctagaaagaaaagtaaatgacaattcttaattcctacatcaccaccaccactatcaatgcatcaccacactttaaattcaattcaggttcatttggggtttttggtataagaaattaacatctatgcaagtacccacactgagccagacatcctatactatatatgctgtacatactntgggtcctttaa

SEQ ID NO: 142636 - DNA, 462 bp, Homo Sapiens
ctgtttcttttctgccttttaatagagcttagctcttttgccacttgttattgtcaagtacaacatgagttcagagaaagaacactgcacctgaccggggatggatgccacgctttgaagaaattggcaggaaacagaagaggtttataggatcttctcttctgccactcccatcttggaaacaagtggaagtacatttgcaaaattatattgaaaaaaatgagaaaatgcatttttctttatagtcaacccttctgacatggacctagtttcaaatgaagttatgaggaaatggcccttatgactaaatgttgattcatgtgctgtgagctgtgaacccaggatgagaaatgggaggaaatcaaactaaggaatggaaagggggaagtgctctgggtgccttgcctaagagactgaaccctcaaatcttggaaataaaccatattttgtaaaccaaaaaaa

SEQ ID NO: 142637 - DNA, 646 bp, Homo Sapiens
tttcaagagtataaaatttactaactcaatacatcagtaaaataacttatgtacaaatgaggcattttcaagtgtttataaatagtattttactaagttgtctgcctaagctttgacaaatggtttaatttaagccatgtatacattaataactgaaaacaaacttaacactaaaattaaataaggaacttcatcagagtgtcttcctccttttagacttgaatcgcgtatagaagcagtttaaagtgttactgttgccttggctatttgaattgaagatggcactccctttctcatctttgatgttgcttccaacatccttcactttctcacagctttctgtagcttgattgtgatctgtgtcctctttttggctgttgactagtctctcccttgaaagcattctttccctaagtcttctaaacggggatgtcattctttttctggttgtgttctcacaacttgtcctgtctctattctcctcagtggccttctcagtactgtctgttcttttggctgtgcttctggtaatctgaaggattttcttttgcagtaagccccacctattccggggcagctctggccactgatcttgctgctggatcagatatgatactgccaactttgtgaggggagctctgaggag

SEQ ID NO: 142638 - DNA, 1119 bp, Homo Sapiens
ttttttgtgctgtcacagtgatttaattgccttgcatggtattatctaagactgacataaatctttcaaattattcttccttaaatatagacattcatataaattctttctatgtttattgtgctatcaagtaattatatatttcatccaatttgatctgttaggattccacggctttgccttcaaagtcatttaggaactcaagactctgtggcttttcaaaggtggtttgaggaatctgatttggaaactctgctgcatctgacatagctagatttttttcttcatcagggaccagatctttatgtcctgattggtatggctgaaaatgtatcttgtctccaagtgcaacaagtttctcctgaattagatcacttgtcattcgggtcattatttgttcacttatttcaacatctttgagatctgtaagaaccacccaagttccattctcaaatttcacaggcatagaaaagacgatccctttcggaataccacaactggccttcactcaatattcctaagatacaatctccccaggtggtgagccatggtaccagtatttcagtgtagtggctatactgtcgcgcagccaaaatgcctccaaattgtcttcctgtggtggtcaagtttttcaagaattcgccacgaattctctgtgtgttacccactcactggtgatccagacctgcaaggggttgatgcaagttttcagggcttcttcctcctgctctttttctatatgtgcccccaggttctcttgagcaattaccatcatcagttcagtcgtcatgctagaggtgacatcatagtaaacgctgagcatgctccaggaactcattatatcctcccaacagcaaaccctttcctccacgatccaacagctctctccagatgataggggaattcttgtgactccacttattcttttcacacacatcttttacgccaatcctcccaaacctcaggacgttgtgtgattttatgtatccgaaaatcaggaagattcttttgtaaatagtctgccacaagttctgttttagcataatatggacaatctgctctacccgcgatgacgaatttggccatggtcgagagagactcagaggcagggaccgcccc

SEQ ID NO: 142639 - DNA, 1289 bp, Homo Sapiens
tgttccagagtggttccacatatgccccagctgtcgaggagtgccaattgcctggccggggattggggacacctttcgtctcaaacggtgctttgccttggagggggcccctgggtcccggtgctttcccgcccggtgaggccgtcagggacggggattcatcaccgggggccatccaacctctctctgtggggatttccagatgagcttgctccccagcgggccaggaagcagcggcaatgttcagtagcaggacaggacaggttggtgtatgggcccaattctgtagaaagtcacgagccccggatgaccaggacaagaactcgccagttggaatgcaccgccatggcctcctcccagcacggggcgtcggtgacagcaggggcaggcccaccagccccaggaggaaggtgagctggcctgcggtgagcgcggccgtggccaccaggttgcaggcgcgcatcatgtcgaactgcagtttgacggtgcctcgggacttctggaaagccggctgcctcggagccccagcccagcgcctcacagtcatgtgcgtccacctggccggctctggccccagggctcggccctccccgggtcctgtccaccagccagcaggacctccacagccccacgctgcgcctgcgcccatcctccagcgtctggcacacccagttggaggtgaaggccgccacgttgttgaggatgagtgagaccagggccaccagcacggccgcggccacgagtctctgcacggtcatcgctgacgccggtgccgccgcttatccggagaaagccaagtcccagtccgcggccgcacgtccagggagagccgacgctgctaggggtggctagaggacatcaccactcatcctcggggcggcgcgggcggaggcccatgggatggtccaggtgtgccgcctctcggcccggccttatcctccttcctgcacctggagcagggccaggcctgtgctgaagctgctcgcctcggggcccatcccagggagcagagggtgggcagcagcaagaacccagggccaggagtgcgccgtcttcccgggaagcggaggccggcctgtgccgcgcgtgcctcttctcgcctgcagcagtggaaaacagagtcactcgggaggccggcagcagtgggagtcgagcccgcgccacactccttagcaccggcctgctgtgagtgccaggctccgggcagggtggccggtgtggagcgggttcacagctcctctgtgctgcctgggcccctgtgtggatgcctccagggcagttggccggtc

SEQ ID NO: 142640 - DNA, 368 bp, Homo Sapiens
acactgatgattaaaacctcaaataattcaaagattctaacaagtagcaagtaaacttgagtttcaacccctttgtcagttcctgattgaattttacaattagctaataagaacaaagatcagaagagaaaatgcttgtgtaagatcatccatattagatacactgctcctgaaagaaatgtgtaaacctaaaatttgaaaagtagttctaggactcagctttcccaagaatttatgacaggtatcaggaatcttgcccaataaatccagggcaatattttgtgatctttccagaatgcacggaaagaggctccacaggtaggttaattacatatttctatgaaacattacttagttaacatgccccc

SEQ ID NO: 142641 - DNA, 608 bp, Homo Sapiens
ccgtccgtcaccagctttttcctcgtggcctggctgtttccaggatcgtctcaagccagacatgtgaaccactcagccactgaggctcttgcagaactcaggcaaagagcccctgggcaaggcacaaacgggtttcagctgctacgccacgcagtgaaacgggacctcttaccaccgcgcaccccaccttaccaagtgcacatctctcaccaggaggctcgaggaccctcatttaagatctgcgtgggctttttagggcctagatgggccaggggatgttccactgggaattagaaataccatctgccgtatgcagcaagggatctgcagactttttttctgccattctggtgagaaaaagcgtgacatttgctctgatccctggaataggtgttgcgtatcaaatacagatgaagaaggaaaagagaaaccagagatggatggcagatctgggatctaaaatataagctcccggaaggcagggatgttgaagtatcccaagggcttaaaggaatgtgtggcttatagtaggtgttcaataaatatttgttgaatgaatttagcccccaagggtaagagctgattaaaggcatttttttaacttcaaa

SEQ ID NO: 142642 - DNA, 484 bp, Homo Sapiens
ttttttaaattcattcaacaaatatttattgaacacctactataagccacacattcctttaagcccttgggatacttcaacatccctgccttccgggagcttatattttagatcccagatctgccatccatctctggtttctcttttccttcttcatctgtatttgatacgcaacacctattccagggatcagagcaaatgtcacgctttttctcaccagaatggcagaaaaaaagtctgcagatcccttgctgcatacggcagatggtatttttaaattcccggtggaacatccccttggtaaggtggggtgcgcggtggtaagaggtcccgtttcactgcgtggcgtagcagctgaaacccgtttgtgccttgcccaggggctctttccctgagttctccgagagcctcagtggctgaggtggttcacatgtctggcttgagacgatcctggaaacagcagggccacaaagaagaaggctgt

SEQ ID NO: 142643 - DNA, 542 bp, Homo Sapiens
tttttctggttaaatgttcattgaattttatttaatcattaatctcaacagcattaaacagtcaataacataaatgacagtcttctctttgtactcctccctgtacaacatcacagagctccatctgtatacacgaaagtcacatgaaaatagaactcagtgttttgtattacatagtctattcagtacatttagaagtattttgcctccaatattcaaccacagtaaaagactcagtgagaacgcgtggtggcgctgcaggttaagatgacggaaaatacaactgcctacgcagctccaggatccagcaaaccgtttcccaaagcctggaagcagaagaatagctgagccagagcgaacgtgagtgtgaaacctctttaagacaccgttgggctgcttggttctgacattctggactgcaaaaccgttctactaggatcctggggatacatgaagcttctgtgaaccaacttttcaagaaaaagcaatggagattggatggatgcacaatcggagacaaaggcaagtccttgttttctttg

SEQ ID NO: 142644 - DNA, 583 bp, Homo Sapiens
ttttaacaaaggggcatttattcagcacaatagaactttgatatctgcaatgcttaaaaaaatacatccccattcccgaggaaattaacttgccaggttcagtttaaagtgatgaacgttccttccttattttactcctgtaaaataaaaagaaaccaaggaaacatattttttctttaatattaaaaatatcttttatggactgaagttgatctattcttttagagaagacacagaggcatatagtataatctttaaaaaattaaattactttacaagttaaaatggaagtgttttagtctttaagatttttaaaaatgcgtctaaaactcgatcttccagcaagcttttgtttgtgtcagtaggtgggactaatatagacccagaaagatggggctctgctcagcttgggacagaaggacctcgagctattttccagttacattttatattttatatcaaagcaccttatgtctatttacacagcaaagtcaaaagctaaaaccatgagagaatactgtttctcatatattttgagctgactctgataagctattgtttagaatttaaatgtatgcacaga

SEQ ID NO: 142645 - DNA, 492 bp, Homo Sapiens
atgaaatgtccaaatttcaaattaactgtaaatagaaaaataaacaccaaaccccagcaagttgcctcctccactcctaatacaagcccttcaggaaccaacaaagtcagctggagaaaatccgtgcagagtagacaagagggaagctagtggtggaccttagattgatctgaaacaaccaccagagagagaacgtcggcgctaagtttgaaaatactgaaaagcacactggtagatcaggctacttactactgggaagggacttaaccatatgtgctgcatgcgaggagatggtcttgtcccactttttgtgagaggagatggtcttggaaggataagtaaggcatcctggtaaaaagggtcaaagggaccctcttttagaggcgagctctggaaatcttgcagtgagagggaaattgaagaacctgcaagaatctcttcccttgcaaaactgaaggtagcccagccccttctcccatcattccccttcca

SEQ ID NO: 142646 - DNA, 422 bp, Homo Sapiens
tttatattttctgcttctgataccccagttatcttttccatttctgcagcaccaatgccttcagactgtgaattttctttctttgatcctaatgatgcatcatgccaggaaattctttttgatcccaaaacttcagtttcagaattatttgccattttgagacagtgggttcctcaggtccaacaaaacattgacattattggaaatgagattcttaagagaggttgcaatgtgaatgatagagatggattgacagatatgactcttttacattatacctgcaaatctggagctcatggtattttctgatgtggtggtgctgaagctactggtggtgatggactcctttttcccctcacaactcatcatgaactgatactttcacaaaataaaataaaaatgaatttataatacaatataaa

SEQ ID NO: 142647 - DNA, 554 bp, Homo Sapiens
ttttagctttactttaatttttcttttattttcactgacagaaaaattttctggagagtacaatcaagatagtgtattattagaaataacattaatagaagcttggtcagaaatgataatagtcataataagcatctctctcaccaaggcattccacacagagagatcacagcacaataaataaaggatttctcatttgccacacaacaaataaaacaattgcagtaacaaaaatatgattttataaatgttcttatactaaaaataaaagcaaaaatatgagatcatgcactggagacaaaagctaaaaatgaatagttataacaaagaaagacaatattccaaaagattaaaatgttcaagtattgtgagaggaaaggggagattcaaaatagaatgggttcagaataagtcaattatatttactaccttaggagagacactgacacaactgtttttatccagtaatattttatgccattagaacacatactgttatccatttaaaggacagattccatttccttggagcatgtgtcatactacaaggatgg

SEQ ID NO: 142648 - DNA, 638 bp, Homo Sapiens
  misc_feature (13)..(13): n is a, c, g, or t
  misc_feature (151)..(152): n is a, c, g, or t
  misc_feature (386)..(402): n is a, c, g, or t
attttgcactttncttcactgaccattagttagaaagagttcagagataagtatgtgtatctttcaatttcagcaaacctaattttttaaaaaaagttttacataggaaatatgttggaaatgatactttacaaagatattcataattttnntttgtaatcagctactttgtatatttacatgagccttaatttatatttctcatataaccatttatgagagcttagtatacctgtgtcattatattgcatctacgaactagtgaccttattccttctgttacctcaaacaggtggctttccatctgtgatctccaaagccttaggttgcacagagtgactgccgagctgctttatgaagggagaaaggctccatagttggagtgnnnnnnnnnnnnnnnnnaaacatttttcccatcctccatcctcttgagggagaatagcttaccttttatcttgttttaatttgagaaagaagttgccaccactctaggttgaaaaccactcctttaacataataactgtggatatggtttgaatttcaagatagttacatgcctttttatttttcctaatagagctgtgggtcaaatattattagaatcagatttctaaatcccacccaatgacctgcttatt

SEQ ID NO: 142649 - DNA, 542 bp, Homo Sapiens
atagtacccagcaaatggtaagatatcagctgagatatactctagtacagccacaatatatagggatacatggtagtccactttgtaccgtaatacttccttcaacgaaggatggattttgtccacaggcagtaaaagaggatttcttcgttttcgtttttctatagcagattgtgcatcagcaatggcccatttatcaattgggtgaggaaaggtcttctgaactcgctcctctacatcttgaacagtccttggctgggccatgcataatttattaagcagctgaaaaatcagctcttcaatataatagagagactcttcattagctgagagagtgggatgcacttgttcctgaaccttccgcagggccgagaccaacagtccccgccatttcggactgttctcctcgctgaagaactcgtaaggctgcggcgcctgctgcatggccccggcgacagcgcctccgcatcgggggcagcccgcgggccgggccggtggcctgacaggcagggcgcgggccgcctcgcctcgccggcggccgc

SEQ ID NO: 142650 - DNA, 484 bp, Homo Sapiens
ttccataaaggcagtgtttttttaattttaaaattctgcatctgaaaacacagtttgacagaaagcatttatatacacctgcagtgtttttggtatgatacagtatttaatacatccactgttttctgcaaaaaatgttgctttgtcagacagaaacaaactcccctagacaaaaaaatacagctaaggcacaattttgttgttgttgttgttctgcaaaataaaaagacagaaaaggtgcaaaaaagggcacgtaatgcagtcatttctgagactcacattctacctcaaggaaaagcattcagatgattggaactttgattactggtcaatttcagatggttcaatatctcttaaaatactcctttaaataaatagcaaaatatctacatatttcagcgtgtgccatttgaattctttttttaaaactttatttacagattctttttttaaaatcaacacattacaaaatatttctgtacag

SEQ ID NO: 142651 - DNA, 398 bp, Homo Sapiens
ctaaaagcccaccaatgttttcttaaagaacagggcattcgctcttcatgagcaatagaaaacaggagccacaaagagccaagcagcaaagggcagagaatagatctagatagatgatgaagaataaccagtatacactctctgtcctcttaatctgttttgttgcagactgatgttttactctatgtctatgcatatgcacatatgcatgtacgtatacatgcgtgcaacttgatggcaaagatcccatcttgtatgttccttgtcatatcaccagctcctacggcagtaactgtcacatagtaaatattcagcaaatattcttttgagagaacgaatgaagatgcaatactattaaatacattcacaatttctcaccttgttcttttcactcaaaa

SEQ ID NO: 142652 - DNA, 424 bp, Homo Sapiens
ttttgtttttatatacttttaatttatttcttatataaaacatggcacagagtgaggagagggtcatgttctccacttttacccagaactcagccatacttgtttcttgaggactggaaggtttggacgtatggagcatcaatcagccaatgtgaacgaatagtggttttcttctggggtggcttcacaggagctgatgtggacaaggggtggggtcaaagcagggtggaccaaaatggctcagggcctgcagtgccaaacttgactggttatcttgaggagggctgttatctggctctcagacctggagtttaatctctggtccaggttgcttatttttgagatgtttctctccagctttaaaggtccatgattctatgatactacttcttctcagtcatgcagcatcagaagtgggctagtt

SEQ ID NO: 142653 - DNA, 572 bp, Homo Sapiens
  misc_feature (86)..(94): n is a, c, g, or t
  misc_feature (486)..(486): n is a, c, g, or t
  misc_feature (533)..(533): n is a, c, g, or t
  misc_feature (541)..(541): n is a, c, g, or t
tctattaactcttttctatttacttcctttggtctcattttcattaagcctttttggtccttgaattgctctagaagtcatttacnnnnnnnnnccataggagagtgagtttaattcagtttctaatagtagtaggttatcttgctggtaagttatgggcatttgtttattaacagctgttttaattaatctttgtgctagtcccctcacacaaggggtaatacaacatcccactgctgttaagactcctgccacaattatgagagatgtaaggattaaagctaccatgcctttccattttttccattttccattttcacattcttattaatagttgaccatcagaagagtcctaaaacccagcagctatttggttttaggcctaaattcattaggcacacctctagggactccaattgagttaacatatgtattgggattaaaagaatttgtcaaatctctctggtgtcagtggccatgtgtatntttgggtatcttatggaatgccagggtgaagggaatggccaattggnctaaagcncaagtcctagtcccattgaatggtagcaggt

SEQ ID NO: 142654 - DNA, 311 bp, Homo Sapiens
acccgggatggggcaccactttaatgaattcttttaattaaactgcaacacgggggttttgcacaggatggtctatatttcatccttaaactgtgttaatcttcatctttgtctgggcggctcaaacatccaaccggaaaaggtctgagtttaattcatctaagtatatacattccacaacccccactccttgaccgtcataggaaaatttgaaagacgtttctcttctgctttaaggttaagaaattagatgcctctgtgaaaagttatgattctgctggggatatcaaagtttttactttttaagcttt

SEQ ID NO: 142655 - DNA, 505 bp, Homo Sapiens
taaattaaatcaacaacaggatacgtgtcattttttcacctatcagattggtaaggattttgaaattcctaatatccagtttgggcaaggctgtgtaaaatggacagtctcttgttttgctggtggaagtatacagctttcctgacaagcaaattggcagtgtgtatcaagttcctgaaaaatattcataccctttattccaataattctgcttctaggaaattttagtaaggaaataaacagagatgtgaacaagtctttatatgcaaatatgttcattacagcattatttatagtagcatcagttggaaacaatgtaaatgtccaacagtaagtagatggttacagtgttataggatcagagtcatgcagccattcataaatattgtgtttttaaagaatattgtcatgaaaaatatgcaaatacaaagtattaaaaaggaggatagcaagcaaaatataatatcctgattttattatattaaatgaatacattgcagtagag

SEQ ID NO: 142656 - DNA, 441 bp, Homo Sapiens
gggggatattttatgaataattttaaccttacatgttaaactggtcatatgcagttgaaaaatgtcaaaaccaaagcttgtacttgttttcttttgaacatgcagtttagcaataatggttaagagcatggactctcagaagtcaaactgccggagtttgaatactggttcctcctctccctttccgcctggttttcagaatgttgcttaaacattctacctttgtttccttgtctgtaaagtggagataataatagtacttatttcatagggttgttgtcagggttgaatgagctaatatatgtaaattcttagaatacatggtaaactttaagtaggacttattatcatttatgactaggttgtagatttaattttttctccccccatccatcctgtggtcaaagactaaattatttaacagtcatttacatcccccat

SEQ ID NO: 142657 - DNA, 500 bp, Homo Sapiens
ataggtcaagtaaagattttcaagagtcatacagctgcttttctctctgccccaaaaggggagatttgggttggccagcagcttctgacccttgttgttagtgtgtgggccttcctttgttctgttgccttcctcacctcccaaaggtacttttagcaccctatttttttctcctctttgaattataaacattgttctgtagtattgaatttttgaaaatttctagattctagaactctgtccattgtggatggagcttgtatatatgttagtgtgtaccttagtctagaaccttcaagtgggttgagtgccaatgtgagtaccatgtgattgttttctaaattggctatacttgccattttaaatactttgaaatggaatttggcattaagggctacaagtcgaaggcctctgctgattaaactatgtagttgatgacatattctaccatctagctgcttaaatatgagagagtggttttgtatgttttactaagtaaa

SEQ ID NO: 142658 - DNA, 228 bp, Homo Sapiens
  misc_feature (103)..(111): n is a, c, g, or t
agtttttatattttattttcacattgaaaatcagtaagatttgcttcagcctccaagagtgtgtttacgtaaaattaaatgagcgctggcagtgagctgcacnnnnnnnnnctaaatgggaaaagggttaaactctgcttcttacaataaagctttgtaattttctccaaaaaggtcttgcatatttttattagatttatttctagaaactttatatttttagttatg

SEQ ID NO: 142659 - DNA, 385 bp, Homo Sapiens
ctcttttgccaaaaaaaaccaacgacaaaagactaacttagtggaccaacctttgtttcttcattatctctaccgtggttctgtccttttatttcgtctttcttctaattctgcttctgcttcttatttcctccctggatttgaactttacttacctaaactaccagttaggttaccttctcagaacctctaaggcagcagtttgaggttgacgatggaagatttaggattagaaaaaagaaacatgaatgaatttctgatgttttattataggggtttgtaatgcaggtagaaagacctttttcagagttaagagtttgatccgacaaatgagctattttgatatttataacgttgtctaataaaagtttcctataaaaacaaa

SEQ ID NO: 142660 - DNA, 522 bp, Homo Sapiens
agctatatatatagcttgtgaaggtttgatctagaacacccagtaacaaatgaacaatgttgcttacctgcttctttgacatctttaaaaaagaaatccaaggaggattgtaaggattgtcttaccacccttagctgaactgtgatgcacaagatttttctatgtgtttggtggaaatgtacctggtttgtacattcacgctaaacagatgataagctcaagtctgatggtttaatagaatgtaagttcatcgtttaaagcttttcctttttaggttggagaaggcaaaacacaggcttgcaagttggaagtatatgaagtcttgacagagtgtgtctggtaaattgaaaagtgtttcaaactatggcagttttgcaatcaggtgaaaatcacctcatgatattcagctgataaggtttataaaattgcccctttctagctgctctgttaggaattctggtttttgatacttttttcctgtctgcaaaccagaatttgattttttggtcttgcatttcaaaa

SEQ ID NO: 142661 - DNA, 593 bp, Homo Sapiens
aaacttgaagttaattccatttaatttacagcttattttataatagtattttattaaggaattaatttacatatagtaaaatcacaaatctaaacatacagcatgaggaatgttgacaaatatatgcagctacataaccatcatccagatcaaaatacaaaacatttcaatcaccccagaaaatttcctcaggccccttttccattcaatttgaattccctgccctcactctaagcagccactgttctggtatctatcatcaaatattagttttgcctggaagtggctttaatataaaagtaattagatagtatgttatgtttggtttgttttgctcaacttaatgtttttgagattcatacaggttgttgcatgtatcagcagtccttttttaaatgaacagtattccactgactatattgtagtttgtctatccattttcctatggatggaaatttcactgtttacaattttgtgctattatgaataaagctgctatgagcagtcatttttctggggtatatatctaggaatgaaatggttgaatcacaaggtagtgcaagacagtcctctaggtggccttggacaacctc

SEQ ID NO: 142662 - DNA, 497 bp, Homo Sapiens
  misc_feature (422)..(422): n is a, c, g, or t
tttttaaaaaaactaaaagtgcaacaaagtcagttttctttcctttgcttagaacaattttcattgtcctactacctggagaaaagagtttgtcaaaaaagctaagaacgccaacacacagggacagtagactgcagattgctcacagcttgtgtcctacagtgtaacttcacaggagggagggaagaaggaacctgaaccccaaggccagctgggatgaatgctgcacaggcacagaggaagaggaaaccatactgccaggcacacctgggatacggagaaggttcttctccagcccaggtctgccattttcctcctaccttcttggccttacccccagcctcttgatctccttctgcagacaaagcctttagctcactaggttttatgctggagagggttgagggtggggtaaaaaccangagtaaactaaggggaagaaggagaatagcagtccttgagtttttgtgaatgacaccttcactgtaaacaatggg

SEQ ID NO: 142663 - DNA, 483 bp, Homo Sapiens
tttctgatttttaaatgctttattacattaactttagtatcattagcagatgaatataatcagattaacaaactggtttggccacaaggaaaagaaaaaacatttctgaagcttcacaaaactatgtgtgtagtgtgcaaactagaaccagttatactttcatcacttcacagaacacaagtagtgtggtgcatcaagagatgttccactgctgcaccatcacctccaaactgtagaggagagatgaaggcaaactttggaggaatttccaaggcaactgcagtcaaacattatctgtaaaactgcaggtataaatggcattatacaaaagctcaaacatccttcaaaacttggactattgaagtctacaattaaatttcaatttttttaacttacaaggaaatcatactcatttaagatacagttacctctactttaatccccagctcagtcagatatttgtagtcttatcagaaatatttg

SEQ ID NO: 142664 - DNA, 492 bp, Homo Sapiens
tttttcatgtgcagaaggattcacatttattggttcaaatacagtacctaacacttgctaaacatgcatttcacactaattggtcacatttccacaggtagtcaattcacagaacagggcccatcccttgccagctggcagggtgggaggtagcagagggcctgggtagcctgcagagcccgccagctatcatttggtcatggagggttgatggagtcaggctggcgggcagcccttggccggccctttggagacaagggctcagggacatcccgtttcctcgattcctacacacaggactgtgggtggaggtggacctagggcaggtaacctgggggtaggctcgtggatgtgtgtgccactagagcccttaaaggtggtgtctgtgggagtggtgctccctatgccctggagcacaggaaggaaatggaggcctcttcaggggggtgactagtccctggctgggtaggtgggaaggaatccccagacaca

SEQ ID NO: 142665 - DNA, 625 bp, Homo Sapiens
  misc_feature (78)..(78): n is a, c, g, or t
attcatgtcggcatgtagcatttcaattacctgtgtggtctttgagccaggtgctgcacacatatctaagatcatatngatgaggccgcacgttgaggagcagtggtgggatcatgctaacagcttcttgacgactaatatttccagattctgtttcactaactagaaactgatgaaacttttccaagtgtggcgattttctcaagatttttcgacttaaatttgtgtgccaggcaagttcttcaggataccaactcagtggctgtggaacttcaactttctgaccgtccacctccaggtcctccaattccttaaaatatttgttctttaagcaatggagaatctcttttgcgtggcttttgtaaccagtaattcttaaagtggccgggagcggctccctgagagcgtccatgaactggccccactcgccctcgggcacgatcttgagctcctggtagtagtgctcgaacagcttgttctccttgacgatctcggggtagcctccttcccagcccgcctcgccgcgctttccaccaccctcggcgccatcctccgcgtcctccggccgctgctgttgctggagccgccgaccccgcgaccgccgccccatagcccacgcggccgc

SEQ ID NO: 142666 - DNA, 515 bp, Homo Sapiens
  misc_feature (363)..(364): n is a, c, g, or t
tttgtgggaggtccatcaattcgagggcttaatttattgggtccttcaaaaatcatcttcgttgggccatctcttgctactgatggcctactaggtccatcaaataacggtctgtcttcagctaaagctgtaagtcgctgatttgtatccaggccggcgaatcttgatgctggactatctacaaatggtttatctaaatcttcatatcgaggtcgcttaagtggaaaacgatcattgaatggagatctctgctcttctcgcacaccttcttgatactgaaatagctgtcgaatttgatgcacaacaacaaggaagtcatccctgtgtaatttcaccagatgctaaaacgttcactcgtctttnntggaagtaattctcttttgcttgcaaagagttaactctttagggaatctgaaagattgggcatctacacttaatcgatggctgttgctgccctcgtgcccgaatttcttgggccttcgagggcccaaatccctaatggagggaagggcgga

SEQ ID NO: 142667 - DNA, 459 bp, Homo Sapiens
aattctatttggaagggctatggttatgcatatatgtaatggaaatactaaaatccagcaatgcaaactataagacgaaaactattaaatcataatgagacttggtttttgattgtgtggaatataaatcactgttaattagaaacatctttcaagaaataaaatgtttaattacaaagttactataatatttcattgacatcaaaagatgtttctatcaactgcagttggattttaacttcttaaaaatcaaaaaactgatgtcacagaaaccagagtgcttattgtaagtgcaacacacttccaacctcacccacttcctcccacaaaacagttgttttatacggtaatgtgaaaaaattatactgctttatacagtataatgtgaaaaaatgtgattttttcaatattacccaattaaaagactgtctgaggcaataaaaaccattttatgtaaaa

SEQ ID NO: 142668 - DNA, 477 bp, Homo Sapiens
ataaactcagttatatggcaatgtattaaattgctatcaatgcatttttactgttaattttccttccaagtatagagtgtttcagcagcatcaagagttaattttacaatttgtatctgacctaggaatctaaccacaatatgtaaccacaatatctaatgttctgtattgggaatgcaggatcagttctaagtagacgtttggtatactgtgcattagttagcttgagtctctcccatgccaaattaagagcgtgatttttgttttctaacattattccatagtatgtgaggaactgccctctccagcaagtacatcatcacctgtctcccagagttgtcctcttcgtgaatatattaacttcaaaattcagccactgagatatcaccttccaggtaatttaattctggcttccgtggagttgttggtgtaaactgtgttcaaacctccttctcttcaaaccagctctgtcttgat

SEQ ID NO: 142669 - DNA, 517 bp, Homo Sapiens
tttatatgtagataaaatttttgttaatttttattttaggtttgggggcgcatgtgaaggctcattacacaggtaaacatgtgtcatggggttttgttatacatattatttcatcacccaggtattaagcccatacccaatagttaacttttctgctcctctccctcctcacaccctccccccctcaaatagaccccagtgtctgctgtttccttctttgtgttcataagttctttcgtttagctcccatttatcagtgagaagatgctggacttggttttctgttcttaagttagtttgctaagggtaatggcctccagttccatccatgttcctgcaaaagacatgatcttgttcttttttatggctgtgtagtagcccatggtgtatatgtaccacatcttctttatctaatctggaaggtgatatctcagtggctgaattttgaagttaatatattcacgaagaggacaactctgggagacaggtgatgatgtacttgctggagaggcagttc

SEQ ID NO: 142670 - DNA, 494 bp, Homo Sapiens
gcggccgctgctgggttccatcgggtctgtggggccgcccagccgggaggggtcccgggaggggtcggctctcctggtgctgatgatggcagagcctacagggactccccgctgagcaggtccccaggcagcagggtggttagcggcgtggggctgcctatcaccctgctgtcgtcggcgctgggcgggccccacaggctgctggagtactggggcaccccgccccacagcagctcactgctccccttgccacccaggcacggggcgttccagtggccagcgtcgctgcgtaccaggccatgggagctgcccgctgcgctgagccgcggctggctggacgcgctgctggactgccagctggaagtgggtggcagcgcctggccttgggctaagaagcgattcacttcttcttcaccagcgaactcggtcaggatggtagttgtttcccaggacgcacatgtgcagagacttctgggccttggcagcctcctctt

SEQ ID NO: 142671 - DNA, 486 bp, Homo Sapiens
caactgatccgtaatttcttggttctgttgtttcaatttctctatcgtgatattgagttgtttgtttgttacatagctggagtccagggctaccgctagctgttggtaccggctctccagatccttcaggttagcagacgatgcagggccctccccattgacacatgtcgcagactcacaaacaagaccattgagctgttgggagagttgtcgcaggctctcggttgatgagaaagtcttggtttcatccatgagattagggacattgtcagcatcatgattctgagatgccgccatgctagtgagactggcaccaggggaagggacaccgccaggtaacacggtgtcatcagatggttgtagagtagcagcattgtccttgggtgtcttccacttgtccaatggggggagcgctaccccattggaacggttaaggtcggacaccagcaccttcagaatgtcctgaatatcctcaggtgagtggca

SEQ ID NO: 142672 - DNA, 605 bp, Homo Sapiens
  misc_feature (335)..(335): n is a, c, g, or t
  misc_feature (378)..(378): n is a, c, g, or t
  misc_feature (489)..(489): n is a, c, g, or t
tttttaaataaaaacagttttgaatttttaatagtctatgaaaaaatagtgtggtaggaataaaacgattacggaaatgaaagtctgttaatgtagacaactttttgtggcacagttcaggtatatgtactgcgtcaatgtggtgaagaacctttgtatgttacagatatataacaataccagagaaaaacatacagatgataattaagtgtggacaacaagggaaaaaaattgagaagataatggtttgagtaaattatttaaaaaattaaaaggtcttagctaaattgggcttgttcttagagaagaatctgttcaaaactaagaattcactncaagtatttacattttaataaaaaagatacattggcaccatangaaaaccgagctggtggattttaaaaataacttacactgatgactgaagaggaagttgacaagtgtaaaccttcaagatcagccatcaaacttggagaaagagctggtgtnggaagtgcaactggagtggatactgggttaaaatcattcagatctagaagtgaaacatctttggtaagaagagttctatcttgctttgtttcttttcttctcctagtgactctctg

SEQ ID NO: 142673 - DNA, 845 bp, Homo Sapiens
cccctatgtggatattttctatctttcgatcagtagtgttattcagtgttatttgtatagagaccatcttatcaccaaaaatgcaaggctgtcttggaaaagaaataatgggcagctagtccttttccactcattcgatgaagcagcacgtgagttttcgttggtacaaatgcaggagtactgacactgatgactgaagaggaagttgacaagtgtaaaccttcaagatcagccatcaaacttggagaaagagctggtgtgggaagtgcaactggagtggatactgggttaaaatcatccagatctagaagtgaaacatctttggtaagaggagttctatcttgctttgttttcttttctttctccttagtgactcttctggattcagattcactttcaggttctgactctgattcagaatcggaagaactgtcttctattgaactagattcgtcatttgaagaatctgaagttttagatttttcattttccttctccccatcttcagaatcactttttcctttggcttttgagttcctcttggctgttcttttgttttctaggcctgactcccgtccactctcactgtcctgctcactggaggagtcctcactgctgtcctcattgctgtctccttcctcttcactttcgccttgttctccactttcacttccagattcactctcactgtcactgctactatcagaagagtcctcctcttcctcagattcagaataaaacttcttagcggaatgctcttgcttggcttttccggctggggtccatccttttgcaaactcaataccttctacatttcgaaacgatgggtcgggggcaactttggg

SEQ ID NO: 142674 - DNA, 904 bp, Homo Sapiens
  misc_feature (92)..(92): n is a, c, g, or t
  misc_feature (145)..(145): n is a, c, g, or t
  misc_feature (168)..(168): n is a, c, g, or t
  misc_feature (218)..(218): n is a, c, g, or t
  misc_feature (244)..(244): n is a, c, g, or t
  misc_feature (325)..(325): n is a, c, g, or t
ccaagcccgggtggaaacggcccgtcacctcctttatccacgggcctttcattggaaagtcgctccaggcttcaacaggggcgtgctaagancagaggatgtgccaacaccaaacttcttgttcagaaggtaaaggcagagctgnaagaaccaagaggtttcacatcnagcctccaggagtcctatcacagctaaaaggagaggtctctgactgactngcagctgttgctggagtcccttcagnagagaaagtgtaggcaagcattgatggaagaacaggtgaatggtcgcctgcagggacagctgaatgagatttcaacctcanacacaatctggcctgcagcgaagagagaatggcctatctattctatgagatagccaagtaaatatgggagatctcggagatcttcatagatccgaatatccaagctggagttgctacagctagtcaccccacctggaggcagcggagcacctccatagccgtcccccgcagatgttgttcaagttcctgagtccgcgcctctcactgtgcaaccgtcctcttggtctttgtctccactttgtgtgcctgccccttgtcactgatcagctcacgcctgtgcacctgcaccatgctgatgctgatcgggcttggggtcctggcctggcagaggtggcgcgccatccctgccacagattggcaggaatgtgtcccctccaggtgtagactgtactccaaggactctgggcctccagcagatggaccttaaggggccaggagggccacctgccttagcttgctagctccctccctcctcctgggtgctgagggcatccagcaagcccctccacagctcttgcttgccgattatgtaaccaccagcctggtgaaatggatatagacgcccacctgcctcacaaa

SEQ ID NO: 142675 - DNA, 751 bp, Homo Sapiens
  misc_feature (73)..(113): n is a, c, g, or t
  misc_feature (126)..(252): n is a, c, g, or t
  misc_feature (254)..(255): n is a, c, g, or t
ggcccgcgttttttcttgggaaaaaaaacattgggcccattttccctttccccctgggggggcccgggccccnnnnnnnnnnnnnnnnnnnnnnnnnnnnnnnnnnnnnnnnncggacaaaatttnnnnnnnnnnnnnnnnnnnnnnnnnnnnnnnnnnnnnnnnnnnnnnnnnnnnnnnnnnnnnnnnnnnnnnnnnnnnnnnnnnnnnnnnnnnnnnnnnnnnnnnnnnnnnnnnnnnnnnnnnnnnnnntnntaaaacaaagttcactttattacattaattttacacactaaaataatatgaaatgcagacttgtttaaattctcttgctgattctcttgaagacaatgtcacccaatgtcatggtattggtgattatgtcgccgttgagttcggtcacagacttgatgtttttgaaagttgtcaccagtttattgtcaccttccaactgaaccactgtcttgactttctcccctgtcattgtctccagctcacattcctcccccaccgtgaattcgttttggatcactttggacccagcggtgatggtgaacttgaagtgcttcccattctgcacgatttccgacacccccttgatatccttccccttctggatgagctcttccggcagaccgattgccttcatgaaggcttcaaagttttcctggctctgcagttggtacttgccggagaaactcatggtggccatagagctccctcttcacgactgacctgcggctctgccccc

SEQ ID NO: 142676 - DNA, 847 bp, Homo Sapiens
gcggccgcactggccgcactcgtagggcttctcgcccgtgtggatgcggtggtgctggatgaagcccgaccagccgcggaagcgcttgccgcactcgtggcaggcgtagggcttctcgcccgtgtggatgcgctggtgcttcaggagcagcgagttatacttgaaactcttgccgcaggcctcgcacctgtgcggcttggccccccgcgcgctgccctgccggctccgaccgaagttgactcccagctcggcagcccgctcgggcgcaccctcgggcccggccgctgcttgctgcacgagcgtcacgcgccaggcgccccgcggctgggcgcaagggacggccccaggcggctggcccgccggccgctccgcgctggattcaggcccgaagccggcgctgcaccgggccctgcggggaaggctcctcaggaggctgcgcagcgccccgcccgccccctcgtcaggggcctgagagccaggagagcgtggagcctgctccggcttgggctcggagtcgggccagaaggtgtctctgccgatctccacttcctctacgtcttggagatccaggtcggacggctgggagagcaccttagggctggagccaggggagccatgttgatgcccatggaggtgaagctgaggctcgtggtgctgggttccaggtgtccccggtgatgagagactgacaggggacgggacagaaggggactcctgaatgtcccctagggctgccatcttccctgagacctgctgaaggtgtcacacctgggaccttccgagcgggagcctcgtgccgaattcgccacccagggcctcgctaccttaggaccgttatagttactgg

SEQ ID NO: 142677 - DNA, 750 bp, Homo Sapiens
tttactatgagataagggcttttattattctcattttatatgtgaagacactgaggctcaaagagatgaagtaatttgccgaaggtcacgcagttaattccacagtcaggattttatctaggattccgtacttccaaactttgtgcttataaacactgttccatcagtgtcctctgttccactgtgtatgttccataccgtttcactgtattctctattggcaggacagtcttttactcattatccatgtaaaattccacagggatcagcagagggtgtggttgtcaggcttccctaaagtttcttcactgcactccacttctaagcctcaatcataaccatttttttccagttgtagaacatatctgtactaggccatgtcatgccttatttcatctgttgccagacacgccagttgtttcaattgcttgcggtgacaaacatgagaccaaatctccttgccgaggtgcaggtaggatggtgccaagatgggaacagatgaggtgtggggcatcttcatttttagattcaagagatacttccagacttccctcatgatcatattaagagagactgtaaatattgagaagggtgggggtggaacatagaatggggagtgagctggtaggatggccagaaaggggatgggtggagggatgtatggcagatgcacctgacggcaataacttgcttaagcctaccctgaaaatgaccccatatggcacctgaatatgtgtctggagttccgag

SEQ ID NO: 142678 - DNA, 752 bp, Homo Sapiens
  misc_feature (276)..(341): n is a, c, g, or t
tttgcgaaccaacgatagtaattttattgactgaggtaatttgaagccaaataatggttatgaggaggatggaagcttttggaaaatgtgaacttgaggcactcttctgatgctaaaaatctctaaggaaaatagtacatcaccagtgtcaccagtgtggttctaaggcagctggtggcccagaatgtgaggacgtgaaatacaaaactttctcatttccaccatcatattatttgctggattcaggaaaatctgaaggaaggtctttttatgcannnnnnnnnnnnnnnnnnnnnnnnnnnnnnnnnnnnnnnnnnnnnnnnnnnnnnnnnnnnnnnnnntcagcccaggaagtagacatttgattaaaccaaaaagtcagtccaaagcccaatttataccaagggaacatgcagatttcacaaacactgactcagaaaccagattttctccactgcttttttttccccaaagggggttgaagatatgtattcaactgaaagaaatctgggctggcctgactgatccagaacaaacattgcctgctgatttccaaagagaaccccaaacctctccatgctgagaatggtggaggaaacgttggatttgttggttttaatggagatgaccgacagccaggagagagtcccaagcttctgctgttctcaggtggggtagagggtcggcatcttccctatatctagggctggacttcctcggctccaaactctgccctgctgctgacagggcca

SEQ ID NO: 142679 - DNA, 378 bp, Homo Sapiens
tttaaagaaatcgaagtttttttatacttttggctgagataaaaaattcacatttttccagttggcatgtgttacttttatcattaacaactcattacaagtctttaaaagactgttttctttttcttctactgtgttttgtagcttcttctcagagccaggacaatgaggacaggctgagggatgtcagaccatagccttgtctcccgcgggccaggcagagcatcccaggacacccaccttcacagtgagcactgtccttcatgaacaattcaccgattaacaacctcgggccccaggaagttacactgtgcccaagttcttccggaggccacaacaataaatccaagccaccgctaatgttatttataagcttta

SEQ ID NO: 142680 - DNA, 454 bp, Homo Sapiens
  misc_feature (12)..(12): n is a, c, g, or t
  misc_feature (99)..(132): n is a, c, g, or t
gtcatgagtctntcagtcgtaatcagtgagagaggggctgaagtagactaatgacgccaaaccaggacttttctacctatctttggagaatccatgttnnnnnnnnnnnnnnnnnnnnnnnnnnnnnnnnnnctactttggtaggtagtcttttctcacctgcctttcagccttgaggctggtttagtttcacaactatatagttgtgctgctcctaaatcttgtcacaggttttacctcgtgttacagttcttttagcacttatcttcagttccttagtagattataaactcaatgagattgaaactatggatgttatatgtctctcccctaacattgtattacatacttagtagctattacctaactgaattgattaattacctaactgaattgaggttcagtaaagccatttttaaattaaatattttaattcaccctgattaaatgtaaa

SEQ ID NO: 142681 - DNA, 900 bp, Homo Sapiens
  misc_feature (82)..(82): n is a, c, g, or t
  misc_feature (135)..(135): n is a, c, g, or t
gggaggccgcgggggcgggtcacaagaaaggggcgaaaaaaagtcgtgttttacgtaacaagaccctcttttctcttccaantgggcgcgcgcgaagcgggcgcgcccccacccgacttctttggatggtccggncgccggtctttatttcgcgtgttcgactgaataccgcaggcggaggtgttttgcggcgcgccttcgtcgtgctcgagacccgggccgggtgttcaggacggacgggcgattctttggggctttggtgggctattggggtttgtcttttttcgcactgctattaatattttattggtatactgaagaaagagttatgaccacattatttcaatgtcatggctttctgaaggaagttatcttcttatttattttctgccactgaattctagattaccagagtggttgctcctggggatgtcttgctggtctgtccctccggaagaatgatgatgcttcctgcaggctgacagaaggaaatcggggtagagagagttgacggtgtcctcgttggggtggtcgttgctgattttgaaaaggaggtgggggaggatggcggtgatggcctcctggttttggtggtctctgctgaggaccatcatcttggttaccactatcaccagggggtctaggtaggagtccttcaggaggaggtctctggggtccctgatctggtctctgacttgagtcctctacatctggtatggtgaaagtaaagtcttcatagttcacatcattatctgtgctctgagctgagctcagagccagaaggaccactgagagcaggaccagcagcatcttgaaggaggctctggagttgctcccaactctgcgttcccccggccgtaatggccgaattcccgggcatatgtccggtaccgtcgactg

SEQ ID NO: 142682 - DNA, 729 bp, Homo Sapiens
ggcatcaaggagtacgagtgcaaggagtgccacggcaggttcgcgcagaaggtcaacatgctcaagcactgcaagcggcacacggggattaagattttcatgtgtgaattgtgtgggaagacattcagcgagaggaacaccatggagacccacaagctcatccacacagtgggcaagcagtggacgtgctccgtgtgcgacaagaagtacgtgaccgagtacatgctgcagaagcacgttcagctcacacacgacaaggtggaggcgcagagctgccagctgtgcgggaccaaggtgtccaccagggcctccatgagccgacacatgcggcgcaagcaccccgaggtgctcgcggtgaggatcgatgacctggaccacctcccggagaccaccaccatcgacgcctcctccattggcatcgtccagcctgagctgactctggagcaggaggatttggccgaagggaagcacgggaaagctgccaagcgaagtcacaagagaaagcagaagccagaagaggaggcgggtgctccggtgcccgaggacgccaccttcagcgaatactcagagaaagagacggagttcacaggcagtgtaggcgacgagaccaattccgcagtacagagcattcagcaggtagtggtgaccctgggtgacccaaatgtgaccacaccatcgagctcagtcggcttgaccaacatcaccgtgacccccatcaccactcggtcc

SEQ ID NO: 142683 - DNA, 419 bp, Homo Sapiens
cgagttatatataaagtatttatttttaatgcacatatttacctacaaaatttacagaaaataaaacaaagcagaatatatagaataccctcttaagacttcttaggagctgagggttttattgctgcagttcaaagaatcaaattttatacaagtgaaagctaagatgaacacatttaagttaaatggcagccttgttaaaaagcttttttatcctgttattgaattttcagctttatgttaaatgaaatttaaaagattgctcatgaaataatttaaaccttttcaaaatctaataaacaggtaaaaggcacctccagtactttaaaatatttacagcaatcccaatagtttaattttaagggctattatagtacatgcggctattatgcatacacagtatgtcattaacactctct

SEQ ID NO: 142684 - DNA, 845 bp, Homo Sapiens
  misc_feature (732)..(740): n is a, c, g, or t
tttaaagaagaactacttttattattataactgtaatgaaactatgtccttattctgttgtattctgataaggatttccttttgagatcataagctcagggactcatctatgaggaggggtggtgtcttccatgaagggctggatatttttgatgatgatcattcagggaaggcatgtaccctcagttaggaaactgaaattagaccagagaactacctccctccctctcactgtcctgcatctacagctcaaggaatccagatacccttacaggccctcctgaatagcaaggtggaaacaaggaaggggccacaagctgaagatgataagctgtacggtgtaaaccagatcgcatgtcatacaggcagcagattacagcagtgaagggtagaaaccctgaagtcagaacatctcccgttgtgcatttgaagcattagaaaagcaaactctcctagtggaaggtgaatttcaggacagaaggtggggtttggcgtctgagtgcttctgcccaggtggaatggggcttatttcagtagatttccttgcaagtcctttaaacttctcgaagctttcagttacatctattgcgcctcgtgaaaactctaaaataggaagtttggacattgttacttctatttttatgagttaataagttttaaagagattacatgactcgcccaggatcatgagattagtaaatggcaatgcccaaggaaaatccagtttttttnnnnnnnnnttattcccagtccagatttcaattatctccatattaggaaagtaaacagggcatgaaggatttttaaactatcattttgcattattcccaccacttaccctttcc

SEQ ID NO: 142685 - DNA, 483 bp, Homo Sapiens
ttccctggaatgctgcttagttcaagatatttccatttcctctgaagaagctagggtgtacaggtgaggaaatatgacaggattattttcttttttaaaaatctcttgtaaaaagacataagggtctgctaaagaaagttgacagactcttgttttctggaggttaaccttgtctctggtccaaattagagtcaggcatttaggatgaggtctgatgatggttcatagaattttgtccacaatctgttatgaaccctggactggtgagccttgttatctgtggccaacctagggaattttaatcttatggaattgaaaaaacaaggaacaatgtttgtgagggatttattaatttcttcccagatttttctttttctcccctgttgtctctcatagtttttccagccctcctagtcacaatccccagaggcagctacttcaattcttctggctacctagttttactttactctgttgtttaaa

SEQ ID NO: 142686 - DNA, 401 bp, Homo Sapiens
ttttttatgactacataatgtttattgcgatctattttaaggcttttcatggatcttttcagctatgcacatggttagtcataatgattgtcattttaggtcagagtttctcagccttagcattgttgacattttggttaattctttgttgtaggggctgtcctgtacactgtagggtgtttagcagcatccctgatctctacctactaaatgccaggagcaacacagtacctccagctcagttgtgacaactactgaatgtctccagacaactactgaatgtctccagacattgcagagaaattgagtctggttgagaagtcactgttttagggcataatttttgggtagactgttagattctttgtgttcgttgtctctggcctgtataactcttctta

SEQ ID NO: 142687 - DNA, 1736 bp, Homo Sapiens
  misc_feature (154)..(156): n is a, c, g, or t
  misc_feature (158)..(158): n is a, c, g, or t
  misc_feature (160)..(160): n is a, c, g, or t
  misc_feature (162)..(168): n is a, c, g, or t
  misc_feature (170)..(171): n is a, c, g, or t
  misc_feature (173)..(174): n is a, c, g, or t
  misc_feature (176)..(178): n is a, c, g, or t
  misc_feature (185)..(194): n is a, c, g, or t
  misc_feature (196)..(234): n is a, c, g, or t
  misc_feature (1018)..(1018): n is a, c, g, or t
aattccaacgcccttagttcatggccccgggatttctcttgggaaacaaggttttggcccctgtttccctttccccttttggggggcccgcgccccaaaagccaaaggtttttaaaaaagtttttgaggggcccagggcggccccccaattttnnntntntnnnnnnntnntnntnnnggtgtgnnnnnnnnnngnnnnnnnnnnnnnnnnnnnnnnnnnnnnnnnnnnnnnnnttaaaattattaaaagctttatttacgattggaatcattcaacaaaaaagcaaaagcaaatgagcctgaaaaaggaactaagctgttgtctagaatgtcctcagaacattcgctacctcagtagctaagctgcctttgcacctggctggcatgacaacagtggctcaacatacacagcagttgcactaacagcagcacaaattttccccttcaaacttgcccagaataaagcaagaaaacaaggggagggtataaactctgccaaagtaaatgtatttaaatactgcatggaattgttaacagcctgaaccttttcccctcatttttgatagttgcagattgatgtagtaactgtcatttagcaaatgccgaatgcatgacgaagaaatcaggtggccttaaaaatccaaacacgaatgatactgatgaatgttcttggtatatcttcaaggacttctttcatgacttgacttttctttgtctaaggatagctccagcattaccgagcacctgaagcaaaggtaaagcagctagcaatgttccaaatattcaatcactctagagatagatttctggccagttgttccaacagcacaagtgagattcataaaactcaaaaattttttgagcatctctgtcattattgaaaagtctccttctggcagatattcccgcacagtggttacattgattggactttcctggcagagacacccaagaagtagtgccgtgtaggaggccacaatgcaatcctccatgtgtttgccggcatgctgaagggctntattgaggtcaagttcttcatcctcctcctccttcttatgtttctcttctgtaccatcagtcttttcagttgacacccactgtatttctccacttggttcttgccactctccactcttatcatgctgagtggtgggagcatctttgatcaactcatctgttttactttctgctagctgggctgcccgctctcgctcaaggatagctgcactaaagcctggacagcatgaacttgtccacctatccttaaactatcatccccttctccactacagatggaagaatcaaaagagcacgatgtttccatgttgacaagacagtgccgattccgagcactatactccactagatttatcagcagacctaagcccagcactcgaatatcaaatctctgctcctgaggtaggtactttggaacctgaagcacacagttcagcgctgtgcctatgagaccgtcctgctctcctgttttggtgctgccccactcattatcattagttaaattaagcaacaccccgatgatggccctcatgcagtcctccactgctttgcctacatggttagttacattctggtgaggcagaggcttactgtcagctaagcatatgctgtcctcagcacggttgtactgctgaatcagttcttcacaatgctgtaatgctcttaaaaggaaataagatatagactattatagtataataataggtacaccagcgaat

SEQ ID NO: 142688 - DNA, 811 bp, Homo Sapiens
cattaattctgatttttaaaaatattggattgaaatattacttactttgattactgtatttttttggcatcccttacattttgtgcccaaggccagggtctcccttgcctcatcctagtcccagtcatgagttctacttctgaagtccagtggtgggtacatgggtatttatttcattgttattaattatagcttactcatgttataaatattatttggttagtaaacagcacttaattaaaaaaacaatgtaaaagacatggattttaagattaattagaaactattgagcctgagaagcatgaaagagaaaagaatccttcgtgctgccaagtcgatctctaggggagaataactcccacggctgcagcgtatgcagtgcacacagaagagggctgctctgcccagtccatgtgggtggaagataactggggggagtaccagaggctgctgtccacttggacactggccttgagcaactcagctgctgcagccagagcgccaatgctgcatggcctgaggcaagccctggcaaatgggctgcccaggtaggcttggcccacgttaaaacagacccacgcagccctgctgaaggaatggaagcaatagaagactcctgaacgctataaatgtctcagggctatgtatcagggagaaaaggagatgtttgatacaaggaatattgttagtacatcttaacatgtaaaatctgaaattttgaaacatgaaatctattgttcattagtataatggtgacgaatgaaagattattttgattcagggaaggcaaacagattgcagcaaaaatctc

SEQ ID NO: 142689 - DNA, 703 bp, Homo Sapiens
  misc_feature (100)..(100): n is a, c, g, or t
gcatttttttgtggagtggtttgaatatcgtaagcgcacgtttaaacatctcaaggaaaagtacccagatgccgtgtacctctcggaggggccctcctcntgctccatggggatccgcagcgccagccggccagggtttgaattagtcattgtttggaggatacaaatagatgaagatgggaaggtttttccaaagctggatcttctcaccaaagtcccacagcgagcgctggagctggacaagaacagagccataggaactgctcctgtcagcttccgaaccctggtagggtctgcttggaatggaagctgctctggacagctctgatagagtcgctttgtgcagaggagaaccactaggttccaaaacagtgaacgtggaggatgaagatgctgcgtggaggtacatgcaattttattcaatatagacatttgctattttctgcttagaaaccacaccctgaagacgtgctgtctatgcagttatggcacattatatggaaactctcatgacatgaaaaataaatacaactagttaagtataaaatgccaaatgaaagtgacacgtacaatgtggtttataaaaataagcttaacatctgagaaaatgtaccaagtggttgtgtgtatgtatataagtgtatgcgtatatgcaaatgacattctagaagaagcatacgccttcgcaggaaggaataggagg

SEQ ID NO: 142690 - DNA, 549 bp, Homo Sapiens
agttactttgagttgggtttctgttacttgaaattgaatccacactaatatatctaccaacattgagacttgacagatccaagtatttattaagctagaggtcatggtcactgaaattactttccaaagtggaagacaaaatgaaacaggaactgagggaatatttaagatcccacagaagcgtaaaaatgacatggtagaaagtaatagaaaacctaaatgtctgtcattaaaggataggttaaggtgtggttcagccatataggaatatctcgtatctgttaaaatgaataaagtacattcattgtgtatggaaaaatggccatgatacattaggtgaaacaagttattaatagaaaagtgtacagtgtgaactcattttaaaatgtgtgtgcttatgtttataaatgcatagaaaggtctattcacagctttctttgaacagtgtagatcacatgaaactttcaactttatacatttctgtattaatattttacactacccacattatttttaaactttattttaaataaagaatttttaaaatta

SEQ ID NO: 142691 - DNA, 430 bp, Homo Sapiens
ttaacaaaactaactttatttggtagaagccaaaatagtgcttcgtctttggtggggggcagtgaccaagagagggcacaaagaaaccctctgggctgttggcagtgctccatatgatgaacttggtgggggtgtgtggctgcttacataggtagaatctggagctgtgcacttagggttgatgtccttcactgtgtgtatgttatccttcaatgaaaaaaaggggagagttatgtatttattaatatttcagtgagaaaactggatattgaatataccattgaatattttattttctttagaaaatactacctattatataaatcagaacagttgatagctgaatagagagtaaacctcacacagatggggagggagccctatcctctaccttaacttagtaagttttggtgaactgtgaaattgtcct

SEQ ID NO: 142692 - DNA, 565 bp, Homo Sapiens
tttttactcattacaatactttaatgtctctgctctctgaagaattagaggcagcttggtagtgactgtcttgcctctgatacaggtcaagggtaatgaggcccctatagaagctgttttattgctgctgcctttgcccaagtcttcaccatccctcacctggggtggtctcctaactggcttcccattctctggaccacccctcccctacccattccccacattgccggtaacgttgtgtttttgaatacaaacctgatcaagtcactctctcccttgcattcagtgacttcccaccacctatacctaagttctccagggtgctttagtacctgggggtgggtagtgggagagaggacccagtagtgcccagtgggcattgcaggttctgtgtggagaccatttctctggtccttgcttaggaaagcttattcattgaaggagtaagtggctgctcactcctttctgctgaaactctttcctgtccttgtagcctagtgtggaatgggagcagggtcacagtgaaagagctgaatctcccacccacccacactgcagcaggctg

SEQ ID NO: 142693 - DNA, 498 bp, Homo Sapiens
tttaaatgtggccatctgaaaagtttatttacacatgcgtatgtcatcacaaattcatttcacaaggatttgaatgttttttgaccttataaaaatcataaaagtactttaaaaattaaatagtggtgctggatcagaaaacatatacttttaggatgtctgatgaaataccagtattacaaaattcatcaaaaatcttctgggaggattaggactccagtgaagaaacaacctttttgtcaacagtgaaccttactttgggcttctttttcaaaacctctgtatagcttctctcaggaagaaatgtaaaagcgttccatatctctttatagcatcgtggaaagcgtctgaagcttgagaccaccatggcttctttatatacgtatgatatttggttatttgaaaagccatcaagacaagatggaacatagtcacatgcccagagattaaaatttcttgaaacatgttgcctcttatctggagagatcttcttacgtc

SEQ ID NO: 142694 - DNA, 1633 bp, Homo Sapiens
  misc_feature (35)..(35): n is a, c, g, or t
aaataaataggcagctgcccttcgctggtgaaggncttgatttccctggagctgaaaggttctccaaagctgagatcccgcagatcagctcatcacagaaagccaagggcgcctcttgagctgtgcgtttcaggaggggggcggcagaatggctggtcccaatcacctgctgctgctggcagtggggctggtgagttagtgttctaggtgggtaaagtggcaccttctgtcaggagatagggttgggtggatcacaggaagagggtgatggagagtgtggcagtgatctggaaggggttagggctccagaggacctctaaggatctacaaagtctctgggctgccaggattcctctggcacaaatgggaaatattttgtctctgatttagtgcaaattgtgctagagaggccagctcaagagaaacagtgggcagctttggtggccccaagctggctctactgtgaagcacaatatggtcagtctcattagagggatggagaagaagttgctggagttggatgtgggatactgtccaggccagctggaccggtgggggaaggggaggagacattggctagggtggcatctgcagggagtagggctcaggcgcctcacaaagcgaggagggttggagagccaagggggtcagaggatgggtctccgctgctgctgctactcttgcgatgagctgaggcacaaggctcaggagtgctggggtaggtgaagaccaggctgggggtgaaaggagttagggagggtgtggtcatgagtgtgggggtgtgcagtgcctcaggttcaagcacaggccctggggaaagggagatacaaggtacagggcggcagggggctggtgggctgctggtgccactggtactgcctgtgtccccctccttggctccttccgggattttgcagatgggtcggtgggcttccagcaccagctctaggcgctccttctgcttctgcagctcctcaatctctcgctgcagcccagatttctcatcttccagtttgtcagtctccgcctgcaggaagtcggtcagttccttcctccggttcctgcacttggccgcagccagcttgttccgctcgcgccttactcggcggcgctcctcttcctccgggctgatctgttcacaaggccttcgacgtacccctggaggcggccccagggcccggatgactcctggccggggctgtggggggctgtactgagggtaggtcagaggcctggggtaactgctgggccccaggaaatgaggctgtaccatccactgcagctcctgactgccactcatgttgctgatccttggcacgaggtggaacttctgctgggctgcctgcactgcggccggggggctgcgcggggtcgccatacccacgccattcccggagctcgggccgggttccctgaagtctcagaacatgccccgggctggcggctccgcgtggtccacggccgctggcttccgactctctttccagattttgaccacatgatgttttactgtcttggccctctactgtgccttcacacagattttttaaacctactttttcagctgttctcagcaatagggttcatctgaattagccagtctaccacaactggatgcacaaccaaagcctaa

SEQ ID NO: 142695 - DNA, 1016 bp, Homo Sapiens
cagtcgacggtaccggacatatgcccgggaattcggccattacggccgggaccctagccaatgtctcctccccttcccccaccggtccagctggcctggacagtatcccacatccaactccagcaacttcttctccatccctctaatgagactgaccatattgtgcttcacagtagagccagcttggggccaccaaagctgcccactgtttctcttgagctggcctctctagcacaatttgcactaaatcagagacaaaatatttcccatttgtgccagaggaatcctggcagcccagagactttgtagatccttagaggtcctctggagccctaaccccttccagatcactgccacactctccatcaccctcttcctgtgatccacccaaccctatctcctgacagaaggtgccactttacccacctagaacactaactcaccagccccactgccagcagcagcaggtgattggaccaggccattctgccgccccctcctgaaccgcacagctcaggaggcgcccttggcttctgtgatgagctgatctgcggatctcagctttgagaagccttcagctccagggaatccaagcctccacagcgagggcagctgctatttattttccctaaagagagtatttttatacaaacctaccaaaatggaataaaaggcttgaagctgtggcctgagtgcctcactggacccagaggccaatgggagagtatttggagccctaggtcccagccttagctctacagactcactgcatgaccttggacaaattctttgatatttttggactttgtcttatctgacaagtggggctacatccgctcggcctcatctccgggactgaggggagacagtcctctggggtaaaagcgaataggcttaccgcccctctccccgtgggggcccacagtgctgctgcgtgtgtcacggaggggcgctgttatgcccccttccagcctcagatgaggcggtcgagtggttctatgtccccatcacctgct

SEQ ID NO: 142696 - DNA, 366 bp, Homo Sapiens
tttattcttggttgcatattacaatcacatggggagcttaaaaaatatactgatgcctagatctcgctccaaaccaactaaacacagtgtgcagctgaggttgagaacctccacgccgaggccaccagaaagttccacatcacatgctctgaggcagcaggctctttgaaagcatgggttggtattcacagcacttggcattcatagtgtacatggaaagtcttgccttgggtcacccagcaagtgtctttgtccagggctccattttcagtcccccatggccgcaatctgctgaacttgggctctcaacagggggtgccaggagcatggttcatcttcagtcctatttcaaagctggaagttagg

SEQ ID NO: 142697 - DNA, 475 bp, Homo Sapiens
ggcggcgagggcgcgaggggccgcgcgccatgctccgggccccgacggcgcggacgccccctcgcgcgccagcgtccggcgcgaccccggatcccggtctgcgcattgccccccgacggctgcgctagggagcgcggggcccggcggggggcggccgagctgggcgccctcccccggcgcggagtccccgcaccccggagggatggggcgggcagccgcgggcgcctaagatgccggccatgcggggcctcctggcgccgcagaacacctttctggacaccatcgctacgcgcttcgacggcacgctaacttcgtgctgggcaacgcccaggtggcggggctcttccccgtggtctactgctctgatggcttctgtgacctcacgggcttctcccgggctgaggtcatgcagcggggctgtgcctgctccttcctttatgggccagacaccagtgagctcgtccgccaacagatc

SEQ ID NO: 142698 - DNA, 527 bp, Homo Sapiens
ccagaaacagctgacattatttattgccaatggtatacatttgagcttttaagcaaaaatcagaattttgaaaaactttctcctatcaccatgacaacttcctcataatgagttttctgatgagatggatggtgatattaagtgattttttgatactatataatgtaatgtgtcaaaaatttgaatttctgcagaactctgtgaaccaacatttttcaagtgaacattcatttttccatgaaaaaccacatgttcaaagtgagagagaacagcggatttaactgccacagagcccaaaagtctattcatgaggcttcagattccatgttataaccagcctttaagaagctaccacttgttgagttttggtgtagtagcaaagaatgttcatagttagttagctgaaaaaggtactaaaatccttttccctgtttcaactataaaatgcgtgaggccagattttcttgatacagttcaactgaaacaacacatttccatagactacatcggaagcagacgcaaggtcc

SEQ ID NO: 142699 - DNA, 816 bp, Homo Sapiens
ttttttggcagttcagaaattttaatgctgctttgaaaaatacttctgtacaatattatctttctcataatgaaaaaaagaaatgacatctggtatgtcaatggtttgctgaaagcacagatattttttgtttccttgttttaggtcttccaaaaactctgctttgagcttgttaagttcttctgctagaagcttcaagttgtgaggaagcacttgttcatcttttgcttccttcattgtctgagatacaatccttcggagtgtctgatcagttttatgaagaatgttagttgaacaaataattctgtctgtgtccttttgttccatattgtcctcagcatattttactggattttccaaagcagtgagcaataaatcagtcacttccaggctggcctccgaagcacatgctggactcggaattgtgaggctgttgtgttcccaagcatttttctcagggttgggcttttctagctttcttcgcatcaggtggatggtctcaggaggcagtgcctgtggcctctggccattcctctgtaaacaggtctcaagaggacaatctaaaaagagctggcaaaagcccaacgaatctgatcacagacgttccacaccagctcagcaacggtcgtccacgccgcttgctgtttccccacagccaacgtcgaaaacaccctcgtgccggcgcgcagtgcaccgcgcctgcgcatagtctccagcgaaagagcaagggtctgccagtgcgcatgctccgctctcgacctcctccccgcacactttgacctcgtgccgaaatcgccacccaggcctcgctacctt

SEQ ID NO: 142700 - DNA, 1154 bp, Homo Sapiens
  misc_feature (71)..(79): n is a, c, g, or t
  misc_feature (169)..(180): n is a, c, g, or t
  misc_feature (230)..(239): n is a, c, g, or t
  misc_feature (344)..(386): n is a, c, g, or t
  misc_feature (388)..(389): n is a, c, g, or t
  misc_feature (411)..(411): n is a, c, g, or t
  misc_feature (430)..(430): n is a, c, g, or t
  misc_feature (432)..(432): n is a, c, g, or t
  misc_feature (437)..(448): n is a, c, g, or t
  misc_feature (452)..(452): n is a, c, g, or t
  misc_feature (455)..(465): n is a, c, g, or t
  misc_feature (467)..(482): n is a, c, g, or t
tactaccccccgcagaggggaaaaaactttttgtatacgcgccgggagaaaataatgcgcgcctatttttnnnnnnnnnatatacagcccaaaaaaaattttataattttccccccaaagggcggggaaaattttccccaggggagttttcttccccaaaaaatttctnnnnnnnnnnnnaaagaggggttcttcctccccaaagggtcccccaggcggcgcgttgtttnnnnnnnnnngggagggtgggataaatgccggcccgggcgcccaagattaaaaaataggccccccctcatagggggccctatttttacaggacaaggggggagcctggaaatacnnnnnnnnnnnnnnnnnnnnnnnnnnnnnnnnnnnnnnnnnnntnngcgtaagctttgggccccttgnggggcttctttggaggttntnccccnnnnnnnnnnnntttnttnnnnnnnnnnntnnnnnnnnnnnnnnnntaatgtttcaggaaaaatgggagcaagcccattcctttatggcggtgaagaatatagtacaccgactgcttccctcatttccgtggcctgcctggtcccttaaggccttttcgaaggtgtggcccacccgggcctgcctgtatcctcagctggggacaggtgttagagtgaaaccctgcctttgacacaggcactgggtggttaggaaagagcccgtttatataaccgtggtggagagcacgggcctcccgcctaccattgcacttggtgatgagctggtccttcttgctggactcctgaaggactttgctcttgacactggagagcgctttttcaaaggccagcttctctttctccagctgcttggatagcacctctacctctccgagggcaaactgtaacttctcctcttccttggccaggaggaccttggttttggcatgggcagctttctcttccaccagcttcttctccactgcctggaactcttctttactgacaaaattttcgtcctggagaaccatcacgttcctcagctggtggattagttcctcctgagactcaatcacgtcccgcagttgatctaaagcgagacacacagatcctgaccccgccttcgaccacccgaggggcgtcgccatcttccgcccccgccagctagttggcggccgc

SEQ ID NO: 142701 - DNA, 346 bp, Homo Sapiens
cttaaaaagtcaggctacagtaatgagagggcagcagaggagagaaagtctgcaaaggcatttttagcctttaacctggaaggttctccggttcagatcacaaggttgaataccttgtttggtgatcagagttccagggaaaataggagctgccatgtacatctattcccaagttacacaacaatatgaaaattactccacaacactgtagttatactgctacacacatgttctgtcaccctaaatcgtgttccttggtatagggaatgttgttgcctaacaagttttgtgtgcctcagctcttcccctaaaatgtaagctcctagaggagggttttgggttttat

SEQ ID NO: 142702 - DNA, 1339 bp, Homo Sapiens
ttgtcataataaactgattttattagaaaaaggcactttaatgccaactgctggaaacacgcatagtaaatacatttgcacaaccaaacacagtgccctccagggggcagggagaagaagagtaggagagggtgatagttgttggcttaacaaagaagagaagagcgagagcgcggccaggggaggtagttaggtcaagtggatggttctgtaccaaggacacagcaaaggtcctcaggcactgattcacattacccaaagtcaccagataatagagttgtttccgtggctgacatttcttagccttgccctcaaacttggcaggagggaggcaagctcgtttaaagaagggagaggggaggagatccaggcaattggcctaggggttggctttgagagagaataggttgacccttcctcggaaagagggaagggggaagcagggagccacgaagagagagaggtgccacgggaactcctggctgccgactcccgtcttcttggtgaaggagtcagggttaggtgtgaaagtgggagatgaggggcattggtacaacccaaggaggtctgctgcagtcatcacagaggcaggctggtccgccttcgaggtgagttgcaggcaggctgagcagcagaaaccatgtggtaggtgcccatgcttgagcaggaatgggtgtggaccctatctaggtcgctgccggactagccgcagtgatgcctgacagctggaaaatgtcaaaaagtaatcaagagggagcccaggatcggggaagtaggctggggtgtcagcaaaggctattgtctggcggggggccggtatcacacaaacagcccaagccctaggcacaaatactcaatgaattcagctctgggggctttgtggctagctctgaggctggagggcacttcatccccgtctaaatccttcagcaaagcactttggggtggcccaagattccagcctgactgcaaggtgactgtggttgctaacacggcaaactccaggaagagtaccttggtccagccagtgagggctgctcccagagctgacttcccttccctcccttcgtggttttaccccactcggcctttgtgtccctgaggagcgcatcttccccaatgtgcatgcgcatcaaagcgttcctactctgcactcgttccagctctacaacatctccagattcggaggatcaaacttgtaccccatagtctcagagcaactgaatctcggcatgaacaaagggaattagagaatgctttcccttaaaaacaaaatccctatccctgtggctgatccacggagacatacacacacccttggagacaagacctcaaacct

SEQ ID NO: 142703 - DNA, 1122 bp, Homo Sapiens
  misc_feature (327)..(327): n is a, c, g, or t
  misc_feature (522)..(522): n is a, c, g, or t
ttgagttcaaaataaatttattgaaatgttcaacacagacatgtgctttcagagagaatagaaaccctttttcacagtttatatacctcaagatagaaggctaactagttgaagtgtcctcagagccaatgatcagtccttaaaaagctcccacacatcccggacttaacagactcccagaactggctgggactccaggaggtcatgtagtccatcccgctgcctctaggcaggtaagagaagagcaatatcttagaatttgtggtaataaatttgctgacctttctttgttaagagtttctccctgttcttgaaggctgtaagganttgattttgaagcaaacccctgcaactgctgtactctggtcaccagggtgagtttctctgcttctgacctttttagttgatcttgtaggtcctgggtatccaagctgcacaggtctctgtccccttgcaggcattcattcttggcctgcagttcctggtgctcattttccaaaaaatcgcagggcctggttcatnctgtaagtccctgctatctgctcccctgcagtttggactgaagcacgtggagttggctcttcagctccctgtgctgggtcccaagggtcctccagtcctccttcagagcctcatactggctcctccactcttcacacttctgctctgccagggccagggatcgctgtgtgctctgtagttgctgctctgcattcattttctcctccagcactttctgcagtgactccttggccttctgctcatagctgtttttctggtcttccatctccagtagtacttttttcattccccaaggggagtatttctgggtacaggtgtatagctggttttctaaggatctcagtttccccttcagtttgtcttcattaagctgtccctggtgccggtctgaggtcttcagctcctgcttctgcgtggttttcccctgcctctgatctgctctccagaaacaccaccacctcaccacagaagcaccagcccacagctcatctctctgctctagtagaggttgcttagggcttcagccaatccccgctgcgctgtcatctcccccggccgtaatggccgaattcccgggcatatgtccggtaccgtcgactg

SEQ ID NO: 142704 - DNA, 970 bp, Homo Sapiens
  misc_feature (60)..(69): n is a, c, g, or t
  misc_feature (131)..(154): n is a, c, g, or t
  misc_feature (207)..(266): n is a, c, g, or t
  misc_feature (274)..(348): n is a, c, g, or t
  misc_feature (350)..(350): n is a, c, g, or t
  misc_feature (354)..(354): n is a, c, g, or t
ctcccccggagggagcctaaaaaactctgtggggaggggtgtgtttccccaattttgctnnnnnnnnnngaaaagaaaaggttctttccccaaaaaatcccccccggaggccgccgtttttcccccgccannnnnnnnnnnnnnnnnnnnnnnncccaggctctttattttttaatagggccccccctaagggggccccctttttcnnnnnnnnnnnnnnnnnnnnnnnnnnnnnnnnnnnnnnnnnnnnnnnnnnnnnnnnnnnncccccctnnnnnnnnnnnnnnnnnnnnnnnnnnnnnnnnnnnnnnnnnnnnnnnnnnnnnnnnnnnnnnnnnnnnnnnnnnntnttcngagttcaaaataaatttattgaaatgttcaacacagacatgtgctttcagagagaatagaaaccctttttcacagtttatatacctcaagatagaaggctaactagttgaagtggtcctcagagccaatgatcagtccttaaaaagctcccacacatcccggacttaacagactcccagaactggctgggactccaggaggtcatgtagtccatcccgctgcctctaggcaggtaagagaagagcaatatcttagaatttgtggtaataaatttgctgacctttctttgttaagagtttttcctgttcttgaagctgtaaggattgattttgaagcaaacctgttggaaaacacaaggaacttgtctatgctagcatatttactacaaaaagttttcttttcagaactttgcttagaaccttggttattaaatatgttcccatctgctgtgtgttgaattttgtcccccagaatatatatgttgaagtcctaaccctcagtaccttaaataatgaccttatttggagatagattctttaaaagataatcaagttaaaatggggtcattcagatgggccccaatctaattccatcgaagaatccggaccggtccagc

SEQ ID NO: 142705 - DNA, 252 bp, Homo Sapiens
ggcaccaggggcacttctgcccgctggcgtggatgagaagtgaatgcgtgctcggagctgcgagtgacagcgggcaggaggcgcccagggacacttagtttctcctgttcttgaagcatgtaaggattgattttgaagcaaaccctgcaactgctgtactctgggtcaccagggtgagtttctctgcctctgacctttttagttgatcttgtaggtcctgggtatccaagctgcacaggtctctgtcgccct

SEQ ID NO: 142706 - DNA, 532 bp, Homo Sapiens
ttttgacttcttattgaatattttactgtgttaacgctcattatttatacagacattaggtttacagaatattctgttttacatcaccaaaattcacagtccgagaataacaacataaccaggtcccaattcctccatgcaccccacaagcttctgtccaccctattttctggacagaaattagcacaacccacaggtttttcctgggccaagtcttcctttgctgccactgtcttggcttctaatcaagctctgacaggccaacattgtgaagtcctcaccctttcccattcacttctggtctcctagtctagctaatccccctcccccagaaggttaaggcagttggttcacaaccaagttgtttggtgaccttgggtgagctccagacaggcactggggtgaggagatgtctgtgcaaaattacttgtagaatgatcttgggatgctggattttaatttttgaagcaagaaagttagggggggacatatttcctgtcctgggaaaaatggagaccaaagtgatattaag

SEQ ID NO: 142707 - DNA, 524 bp, Homo Sapiens
tgcactttgcttcctaacccttttttgtcagaaatctacaacctactgggcatggaaatgatttaaaatatgatctgcattgactaagaaaactcatcctcacttatgaggtgaccaggatgcagagagggcctgaggggcagcagaacaatgcaattcacaggtgaggctccaaaaagggccatttctttctccccaaggtgcatagaacatttttaaatatcagagtacccagcaagacggaaggactgtcatgcaggaactctaacacaaaatgtgcctatgactaacacgacaaaccaaggtgtatggtttctttgcacacccagaaaggtgatggccaagatacagaggagaaacgaaaactggaattgaatgtgcattaggcatcttaactattcatattttgtttcatttgggaactaagcctatttggaaagagtggattagaaattgaattctttgtcaaacagttagctctgtcttgaacttgaagccttccaaatcagaattatgtatttaaa

SEQ ID NO: 142708 - DNA, 506 bp, Homo Sapiens
tttttactttggaaatcatgtattatttaaatcacatgtttaaacgcacataaacttctgagtagtgttttctgcacacacaagatgtctccaggggcaccaaagaatgcattttccacgtttgtccctaaacgttaatgcataagtaaccttggtcaccaacagatgtgagggcacgtgacgttcgggctgcgccctccccgccccggccctgcacacagtagggccgcaccgcgctttgcaaacaggtggactcggcagaggcgcgaccgccctcaccgcagagagctgggccacctgcaggctctcaggacacccaaggccccacctcccacccggaaaagagacgatacgccgggcgcaggcgcagaagccgcgcccgtccgcggcgccgccagccagggcggaaacggctgcggcttcgctagggacgcatgcgcgggtcccttagttttcgcgagataacggtcgaaaacgcgctcttgtcgatttcctgtagtgaatca

SEQ ID NO: 142709 - DNA, 491 bp, Homo Sapiens
cggacttaggtgtttcggacgctattgcccttcgcgccagccgtcgagtgggcagcagcgggactcagccgggcgccaggttcctgccaggcagcgccgggaagcgcgggcggccgagaactccttcctgctacttcgcccagcgccgctgcttcggcttcccagcgaagtgggagaccttcctccctgtttgcagacgtccgtgggagacccttattttttccaccgctaaggttaagagattctggaatagaagcgtcgaaggagatcaagtgaaccttctacaactcctcggatgtcgccagtctccctttcggggcggaagactacgtttgagcatctcactgaggtgcaggaatggaagaacccaccttgcagcttttctgcagtgtggcttgcctgatctacccctaggaatgaagaggaggcttgtaataatccgatgaagtacagatgttgaagaggatatcgcaggacctaaacttgtgtcg

SEQ ID NO: 142710 - DNA, 812 bp, Homo Sapiens
tttcactgcttaatgagtattttatttttagatgtggatcaccccttagggaggggctctgtgggaaggtaggtaatgaactatttttaatataaatcacaagtgtcaaagaaagtggtaatatccaaagaataaacaagagtgaccaccattcaggtgccgagaaggtatctgaagctcccacaggcattttaaactgtgtgatagtatttcaaccatttggttcaccaatgaagaaagatccaaggattgccccaggcatgtgtttatttgattcaatgcaggtaacttctcaggcccagggaaacactttgcccttcaaaagtttcattagaaaaccccaatatactggtgactaagtaacaagactgaaactctacacaaactttcgttgtatggagacctccgcttttgctgccttagctgaagtattgcagaggaaatgtataaaacttaaaatccagagtagaggatctgggacccaaaatccgtctttagaaatccacggcacttttacagacggactatattaaagtagggacaaagtcccaggctgggggtactagccggctatctgcccacacagtatgtaaatgaaagtagggtttaccatccagggcattaacttcattttccttgtcttcgagatccattaaatgctagtactgtatgagaagcgtggaccttaagtattaaagatggctttttcttcttcttcttcttatttagcgtagaaactagcaacagggaacaaggtaactgaattcacggtccactcgcaggagcgcacgtccccagggctccgggacggc

SEQ ID NO: 142711 - DNA, 560 bp, Homo Sapiens
cacaatcatccagtataagacatcgacaagctcgtttagtcccttgaaaatctgcatcattgtccactactgtactcctctgttctactgactccttgtctgattttataggagaatcttcttctgaactgtttggtgcttcagatctaagacaacgcttaattctttttaaaactggtgaaacaggttctgtttgccttctctcacaattttctatagcctgcctttctatgttatccttttctgaagaagaaagtcctcttttcctagggcttacccatgattctcgggtactctgctgttttaaatcagtggttctcccattattatttcctttctgaattggcacaggctctggtctcttctttggtgatcttgatcgtacttgagaattagaagagatttcttcaggatgcgcaatgctacgattccttaaagttctaccacaaaaagattcatccaagccgtttaaccccactgttgatcttgtaacacgagtagatcgggaagcagccatactatggcaagtccctacaatacggtcatcatgatccactcat

SEQ ID NO: 142712 - DNA, 458 bp, Homo Sapiens
ttacgataaaaacacatttctttattttaaaagccacagtcatggtgcaggcattttgctgttgacctgaacaacaaaatgggccttatgctctgtgatgagataagtgagtaaggggtgaaccaagaggggtggttcacttggagtgcctgaacatgatccttcaccgacagggagaagccttggccaacagaaccattaatcactgtctgctcccttcatttgcgtaagaaatgtgattcactccaataaaactggctattggcagaggggaatcgaacgtctgacttgtgagtctaaaagagccagctgttccagcctccaggattcagtgagaacttcctatttcaagttaagttcccagctgtcccaaggcttaggaaagggggataaacccagccacccccacctctagacacatgctccagccaacagcaggagtgttgcagattttatca

SEQ ID NO: 142713 - DNA, 543 bp, Homo Sapiens
gcttttccaaggtgagcatattcagcgtttacctggaagtctcttcttcccacctgggctaatcaggttacaattttcaagggtaaccaaactaccagctacaggatagggaagtggtggtggaataagagaacatgatacctggaggaagggaagaaaccacaagcattttcctactgaaaaatagggtgacatgtcagtcaaattctgatcaactggaacttgagtttccagttaaattccatacactaggagggagttttctatcaaaatcctgcagattgaagaagctggtttattagaaccagcctgtcgcttttcaaagctgcttaaaaataagatactgacctcacccctagagatgattcagtgggcctgggtggggccaagaaatccgtggtgttttgtaagcactgctggcgatttctcatggcagtaaagaccacactgagactgcactgattttgattaaagtacataggcttggctgtttttacacagctaactaaatttggactcttaaaattgtgtttgtaatcacag

SEQ ID NO: 142714 - DNA, 489 bp, Homo Sapiens
ctacgctaacgccaaacgccgagcagtgagacgcgcagcacccaccctgcgcctcggtggcagccgtccacgccgtcagtgcctggcggttcccgtgggacataccgtccactcgccacgcccctccgcccgcggcgcaccccacgcaccgtgccctggccgcccgcctcacgcaccgctttcctctccgtccagcgctcgctgcagccgggccgtctcgcagtccagcgtgctggccagagaccgcagcttcccgcagaagctccggatagggtccatgctgagcacagcggggaaggactccaggcgtacgcagaccccaccgctcagctcacagcctcccgccactagtttgaatctcggcgccggacgcgtcctcggctctgcgcaggcgcagtcctctctcgcgagagccgaagtctctcgccgaggccccaggagaccccgcgagacgggtgcgcttacgccacggcgtctgctggcggccgc

SEQ ID NO: 142715 - DNA, 1529 bp, Homo Sapiens
  misc_feature (1373)..(1407): n is a, c, g, or t
  misc_feature (1410)..(1445): n is a, c, g, or t
  misc_feature (1457)..(1467): n is a, c, g, or t
cctcccggaaacccggtccttcgcccaggggctttaatccttgaggcccataccacgcggcggaccttttaggccccgggaaaaacccgggcggcccagttggaagaactggtgaaaacaaacaattagttcaagccccagtctccgggaatattcaggctaaatgagatcagtaacggccccgggacacggtctccagctgctgttgtccagaggggttaataatactttgccccagggatgcatcactgttgtttggttttgtgcagaggagtttggggaaccccaggagaggaactgagggacccaagaaagaaagcaagaaacctggaatctggatctagttggagctgggctgtattggttcatgtgggttcgctcccaccctctatcttaggcatgaggcccctgggatgtaagcaccttggacccaaccccaagtcctaagtcaggaattccaactacctgaggagcccagggcagaatggcaggaagggtggaggaccatgctctggcctcagagctgaatggcactaaggaagtcctcatgatctgagtcctgaaggaagcaaggtgaggtgggaggtctggggggtgagaggatttgggcccccagagccagctgggccacactgagcttcccgcccttgtgcatgaggtagagatggaagtggaaaccgctgccataggtagcatgcctcagggaccagccataataggcttgggcatagtgtctggtccgaaagtggggggcagcagaagtcattgagataaaccggcctccagggacaagcacgcggctcacctcactcaacacctggtccacagtgtggacaccttcagaggacacggtccagggatctcgttccccagccagcagggcatccagcgtgcccttctcgagcaccacatcaaaagaagcactggggaagtccagcttccgcacatccatggtctcccagcgcagctgcggcacatgggcatagcgagcctgcatggcagccaccacgactgatgagtagtccacactggtcacattagggaagcctccgaggaacagctcgtagctcagggcactgttcccgcaacctagcacaaggatacggtcctcgggccgcagctccggctctaggagggcacggaaggaggagaagtccccgaaccaatcgtagggggcagaatcggctgcgccttggtagcgctgatcccagtactcgacttcgcggtacccgcagttccgctccggtaactccggaggcgccctacctgcccctggagaggccatgctctcaaccgccgggcagccagagccgccggccctccccggccgtaatggccgaattcccgggcatatgtccggtaccgtcgactgnnnnnnnnnnnnnnnnnnnnnnnnnnnnnnnnnnncgnnnnnnnnnnnnnnnnnnnnnnnnnnnnnnnnnnnncaggggctaacnnnnnnnnnnngcccggtgaaggggcggcgcccctttaattgaagttgaggttgcttagttaccaactgcttt

SEQ ID NO: 142716 - DNA, 639 bp, Homo Sapiens
tttgtcaccagacacactgtatttttatttacttattaagtaactggaacgctgtctctgtctctctgccgggatgtaatatccagaagggcagggatttttgtctgttttccttgctgctgtggcaccggtgcctgtcccagcacagtacctggcccctagccagggctcactgaacgtcgcttgaggaagaaacaagggatgacctttgatgccagagtcagaaacacggtttttggtgccgcatgtccgcccctctctgtggacagggggaggcggtggggaaggcccaggtctcccagagcaactggttttgctccctgaggggcttgctggcctcctggggtggaggtgtcaccaggggcaggattcctgctgagcaagtgaaacacccgctgcaggcagcagagggtgcagctgagagttggtcacgattgcacttccgactttggagacccagaaccactccagcggaggccctgggggagccccttcccttttggaggaaggaaagggagacctgtttgctggctgagtcggggtgtgaagcaggtttgggcaggatgaggagggcgaattgggaaggagggggaggtgggggctggatttaaaatgggggcaggccttgcctcgtgccga

SEQ ID NO: 142717 - DNA, 616 bp, Homo Sapiens
  misc_feature (345)..(358): n is a, c, g, or t
aggccaagaaggcctggctagaagacctgtgcctttaccaccagatcacccgagaagtcatctgtggaaaaatccagaattggagacaatggcgcagccatgtatgtgggggtctgtttccacacaagcaagtcctgttagagggacacatgtcaaaatgctagctcccactccaagttcaagttcccaaagttaacatcacaggaaattacaccaccaactgatttgccccaatgtcggctcctctgtctggaagtcgagtctgagaaggccattggtttagttcagctttggccaaaggaagggaccagctcagacaggaatgagtgaaagtgctggcctgannnnnnnnnnnnnnaaactaacattttccccaaaagttatcttgccattacccaagagtcataagtgaaaagacagccaaataccaaaaagccactgaggccctcaacagtgcctgctcatttcaaagccatttcacggacagccagggggtgcctgggccaccgcagaccacccctcactccaagagcactctctgctctctagagctccatgttccatgtaaagttccatcggcatgtgcacaccacttcctacgactgatgtcagcaaa

SEQ ID NO: 142718 - DNA, 425 bp, Homo Sapiens
  misc_feature (304)..(304): n is a, c, g, or t
acagaagaaaagagggactggaaacctcactggaccaaagctcttcccattcatgaacccgcatccggagtcaggattctcccctgacgcccctcccgtggtccctgcacaatctcggagagacgcggccatgcgggtgcagagcggcccagagagggctccaggccagggcacagtcacagcgcatggaggagacaggtcgcccagggtcccgcagtcagcgcattcgccatcttatggctgaaggagactgaggccgagatgggaaagaactccaggcgcagattgtggagctgactgcggngaggccggagtcccgccacagccacttcccaccggttccaatcagccccttccccttctcgggatgtcggacccggcactctcaccatttctaggctgccaggggcacctggcatgttagc

SEQ ID NO: 142719 - DNA, 594 bp, Homo Sapiens
tttcggtggtgactcttttttattagaatgcatagggttgcacaggtgtctctatcattagactgcctgggctcaaccaggagtctcttccattaaaattctgggggtcactcgtgtttctgtcattaggccacctggtgttggctgaaagtatctttcgttagaatgccttgggtcgcccagtttttactttcattagattacctggggttgaccaggagtctctctcatttcaatgccttcagttgcccaggtgtccctattgttagattgcttgctgtctgcaaggaatctctcccattagaatgccttgtgttggccgagagtctctcccattagaatgtctggaattgcccaggtttttatatgatgagactgcctggggtcggccaggggtatctttctctcgaatgcctgggttcatgcagctgtctctataattagacagctttgagtcagccaggagtctttcacattagaatgcctgttgtcgcccaagtgtctctatcattagactgcctggtgtcagctgggagtctctcccgttagaatggctaggttcaccccagtgtctttatcattagtctgccagtg

SEQ ID NO: 142720 - DNA, 477 bp, Homo Sapiens
  misc_feature (113)..(161): n is a, c, g, or t
tttttctcttagcatattttattataatgatgtttgtctgtgtgtctcaccattagcctatgagttcctagaggatgaaaactgtcttctttgtacatctaacatctagcatnnnnnnnnnnnnnnnnnnnnnnnnnnnnnnnnnnnnnnnnnnnnnnnnncaatgaaatgcaaagcgcacaagtaggctccagggtcccccagggcagaatggatgtgtgattgcagcactgggattgaagctgcagccactggatctgcaggattccataagaggcctggaaaagctcagttctgcctcagagagggtgagttggccagaggggcactcagtcatgaacttcttgtaccactggtggcacttcggtgctgctcagctcctccactgactttccctccatcacgttgcccattgctcaggccttcagggggctgacgtctgagatggacaggccctgttcgctgctcctcgcccaa

SEQ ID NO: 142721 - DNA, 1013 bp, Homo Sapiens
  misc_feature (599)..(600): n is a, c, g, or t
  misc_feature (604)..(604): n is a, c, g, or t
  misc_feature (606)..(609): n is a, c, g, or t
  misc_feature (611)..(611): n is a, c, g, or t
ttttttgtgagaaagctctttactgggggtacagcgaggaggagcaaggccatctccccctacctgcccccaccccctcctagggtcctggggtgagggggggtcttccctccaccggaccaccactgtctttggtacaataaatagaaaaaaagggggagaggggcccaagggtccagtccttagtggggagggagcggccaaaaccctctccttgacccccctgccccaggccccaatcagtgcaggcctcacccaccccagctgggtagcagcaattccagtcaaggagagagatgaggatgggagcccagggcccccagatggtgggagggtatggcttcaggaggggccccagggagggggcagggtcacgagctggctgctgtgctctggggtacaccacggaggcccaggtgaggccccagagtggcagggtcatcaggaggcgggaggggtggacgacctccagtcatccgagtccggagggctgaggcagccgggtgctggggggcaggcgctgggtgaggtggggagcagtcagcagggccgcccaccaggctcacatccatcagctccgggggtggtggtgagggttnnaatnannnnangcccaacggactccgccctgcgggggaccccggcgccgcgaacccagcggaacgcgcctcgctgcccgtgggcgtgcccgttgggcgagtgggtagcacgcccccgcggccgagctgtgtctgccttccccccccacgaccaagagagcgtgtggtgcggtggtctccccgcaggagagaggggcctgttgggggcgtcaagcactgcctttctgccccccccgcggccgccctgttatagcgatcccgcacgggcgccgatgtaatgcccggccgccgcgagaagcaagggggggcggcgccgccgttacctctttcagcgggccgtcggccacctgtctccgcactacgtatccgttcgccccgcgtggacgccgtaacacggccgtcctgcgcccgcga

SEQ ID NO: 142722 - DNA, 1078 bp, Homo Sapiens
tttggtgttttacacaatgatttattttaaagcttaataggaaatcacaaagtatttaataaaaaatagttttaaatacatttttaaagtcttaaggaaagtctctatttataatcctcccacctccacctcccaagtagctgggactataggcacatgctaccacacctggcttaaaggtgcagttttaatggcagatttcagactccttaagctacatgatggctaagagtcagcttaaggacttaaaaaatgtacatttataaaacattgaggaaattcaccaaaatgttttgtaaacattataaacaaacatctactatataatgtgagagacagtttcaggatctatttagaaaggtttaaatcctgtattttataatattattttataaagttactattactatgaaatttgcattacacattctgtgtcacccttatgtgtcaccttaactaatatcaaggacaggtttgttaaaatatacgtattacactatatacatacatacacagacatagtgcttttttccccttgcataatgctgcttcataagaacatatgtggtctaaggaacaatcagagcatagcaaaatgctgccttaattgtttaattaaatgttgtgtgtccacatggtctggaaatgctgcttcagacttctgcgcagcaacatagcttctctgcagatctccaatcttatcagagattgttgcaaaattaaaatgcggttcatacatatggggtgctaatgatgatgcagtttgtaatagtgcccttgcctgttcaacgtggcccttccgcatctccagcacagccaggttgttgtaggcctcggcgtggttgttgttgttgaccagagccagcctgaagcactgatgggccaaatttgtatctcctattcccacagctacatgtcccaagttgtaccagacatcagctgcctcttcttcattttcagccaaagaaagggcacgttcaaatgaggtcagagtcatatcatactgctgggcatagaagcaacacagccccagattgttaaaaagctggccgttataaatgcccatctgcagcagccc

SEQ ID NO: 142723 - DNA, 1299 bp, Homo Sapiens
  misc_feature (410)..(410): n is a, c, g, or t
  misc_feature (467)..(475): n is a, c, g, or t
  misc_feature (534)..(542): n is a, c, g, or t
  misc_feature (546)..(556): n is a, c, g, or t
aatatataaaaagtcttggtgtggcgagagctcaagggttttgccccaacaagaagtgcgagaggggtgtgttatatatgccgcaacggggagggcacaggcgcgtttattgggcgaggcacaaataaggcggccgtgttccggggggtatagcgtgctacaaaacgcacagggtttgtgggggaagaaacggtctttcacaatttgtctcgctccgaggagcatagcgtcttacaacaggggccagttggccgcacccacgcggttatctctcggacaagaggaaggttgtgcaacacgagtgctgggttgggcgcgccgtataaaaagtcggaggagaaaatgacgggagagctctccgcctatttccggaagactgtgccacctggtatggcgagcggggaatctcnccccacgtttatagagtgggggctccctttgcggggggcaaaattttccccgctttnnnnnnnnncaaagattctggtgcttgccacggaaagccgcgctttttggggtgttgtgcacgcaccnnnnnnnnntggnnnnnnnnnnnatttgggtttggggaaaatcccacaggccccggtaattttcgggcgggccaaggggtgttccgtgaggaaaaaccaaaggtagggacccaatgtttccgcggttaccatagggggggtccgggcggcgccaaaaacggagtggtgttaggagagcgttttttcgaggggccgagagcggccgacaaggggtgggagcccgcgttcatgggggttttttacagaaacagggcagtaggctgatttgggccccagggccgcagcttgccaacccctgctgctttaggggattcattagacttcatatccttgacatatgagagagggtgtatgtctgaaaccttcacagatcctcccatttacgaaattgctgtaatctcgcgctctcctgtttcctcatctgttcccgggagcaatacctatagtgcacaggattgctgtgagaagccaatgagatcctgtatcaaatgagaataacatgcatggagctgcatccactgcccagcagctatgcccatttgccagccggtgactcacttctacatacaagtagtggtgacatagtgcaaatctgtgcctgaggataaatcacttatcagatgccacagccctttggggcaccaagtacaatgcatgccagaccacaggtccccaaataatacaacacagagcagaggcagaggtggccttgggagatccataaggtggatcactagtggtgaccagggaggagtctgtggaggag

SEQ ID NO: 142724 - DNA, 608 bp, Homo Sapiens
aaccagtgatatactttaacagtcttgatatctggctgctatgtcttgtagtttggtgataaatgattatagaaagattatcttcatggtaaaaacacaatgtattcagaatgtagtttataaagataggaggctccatagataagatggagagactttatgcatagtgtttcctatagcaacgataagctttattcctctttctctaagatagtaggtaatacaaacaagcttaaataatttaaagcaagcccctctttcagtaattttatttttctgtcacttaaaatgatactggtctgatcagtagtggaatcacacctgggaatagccactgctttccagcttaggcaacatagcaagaccctgtctcttaaagttttaaaacaaattattatacatgtaaaggttagtacattttaaaagtgcctggaacaaagtagggtacataatacctaatattaactacagtcatcaaaatttagaaatgcatattataaaagtgtaagaaaaatgaaaaagatgaacttccttttttgttaggtgagcaagttaaaagtcctatttcctgtaatctaagcttgttgatttggggtcatatttataca

SEQ ID NO: 142725 - DNA, 624 bp, Homo Sapiens
ttttttttgtgaccaaagccaaaggctaaacctggctgcattttattggatgggtgatggaagtgggtgggagtactatggtaaaggagggatatatgggtgggagccaccaacaaaagtcccccatccccctcccccaacagaaaggagagagacaaccctttcccctcaggtgatctggaattccagggcctctgccagctttgcaggaggtgcacagaagctggatgcttttggtctggtggccatgagctagactctgttgcctttggttgcttttcactccacagcaaacccgcaggtctcctccacggctgtcagcagcttctcgtagagcttctcataggactcatatggtggaatgtcgatccggttaaagcaggtatgggccttcggaaggttgtctgtgttcgcgtctatcaggtggatggtgaacagccggggccctgccgcgccttgcaaagccttgaagccttggagcgggactcgcgtggacccagtcacaaacttcaggagcctggccttcctttcttcatcgaacgtcttcaccgcttggcagaaaccaccgcacgatgttgctgtcggccacacagtgcttcagccggtgttcgacttccagtcgtc

SEQ ID NO: 142726 - DNA, 366 bp, Homo Sapiens
ggctcccactggtttgctttcactccacagcaaaccctgcaggttcctccatggctgtcagcagctttctcgtagagcttctcataggactcatatggtggaatgtcgatccggttaaagctgaaaaaggacaaaagagagtcaccgtgtgggcagtccagccctaggaccaacctcaaggccaaggacaggcagtgagaagtatatgtgggaggggagaggaatggggggtggggcagggttggtgatgagttctccatgtcccctgtgtttttctgcttctaatacaaagatttgtaattggtttttgcttttgggtagagacaggatctcgctaggttgcccaggctgctctcaaagtcctgg

SEQ ID NO: 142727 - DNA, 533 bp, Homo Sapiens
agcttcctgaagctgcctcagaagcagaagccactatgcttcctgtacagcttgcagaaccatgagccaattaaaccccttttctttataaattactcagtctccagtatttatagcaatgtgaaaacagataatatgactatcaatatacaaaagtgaattgcatttctttccagcagaaatgaactgttagaaaatgatttttgtaacataccatttactatattcctttaaaaatataaattaggtaacttaacaaaaggtatagaagacctctgtagaaaattacaaaactttattgacaggcatttaaaaatgtctaattttaaaattgccatgttcaatgattaaaagactcgagttaagatggcagttctccactacacaatgaaggtaattgcaatacaaatcccaaatgagtttttcaaggagcttgacaaactgattctaaagtctgtatgacaaaaagcagaattcaggatactccagaagcagatttaagatagaattgacttgtagatattcgtaacagc

SEQ ID NO: 142728 - DNA, 959 bp, Homo Sapiens
ttttaaagtattaataaagggttttaatttgctacaaatattttattttgatatgtaaaaaatatgagtttggcaggatgtcagagttcacaataatggaatggaggatcattttgcttaaagagactttttaaacctgtttggattttagatcttcccttcatagaataaggaaaaagtcttcacggtttgtcatagttgacacctttctagcctgtaataaagtgactgagaatgaaaggtgtaatatataagaacagaagatcctgctaagaataccagtaaccaagcacactgaatctttgaggacctttctcttagaaaaacctgatttacaatgcttttgtttgcatacataaaagttgttagcagcccaattccaagagaaattcctgttatatgctgcataacaagtttgacgctcagaatcaaaatatatggaagacttttttgcagccacttgaagagatagcggaattctgagaaggagctactaccatgatctccagattctgcggcagtatcatcagtcagccttgcttcactgtgggagtgaccccgtaagcgactgtgtacacatccatgggcacagctatggacacctgaccttatatttctggagcttgcattttctgcacattctttaggtatggagtttatctggatatgaacatctccagaatgagggcaagaaccctctcctgtcaatcttgtgtggacacactgaggggttgaggcatcctcactgcttccagttcctggaggactgtgcagttggctacgattggcttgcatggcccttaaatactttttctctgacccagatgtctttgcttcaggcctctgtctcctctcatgaccagaagcggacggaggtgtcgggagcgacagcaagaacagcggcatacaccgcctccagcccttcagtcgggtccatcaaccgcaaaccccgcaagctc

SEQ ID NO: 142729 - DNA, 567 bp, Homo Sapiens
ctcccctcttcatccactttaatatagctgttctgaaattctggtgcattcattcggttctttgaaatgagaatgtggtgcttaatttttgtgacgttgtcgagagaggttgggcctgatgggagcaacactcatcatcaccaagtcaaactttgttggagtgttggtttttcttgtgatattagcagaaatgatctcatgctagccatgtggatgtgtgtgtggtgaatggggggcttcatcaggacacacagaggggaatgtggccacacggtggatgaccaccaagccctgagatgaacaggtatttactgagcagttgtattcagatatgggtcttcatgaatcatgtttaacaatcagatgaccgctataggcaagttcctgagcttccgggtgccttgagtaagagctgagaaccggcctgctgggtgtttactgtatctgtttggaagcactggcggagggtcgttgtaagatgtcctgagcatttatgtggtctggttttaactgtaaatagtgaaagatttttttaagcacttttgcctagacttaaacagcaacttg

SEQ ID NO: 142730 - DNA, 484 bp, Homo Sapiens
tttcacgtggaaagggattcagtttattctctggctccaaggaacaaacttgatattactgaggaagttatagacatggattttagcttaatgcagatgctcctttacttacaacgggcttcatcccaataaactcatcgtaagttgaaaatattgtaagttgaaaatgcacttaacatatctaagctcccaaagatcacagtttagcctagccttcctcaaatattctcagaacatttacattaacctatagttgggcaaaagcatctaacacaaagcctattttaaaaatagaaggttggtcttcatatgttgctagcctggaaaagatcaaaattcaaaatttgaaatacagtttctatggaatgcatattgcttttgcaccactgtaaaatcaaaaagttgtaagtctaacagtaagtcagggactgtttgtataagaaggcttaatagttgggtcagtgatagccacaagggagcaggc

SEQ ID NO: 142731 - DNA, 341 bp, Homo Sapiens
  misc_feature (129)..(164): n is a, c, g, or t
tttagagacaaagcctagtttattactcacagcaatagcagtagctacagtatcagcatttgcaccagattcccaattcccatagaaaaataagaaggggggcagatgacacctgcaagcacgcacgannnnnnnnnnnnnnnnnnnnnnnnnnnnnnnnnnnngggttgtgttacaaaaacgaatccccaacatgaatcttttataatggtcagttaagtcggccttacctttgccccagcagaagttattatcatgtttaagagcaaacaaacctgctcatgctatagagggagacactatcatcttccaaagcagtttacttgaaaatctaatccagc

SEQ ID NO: 142732 - DNA, 903 bp, Homo Sapiens
tttttactttaattgcaggatatttattaagaagtgccttttgccaaacatttgttcaaagagagagagaagcggaattgggagaaaatgagttataatgtaggtccaacgacagccttggccaaccccacagggagctctggagttaaaacggccctcggagatgtcctcagatgggcaagagaacaactttgtatctccacactgatcaatccttggctatgggccactccacaaaaaagtgtgaccttaggtgaagtggttttctacagctatgccaattcctgaaaagggctgacagctgcaggctgcctgctaacatcacacccagcaagtggggagcaagccgttctttgaagggggggatctgggctgcacatcatactactgccacatgtaacacatcaaatcatctcttttggagagttgcactaaacattcacatacgaatggctttgagaatctggcactgaagcaaatttctaatttaatttttctcctgacatcagttcatatcctatggaactagttttccacagaacataattcgataaacgtctccctaatcttacagtgccttgcaggctgttaaaagaactgcatatagatggtttgctctgggcttgcctgcccttcaacagggtctattggttctgcctgagaacgttggtgttgctatattagttaaggacctgctatacaatggcatgtatgtactgtgatgaaattaaccatcacaccttcataagggtcagatgaatgaatatgtgatggatatactgtgatgaatatgtcatgaaatagtgacaattcactaaggccaccaagaatgagcctgtgagaaggtaccagtatcactaagtgcagtagtggctttactctttagaccagggctgatggtaa

SEQ ID NO: 142733 - DNA, 482 bp, Homo Sapiens
ttttatattcaagatagttttaatattaacttttgtgaattagaaatatcactcttaaatgatgaaaattactagtgaagtaactattttccccaattgcagaattacaatatttatacatataatacagagttgattgcattggaaacaacagtttattttacgtaaaataaacgtcaacgggtaaaaagggcatcttcacgccgcacctcagagggccatgagtccttacacccatctgcaaagtaactttccaccagcattcaactatttttaagtgcaaacaattttttaaaatctgtgattgcagcgtctgtcttcctgaattacattacgtcagaaagtaacagttttctctatgagtgcattcaaggttgtcttctgaccacctaaggtatagaaaaatcagtgcaaaaacagtgaagcactataacagctgaatttcaggggatttcttgtccaagaaacattttattttacac

SEQ ID NO: 142734 - DNA, 351 bp, Homo Sapiens
tttgcctctgaacaggttttcctcctcctcttaagtaatccagagctcagttcctttattgtctctttcattcctgatctgctcatttcctactgaaagctgttctggggtcagccgcactgggtttggaatctgtgtgctattagattcttgatgaatttttttggcccaattcttatttgggtaacacatttgatcactccacagatgctggatgtggtgctggaaatgtttttgaaatgaaccatggagtcaaatatacaggaaggagctggggcagagcaccctttttcttgaaaagctatccttttggggactctttttgacataagaataaaaatagcacttctc

SEQ ID NO: 142735 - DNA, 638 bp, Homo Sapiens
agtctggactggctgaaagatctgcattcgtaggactctaatgttggtcttgctgtcctgaagcagttgctgagctgtaccatggagtttccgatcctttgaagatccatttgaatacatctgtatcatattctctgcaccttgttttactttaagttctatatccaattgtttttgtagggccttcaatctattgttgctagtagaacaacgagggtcattatttggagtatctggagtccttgggcaatctgtaatatcttctggatctgatacaacaatatgtgcatttaattcctgcagcttgtgatgtagttcttctaattttttatttgattttttcaaaatgttgtctacataagccaaactttttttatctgttgtgactttcctcagattttcagctccttctttgattttcagttctttccttatttctctcttaattcgatccttgatatcatccaatttctgctgcaccattgtatctgaaaagtctaatttttgaacagcactcacattctcagaaaacggaagacttcgggaatccccctgcagttccgtgagcagaatctccccccgttcggggttggacgccattgcgctccggtatggactccgcacctggacgcggccgc

SEQ ID NO: 142736 - DNA, 473 bp, Homo Sapiens
aattccatgaaccaattggacttttctcccacctgtaatataaataaaatatgtactgtttcatactgaattttttcaatgcattggggttcaacataaaaggcacaaataaataaaaatatcattaaataaacggaaattacaatttcaagtttcatgtggagttgtatctcactgtttggttactttttccaatttaatttgacagacttagtaatagcacccaactgtttaactgaggtagatccacattgtaaagaaagctgggtcccctccattttatctctaaatttatgatacttttataaaaacaaaaatccatttaaatcatatgcagaagcgatgacaggtggtactacctgaagaaagcttagaacatgagcaggtttgcaaataagacctacgcccaaatcacactctccatcagccacacagaaatctcagactggaggggaaaaaagatagaaacatga

SEQ ID NO: 142737 - DNA, 561 bp, Homo Sapiens
  misc_feature (490)..(490): n is a, c, g, or t
ttttcttgttttctaacctcccagcttattcctggagagttaaaacacagttactagcactaaaaacattaaaagtgctgcgcgctggcctcaatgactggtacattggagaagctgtgcagcagcatccttttctgtggtgggcagggcaggagatgaaccataggagccaaaagtcagacaaacagaagaaggcacaccaagcctgaaccctccggacaacagcagagttaccagctgagggatgtccctggaggtttctgacccatgagaggccccctcaccctcctttaccctcctcctaccaccaagctctccggcagtcatggacttattcctccccgtttttactggacaccatgtttcaggccaatctggtcacctgtagtctggtggcatctctacccctactgtccagtaggtgggatgtggctgggatggacagtccagattctactaacaggcaactctgaacaaacaccctccctgnaaacaatattatatttgatggttagattctttagcaaacctattacattattcgatgtcagctaacctatt

SEQ ID NO: 142738 - DNA, 584 bp, Homo Sapiens
tgctatattatgtggctttattttctgggatacaggtctggcatttctttctttgatgtcctcttccataaggttctctgggagcaagccacgcccacaggctcagtctcccagcacccccatagtttctcctctgcctcagccggcacctctgtcgtctgcgttcacaagtcttccatttttccattatgtgacgcattctttgttttgttttctgttactgagttttgctcttccttcagtttcttcttaatatttttgcttctttttgatataataactaaaatgtagaaatgatgttattgagatagtaataagtgaggaataaaaatggagacaaaaggggtgagggaaaaagcctggaaaaatagaggtaccaacagtggaattttcagaggattcataatgaatgttatttgtctgacaaggatggtgaaaattaaattttaaaattattttcccatattttgtattcaagttgtataaatgcccagtaaaagaagaagaagaatgtagaaaatttataatccaatgtggtaaagagacattgggaaaatgttttctacaggttatgacaaagtcct

SEQ ID NO: 142739 - DNA, 341 bp, Homo Sapiens
ttttttttgagcagttaaatttttaataagggttagatttggtacactctctcaagaggggaaaggatgattacactttcattttgcaaactgtcttaaaagcctttccaatgagtgccgctttactgttgtcacctcctctgacctcagcagcaagcaaacagttatggcatgattccacccagtaggaagggggtggagattaccactgaaatagtgcagtgtcagttgcagttgctggtaaaaggaagacgtccacatctggtatcttgattttttagttttcagtctgatcccaaagcttcgtgttatgacatttgtaacatctgctacaaatactg

SEQ ID NO: 142740 - DNA, 454 bp, Homo Sapiens
ttttattcaaatagttttaagttattattaaagaatttggaaacttaccaaaattttgagaagttaaaggtctaaagggggaacatcaggttgttgttaccatttgtcaaactattttttctgatacagcaacatggtcatgagatcacagttatcgtaacatgataacaaaccaatataacggtcatcaggtgaaaattcataaaagattacccgaaaaggactaactttccccatcattagggctggatatagtctctagccataagcaaacattttgctctccctagtctcttgcattggtcccagcaaaagaccacaatgaggggccactctgcagatggctttaagctgagcctcctcactcactaggaatttcacacaagaacttcagacgagcctgatgtcatgttttatgatcacatcagtcttgctaccgctgactcgggcactg

SEQ ID NO: 142741 - DNA, 572 bp, Homo Sapiens
  misc_feature (324)..(399): n is a, c, g, or t
  misc_feature (528)..(528): n is a, c, g, or t
tttccattttctatctttaatatgtaattgataaaacaaacataaagttgtaaagatctgtgttatcacatagtaatacaagagttttttaaatttttgtcatattcatttgaaaaattccaaattccaaatggtcaaactccattatatctaatagagagtgacaaaattttctgatgaagtcactgttttgctaccaagattcaagctgcaccagagttttcttcccccattccctgtgctgtccacagttctttataaatggcagagactcataataaaagtaggtattaggaactgctgtcctctaaggtagtattacannnnnnnnnnnnnnnnnnnnnnnnnnnnnnnnnnnnnnnnnnnnnnnnnnnnnnnnnnnnnnnnnnnnnnnnnnnngaaagaagatacaaattaccaacattagggatgaaagagggacattactgtagctcttacagaaattaaaagaacagaaaataggggaatattgtgaacaactttatgctaaccagtttaacaacatanatgaaatatacaaatttttttaaagattcgcattaccaacacag

SEQ ID NO: 142742 - DNA, 457 bp, Homo Sapiens
ttttatcatcttttcaatgtactcctggggaggaaggggtatagtcgtatgcgcccaaccttcatacatgtaatcctgatccctggacacagtgggtgagcacctaagtgaggccaagaataatggagagttttgcagtcaggcctgagaaagagaagtgactctctgtgtgatagactgtgaagaataaagctccagaacttttagggtgggggacagcaccatgtttccaactgtgtgcactagagcagagctgagaaacactgagagagaaacctttaagaaggcctagttacatttcatctctgctttcctggggacacccctgtatcattaaaataaatgtcttgcttatactaactcttgtgaatttctgtcacttacaagtaagaaggccaaaaatcacacgtttggcctccctgaaacctattactcaagtaaggttggctgttgggga

SEQ ID NO: 142743 - DNA, 567 bp, Homo Sapiens
gtgagaataaggttggtttttaccaaatatttgttcctccttgacaaaagtagctctgtgtggataatatgattttattactacagttccagtcacttggttatatttatcttagcatgagcctttcacaccaagatttctatattttgtaacataggtgaaatatttaaaacatcaaaaactgtaaatctagatttttaaaaaatccaactgcaatgtcttttcctttgattgagatgatttgtgtaaactcaccagtcttgctttggagtgagcagaagagaatgactattttacgtggagcatcattgtgtgactgttgacctggacagtcccaagggctatgcagatggactccattggcacagggaggtttgacctcttccctgctattatccctcctcccaactgtacagatttgtttgttgtagtttatgtacttcttgatactgtcaaaaaattatctggaaatggttttattttgtgaagtgaacaatactttgtaatttatgatagtgtaaatggaaggcaaagcatcacatgtattaaattcttctgtctattaaa

SEQ ID NO: 142744 - DNA, 438 bp, Homo Sapiens
tttagaagggagactagagttttattactactcaaactaacctccccgaaaatttggaggctagggtttttcaaagatagtttggcaagcagggggctagggaatgggtgctgctgattggttgagaaagcaatcatagggatagggaaaatggccttcctgaagctgagtccacttctgagtagtggccataggaccagttgagtcaagagtcatggatccagtggggccatccagtcatcagaaatgcaaaagcctgtatgtaccttttatcttttgggttattaacatagcatggctacggtcttctagacatataaccatcctagaattctcggaaggtaattctttggcagaagaaaacatgcgccctaggagtatgtttagatatgcccattccttgactgatgtccatacagtcatgctctcccaacaaga

SEQ ID NO: 142745 - DNA, 461 bp, Homo Sapiens
ttttgtgagtttaagagagcgtaagtttaataggtgaaagaaagaatagctccctgctagagagaggggtcctagagaaataagttgctggatctgcagtgaaatgcaggggtttttataggtgcctggtgaggaggcagtttctgatttacatagggtgcaaaagattgattagaccaggtgtgcatagacactaaaaactggttaggaatagctgtgccatttgcatagggtatgaaaagctggtcacccctaaccaaattttattatgcaggtgggtcctctgcctggcctgtgccacactgcccattcctttactgtacatgtggtaacaaacaaaaaaagggaagatggagcctctatgttggacatgcctggcccacaggtagcccttttctattgacacagctgctgacattcccctgtgcaagattccagctcgcttatctatgtttgcagct

SEQ ID NO: 142746 - DNA, 650 bp, Homo Sapiens
  misc_feature (640)..(640): n is a, c, g, or t
tttttttgcatccaaaatattttaatagtaaagaataaagaatgaccctcaataatgcattcttagcattcaaaggctaactttacaaatttgaaaacttagtaaaaacagttttcatgaatacaagaaaaagtaacaacaatatataatcatctaattatctgaatacaatgacaggtttccagacaatatgtagttaacatttaggctaaaaatataaagaaacacaaatcattcatgcaagtattttttaagtctcaacttccagataaaatttggctctggcaaataagaacaaaatattaactataagtttcacgttattaggctccttaactacactgattctctgaaattaaacaaataacttttcagcttcttttaggtttgggggtctatccattttagcaattacagcccaacggtcctcccgcatttttcttatagctccaaacttcagtgtagatccaggggttgttagagatgaaggggccttttttggtgttttgacacaaagatgagaagctggtggattattgttcctatacagtgttttcaatgtctcttcttctgaaaccatgctcaaaagatcagtagtttctgaactatctgaattaatatcaaatttcaaaggccattnttctcttttt

SEQ ID NO: 142747 - DNA, 406 bp, Homo Sapiens
ttttcagttaatcttgttgcttttattttcttaagacaagttatataggtgttgtttatataatgcacacaacatagaaatgtttgaaatgcctgaagaaattctggatttagagtcttctctctcaggactggcttccagacatccactcacagcatgtctcctcgtgtccaggatctctgggagatactcagtcccttccatcaggaacacatgtggctgcccatagctcagtggcctatcaacttttgtttgatgcatcggtgttacgggaaagctccttggcagcgagggcctggctctttatcgccgtgtgtccccgccccacgtgggtcccatgcttagcccacggcgggtgtttgaaaagcacggaatgtatatggcgggacagggcgcgctgcggata

SEQ ID NO: 142748 - DNA, 356 bp, Homo Sapiens
gattttaagtcctttaatttattttgaatatcagtaattacattttcaaaatatgatataatttaaaggtatcagtaccataaatctgtatcttacagtaggaaatataagagtaaacagcctatatacactttgtactactgacacaattttatgtatacaactctatacagtatctactaatctccagaaaacccacctacaatccatctgtctggactgtgggcaagtggttctttctgagtcagggtctcactctgtcacccaggttgcactgcagtagtgcaatcatggctcactgtagccttgacctcctgggctcaagtaatcctcccatctttgcctcctgagtagct

SEQ ID NO: 142749 - DNA, 540 bp, Homo Sapiens
catgtttttatcactttctccaaagcatgttaattattcttcattaaatttatcttgccaaaataaaatgaattctgaattaatatttttacgttccacttgacagtattttggttggttttgtctccatgtctggaaaccaaaattcacaagttacaaactatcataaactaacatttcctagagattatcctttcattcataaaaaaggtttagtcctctaacttaaggacttaaaaataccacaaaatcttttataaatattttcactttttaacacagtagagtagtcgtctggggtaaatgtaattattacggcaggattttccagacatggagaataagacacacagctgttttagtgaaacccactgactcaatgaaatatgtaaaaactctaaaaattcatgcaaacatttttcatgagtaagaacacaacactcaacttgtatgaccaacttccacaacccaaatgaagcagtgaagaaaaggtcatctaagtttgtaaaaacagagatatcctaaggataacattacagt

SEQ ID NO: 142750 - DNA, 636 bp, Homo Sapiens
ttttttccaaagagtaaatattttaattttttcttcaagagtattcttattttcatattatttaaatagtcacattaacaaggtacatttccacaaaaatatttgtacagcatcagtattcttattcacatccataattgccataattaggaaaaattaggaaacttagcaaagacagtcaatacacatgttcttttacttgtggtgagataaattcaatgtctaaaataagtcaggatggatcaacataaaagctgaactagacacccctaccaaatttctcaatgaaaaagcaaatagccctgggtgaccagcaagttatacaaacaatgcaagacaaatccaactagaaatcggaagctgccatttcgtatacacaaaatacaagtgaaacagcgaagtaaacatatttttagagggaggtgctgctacccgggacattagagatataactgagccagctgagatgacatttacaatctcttgaaatgcagcagatggcactctggtgcttcctatgaagcaacatgcttgaaatcaagggccaacaattgttgtaggaaagcaaaatatacctctaacacctacgtttaccaaaaaagctgacatctcaaactctgagttgttgagactcaa

SEQ ID NO: 142751 - DNA, 1132 bp, Homo Sapiens
  misc_feature (1014)..(1048): n is a, c, g, or t
  misc_feature (1051)..(1092): n is a, c, g, or t
ttttttcccttaagttacatttaataacagtgacaatgaccaacattgagcagttgcctcgtgctccggtctcagcactggcttattaacatactcttaccactcagagagggacactgaggagaagagaaatggtaaacatcataagaataaaatgagaggtaagaataaaatgagagtcagaagcaaatgggaggaactctgagtcaggaatttggtaaagatcgggggaaacagagtgacctgagataatggggggttcatctttggggaactttaggagattcttggtgcctggagacagcagggcaaagaggaaggaagaacctggatgccctagcgagccaggctccggcattctatccccacatccccgtggacgttttattagggtccactggccaaatgacaagctccaaagatcaggtaatggtgggtgttccgtggacttcggggtcccagaaccttctttatgttccttcttcatctgtaaaatagcccagtgaaatttgccattgactccccaggaagatcttgagtatgatcattctgtgaccctggcagactgggtgagttctccttctatgttcttcactgtgtcagctcgaaagagtgtcatagacgttcagatctttgcttctgaagctggtttatttctggtgctccaaacacaggactctcattaaaatccaccagtatatgcacagatgccttgtgattttccagctttcatggattttaaggccagatgagaaacatttacaacatccagttgttccttccattttcctccttcacaaatgctctaggtttcaggcggcccctttgtgtggattctgggggccttctgtacacacagcactgttgagggtctcaggcctcactgctccgaacaggaaagactcgtgattagcacagggccctgtcaaggtgaacatatccttctcagtgcaggcctggctgcccggccgtaatggccgaattcccgggcatatgtccggtaccgtcgactgnnnnnnnnnnnnnnnnnnnnnnnnnnnnnnnnnnncgnnnnnnnnnnnnnnnnnnnnnnnnnnnnnnnnnnnnnnnnnnacgaacagcgctgagcgccctataggatctatacattttt

SEQ ID NO: 142752 - DNA, 423 bp, Homo Sapiens
tttggttcaagtttgacttttatgctctgttattctcacttcaaagatgatgagactgaaactcaaagaaagaagacctgccttgggttacatatcagtttagtgatggaactctaggccagcgcttttactgatagtgatcttcactctctgctcctctttgactggggaggagccttgtgcttagctgtactattctacatcttgatacatagacttttcattttgtgggagagtagcagcaagtccttggaagttgttcattttgcagttagctaaggtagaggggctggtaatgttcagtttttctgtaccattctcctgatatgttggctcaagataccagaatctatcttggaatgttgtgtattacccattagttaccaatcttctgagagagactttcacactggggcaaacttc

SEQ ID NO: 142753 - DNA, 556 bp, Homo Sapiens
cggtgcattttggttccaacgattaactgctgaagtactgatcgagttctgcatttcttcaatgaggaactacaggctgatcttctgccataatctcaaacagccataaatgacaaaagaatgcttgctcagtgagggtagctggtgcagaagccattttttaaacttaggtatttaagtactgaaagaaaagacagctttgatttctggctgcaaaaaagatatgaggaagagctcctccccttccttgagtaactgcaactccgttcttgctaacaaaatatttggaattccacttgatgagctgcagcagggaggacatccagacaatgaggttccattcatagtccgccacgttgtggactatattgaggaacatggaggtctggagcaacaaggactttttcaagtcaatggaaatgctgagacagtggagtggcttcggcagagatacgacagcggagaagaggtggatttggttaatgaagcagatgttccctcagctattagccttcttagattttttcttcaagaacttcctgaacctgttatcccc

SEQ ID NO: 142754 - DNA, 614 bp, Homo Sapiens
ctacaataaaacccataccccatttatttctttacgtgggaaagggtatttgtaaaagcaagacaaactccaaggttggtaatgaacaaattgacaccagctggtatatttcccatcaccctagcaaaaacaatttctttcctcactgcaggcgaagaacaagctaatcacagaaattacgtctactaaaattcctaagtttacacaaataaggtccactggatcaagtgtatacccactggatcaagaatgtcacaacatgactaggaaacaatgcagccaacttaaaagaaaaaattaacttaaggatagcaaaatgccatacatttacatagtctcagacaagcaacatccattcttcaatgtatctggtgccagctaagaactataaaacctcaagttaaatcaaatagcagctacaggggcaagttccaaaatctctatggatttatagagcacgagatagttaccattttgaaaacttacctttcagtacttaaatacctaagtttaaaaaatggcttctgcaccagctaccctcactgagcaagcattcttttgtcatttatggctgtttgagattatggcagaagatcagcctgtagttcctcatt

SEQ ID NO: 142755 - DNA, 1518 bp, Homo Sapiens
ttttttttgcttttgcaaatgtttactgaaataacgatgctgctgtggctcccaaaccccaaagtaggcctggctggacaggccttggtgccgaatttctcacctgtccttgctggggacaggtttgtgcctcgacacgaagacgaacttgagctggaagtggatgaccctctgctagtggagctccaggctgaagactactggtacgaggcctacaacatggcgcactggtgcccggggtgtctttcctgcctattacgccatcgaggtcaccaaggagcccgagcacatggcagccctggccaaaaacagtgactgggtggaccagttccgggtgaagttcctgggctcagtccaggttccctatcacaagggcaatgacgtcctctgtgctgctatgcaaaagattgccaccacccgccggctcaccgtgcactttaacccgccctccagctgtgtcctggagatcagcgtgcggggtgtgaagataggcgtcaaggccgatgactcccaggaggccaaggggaataaatgtagccactttttccagttaaaaaacatctctttctgcggatatcatccaaagaacaacaagtactttgggttcatcaccaagcaccccgccgaccaccggtttgcctgccacgtctttgtgtctgaagactccaccaaagccctggcagagtccgtggggagagcattccagcagttctacaagcagtttgtggagtacacctgccccacagaagatatctacctggagctagctgtgcagccccggcctctgcgtccccccagccctcaggccagtgccaggacagctggctgctgacaggctgtggccctgcttgaggaggggcacctgccaccgcagaggacaaggaagtgggggccgctggcccaggttaggggagggtggggcaatggggagaggcaaatgcagtttattgtaatatatgggattagattcatctatggagggcagagtgggctgcctggggattgggagggacagggcttggggagcaggtttttggcagagaaggatgtccgttccaggagcacacggccctgccccattctgggccttacctcccctgccagggctcgggcgctgtggctcctgccttgatgaagcccgtgtcctgccttgatgaagcctgtgccacctgcaagtgcccgccctgcccctgccccaacccccaccgaagagccctgagctcaggctgagcccagccacctcccaaggactttccagtgaggaaatggcaacacgtggaggtgaagtccctgttctcagctccgtcatctgcggggcttctgggtggctcctgccactgacctcaccggcatgctggcctgtggcaggcctaggacctcaggcggggaggaggagctgccgcaaggccctgtcccagcagaagagggaggcttcctgactgacacaggccagccccatcttggtcctgtcaccctggccccaactattaaagtgccatttcctgtctggactgcaaa

SEQ ID NO: 142756 - DNA, 342 bp, Homo Sapiens
gagtatcctaaaaataacttttgttgttctctttggttgcttttgtaagacacaactccatggatcatatatttttctcttaattgccaagttcatagaactgtgaatggcagttttcagaaattattacgaagtaaccgcatagaaagtcctttggtaatacaggaatccataagacatgtttttttcagagaatcaaaaaccaaaaacggtaaggcactattttagagcatgctgttaagaagcctcttgtgtctctctcttgtgtttttataaataggtatctagaagagcagaagacagagaatggaaaagataaggaacagacacaaacaaataccg

SEQ ID NO: 142757 - DNA, 376 bp, Homo Sapiens
tttaaagtgttcctctgcttgacctggaggagccagaagcttgtttataccttcagtattcaagggacagtcacaggcctgttttgaccttttcctgagaattagctgaaacttccctctgaagtcaagtagtgaatctgttataggtctaaggaaggtcctcttcatctgggagttcttggcattactttggtccttctttcagaaacttggcaagttggaaagtgcaaagacagtataagggcccattttcaggccaggtccagcatgaaacagagtgaacaaaattagttccacacattagggaagagccaagtcagacgaatatccaatcatttgcagtagtagaggcaggtgaagggtccccagatctggg

SEQ ID NO: 142758 - DNA, 377 bp, Homo Sapiens
  misc_feature (115)..(115): n is a, c, g, or t
cagttctcttgtggggagggactttgtcagtcattttgcatcttaagctagactaacctttttgttgttgttttcctaaaaccataggtgcaagctttgccgctgggaagtcatnattgaattaagcacttttgaaaatgtcactgtttgtgacacacaatgttctctacagaaaacttcttctatcttatgtcattttagcagtagatgtagctgcctgccaccaggtgcaatatgtcatttgcatcagccttttcagttaaggaaattaaaacttggcatgcattagttcatatgtatgaggttggctgtgtccccaaacagcaattgcttgtacaagatagaagtttgcttctcagctgggcatggtggctcat

SEQ ID NO: 142759 - DNA, 1169 bp, Homo Sapiens
  misc_feature (1053)..(1087): n is a, c, g, or t
atcgtctattcttcggtgatccgtcgtgttatgctggacaacaggtgtcgcagggtatgttctccctcttatcacgaggtttgcgtgggagaccaaagtgtgaacgaacagggtgatgcgtaagtgagcgaaacactctccgggggcaaatggaaggttgaaaggtgcaagcccatttgtgtagtccgcccacctgaaaaggggaaatcggtgcaaagccacggtgtccatagccggagtttcttggtgctcgtggtcaatgcattctgcccttgtgaggaatggaggtctcactggttataccacttgttgaccaacccattgcttgtgataagtgcaactcgtcaagtcaagagcccagtggacccaatgcctggaagtgtttcattggtaatacaagagtgttttggacttaaaagattgggaatcggtgagacgcgtcgaataactttgggcatgtcccctgttgtcaacctatgtccgagaattgtaaacccctagaagaagagcttcgaatgcatgccactgctatgcacattgtctgctggcctgagactgccaaggtagctaccaaattagttctgggagaaattgcagcgtaaaattgaagcaaactgctgcctctccactgcgatagaattcaaagagctggtgacagacaggttctagccactccctttgtggctcctggataactttatagagaagattggaaacttaaagaactcttgtctttcaaatttgtggcataatttggtaaagatgtttctggtaatgtcttaaactctgacaaccattccgtccacgaacccctttctctgaagtaaacatttttccacatctgttctaaaccttcaaccaggtcggctgccggagctccacctgcaggacctcgactcgtgaggctctcagcgacagcgacggaggctgctctgcttcctcccgagtagcagcaccacctgctccccttcttcctagcagaacgggtcccggcttctctcccccggccgtaatggccgaattcccgggcatatgtccggtaccgtcgactgnnnnnnnnnnnnnnnnnnnnnnnnnnnnnnnnnnncggccgcttcctcgctactagctcgctgcgctcgtcgttcgctgaaagcgaggccatatgaggtagataggttagttttttg

SEQ ID NO: 142760 - DNA, 702 bp, Homo Sapiens
tttgtatgaaaaaacaaacactagctttattaaaatgaaaagcagttgcacaggttatatatttgattttgtcaaaaaagattttgttaactccattaaatacaaaccaaattgtaaacccctagaagaagagcttcaatgcatccactgctatgcacatttctgctggctgagactgcaaggtagcaccaaattagttctgggagaaattgcagcgtaaattgaagcaactgctcctctccactgcgatagaattcaaagagctggtgacagacaggttctagcaactcactttgtggctcctggataactttatagagagatgaaactaaagaactcttgtctttcaaatttgtggcataatttggtaaagatgtttctggtaatgtcttaaactctgacaaccattcctccacaacccctttctctgaagtaaacatttttccacatctgttctaaaccttcaaccagggcggctgccggagctccacctgcaggacctcgactcgtgaggctctcagcgacagcgacggaggctgctctgcttcctcccgagtagcagcaccacctgctccccttcttcctagcagaacgggtcccggtgagccatcttccccctcctctcactgactgacaacccagccgggagagccaccactgccgccctcgtgccgaatttaaacccagcctcgtacctagccg

SEQ ID NO: 142761 - DNA, 408 bp, Homo Sapiens
ttttagagtatctgagattattgcagactttatagaaaactgctcaagggagatccagattttctgggtatggggagggcaggcaggcctcaagccaatatattaaaggaaggtgacttcctgtgtgcagacgcagcacaggccagccattctgcctgatctagagggtggggagtcagggaagaggggggtcctctcccccactcaccaattgtgctttgggatcatggagaaggcaaggtgctgagcttctgaccctgaaccaggagggcttgtgcctgaggcaggaggaaagacctacttctctttcagaagatacacggggtgaggtggtggtggtagcggtggtggcaaggaatccccaagggcgaagagccacaggggtgggagagagcatagagaaatcga

SEQ ID NO: 142762 - DNA, 466 bp, Homo Sapiens
cttatttcagagcagtacatgcgttcgtctcacgaaagctcttacaactaaaacaacagcaccaacaaaccaggatcaaattaatcgtgcattttccaggattccatgttggacttctcaggtgctttggagatcaggaaataatcatgctgttgcagcagtatggttttgtgtctggattttattcatacaggcatgtgtttacaggcatgagaattctgtattgaaaagaaagtccttgtttttttctaacgtatctttctgttccatcaactgttaaaaccaaattgttaagaacattgagcttcttaggagagattacatgcagctacttaggaccacctcagcaaaatggagttgcctgggtagatagcagcagcagctcaccagccccacgctgccaggctgctggctgctgtccaccaggcagctgtggaacctccatgttctgcctaggtgttgtggc

SEQ ID NO: 142763 - DNA, 417 bp, Homo Sapiens
tttatctttgtaatagaatggtttatattcctttgggtgtatacacagtaatgggatttctggatcaaatgatatttctgcttctaggtctttgaggaatcactacaccatcttccacaatggttgaattaatttacattccaagttttcaatgcattggcagatgaagcatggtaacctgggccaccttctctgatattccgatttaggaggtctgacatggaggccaccataatctcccaactgatgctgatgctgctagcacatatggcaaatactgattagcaagttatccatgcatttcatagctttcctcattgggcagtaatccagaggctaagatgctcatctgagatttaagatatccagatatttagcttgtagaacaactgctgctgacaagtacccaagagcata

SEQ ID NO: 142764 - DNA, 386 bp, Homo Sapiens
tttctttgtaatagaatggtttatattcctttgggtgtatacacagtaatgggatttctggatcaaatgatatttctgcttctaggtctttgaggaatcactacaccatcttccacaatggttgaattaatttacattccaagttttcaatgcattggcagatgaagcatggtaacctgggccaccttctctgatattccgatttaggaggtctgacatggaggccaccataatctcccaactgatgctgatgctgctagcacatatggcaaatactgattagcaagttatccatgcatttcatagctttcctcattgggcagtaatccagaggctaagacgctcatttgtagaacaactgctgctgacaagtacccaagagcata

SEQ ID NO: 142765 - DNA, 448 bp, Homo Sapiens
tttttcgtgagtacacaatagtcatcattttatttgaaggttttccacatggaagtaaaattaaacctgtctccaaaggcaaaactttcttcataaattagacttaaatttggggtcaaatttgaggaactgttttctaacaattaaatatactcaaggattaaagctgttttgcaaaacaggaaacatcctgacagaacagaggccagaaaagagtccggcaagaagaacataaggctaacactggcattcattgagggtttggcctgtatgtagatgatctctaaggtcccttttaaccctgtggctctacaagagggaactggattttgaaagctgaatctttatagtgaaaaacgtgttccttggtattaagctgtccaggctgctgaagtcgtgcacataggcagtgttttcttttgattagctcatccttgtctgatggaca

SEQ ID NO: 142766 - DNA, 451 bp, Homo Sapiens
ctccccgggccccgactcggcctccgactccccgctctcctccacctccaccggcttaatcttgcgcacctcacggggcttgggggacggccgggcagggaccactcggtgctgcgggggctgctgccctgcggggcatcgctctttctcgaccggggcattccccgacggggcggacggcggatgcggcgggggttggaacacccgggaccgcttgctgaccagcttcgagttgacctggggaacccctgcggccctggggagcccgggcccgcggtggaggccggtcctcgagtcggccttctcgaagacggcgctgagctggctgaccgtgggggacacggcgtcagcgtccagcttgtccagcgcctcggtgctgccgttgaagcgcaccacgacgtccagcttccggtcctgcaggccggcgcgctcctgcctcagcagccgccgc

SEQ ID NO: 142767 - DNA, 452 bp, Homo Sapiens
cctttttaaaatatatatttttaaaatatgtatcttttgtcatataaatcagagttgacaaatactacatgtgaatcaaagtttacaaatgcaaattcaagagaaaaaagatgaaaatacagtacgagtgcattgcaaatttcatttcttgtgccttatgaggaaaaattaatttcagtttcatcctccaaatagcctgctctgtaacaaaattgtaagatttcttaaactaaaatctaatagaaaccaattctttgatacagtccttagataacattagtcaaaagtgctacaaagtaaagaaaaatttggttttgcaatgcctccaagaaacaccaattacaggaatagtctctacatgttagatccccgtattctgtaaaggagtctcaggattatacagcaaactggagtcaggaatggacttaggaaaagaaacattcaataagggc

SEQ ID NO: 142768 - DNA, 835 bp, Homo Sapiens
  misc_feature (635)..(635): n is a, c, g, or t
  misc_feature (759)..(759): n is a, c, g, or t
ttttgacaactatttagattaattttattagaggctcagagatagagagctacatctgcttttgactttgctgctatttgaacaggtcacttccaccttgcaggttcttagattcttcatatgtcaaatgaaaaaatggcccagatgcacaaaagctctagcactcttgttctttctgtcctgcagggcacttgtgttagatagtagtcctcccactgagctttggccagtaaagagcaccaataacaacagtagaataatgaccagtgttcacagagttgttgcagtgtgcaagacattggggtgggtggtttttcttctgtttctgctcccctgtccatgaattttccccagtgaacactgctcaagccagccttgtgtatctgacgttgaccatcttgcttgcatgactgccaggagtgtgcatatttgctgctccacggatgcgtcccagttgggccaacttctgttcttggctgtttgaatatatcctggcagctcagaggtgtaatttctccaaatgccgcattcctgcacgtttttaagcccaggcagggggttcgggggtgcaaaggaaaagacaaactcttctcacccagggagcttccatagaaacaggccaagggcagtttagncctcgtgcccgaatttcttggtcctccgagggcaaaatttccctaatagttgaggttcgtatttaaaatttcggtaaatcatgttccaaaggcggttttcccggttgtgaaaatttggttaatnccggctccacaaattttccaccaccaacaataacgaaggcccggaaggccataaaaagttgttaaaaatccttgtg

SEQ ID NO: 142769 - DNA, 587 bp, Homo Sapiens
tttttactgtcatatcatttatttcttgccattagagatctggtagggaattctagcaagttggaagtagtgagcaaagttgaggcatctctacttcataatcaaaatttatcctttcaggatattcttgttaaacgttattaacatttcttaacatgtttcatttttttaaccttaaaaatataatatccacattttcaaaaagaagtacatccataactccaccatcttgatattttaattttacatatatcttccaatccttgtccaaatgtatgtttaaaaaatattttacatatttttcttctgtgcatattatttttgtttctgagtttccctgggaggattgtatttgccagatgagggctcaatttctgaatggctccgagaaccctaatttatgctgctgtagaaactgaccaaaatgggttggcatcccctgggcaggtatgtcctcaaatttagaaggctcaggttggaggctgaagcaggaagtgactatgagctgtacaataaagagcagagcccagtataagagaattaaagatagtttttacaaggaaacgatgtcggtgctattataagtt

SEQ ID NO: 142770 - DNA, 417 bp, Homo Sapiens
tttttcaggattttctctatttatcttaatttctccaccagctctcagatctgatggtcattaacatgcacatttaggataatctggagggcatttcagactgcagacaggctggccccaggttttgcctgggagggcggtctgaggccagcaggaatactgtaccggggctcaggccgtcacccgcagccagcatggagaacgctgtcctgacacaagtcactgcattcagggcactgatgaggctactaaaaggaataaaagacggtatcactatggggcccttgaggaaacagttctgcgaatcctccacgcctcattctgtcacgggagagagtctctgcacttctattttcagcaggccaacatttctctgtgttgcttgtgatgatcttatgaggggcctgctgaagaatg

SEQ ID NO: 142771 - DNA, 576 bp, Homo Sapiens
tttttttaacagggatatacataattcaatttttattatcaccagtctttatcaatttagctgttctcctattgttcaagaaatgttatttggacaagttttccatagggcaacttgacttcctctttattcatttaaaagttgttgtctccttcaaagatatttagaggttgatctggtgagccctggaagtctaaagtcattttgtggcttcagaggcaggaagaactcccaacagcgatgtgtcgctagcatcttcacaaccatggttgggggtgtcatctgaggttcttgtcccatgtgggtcctctctcttgaggcaggtctccatctcatggaataaattctcctcgagagaacccctccttctggttgaaactctgaggggcagatgtttttgtttttgaactcggcaccacgtgagaaatagaataaacagaaccaggagaaggagcccaaagatactggataaaataagtgctaaatgacctgaggaggcattcagtgatttcagcgactgtccagagcacctcacgccagcatcttccttgtgtccacagtcactctgtccccccc

SEQ ID NO: 142772 - DNA, 481 bp, Homo Sapiens
ttttcaattttaataatctactttatttaacccaatatatccaaaatagtaccatttcaacaaataattgataccgtgttatcagagctgagatatttcaccttcttctttcctacggagccgctgagacgcagcgtgtattgcacacctgtctgcactagccttttccaaggctcagtagccgtccttggctaatgaattagacgtcacacacctagatcttcccctaaaactgaaatcatttctctctgcagagaccctggggttcctggcccgtagagaggtgtccaagctgcagatgatgttcaggccttgggacaggtggctcaagcggtggggccctggagacagacaccaccgtcctcttgactggtgggttctgcgggctccgcatctcttcgtcctggctggggctcaggctggaggccaggtgcggtcagctgacatccattgtgagtcgctcatatcaaaatcctcgctg

SEQ ID NO: 142773 - DNA, 593 bp, Homo Sapiens
gcggccgcagcagggactccacagggacccaatcaatcatgcggcccaagttgaggaagcggaggcggctgaagccctcgaaggtgaaatccttaaccagcacctggcaggtggggttgacgaggtactcatcttcacagccccctgggttctcctcctcatagaaaatgtttgtacagccgaagaggctcaaggacaccagggtgtggctgaagctcctcagtgtctgcaggctcttggcggacagcttctcgcagttagtcaggtacagctccaccaggtcctgcttgcggatggcctccaggtcctggtcctgcaccaggtcctcacggaggtggatccgcgtgaggcgggtgctgcgggggtccgaaaagaggctgaagaagctctcgtgtggctcgaagttacaggcagcgttcaccagctccacatactcattgacgagccggtcacagatctcgctgggcaagaagatgtccggatgtagccgcagggtcttcttgtccagcaggtagcccagggtgccatccaggttgcgcaagcatgaagtcattacagagggccatcagcgactctggagtgtcggacgccat

SEQ ID NO: 142774 - DNA, 525 bp, Homo Sapiens
  misc_feature (40)..(41): n is a, c, g, or t
  misc_feature (106)..(106): n is a, c, g, or t
  misc_feature (130)..(130): n is a, c, g, or t
tcatcagcttcttgtgattcttggcttttggcccaggtcnntgccaatccgagtgatggatccagggactccttggaaaggtgatcggatcgggtttcagcttcanggagttctcaaaattacccttcangaatccgagctgaaactcaaggatttggtctcggcttgcgaatcctcctcctcggggtcgccctcgggcccgccagcctcgtcctcgccggcggccccgccgcgtaccgcagaccacgtccatttcgcccactgcacgggggacaggatctgccacgggctgaacgccatgagcgcggctcctccggctccagctcctaggggcaggggaatgggtggggagagcctttttccctttcaaaatggagggaaccggtgacaggcgccagcaagcgtttccagcagaggcgcggatgtggttaaacgagtgccgtcgggggccctggtggagcgcttcctcccgccggcagccggcgctgcgtcctcctcggcctcctcccctcacggtgcggccgc

SEQ ID NO: 142775 - DNA, 160 bp, Homo Sapiens
cttcatcaaagtgaaaattttcatcctgtttttcttcatacttttcagatagacaaattattgatcgctttattcgtactcactgtgacacttgccctggggcagacaacatacggatgagtattgccatctgtctggacacaaaaagtcccctcgtgcc

SEQ ID NO: 142776 - DNA, 535 bp, Homo Sapiens
  misc_feature (467)..(467): n is a, c, g, or t
tttgcttttccaattaaagtatattcatgatggcattgtacaactgagtgagcaccacaaagtggacgggaaggcaggaagtacggtcctgggtggccggattgcacgtgagccaggacagagcgttgtactgctccaaaacaaaccttaaaacatccgacgtggttttggagtcaagagggtgtggaacccgctgagaattcctggcaggcagaagttcgtctgtctgtgctactgaaatgtggtgatgcagcgaagcctttaagaagagagggcactggttttgagcctgaggacacgatgaccaaaaccactggggaagattctcagctttggcagttgatacaaaatacccaagggccaggggctgctgctttagctcctctggtgcttctctagaaagaagacgctcaccctggctccgactattgctgaagtgagagcccacaccaattccagaaggagangcctggggagggtacttgggggagagtttgggagaagaagaaagaagaggcgcatctaatatggccaa

SEQ ID NO: 142777 - DNA, 424 bp, Homo Sapiens
aacagcaaccgaaggctcttatgtttttccaaagcaggcctcagggaaccaggtggtccaaccggacaccaaggcgtccaccgtcaccccttttccccgcctcggggagggcacctgccctgggagctgagaggtgggggccacctgggtgggcctggagggtcaggagggtctgttgggagcagaagcccaggcagccgctcttgatgcctgagcaggtgacttgagtgaaggttaccctggcaatggcacccacttctgtatttcacccccaagtctggggctggtggctaaggactcaccttgccctttaacaagtcctggggagctcccccacaatcccgagacgaccctcagaatcagacacaaacactcctgtgagtgggcagatggcacaaatgggcttcagaaggaaggacattaa

SEQ ID NO: 142778 - DNA, 409 bp, Homo Sapiens
ttctagaagaatcctttttaaaagaattacatgaatcccaatatatagaagagttcaaatcaaaacctacctgaccaaagcacagattgtggggaaggggtcttccttgggtccctgcccactctttgcccctaccgggtgatcttaggacacctttctggaaccctggggctatgcagaaccgggtttttaaaaactatggaattactaggctagatgctagaaatacaatcatcaagaaaacctggactctatcccctcgtacgtctcagttttacagggaaggtaacagatgaaaagcaatgactgttaatacaagttaaaaggtgataaacaataggaaaacaagagagagataatgtgtggagaattcagaagagacagagaaacttctagtcgcgggatgaat

SEQ ID NO: 142779 - DNA, 444 bp, Homo Sapiens
tttttttgttttcagcggtattattatttgtgagtctaacctagcgggtggtcctggctgtcaccggtgcttgggcgggatcaccaccagcggctgcccgtacttgggccgccacatgaggacctgggcatcgttggcattgggcttgaccagggcgctgggcgggatgggctcattcttgctcaggattttgggctggtcctgggcgatgggctcccgcagccgggcgcgctggcccaggggccggttggggttcacctcgatgctgagctgcatgcgccagtgcagcgtctgcaggatgatcatgtcgttggtggaggtgttggtggccaccagccaggtggtgaagctctggttagatgttggtgagcttggccacgttgctctcgctgacgggcacggcccatgtgacgcttgggtaaaagttgtcattcatgctgatga

SEQ ID NO: 142780 - DNA, 1789 bp, Homo Sapiens
  misc_feature (1020)..(1028): n is a, c, g, or t
  misc_feature (1547)..(1590): n is a, c, g, or t
  misc_feature (1681)..(1715): n is a, c, g, or t
tttttatgtactaatacaaagcctttgacaagttttttattgtgaaatattggatctagaaaaaagtacaaaatgtcaacagtcagatgtgtacaagtacagtatttcaatagtctatacatgtgaacagcttaacaggttcactgcagaatgcatatttagaccaatataatctaaaaaggactgcaatattcacaggctattaatacataaataacttgagtcaaaatgacccttactggtaaatgctaattaatagtggaaaacaggctaaaagcacaatacaccacaccatagtatctccttacaggtccacatttaaagaatatcagtttattatgtcaaaacactacagagatccaggactgggactgaattactaatttatacaattgcaaaaaaatttaagttataaaataaggtcatggaataaagaagggtatttaattaggactaaatactgtgaagcccatgaaagggttttagccttggaatttacaaagctaaattattagactgttaatgttagctaacactaaaactgaattaccttccattttaatgttagctaatattaatattcaactttttaattttgatgttagctaaggggaaggacgaggacaactttcttttgtagtttctccaacaaggtgtaagaactatcaaaaagtaaaaccataatgaccactgtggactgacaaatggctatgaaacaagaatataaaacattacaaatttcaaagaaaggtaataactatcttatgaatttagcaaatcctgcaaacgttaaaatccatgttaaggcattatctgtcatggttgagagtactaaatttaagaaaattattacatgaagatcccataaaaataaactggtttagtttacaagattctaactgaatctttttgtatcacttgaaaattaccctatattatgctttcaaaatggacaaagaattatttggtattcactttataatgaactatgagaacagtctattgaaacacgtcatgttnnnnnnnnnttgttttcaatcatgtgttcttaagaaagccaatctttgatatgacattcacaatcaatgcttgtataaaacaaaacctttaaaacttataaatttagtaacagttttacatgaagcaaatttatctttgcccataaattattaagagaagcaactcactctatacagtgtatctagcaatactttaaaatcaaactaaaactctgaactgataataactaggagataaattctatttcaggctgaaaaccgctggatcagaatatagtcaataacttcatataacctatcccaccctaccttaaccttttatagacaattttaaagactttaggacaatttacttataatgcctgaatcttatagtagattccaatttattcaaagattatcacagattggattaaaaagatcatttaatttttttcagatttgccttaaatttacaaattacattgtacataaatattaacttagataaccacacatagggaaagcagatacatggatcactgcagnnnnnnnnnnnnnnnnnnnnnnnnnnnnnnnnnnnnnnnnnnnncatgtaactcacacaatactaatatgaagccacatgacaccccggccgtaatggccgaattcccgggcatatgtccggtaccgtcgactgnnnnnnnnnnnnnnnnnnnnnnnnnnnnnnnnnnncggccgcttcctcgctcactggactcgctgcgctcgtcgttcgactacaaaagagctagcgcccatagtggcaa

SEQ ID NO: 142781 - DNA, 442 bp, Homo Sapiens
catagccatttgtcagtccacagtggtcattatggttttactttttgatagttcttacaccttgttggagaaactacaaaagaaagttgtcctcgtccttccccttagctaacattaacagtctaataatttagctttgtaaattccaaggctaaaaccctttcatgggcttcacagtatttagtcctaattaaatacccttctttattccatgaccttattttataacttaaatttttttgcaattgtataaattagtaattcagtcccagtcctggatctctgtagtgttttgacataataaactgatattctttaaatgtggacctgtaaggagatactatggtgtggtgtattgtgcttttagcctgttttccactattaattagcatttaccagtaagggtcattttgactcaagttatttatgtattaatagcctg

SEQ ID NO: 142782 - DNA, 411 bp, Homo Sapiens
ttttttgcagaataacagttcattttatttacggtctctcaaccaattttcagcacatgtgacagtggccatgttaatatgaataagatttgaaataaggttttctgaaactgtatcacaggtttcatattccttttagtcaccggttttgatcaaaaggttgataagtttgactgctgtggttcagtcttcaattttggaagttactgttattagcccactgtggtttcaggtcaatgctcccctccagaagtctgaacatgcctgaagcaacatcctcaactctcagcaggtgagaaaatctttagttagtttctggagaagcagaaaggtacaatccttctgggacaggcagtgctaaagcaaggcacttgtaagttcatatcctggctctcagttcgaattccaact

SEQ ID NO: 142783 - DNA, 388 bp, Homo Sapiens
gctgcttcagggctcgcgctgctgctctggaagcctgtgacagtgctggtgaaggctggggcaggcgctccaaggaccaggactgtcctcactcccttctcaggcccccccacttctcaagctgacttggattatgtggtccctcaaatctaccgacacatgcaggaggagttccggggccggttagagaggaccaaatctcagggtcccctgactgtggctgcttatcagttggggagtgtctactcagctgctatggtcacagccctcaccctgttggccttcccacttctgctgttgcatgcggagcgcatcagccttgtgttcctgcttctgtttctgcagagcttccttctcctacatctgcttgctgcgtggtgacttgcac

SEQ ID NO: 142784 - DNA, 482 bp, Homo Sapiens
cttgatattttcaaaagagcatcaatttctcaactgaccttgctttcttgatgtgctatctaatggttagagcaaggtgtgctatctaatggttcctcatctgggtgaaagacttcaaaaatcctttgttcagtaacactcattagatggcacagggaaattttctttactaactctgaagcttcatctgccagaaaataaaaatggaatagtaatattctgcttcttactagcatactaggaaataatgtattttcagttctctgttgtcctttctaaagaaacaaagaacaaaagccactttagtgataataatgaaaaagaactagggcctaccagggacaacactcaaacatgtaagggaaaaaccaagaaatgaagtctcttcattctctttttcctcctttaaactgttgataaaaccaagactagtgagtgcacacataaaaattctattatgggtgagcagtagagatggatat

SEQ ID NO: 142785 - DNA, 148 bp, Homo Sapiens
tttttttcattttccaccatttactcttgttatcaaaaatagttcaactcttcttgcaaaacaaaaacaaaatagtacatactggacacatacatcacatttttcttcctatggctttagcccacccccaccccaccaaaagtagacc

SEQ ID NO: 142786 - DNA, 503 bp, Homo Sapiens
ttttacatttagatctctgacttatttggagtttatttttgtgtatggtgtgagctctaatttttttcaaatgcctgcctgttttcctagagccacttatttaaaaagtccattttaatctctgagaatgtttttcacacgcttacagaacactcagattgactagataagaagcttggccggtgtctggccacaatctaccctcagatttatttccatcccagctgaaatgactctgactgctggctgtccagccaagcacctgtccaagctggcttggtgatgacaggcctgtagcagggcaaggcctcaaggccaattttggcaccagaactctgccctctggttttgggattggatctcatggtgtctttccagtttcttgcccctggtcatttccatatgttgaaacctcaacagctgctcttgttctaatcctgatgacccagtgaagtgcaggagagatgacaggaccaagaaagagaagattccttctttcagct

SEQ ID NO: 142787 - DNA, 270 bp, Homo Sapiens
tttacaaggtagaaactctggctcaaagaggtcgatcacttgtttaaaagtcacccagttagagggtggcagatctgtcacaagccaggtcttatgctaggtgctcctttgaacaggttcttgagcttacacacacatttgctggggatcttgttaaactgtagattctgatttaggagacctgctgtggagcatgagatgctggatttttcacaagtcccaggtgatgccaatgctgctggcccaggtgccacttggaatagtaaccct

SEQ ID NO: 142788 - DNA, 363 bp, Homo Sapiens
ccttcatgtaagaaatttacttccaaaactaaagtataatcagttgtctagcaagcatgaaatgagaataaggaaagttacttgtcctactaaagtgatttgatggtatcaggtcaaggaatgtctctggaaggaatctacctgctggcaggacctgacagcccagacctccggccaggacatctttaaatggtccttggatgcactctgacagcattggctcctctgattttctttccagcttcaatacagaccaattccttttctgattagtagagaatttctttagtccagtagatattgacaatgtctggaaatgccagcgatggctttagcgacaagcagcattcaaggtgggctttg

SEQ ID NO: 142789 - DNA, 515 bp, Homo Sapiens
tttttattaggagataagtttactgttcattctacaaagacacttaactcatggaacactgagtcactctaacccttgacttcattacacaaaatgaaacacttctgaagaaatacagaatttcttaactcacggcaggatcaaagaacaaaggctcctgctttggcatttcaaagttgaacagagttctcaataagaaggccacagtcaaatactaatggaatctcaactctaaattaaaatgactaatcattaaactgttcaacttagagtaataaaagatttctagatacagaccccgctggcctatagtcagtctgggaagggctagaaagaaccaacccattgtgtggcttccgtatcttccttgcacaagcaatgaaacccagcagggaaagcagtggagctggcagagggcagggtgagaagacacccagtgaggactgacgggagaggagaggccagggcagcctcaggtacagctcatacctgaacttccttggcctcagagaggg

SEQ ID NO: 142790 - DNA, 479 bp, Homo Sapiens
ttttaaatcacttacacctacaactcaattaattataactcaatgtttctgagcccctcttaaactttcagtttaaacaaaagaactattcactgtcttagaattggtctgatacatttaacatataaaactgagaatacaaaatagagccaaagtactttctagaatatctgaattggcagggttgggttgatcacaaatggtcttccaaaaaggatttataggcagttctccaaagaggagagagacaaagagattttgtcttagaacagagaaagaaaatgctggacgataggaccgataactaagaaaaagagggggagatttaagaatctaagacaattcaaaacaatgaggctacatatttgctcccaacctacacagcaccaaaacaatgagactggaaccaattttgcaaagtgatacatcaactagcaaagtaagacacaaacaaggtaagagtgctttcttctctctta

SEQ ID NO: 142791 - DNA, 387 bp, Homo Sapiens
agtaaactttctcaaccagtttttaactacaacaatacatgttgtgaatgaatatatttgataaaaatggttttaattgacctattcagcgatttctgattatttctttttcaatagttatgaagaaaggatgacttacttgacaggaacctctgatctttcaaacattggagatgaagggcagaatttggtttgtcttttcaagtttaggaaaaggtgaagttaattggtccctctttctttaacctttaaaaaatcaatataaaatgtaagtttcttaaccatatccatgtatagaggcattgattgatatgagcacgttgtaagaataggttataaaaatttaaagtttaatataaatttatatcaattaataaagtttaattt

SEQ ID NO: 142792 - DNA, 322 bp, Homo Sapiens
aatctactattgaaaaaaagcatttcttaaatgtactgggatacatatatatatatgactttttcttgttactaaaaaattactcatagaacttacatattaaaattttaggacttgtgatgaaaaataataaaataatttaaaacgataaaaagcaacataattttatatgttgtaccttgtacttccttataaggtacaacactacaatagccttagtgtgtagttttctttttgctatgtatgtatatatatatattcataaaagtggaaaaataacatttaataaatcctctttattttctgggaaatccttgcttta

SEQ ID NO: 142793 - DNA, 542 bp, Homo Sapiens
ttttttttggacccaggtaaatagacagatttattgtacgatcaagctggcattttatgtcagtggaagaaagctctcttgaagaaggcaaatgaaactcctaaaaagtagctgtctccagggagtcagaagagtatgggggcttttgttatttacttgtacgttccttccctgtttggattattttgacagcaaagcctgtgagtcccagcagccggaggcagcagcagggttggacgaaatagtttgtgctgtttctctcaggcagggccgagaggcaggtatgggcatcatggtgggccctggagcctgctctgcctgcaggtctgttcttgggaggtcttggattctgctcagtaacaaacacctgagtgccccgacctgaattggtactccttgatagctcttccttttatgaacttcacgcagtaataggtgccagcatcagcaagagagatttcacggatgcgggtggaaaagtctgtgttgccaggcttggtggtgtctccgatctgttttgctctggggaagttaccttgtcg

SEQ ID NO: 142794 - DNA, 287 bp, Homo Sapiens
catttttatgtcatggtgtttatcttttctgtgctgatttgtaaaagctattttaaaacccttcatctgccatatatgttacatttctttcctgctttctgccaccttccaatttgttaccaactttcttctccaaccttgggccactggcatatacactcattttaaatatcagaacttgtagtgctctttgaaatgcagacagactatggttcattctgcaactgcatattagttaacaggcaaaaataccttagtaagagaaagtgtcttttccttctaatgta

SEQ ID NO: 142795 - DNA, 391 bp, Homo Sapiens
ttttgacttcacagtttattcagagcaggtgcaggtgacctggtgggcagggtgcccaggaggggcaggggtgggcgggcgctccgaaccttgtggtctgaggcaggaactccattaaatcagctcctgcgacacagaagtgcaggggctcaggcccgtgtggtctctggaggccccacggggcttcgatgagggccacacggcgggacttctgtcctcgctgcctggttttgcgcaaagcacccagctccctgagcgccttctcaatctgcaaaatggggtaacaggcccagcctctagggccaagacaaagcgaggtgagggagaccctgggttctcgcagtgcccaacatgggagccctgaggcagcgcccgcaggatctgtgccccg

SEQ ID NO: 142796 - DNA, 373 bp, Homo Sapiens
tttcaggaaaagactgttttattagatcacttattataataattctaaaatttagtacaaaatattattttaaagttcctaggattattattatgttacaaataagtttaaaatccaaactgattatttcaagctgcagaaccccagattccaaggaggtgactgaagttgaagtgggtgctggggccaggactcagatctcccacctcttccttgttcagagcagttctgcttttccgtagttcatgtactgtattgggcttttgtgtaagactttgcagaacttttaagtccacagttttaaaaagtctggcccggtcgagctccagacctgaccatctctcgccgcctcagagaagcccaaccgggggaa

SEQ ID NO: 142797 - DNA, 397 bp, Homo Sapiens
agtttccccatctctaaaatgaggataatagtacctacatcataaggtggttctgagtattaagtaagatgatccatgtaaagcacttagcacaatgcctggcacacaaaaacactcagtaaatattagctattattttgcatagatttatttacctggtttggaattttgaggatccacctcaaaagctgatctttgtaattttcctgaagcagggctcagaacagcccacttgataagagacagagtatgtgagtcttatcaaaggagtgaacccagctggtcactctgcgtggtatccacagctcaacctttgttgttttcttcttcccatcacctataaggcaactcctatgaagatttttgtgaggggttttttaactttaaatctttgtgg

SEQ ID NO: 142798 - DNA, 723 bp, Homo Sapiens
tggtatttacaaagatttattacagcacgggaggggttcaggcctggagtcagggaagaaggggaaaggggcagagcagctgggggacaaggaaaacctggcgccccccgctgtgtgccccaccggggacataaactaggcggcattcctggcatcaaagcacaaaacgcaacaaagaggtctctgccagtccatcttccaggcacccaggaggagcaagggtgattaagggaagattcccaaaatgttgaggctatggagaaaaacgccttagtcctggaccctggtagaagccggtgagagaagtggtgacttggaatcctccataggaaagtgggtagaaaaggatctaagggtacctcaaggttctcaggacctcctttccccagatcttagggtcctgccctgtgggtctcctgtgtccaggggagaggatctggggagtagaattgtgaagggcaaatccctgttcccggttttctggattttccaatgtgggctgtctcacatcccacctcccgctgggtgaatggaggaatgactggcaggggtgggcatcaggcagcaagtgcccaggttctctgggtatcagccaaaggtgggcaaacaagcaaacacagaccagccttagtcttctagaagtcagaagccgcagccctagcaggcgaggggaagagcacaaaacagggtgaggatagagtgggtttctggggaacagcgatg

SEQ ID NO: 142799 - DNA, 460 bp, Homo Sapiens
tttaatctgttaagccatttatttataatttataacatcacttacttctgtttgcacatttgatgaagtatttgaccaaactactgatttcctgcatctttttctgcctggaggcttgtgttgaggctgatacatttggttttgctattctcagacattctgtttctttctgaatatatttctgtaaaaatctaaaaacagcatcccaattcaaatattttccttgtttggaatctgaatgccgatctagatgtttaattgtttcaaggatctcgaatcaggcgcttaaatttctcaacttctttctttcgttctgtagctctatcatgttctagttgacggcagcagataagcagatcattaagtactagactcatggttcacaatttcagaacacacatcactgtcactgcactcggaaggtcaaagtagtatcaaccgcggcggtggctgcagcgca

SEQ ID NO: 142800 - DNA, 395 bp, Homo Sapiens
ttttttttaattttcatagatcaatttatttagaattacaaatattaagaatagaagatttatgcatttcttaattaacataacagtttagctaaatataaactctgcactaaagttctgcaggggcacaataccaacaaagaatacggaagcctttttaaactatacaaaaatttcaaatggaaaataatcttgtttcagttttattatacattaacatataaaaagtctcattttatgagacatctaaaggaattaaaaccacctctacagctatatcttaaactccaaatttgaaaaaaatttatattttgactttataatattctattaaaacgaagaaaattccaaatacatactttttacaagattaacatttaaggcagcgtttccct

SEQ ID NO: 142801 - DNA, 149 bp, Homo Sapiens
ctggtgtgctttgttatagctggtgaacagtgacagtttgacagcactgcaaaataagaccccagtttatccaaggggagaaagtggagtacattcatacatgcagtaaaagattaccgactaataaaactcacaacaatgatttaaaa

SEQ ID NO: 142802 - DNA, 516 bp, Homo Sapiens
tttttcagaacctctgaggtccctttagcttttatttaagtagctcctgtttcccaaaataagagggctggagcacagaggccagacgggccaacttagggtacagcacaggtcgggggcagtcgccctatctggagcgagaggtatccgcattctgcaggtgcagggactgtgatccagcaccctgccgcctcctcgctccggctcccaagagggcgggaaccgcggtgttgcagggtgcgaggcttggcttcggaaacgcagatcaagtgtatttcaggcggcagacatcaatccagttgggtgctcacacctggcccgggggaggggaaacagcatccataggaaccacggggcggagaggaacccctcgtttgggacgctagagggctgctccggcttgactaggtccgactgcttttctgtgattgcttctttatcccgcccatcatcccagtactctatctcgattggcttttcggtctgccactcggttccgccgcgctgacccccatt

SEQ ID NO: 142803 - DNA, 447 bp, Homo Sapiens
ttttttttcttcttctttaaagcgctgtcaccttacttcagcacctttagctttgttctctctgctctcactgccaagaatatccctgatatctagaggcctaatgagtactcttggtcactaactgactctcaggaggcagcaatcctagttctcctggtctcttttctctcttccatttctgaaatccagtcttttacctctttatgatgtttcctttgaaatagttctcaggtttacccttgcccttgaatctccatggtaaccattgtagtcctgtgtggttgtaaatcaactggattactcaaacaggcagtccagctggctgctccaacttcattgtcttttgcttgagtttcaacccattcattttttatctttgttgggcacaaatcacctggggcgcttgttaaattgtggagtttcaggctccatctgagagatttt

SEQ ID NO: 142804 - DNA, 465 bp, Homo Sapiens
  misc_feature (49)..(49): n is a, c, g, or t
  misc_feature (62)..(62): n is a, c, g, or t
  misc_feature (66)..(66): n is a, c, g, or t
tgtcgttcatttgaaatgcacccaagggttaactgagcaccacgcgggntgatagaggagancggnttcaccacctacacccccctctgcccacgtccccaggaagccatgtcagggcagaccaggcaccttctcattctgaggagagtgcatctcagcccaaatattgtgttccatttagagaacactggaacagattaacagtgaagcttctccaagaaacggtggacagagagcacctggagagtcccgggctgtggccacagaattgcgccagtgaagctggcggttgacttcaaataccagagcatcttacttggggaaggattggcctcattcatgtgattctaacccaaggtaacattagaaacatgctagggtttatcacatgccaagcatgctgtgggctgtgttgcgtgggagccctcatcacggccctgcagtaaagacgctttatctttgaaa

SEQ ID NO: 142805 - DNA, 405 bp, Homo Sapiens
ttttaatattttgtagtttatttacccatgaacacaatagtttccagtcttccgcatcagataagaccaagttattcaaattaaaatgttaaagatacggttttaacagaaacaagaacaggctgaaaactgccatgaatatccatatccacataatgtacaaaaaagaaagactgatattattccaaatatttctatttgaaagtaaaagaaaatctgtacagctgaatcttcccagtaaacagaaagagaaaatattataacacagtattaatcttccacataagtaaggccatatgcaaacaagaaagagaacacccaaaattgcagtgtttcttcaaagaacccttctctagggaacatatttaacactccaaccatcttctattcttctacgtgcatact

SEQ ID NO: 142806 - DNA, 396 bp, Homo Sapiens
tttttgcattgtaattaagtttattaatcagctgactttagcattgggagattattctggattgcccaagcacttaagaataggagaaaccggagagatgcagcagcaatagtcagtggtttcaaatatgaaagggatttcacatactattgttggctttaaagataggaagtcgtgggggcaaggaaactctctaaaggaaattaatctggcaacaacctaaataattctagaaaaggattcttttccagagtcaagaacagagccaggtggttcttctcttctaaagacatttccatgggccagttccaccgcaagcttctcagagagaatatgttctgccgtacggacaccgaacgtcccctaagatggccgcccccatgatgctctccccta

SEQ ID NO: 142807 - DNA, 521 bp, Homo Sapiens
  misc_feature (72)..(97): n is a, c, g, or t
attttgtttttccttttccaagactctgaaaaatttcggggtacctctcgcctaaccaagaggaaaggtttnnnnnnnnnnnnnnnnnnnnnnnnnncaatacacctagcaaagcagacgccttgttttccagaacctcggactccggcagaaagaggtagagtaaaagtgctgctagattcagcttcaccttcttccctccatccttttctcttgcattttctttttccccaaaaacatgaatctggtttttctttctatagactgagtcagagaaagcgttaggaagaagccgcaactaatgtctgtgaagggaggaccatgaggcgagagtgaatacgattcgttccgctgcttctgactcatccggcagatcggaacacctgcatttctggatgtgtcattcccgtatgtcgaggcgcctccagaacccgaaataatgtgtagacagacctttgtctaacatcccctcggagggagctccccggggtaggagcccctggctggaccgccgcggccgc

SEQ ID NO: 142808 - DNA, 392 bp, Homo Sapiens
gcacctaaatgatgaaaaaatttattctgcgtcaaggtatctggaaaatgaagctgcatttggggcacattatacatgaggaatgatccatatatggggagtacaaaactcaattatagaattatttcttagctagtaccagatactccaaattacaaatgcttaagtaaaagtaaaatatgatttgccatactaaaaggctagaagtgaaatatgacagaatttaaaccagcagatataaatgcagcacctatgtgtatatttttaaaaaatcaaatattggggaaaaaaatcaaatactgagaaaagctctggccttaaacacatcttacctgaaatccaaccagaaagccagtccatgattttagcaattttaattcattgtatgaaaa

SEQ ID NO: 142809 - DNA, 370 bp, Homo Sapiens
agtattttctattgatataaagttcaaacctccagctagaatttttgtttctcttattcaaattcttaactttcaagaccttaactgtgaagtttaagcttaaacagcaattcttaatgtttttaagagtttaagaaaagttaccatgcccagtacaaactgtagcaaactacgatgcaaatatggctcatggtaattttatggtacagtataatttcaggcaattaaattcaaagcttagaaatggaatagatgtgggagattaccagttgtgaactgaaggagaccacagaatcaacagtgttagtgtaagcatttattattactactaatgacaatactcactgataagtccagtttgtgaacattt

SEQ ID NO: 142810 - DNA, 401 bp, Homo Sapiens
atttgtatttccaggcagttgtcaagaattaacgcactgaactgagtacatcacattctcaaagaacaggttacttgttaatatttatattggacttcaccgtgttcaaagcactatctcccatgtaggcaattagatcctaatgatatcccttccagctcttctttttcatagtgaatgttgagaattgtactggtcccaccctgatccaccacagcttcttcatctggtctctgatagctgaggacgccgtccggctcgttactcccggcggccggcatggcggagccgaactaggtctcccccacgggctccaagccaagcatcagcagcccgcgccctctggtcgggtctgagcagatcactcgaacggcgacccccaccccggagccaacggtcaa

SEQ ID NO: 142811 - DNA, 400 bp, Homo Sapiens
  misc_feature (249)..(279): n is a, c, g, or t
gtagaatgtaaaaagtcattttagatgccacccattgactttgccacatagctgaactgtgtttactggaaaaattcagaggcctaaagtttaaaataaaatttacttctgatgttttaattaaaatgtttgccacattaacttttctgatgccttaaaagtgaacttctttaaagaacctttgtgctattttatcacaggcttacactacaattgttaataaatacttcatttggagatgtatggtgnnnnnnnnnnnnnnnnnnnnnnnnnnnnnnnagcccgctgcatgacccgtctctcctttctgggactatttctgctgcgtcctgcaccctcctgggcccacctccgattcacagaggtttaagggggacccaaatcactgctggttttcaat

SEQ ID NO: 142812 - DNA, 510 bp, Homo Sapiens
  misc_feature (434)..(434): n is a, c, g, or t
  misc_feature (458)..(458): n is a, c, g, or t
ttttttttgaggcaataggaaacattttttaatgaacaaacaactttcacacaaactgtctgtatcacattgttattacaacacagatgagctgaaacgtttttgtacagatttggaggatgggaatcctaaaaagaaatcaagcatatagaggtagttgaatagcaatatggggggaaaaaagcattatcttatatttcccttcagttcattacagtgcaagagtaaaatggctgcttaccaaacaaatggaaaacacacacacatttgccactgtttacgtggcttgcttgatattttaatcctggcattacttacaactgcataagatgatggaactaatttacctaaaataagcctatggtgccacattggcctatttgctttccttttattccattattagtgttgctttaacaatagataaatgttantcaacttttaaaattatgcattanctacagtgttgctttgtaaacttctgttaaatcgcgtttgctgcaaaaacat

SEQ ID NO: 142813 - DNA, 1104 bp, Homo Sapiens
  misc_feature (65)..(99): n is a, c, g, or t
ctataggggcttagcgctagagcgaacgacgagcgcagcggagtttgtgagcgaggaagcggcgnnnnnnnnnnnnnnnnnnnnnnnnnnnnnnnnnnncagtcgacggtaccggacatatgcccgggaattcggccattacggccggggaaacattagtgcaaatgttgcatcctatttcccatatgtccgcatgttttagaaaaaaatcctcaatttcctaaatatgcacagaaaaatcggtattgtaggacaagtgtgactttcttaagaaaatgttatttaaaaatcttccccacctccttttctgccctccaagactgccaaatacttgttgaacatatattattaaatgcctactacatgccagccatgattcatggtcttggggacacagcagagaacgaactgacaggactcctctcttatgtaactcacattcttatatgataatgataagggttaacattaattaagctgtcactgcatgttagtcacggtgcagtcattcccacacattattacacttaaacctgccagcaagcttgcaaggtagttgtttttcctttaaaaactgagtctcggaatgatgaagcactctgtccaatgtcacacagctagtaagtgtggagaccttgcatccaatcaatgcccgtctcattctaaaggccatgttatgtgttctccagcccatggagaataattttaacacagtcaatgaaatttctacacaacaatgttcttgtctcaagtccaagaatgcctcctacacctcctataatactggctttctggtgagtaaagatgccattctcatgtgtaatcaggtggccaatggagatatgaccaaagtaaccatctgcctacactcataaacctgtacacactcttcctgtgtcgattcaattcaagtaccccttttgatcacttagcaaatctgacctttaaaagggttagggtttttatatccatgtaagtttctgtattgctttggaagtctctggttaaattaatactcttttaatagtgacctgtgattctgttttgatcaagtgttttcaaacttgacgtcttgaatgggtttctccagtgtcaaaatcctaa

SEQ ID NO: 142814 - DNA, 450 bp, Homo Sapiens
ttttcttggaattttctattttaataaaagctgaatatagacctacataaaattttaaagccctgagacagtcaatgacaaatgaagttttagtagctaagaaaatacagcatcgttccacattatgtgtctctttaacgcctacgcctacctttcgttcatttagtgagctgaagaaaaaaatgttcaaacccttatatgcattttcttaagttcctagaataccggaatactgacacatatgattgcactatttcctatccgtcgaagatgattctgaatttcactaaaaaccgcaaaggaaaccaatagtcacaaaataattctgataaccccaccaaagaggaaataaagagagggaagttactctaaaagtctgatagggcaaaagtgactgcagcagaagggcctcaaggttcagtccatgaggaccttgattaaccttcatct

SEQ ID NO: 142815 - DNA, 646 bp, Homo Sapiens
ttttacatgttgacggacagcatataatcacatgtataagggtttctgcttgtaaaagtctggaaacccattctaactgccagaatcacaaaacctagagaaggggacataactgccctgtggccacccagtagcttttatcttctctcgcgatggcagaggcaggacagccagcattctggtgaggattgaaggattagttgtaacagatttcagcaggtctgcagtgatcagatgggtttctcacatattgttaagttgaaagtagccgtggctcagtatgagttgagtacctgtttaaaatctgcattcaaagccttcttcccagaggccacaactgcagtgagatccaagtgtgtggctcacccgccccggggctcacagctgggcagggtgatttccactcaaattcttgtgccagtgcagatcttgttctaaagcttttctaaatgcctggagactagaaagacttttggatacttttccctttttcttttggatgaaattgcatctccagtagaacagcagcattccatggtgcctcagccacgatcctctggacagagatttgtggcgaagacctgacgagagactgtaaaggaaaagcagggtttgtttttcctggtcaaagttgttaatactaaaa

SEQ ID NO: 142816 - DNA, 540 bp, Homo Sapiens
  misc_feature (286)..(338): n is a, c, g, or t
tacaaggaaggaaagatctgcacgtgtaaaacatggggcagccttggaacatggtgttttttggagtttcctttctcacagttttccatctccccacttctttgatcagtcatgtgtccgtgacctcgttccatgacatcaggatagctgtgtttgcacaccatgctgcatgttcatttggagccaggaggggttctcagtggagcctggcttagggaacagggagcgatggaagaatgccaacattagcgttggtcttctcttgtcaggaatgaaggatgcttgnnnnnnnnnnnnnnnnnnnnnnnnnnnnnnnnnnnnnnnnnnnnnnnnnnnnngaaatggttggtttgtcaaaactcactgtagtacataaagcttgcactctgcgtcctatatctagcagcatggggtacgtttggcagttcactccattagggggtaaataatttatgaccattcatctgtttttatgaatttttttatctagacaataattgtaaataaagaactcaccatctctgttcatttaatactaaa

SEQ ID NO: 142817 - DNA, 411 bp, Homo Sapiens
tacccctttctattattactttgtagtagaaagaaagttaatgaaactgagaactgattggagggtgtttgatcatttagtttttaacaggctgaggcaacatggatcagtgtgtgtccccctcaggaatgtatccacagtggccttccttgctggtgggcagtgtatcctgatggcagggtacaagtaccattaatgaagggtctgcaacataaagccttaaaaagacacacactaagaaaactgtaaaaccttgaacattgttatttatattttttaaaatggaaaagatcactatgtttgttgtgctaaccacttatttgattctgttttgtggtggacatagatgattacgtttgagctttgtattttgtgaaaaccttaatgaaatgaattccaaagataaaaaaa

SEQ ID NO: 142818 - DNA, 803 bp, Homo Sapiens
  misc_feature (770)..(770): n is a, c, g, or t
taagaaaaaaataaaaccaatttttgggttggcacctgaggtaataagttaagaataagcaccaaaatggcccttcctggcacgcgccggctcacaggttcttcatgcacacctggcagcggctgatgtgtgtgcggatgaggccggccttgagcgtgtcggcggagggcgagccctggaagctctgctcgggaatggtggtcagccagaagctgtacttgttggcgtagtagtggcaggtgccgcggcctccattgcattcgatgaatggtgtggcgcggaagtcctctagacagctgcccggtgacaccagtgattggccaccgccttcgtctcccgccgccgtgtgcatgaggaaggaatatccgatccacaaactccgccacccagctgggcagtgtgggatggagacatcctgactgtggaccgcgatggcgatggccggggcctcacacacagaacagcggctgatgtagggcttgatctcgtcctcggccacgggcatcatgggcagcggcgcagtggtagagagccagtaggacttgtcgttccggctggcatagtagcagacatcaccagggttgcagtacagaaagggcatggtgctgaaccgcgccaggcaggagcccgccagccccaggtcctggttgtgcgccttctcctggccctcgaagtacagcaggctgtatccactccagagtttgttcatgcccaccgggcacatgggctcctggtccgtctggctgtgcttcaccaggaggtagccgatntgacgctgcggcctggcatacccggcaggcgag

SEQ ID NO: 142819 - DNA, 312 bp, Homo Sapiens
ttgttttatgatatggggctgctgcaaatatttatcttgcgcacacttttcaaacagaactaatgcatgttctcccttattcattccatttggtactcgatgttctgcaaactccgtagataagagctcagattctatttcttccaacaaatcctctgatgctgaaacgctctttatttttgaaataaatttcttggtgcagtctgtatcataggggctttctgaataagtcttttcattagctgattctggaaatgtagatgaccttaattccaccaatatttgtgttactttctgttctgtttcatttgt

SEQ ID NO: 142820 - DNA, 457 bp, Homo Sapiens
actttttcccaataaaaaccagactaaacataattaaaacgtaagtgacaaacaagggagggaaaacatttacaactgactattaatatcccatattcagagaaatccaactcattggaagaaaatgacagacaataccctaaagggataaagaatacttataggcaaaaaagaagtacacacggcaaataaatctgtgaaaagatgctcaaccccggtattgattaaaggaataaggaagtgaataacaacaaaatagtttttgccaaatctgattgtcaacatgtcatatattgttaacattgattgctgtcgaggctgtgaaaaactaggcagcttcataattgttggcaggaacaaccaactgctacaaacattttgggggcaatttggaattatctaataaaatatatttgcataccctttggccatgccatttcacttttacggatctaac

SEQ ID NO: 142821 - DNA, 479 bp, Homo Sapiens
  misc_feature (416)..(416): n is a, c, g, or t
  misc_feature (463)..(463): n is a, c, g, or t
acagaaaatttttagtaattttattcatttttcatagctttacagcttttatgaaaataatgatcactgtaagtataaaatgaaaattaaagaaaagggataataacccaaaactctccctggccaaaaaaccagttagcatatggcaaatatccttccacacattatcttcaggcatatattcacaatgaaaggtgatcatttatattaactagatcttaccaagagagccaccagccctatttctcccctaaatacgagttctattcctgttcatggttctgtgttatcatcttgatggatttgttagaaagattccaagtgtgaacaaacccccttccactctcagtagttttacagggtttaccaccagcatggactagccaaaaacttgaagatgtgcattcagacaaaangttggtaacacatttctcatttctaaagcttttaccagtatggactntctgatgatattgtaa

SEQ ID NO: 142822 - DNA, 465 bp, Homo Sapiens; identical to SEQ ID NO: 60879

SEQ ID NO: 142823 - DNA, 724 bp, Homo Sapiens
aatctattagttgaagtgcccaaccgacctgtctccaattagagagagagtagcccggtaaacaaatgctcttttaaaaatgcagacggctgtatgaatattaagaagtttgttcacaccttgatgagcctaaattacttcagctagattactttcttcctaacacccatctgacactgatctactcaggaacaggaagtctggcgtaaaagtaagaagaggcactggagcatggaggatttccgggtggagtaccatgcagtgggctacatccacattgcggggcagtatgagagctgcaagaatttggggaacgatcaaagctatttgactataacttgcaagaaatgtctctgtctggcgatggctcagagtcagtgtacttgtgtcactcataggacaaagagcagagcctaacctcacctatgctctctctagtataaaagttatgtacacagtgttgaagccagaaagcctggggtctgaacccaacctttggcacttacttcagctccataatcctttatctggcatccttagggtcaggttccagctttaaaattcagaagtctttacattttaaaaaggcaaaactgaatatactgaatattacagaccacttccagtagggtccaaggcagtaatccataattaaacacattaatatttctgtggcaatatctatgaatattcacaccaaatgagataacaaaaaaattttttt

SEQ ID NO: 142824 - DNA, 769 bp, Homo Sapiens
  misc_feature (341)..(349): n is a, c, g, or t
ggcctgctgagggttgagcagacagcctgcattctaacataccctgtgcccaccccacgggcatacagactgcactcaatacgctgaagtcgctttgttgtagttgttgttgtttgcactcatttggattttattcctgctttcaataccaataaaaatgcagatgctttaaggcctaaagcagaattctgaagaatttaacagctatgcaagttaaagtttgatatgttttgtctcccaagcaccttgttttttgttgttgtggttgttgttgaagtcagctgattttctctttagaacagagggtcagctagaaacctaggttttttggaattgtaaannnnnnnnnagtatagtctggagagaaaggtcattcaaaaggaacagtacaatgggacttgctgcccttcatcatctcgttcccgtgccacggtgtgtgttggtcacgtaaaagcctgggaagcatcagaggagtcccggattgctgctgctacctggagacagggttagcaaaataacactagtgatgaagggagaggcttcttttcaccataagcctgctgtgtacaccgagggcggcaggagaagcatgtgaaggagtcagcctaagtttgcacattgcataaagggtacactaaggtatgagctgaagctttaggttctccgtgcttccctcaagacctccttcttgctaacagaagcagtaggcaattgctgcagtgcgttctcaccctgaccaataggtctgtctgtatctctgtaagggaaa

SEQ ID NO: 142825 - DNA, 498 bp, Homo Sapiens
tttgagtgtcaatcatttcaagaaatctatttgcaaggttaaggacacacctgagaaaagaacagagaaccacaggaaaaactgtggtccgtgcttttcccaaagattgtctggggacctcagtaagtaaaggggaaaagtgtgggtattgaggaaaggggaagaagtggaaaaaatgggtgtgggtaaatcagaggcaaattgttgcattcttctgtctttggtcagcgttcactgaatacacattttacatgcgatggaggtagaggcagggatgtagcttttttatctttgtgtaatagctatcttatttaggaaccagatgggaagcaggtttgcataagccagttcccagcttggcttttccctttggcttagtgagtctggggtcccaggatttattttccgttctcacaggttgtagtcctcacactttggctcaaatattcaagattttttgcagagtttggccttttcttcagcactgggaattgtgat

SEQ ID NO: 142826 - DNA, 306 bp, Homo Sapiens
tcatatgtgcctttccacatctttttccatgttcatgccaaaatggaaacacattcacacacatgtggggctggtgtttgtttctaccgaaataactaccctattttaaaagtcctaggtggaggggaacaacgcacacgggggcctatcagacagtggagggtgtgaggagggagaggatcaggaaacataactcataggtaccaggcttaatacctgggtgattaaataatctgtgcaacaaaccccatgccacaagtttacctgtgtaacaaacctgcacatgtacccctgaacttagaagtt

SEQ ID NO: 142827 - DNA, 461 bp, Homo Sapiens
ttttacttaaataacagatatttatttcttcacaattctggaggcaaaaagtcaaaatcaagagtttggaagatttgttgtttttctgaggtctttttggcttgcagaaagctacttcctttgtcctcaaagaggtgtcagtaatagttaggattataaaggtggaggctaaggagatttataatctgccatctgcaacctggagactaaggagagccagtggaattgtgccagttgaagttcaaaagcatgagaaccagaagaactgatgatgtgaacagatggtgtaagtttcaacttcggtgcgggataaggccaatgacccagccagttgtatggagaaatgaacgttctcatatatttttgtttggaattgaaatctgtacgtagaaaatcagtgatgatgatagctacaggagacacagattactaggcagatagaggtaggtccccagtgaaac

SEQ ID NO: 142828 - DNA, 386 bp, Homo Sapiens
ttttttttatcaataaacacatttacttctatttccagtctatcagcatgggtccctttacagttatccaaagcaagagcactatatttcaatataagttaccatgcttatttacccatgccaaagagtgattacaaagtacttgcagcctttcaatattgggcacttaattacagcaaacccatgtaagtcaaaaagtagatttctccaaagcaaagtatatcttctttctcttctttttaaaaactcctatgagattgtgaaaatgttcaaacatacagaaaagttgaattttacagtgaatactcctagattgattcttatagttaacatcttgctatactgggaaagggcttcttaaattacaattttggctatatcacttc

SEQ ID NO: 142829 - DNA, 474 bp, Homo Sapiens
ccaatccctgaacataatacagtatatcatataaatgactttcataaatattttcaggccatagtaatttttctagacctatttttggaagtgaagtatttaggaatataacagtatatagaattaggggaatatttcattcagaattctattgttggtgaatttaattctggtatgatatgctgtattaatgttacctccagtaaatacaattccctccagatttagctattacacttcggtgttagctcttggtcagtgttttagaacagtagacatagtctacggtaaggaatagtcttaattggtaaaactaagatagctgaatttggaaggaactcttaatagtaatggatttggggattttttaggttccttggttaatgtttgtttcttttgtctgtttctttttctttcatttctacacattcatgcagtatttcatggttctatcaaagcagcatgaatgtgtag

SEQ ID NO: 142830 - DNA, 600 bp, Homo Sapiens
  misc_feature (581)..(581): n is a, c, g, or t
ttttcatttcaggctttgtttaatgtagttggcatgcaaacttttatcaagtttcagatagaaagacattacaaatatattcattggtttatattattttatataaatgatgcaaaaatattaaaaagtttatataatttagatatagaactcagaagctaaaatttcccttttatacatttaattaaaatgaaaccctaaagaagccaattacctttctcaaagctgggcagaaattaaagaaaagtcgatggttacatgctttgaatctttcaggaagatgccagttctgaattatttcttcatcagaaatcacatgatgatccagcgctttgagaggccatatactgttaacaagaacatgtctatatccttttttaaggcttactggacaatcaaacatagtgagggcaatgagggttggacaggcagataatacacatatattctttaactttgcaaacccattgtcatgaagatagagtagttttaggttcttcaatccattccaaaatttggtatttggtagactctttatctgatttccatggagatcaagtttgattaattttatacaactntgaagtggatgaatatctg

SEQ ID NO: 142831 - DNA, 444 bp, Homo Sapiens
  misc_feature (208)..(216): n is a, c, g, or t
ttttttgcaaaacaccaaatctatatttacacttccacatataataacataactttaagctgaaatatatcataaataaaacacgtaatgtctactgtttgacaacttaagtatcaacaattaaaataaatcaaactggaatgaaataaatacataaacaaaaatccaacgaattgtacctctattatatgtactgttgtctcaaagnnnnnnnnntataaaaccagtagtataccaatagttaatactgatggacacaaaaacatattttgaagtacaaagggctgtaggaaaataattggtatttttatacattcagaaatgtggttaaaaagagaaatctgaaagcccaaaaaattccagcataatacaaatcgacttgttttcaaatagatttggtgattcttttttttaaatacaggtttaaattccagccctctatcc

SEQ ID NO: 142832 - DNA, 518 bp, Homo Sapiens
ttttcagttttaagttttatgtttattgtcaagggggaaaaaaagtccacagcaattaccgagtcacatgccccttcaatctttatgtttctgacagcaagaacaataaaatatgtttttgcccaaaccttttaccgctcagattgacgtggcttcagcgacactgcttttcttccatgtgagaaccgtttatgagaaagctaacttagaaccactccttggtggggggtggcagggggagtcctggctgctctgcagaacagatgttccctggcagaaatgtccagaccctgaggcctgggaccagagaggaaagtggggtgaaaccaggtgggacaaatctgtatttttacaccatcttcgggcaccttgtttggtttgcagggggacccaaggagagcaacacttttccttggtgagaaccaccggccaagggtaaaatccttccaatcagagcatgaaccaaaaagaacatggcccagttatttgggtctgccaaaacctgggccccgttgtgt

SEQ ID NO: 142833 - DNA, 626 bp, Homo Sapiens
  misc_feature (325)..(336): n is a, c, g, or t
  misc_feature (520)..(520): n is a, c, g, or t
ttttaggtaattataccttattaattttaatgaactcttagagggcgaccccagtcgtgggttcggcaggatgaaacactacccatttaccagtttacagacatttaggtcgtttcgagttatgaataatgctgtgaacattcatgtgcaagtctttatgtggacgtatgttttaatttgtcttgggtagatacctaggaatgaaagtgatgggtcgtagggtagttctatgtataactttttgagaaacggaaactttttccaaagtggctgcatcatttttcattcccaccagccatgtatgagggtttccagttctctgacnnnnnnnnnnnnaatattctagaaatgcactgtaatttgagattgatatttttttcttagcattttgctagcaacaagctaccatcttggagatcattaataattagtctttaattattaggaatggttcctgagtaaaatgaaaatatgtcagtctgccataaatgaaattcattattttagaatttcaaacttntcttcttaaatgaagtgtggtaggaatcctattttaacaactgtaagctaaagaattagctgtgaatcttgcccagtttcaataataaatcagtgaattccaaaaa

SEQ ID NO: 142834 - DNA, 453 bp, Homo Sapiens
  misc_feature (176)..(184): n is a, c, g, or t
  misc_feature (349)..(363): n is a, c, g, or t
  misc_feature (397)..(397): n is a, c, g, or t
ttttccactaaacgtatctttattttgatagaactacaattcactttaaccactgcattgcataggacactgttgtattataatgcttgtacaggaacgtgcattatcactagtgttacacataaacacgtcaccaatctagtcagtatcaacagattgatttgagttcagatgannnnnnnnnctatgcacggatgtaaaatcacaatgtgtttacttggatattttatgcagatagcacaagatagagtatacctatgcaaacagcacaagttacagtgatacctatgtaaatcagaatcctaaaatgagatacttaatattttcattataattattttctaggttnnnnnnnnnnnnnnntatttaaattttaaacaaaggcatattactgagncagaattcagtgcagatacagaagctggtactacaactggcatagtcaagaagatc

SEQ ID NO: 142835 - DNA, 353 bp, Homo Sapiens
atagtacagtatttattttgttatttagaaaagtaaagagtaaaaatatttcaatggtatttacttccaaggtaattcagttcaatcagtaatttgaattggtttcaactcttttttccttagggtaatgaggaaaaactattacatgggtacaaagttttaatgttcaggaaatattggccttgcccttaaggaaattatattggctgagatttctctcaaactagtttgtttagcattattaaaattaagtgacagtcacttggattaaatagcgataaaaagcatgagactttctagtgatttttgatgccaagcttcttatcactgttgggccttcacgtgtgtacttg

SEQ ID NO: 142836 - DNA, 444 bp, Homo Sapiens
gcgacatgacaatggcaaaggctctcctttttgtgaacaattttaatacaacttggtggtccaataactctacaatcagccttgtagaggtcattaaagacagaatcctgaaagtccgtgactacaaatacattttcaaattccggagaatccaaaccttcaaattcttccactgactccatctttacaaagcccactttaatgtcctttaaggcttttataagttcttcttgttttccagcttcttgaaccaatatcactcttgtttcaatctgaggcatctcttcttctacatatgaagtagatccaataagtaagttttccttggaaatctcagtaactttagaatcaaaaatggaagagtctgccaagctagtcctcccagtagtggatgttaatacactattttcagccatgatttgtattcttctaaatcagcactct

SEQ ID NO: 142837 - DNA, 512 bp, Homo Sapiens
  misc_feature (68)..(68): n is a, c, g, or t
gagatacttctttactgaagacatttgttcattgagaattggtaagtggattaagaaagaagacactnttagtcacttagcatattcatctaagaaacatctttcaaatactgaaatatatttaatattctttatgaataagctttaacttctttgatgaatttaaattggagtttatccaagtaagtttttttaaaagcacctgcgaaattctgtttccaaaggaataagtcatacattaaatatgtgaaatatatttatgttgctaatcattttatatcagccaacaatgtagtactaccagatgcagtggtgacatcacactcaagggttttcaaccagagagaaacatgattcatatatttaagagattactgtagtgactaggggtagggtgatgggatcaaggcagagaggctgagagatcagctatagatgtatcagaggtggtcagcaagacagtagttgggtttgggcagaggtaaacagatttgaggtatgttttggaagta

SEQ ID NO: 142838 - DNA, 214 bp, Homo Sapiens
ctagagcggccgcctactactactatacggctgcgagaagacgacagaagggcggagagaaaacggagcagagaaagaggaaagaaacagaaaacggtgacaaaagaaactactggactgcagcccaaagtctactgctttcagctttgtgtaaaaggtggtatcttttagggctccagagacactaaccagtgtaatttttggagggcaacat

SEQ ID NO: 142839 - DNA, 213 bp, Homo Sapiens
acggctgcgagaagacgacagaagggagtagactgttattaccatgaaaggctattagtttttctcaatttatccaaatgtttcttggagcagaatatgaaacttacgggattccaataatgatcagggccaatatgagtcaccaaaattatagcataagctgattcagtacactgaggaagagaggccaatgtctaagatcaggagataagg

SEQ ID NO: 142840 - DNA, 168 bp, Homo Sapiens
gcctactactactatacggctgcgagaagacgacagaagggctatcaggaggagggaccagcacaagcaccttacagagtgcatgcactagtcagggtcctggaacagtccagagaagcggtgggagccagtcaggaaagacattttgggatctgattgttaaatgcc

SEQ ID NO: 142841 - DNA, 192 bp, Homo Sapiens
cttgctgtttttctcaactgtcagtggaattattgtcttcctgtctccatatttaggtagtgtcagtggctgagtatcaccgcaggatcgatgctctaaatactgaagaactgcgcacactctgcagacgcctccaggtgcccccttctgtcgtcttctcgcagccgtatagtagtagtaggcggccgctct

SEQ ID NO: 142842 - DNA, 147 bp, Homo Sapiens
tttcttaatctttttctctttctctcattagcacctggggctgatggcttatgaggaaattgttatagtcttttagtaggtaagttttgtccctatagtccccttctgtcgtcttctcgcagccgtatagtagtagtagtagtaggc

SEQ ID NO: 142843 - DNA, 127 bp, Homo Sapiens
cttgttccaatcgttcctcttctttacgcttggcttctaattcttcaagccgttttatacgttcttcctcttctcccttctgtcgtcttctcgcagccgtatagtagtagtagtaggcggccgctct

SEQ ID NO: 142844 - DNA, 166 bp, Homo Sapiens
acaattgcttgaagccctttactttccccttctccacgtctttggctgactttcattcattcttcaggctttgtcacgtctatcacttattttctgactacttccctgaccccaatcctggattagttgccccttctgtcgtcttctcgcagccgtatagtagtag

SEQ ID NO: 142845 - DNA, 190 bp, Homo Sapiens
tatgcgacagtactatgtggtcccataaaacctaaaatatttactatctggccctttaaagaaaaaaatttaccaactgatgccttaagtctcaaagtatacaatccttgtttcaagttgaaggtcttccttagttctgcatcatcctttagtcattctccaggcccttctgtcgtcttctcgcagccgt

SEQ ID NO: 142846 - DNA, 959 bp, Homo Sapiens
acaaaaaacaattgttatttgtgtacttttaaaacctcacagtaatattttcacactaccttcttggctgaaagttcacactcggaattccagagcagtccatggccaggcccactgggctccccttgctctctccttggctttggtaaccactggccccagggactcagcctgctttcctatccatcccctcagtagctgtcaccatgcaggttaccccttctgtttcttctaccactaactccatgtctgactgcaagtgaaaggaacagaagcccaaacctttgggttttaaggagtttattgctaatctgtaaaacagaaagagacaggagataagcatgacaaaatatagggaagaaatgacttttgcctaaacttccaaattgtgtacaattgaagcctctgctttatagctcttagcacacctctcaaataagaaggcagtactgggaaggctctgaacctgtggcagaaccactgatagctgtggagctattccaaggagtctgggaatcagggggattatcaagatcattgttagaataaattaatcttactgtatatatagcagaagttttcaagcatatgtaaatgctactaataaccaaataattacaccttgtttttctttaaactgtaactctcaagtatgtctctacataattttttgatggtagtgtctgcatgctcaaaaagcttgaaaacactactggagaagaaggtctcgggagtgtgatgaaatacgtttacatggcagcttcatcatttaattggtgaaagtgactatgtgtcttaaactctctgagcctcagtttgcacatccaaaagcaaggatataattccatgaacctttccacctcaagtccacaaggcagaatagcaagatgttaactgccactctgaggaccaccaaataaaaggacaatttattaggccacttgccagcatggacacaa

SEQ ID NO: 142847 - DNA, 280 bp, Homo Sapiens
cttctctttcttttttacaaaaaacaattgttatttgtgtacttttaaaacctcacagtaatattttcacactaccttcttggctgaaagttcacactcggaattccagagcagtccatggccaggcccactgggctccccttgctctctccttggctttggtaaccactggccccagggactcagcctgctttcctatccatcccctcagtagctgtcaccatgcaggttaccccttctgtcgtcttctcgcagccgtatagtagtagtagtagtaggc

SEQ ID NO: 142848 - DNA, 321 bp, Homo Sapiens
cttgagctcaaagagagttctcattttccctattcaaactaatacccatgccgtgttttttaccttggatttaaagtcaccttaggttggggcaacagattctcactcatgtttaagatcttgttatttcagcttcataagatcaaagaggagtctttcccttttctcttttaccctcaggattctcatcccttacagctgactcttccaggcaatttccatagatctgcagtcctgcctctgccacagtctctctgttgtccccacatctacccaacttcctgtactgttgcccttctgtcgtcttctcgcagccgtata

SEQ ID NO: 142849 - DNA, 135 bp, Homo Sapiens
gcaaaacattcacatacatttaatctctttctcctcctctggttacatcttttctctattcccttctttgtctttacttaattattccaacatcttatcttcttctcccttctgtcgtcttctcgcagccgtata

SEQ ID NO: 142850 - DNA, 213 bp, Homo Sapiens
gagtaatctgtcttttctctctgcaagcttaagatttttctctgtatcctggaccttttgaagtcttactgcaacatctctaagtttggacttttcttttttggtacttcttgtgactgtttctagtgctcatgtcttttattaattctggaaaacttagccatgatctgttcaaatattgtatcccttctgtcgtcttctcgcagccgtata

SEQ ID NO: 142851 - DNA, 457 bp, Homo Sapiens
  misc_feature (247)..(387): n is a, c, g, or t
  misc_feature (389)..(408): n is a, c, g, or t
atgtgaagtgtaattgaacagtttttgtcgtcaaaagttttaaaatcttggtcttcatttccagatatcatctcttcttttgatcactgttcctgattgtgacattgtgcaagtgttaaattgtgtgccttttgttcctgaagaaagaggtatggtaaagattgaaatactggagtatatagtctattaagtagtaagttggtatgttttaatattggactaaataaagtaaaatataggttaagtnnnnnnnnnnnnnnnnnnnnnnnnnnnnnnnnnnnnnnnnnnnnnnnnnnnnnnnnnnnnnnnnnnnnnnnnnnnnnnnnnnnnnnnnnnnnnnnnnnnnnnnnnnnnnnnnnnnnnnnnnnnnnnnnnnnnnnnnnnnnntnnnnnnnnnnnnnnnnnnnngaatgaaacccttctgtcgtcttctcgcagccgtatagtagtagtaggc

SEQ ID NO: 142852 - DNA, 362 bp, Homo Sapiens
tttttccagagttttgggaggttttaatgggatgaacttgatgaacctcaaggtggcctgattctcttagccacaaagtcttgggtgtggggggcatgaggctgaaccccaaatgaatctgtccttttcttctttttcctgggtagagctccctcctggtgcggattctcctcctggccgcatgcatttccttcgtaagtgtgggagggtctctgggggctggctgggggtgtgaggctgggatcgggcgaatgcggggctcgcagtcactggatcctcccgtccgagtcccgagcatcccattgtacagacggggcgggctggcgcgcagcatcgggtgtgattcgcgtcctcctctctcc

SEQ ID NO: 142853 - DNA, 694 bp, Homo Sapiens
  misc_feature (537)..(537): n is a, c, g, or t
tgtccaagatgccccgaaacccagctcttcctctgggaaacatcccagggaaaacacaaacttgagccagaggggtaggagggataagttttttcccagtccaatagagcccattgcctgagcctcttctgcttggcagaatagagaggagaccattcactccaccctttcaacaaacacatgtgactctgaggcaccagtgaaaatggcatctgggttttacaaatgctactgttccatgagggtctactatatgtgtcaggcactaaagggatttaccaaagcaacttcattaaatcgttacagcattagggtcttttagccccattttacagatgaggaaacagcctcaggaaagaagagctgcttgcctaaggtcataccaagaatcagttgtgcagccagggatggagcctaaaacaccccagcccaccagtagacatgggggggtacccacagacggagagaatagcagaccaagaaggaactcaaagaggcattgagaatcaacaccatttcacagacgggaagaccaanaacaagtgtcacagcagttatgagtcagggccagaactagaaggtaggtattctgactcccagctcaaagctcctatcagagggcacttttccttggtagatatcagagaaccacagggaggatcaggtcacattcccagcttccccttcaccctag

SEQ ID NO: 142854 - DNA, 179 bp, Homo Sapiens
ccaactgtgatctcgccttgtttcttacaagcaaaccagggtcccttcttggcacgtaacatgtacgtatttctgaaatattaaatagctgtacagaagcaggttttatttatcatgttatcttattaaaagaaaaagcccaaaaagcagtaaaatttccatttctccctgttaaaaaa

SEQ ID NO: 142855 - DNA, 380 bp, Homo Sapiens
tttcaggaggcaaccaattctaatttgttagtagcatagaacaagccactggggtgaggctgcaggaacaagggctgccgcgaggcagtgtcagagtccaagagagatgaccgtgcccaacatggcactggctgtgggacttgccaggagcagcaggtttggcagagttggctgccgccatcactctatccacgagcgagtacggtagcttctaagagtctatcacctcctttacatttgcttgtctttttcactgtcaccttgtgtggataggaagggaggttgtttatgcatcgtgtgttcaaactgttcttaggagcatctcccctcttcctgctgtcagccttccctgtcagccacgctgacctctcaggagctct

SEQ ID NO: 142856 - DNA, 850 bp, Homo Sapiens
tttagtgtatgaatgatgcatgtttttatgatcttaattacatttaaggatttaaaaaatgccactgatctcacagtttacaatatccaaatcttcaaacctgctggaagaagtccacagcacagcctggaaattgcatccgttgcattctctcgtgcagttaccttctgccttgatatgtagtcagttcttcctgaaggatggaagctctcttttgcagaaaattaacctgtgattttagggaggaaatggtgtcttcaagttcttgtcttagggatgctggcatcaatcctttcaattttgtttcatattcttgtcgtatgtaagttatctgttcctgtgactccaattctttgtgttgtaattttttctctgcacatcgcacctgattagaacggttttctaattcatcttgtaaaaccttgattgcttggtcattatctctaatcagctgcttcttctcatcttcaaacttttgtctaacatcctggagccgcctttctgcagcaagctgctgctggctgttctcttctttcagagaggaaatggttgtctgaagttctgctatgatctgtgaagatttggcaagcttctgagtgtattccttctcactctgcttcagctttctgttggccttttccagtgtcatctctgtctcagcagcatgagtctttttcagctctattttcatcttttctgattcagccttcagtttattgacgacaatctcatgttcccttgtagccctttgcttttcctcttcacgaagaagaccaagctctaccagctgctgtttccgccccggccgtaatggccgaattcccgggcatatgtccggtaccgtcgactg

SEQ ID NO: 142857 - DNA, 371 bp, Homo Sapiens
ttttttagatgttgcaggggttttattgctttaggttatagaggaaagaccattggcattggagtcagacagacagcagaccatcctttgctgtttgacttgcgtctctcggcctgtttccttataaatagaaagagccaggctcagtgctacactgttgatatgcagtagacttgctacttctatgactaagacatcatctccatttcacgaatggggaggttgaaacttagattgttaaggtaacttgctagtagccagatagctagaaagtggtagaagcccagtgcacaggcagaatccatgaccggtctaaaatccttgccctcaacggcatcattctgacactccatggggtcttcccatggcca

SEQ ID NO: 142858 - DNA, 535 bp, Homo Sapiens
caggcttgacatcatttttattggatggctgatgaactggaaaactccaggatagccaggctttaatttgtaatcttaattttcatataaatcggtacatttcagggggaggcagagggggatgtggggacattgatgcttgccggccttgtggtaataagacagctctgaagcacaggcagcagtactaactcatccagtatctgattctgtcttttcctctatccatctgtcttccatctttgcatccatcattcaacgaaatttacccgcctatgcagatgttctgtggtcttaaacatgttgtattcagttcagcatggctggcgaggtctcaggaaacttacaatcatggaggaaggggaagcgaacacgtccttcttcatatggcggcagcaagaagcagttctaattgatgaattttggagaagtaattgagtacatctggctcagcatcttctaggtccatctctttaagggccagcttgactgtagtgtgcaagcttttgggcctcttctctcatgtgatagttca

SEQ ID NO: 142859 - DNA, 432 bp, Homo Sapiens
gcggagcgggctggcttcctgaacggccctcgcctcttcaccaccagggccgtccaccagaagtttctaaacgggtgagaggcgacaacgcagtgcagctgggttaaaggaaggaggctggtttatcctccgcacttacttggtactcgatctccagcgaggccttcaggggcatgggctggtagaagcactccttctggccggcgggaagggtaaaggtgaagtcgctatcgagggaaggtgtgaagccggccgccccaggcagcagcaccggaggcagagcggccagaaggagcacggggaagggcagccagatcttgtcgcccatccctgctggggcgatcccgggctgaaagaggcgtcaggtactgttgtctccgctccgcgtttcctctctggactcctcgtggttgacagggaaatctggagtct

SEQ ID NO: 142860 - DNA, 733 bp, Homo Sapiens
caccataaccactatattaaccatagaccagatattaactctatccaagttgcttttttgtatgtttcgatcacgagcttcaaatgctctaagcagaatttgtatgtgcccacttttgcttagtctggacttgatgctgttgatggattccaggatgtcttccagtttcatatccaatatatctgtgccagtaatatatttcttccaatcttcttgttcttgtgcctgttctcccatattatccaggattaattcaaagaaaatcaccttctcagaaatggtgctgaatgtattgtcaaagcagaacatgtaatcaccaacttcagtctctacagtgtgaactccatctgattttctttgttcaaaaactaaggttttgccttctggagaggcaagatggaaatcaatatctaatcctgctccatctaaaacttggtactcgatctccagcgaggccttcaggggcatgggctggtagaagcactccttctggccggcgggaagggtaaaggtgaagtcgctatcgagggaaggtgtgaagccggccgccccaggcagcagcaccggaggcagagcggccagaaggagcacggggaagggcagccagatcttgtcgcccatccctgctggggcgatcccgggctgaaagaggcgtcaggtactgttgtctccgctccgcgtttcctctctggactcctcgtggttgacagggaaatctggagtctgaagaaac

SEQ ID NO: 142861 - DNA, 376 bp, Homo Sapiens
  misc_feature (353)..(353): n is a, c, g, or t
cacactttgcaagtatggcgtagtagacacattatatttaattaagcaacttgtcctcgtttctgtattgggggttttaacatcatgggttggatcttttgttttgttgtcttgctctttttcacaatcttgaaatagcaaatttctatgaagtttactctccatttccagtttttctggatctacatcaacacctgtatcttcaatactgacttctttgacttcttccttgcttgcacaagacttctccatattttctcctaaattagctttttcttgactcttcattgttagaatatctacaatcgtgtgtcgcatctcttcaataggctgagcccctgccagaatggctntctcatagattgcaataatattt

SEQ ID NO: 142862 - DNA, 542 bp, Homo Sapiens
tgcattcaagttttcctgggacaggtatctatgtgtgtgcatgaatctatttttacggcatatgtctaggaccccctacgaggagccaaagtttcagagagcccagcaactatgtaactccatggaagggaggcatgatattactctctgttcacaggagcgtacgcacagatcttttctcctcctcatggtcagttttctatttgtgattagtaattagcttctcttggtacgctacgatctattacaaaagccgaacattcagggggcgaagctgaaatgacaaaatttggctataatttatgttggcccctgacatatatatttttttaatggtttggtctctaagcatctgatctcttagcaacaagaagcacctttataaaagatggcacccgaagagtgattgccagaaaagccacctggttcttaagcagccgcgcatcattagcaaaactctccatcttccagagtcccaaaactagaagtggcccgcagccccagggaacccttgtttttggccctttttctgggggaaaaaa

SEQ ID NO: 142863 - DNA, 455 bp, Homo Sapiens
ggggaaataataaaataagtctttaccatgtatgaaagaaattttaaaaaatacaaaatattttctgattagcatctagcttataataaattttcaaaaaagctgaaggcaaaaatgccttcatcaggatgcactgagaactatatagttacgtcctgctttttgtataaactgagatgctcacatgcttccccttagaacaggcaatgtgctatgcataacatagttgtacattatctttgcggttgctttgagttttattttttattatttaaaattgtagttataaaatttttcagtatagtacagtacatatactgtgaggcgcgtgctaaagtgaataagcgagttttcatgctgacccactcaatgctattcagaaatcaattggcttagcactttctcatatccttaggtgcatttagattgccagagttaaccttctgcgtttaaaa

SEQ ID NO: 142864 - DNA, 890 bp, Homo Sapiens
tgtggtggcaagaagcctcatcagtaaataaaccgttgctatgaaacatgtgaaagtgagaaccatggtttaattgtggattttattagaagtgtgatactagtcagaaaggcccaggaagttggcattgcagttaccagctcagggagaaggaaagagagcagcagaaacttctataggagatccaactgatgttaacatatgtggacaccctcctgtccccggcccctttcctttcacccagatttggtatgtggcaaatctaaacatttgcaaattcacagtcgtattcagtcatccggcacattatgaacttccactggcgatccctttccactgcagagaaagtggttgttgctcctcggatatagtaatcataattgtaggaaatcatgtccatttcctcaccatagtgacctggatattctgttgttagccagcaggaatatgggcacctcttgctgtagcgacaacagtaaaactgccactcccgatccagcactgactcgaagtagcggctctggaatcctgccaccagcccattgttggagcacgtctggtaccattccatgccagccctgttgatctcctcccaccagcactccgtgggttccccgaggctctgtggtgtgggcatgcaggcgtagttccattgtctgtcagaaccttccttcttgctgaagatgctcctcacggccactatcacctgcccctggggacactggtagctgaagccttgccggttcaaattcacccacccatcatcgctgtagtcatgatactgctggtatgggtatccataatcgccatactggccccaggccatggtgactaggggcagaagtacccagagaagactgaggtccatgctgcctgggattttggcaaac

SEQ ID NO: 142865 - DNA, 1043 bp, Homo Sapiens
ttggtactggtccggaattcgttgggatcaagcagcttttcagtctctgggacctttcatatcttctttaaaatactggcctgagctagatggattagcaaaagtagatatgaaaggtcccagagactgaaaagctgcttggcgaacccaacgtgaaggatcactgatcaaattaataaaaagtgctgataatttggtccgtcggatttcttgacatgttgcacatgaaaccgccatgaagcattcagcacaagcctttcggactccccatacattatcagaacaaagctggaaaaatctgggcagcaacatttcttcagtagcttgctggccaactacactgcaaatatctccaaaattggcagcacagacctttcgaacgtgaaacattctgcaatcgcagcacatctcacaaaacctagggaggataagacgctctgtaatatccttcccaaccatgggagccattttgcacattatagccacagcttctgttttcacatcatcattgctatctggggctgtcagctctatgaggacagggcacactttggtctccacatcaaatcgttcaatgagctcctgctccaacagagccagcaaagctgcctgacttgttttcctcacctgattattctgatctgcaaggtatctaaccacaataggtagtaagaattttgaaaaagcatatggtattgaaggccggttttcttgacaaaacagtgcgatgtgaggcacctgttccatcagctccgctctcacagttggttctgaatcatcggccaatctgctaattctttccaaaacagcaatacaatctctttcatcatcgcagacttccctcaaggtatcgagcaaactccgggccaccatttgtctgttaaatatgttctcacttgcagcatacttgtccaatctccccaggggcgtcaacatttcatcttgtgagacaaagtccagggatccgtctgcgtcctcctgcaggtcctcctgaagcagcgagaggtccgccatcttgtggtcgccccctcctccgcggccgc

SEQ ID NO: 142866 - DNA, 987 bp, Homo Sapiens
  misc_feature (645)..(645): n is a, c, g, or t
  misc_feature (814)..(814): n is a, c, g, or t
  misc_feature (862)..(862): n is a, c, g, or t
  misc_feature (915)..(915): n is a, c, g, or t
  misc_feature (920)..(920): n is a, c, g, or t
ggcctgggtggcgaattcggcacgagggatgatgtgaaaacagaagctgtggctataatgtgcaaaatggctcccatggttgggaaggatattacagagcgtcttatcctccctaggttttgtgagatgtgctgcgattgcagaatgtttcacgttcgaaaggtctgtgctgccaattttggagatatttgcagtgtagttggccagcaagctactgaagaaatgttgctgcccagatttttccagctttgttctgataatgtatggggagtccgaaaggcttgtgctgaatgcttcatggcggtttcatgtgcaacatgtcaagaaatccgacggaccaaattatcagcactttttattaatttgatcagtgatccttcacgttgggttcgccaagcagcttttcagtctctgggacctttcatatctacttttgctaatccatctagctcaggccagtattttaaagaagaaagcaaaagttcagaagagatgtcagtagaaaacaaaaataggaccagagatcaagaagccccagaggatgtacaagtcaggccagaggatactccttcagatctcagtgttagtaattccagtgtcatactggaaaacacgatggaagaccatgctgctgaggcatccggngaagcctctaggtgaaattagtgttccactggacagctctttactttgtactttgtcctcagaatctcaccagggagcagctagtaatgaggatgataaaaaactggtaactacaaatctatgttacgaccagaggttggcaccactttcacagattcagctctcttanattcaggattgtataactccctcccattcctggaagactcctcttccntcgaatagatctagacatagagctttgacagaacctctggggggaaacccagnccagnagggaccagagggaagaatcctgaggggccctgtgcccagtttctcccaacatcacctgggcaaccg

SEQ ID NO: 142867 - DNA, 426 bp, Homo Sapiens
ttttcgattcaggttgattttattttcatggttttaacctgttggtgtagaattcactgactgtatgattgatgacttttcagtggcggacctctagagacatcacagaactgaggtctcgctttgctctttgtcggcctcttctttcttcattttttctttcagccggtgataacgaccacgcagtattggtcctctagctttcttaggttttcctgcaggggtgttagtttcaccggctttttggctcgagctccctcgaaggggtcttttcgccttcctggtggtctttaggcccttaacgccgcttctggaccttcgttgacggggtgtcttccccttcttcctccctttggtacttgaggttgatggggtctgttcgtccacatcttcattaggcttctgtggctcactggtcacctttgc

SEQ ID NO: 142868 - DNA, 921 bp, Homo Sapiens
ttttccctctaaaggaagatgcgtcccgacagataatttgggaaacccacaccccctgcttttatgggaggaaagatattttctggaccaatcccgtttttattattctcatgtctgacgatacatctgtgttctttgtccagtgacttttctggcaccgttaaccagctaaattttcatgtatgtgtcgttagtcttcatggtgttcccctcctgggatcccagaatcgtgttgctcttcttttcttgccaatgtatcttaataatatctgggaaaaatttctcaagaagacaaaggtatgttccagccttctggagttttgtttcagcaattgaaggaagaaaaatagtgggcttgggggaaacatctgcatcaagttgtttatcaggtgaagttactatgagcttagtcccttcagcaaatatcttgaaccaaccagtggtatcccaggtggcacagtaatagaccccagagtcacgttcaattagattttccagtataaatttaaggctcttccctgtgcttgcataagtatgatacttttctcgactgattcctgattccaacacaacctggagttgtaggagtcatagtacagaagacgctgtggggccttcccctcctggtgtaggtaccagtgggtgtagacggcattttctacaggaagatcacaagtgattacagctgatgacccagttggcctggtgactgactttgttctcccttccaagttggaagatttctgactggcaggaggcaggaaagctagaagcagagctagagccacagcatgccttcctctctggggtcttggaagtaagggaccagacgaagaggagcagaagaccctctcaaactcaggtcccactcaacaaggaagtgatccctaacacagaagacagtaggaggagctgtcttcc

SEQ ID NO: 142869 - DNA, 493 bp, Homo Sapiens
gaaatgcctacatttttaaaatgacagcttgcacaaagcaatgccttggtcctaaactatggagtaccaattgtggtgtataagacaacattccaaggggaggaagactttttgagcaaggagtaggagggggctgtgactcctgacatcttgtaatcccttttgggcaaaggattttctgcttgtccataaagataaagcccagcacctgtagtctcctcaccacactgtccaacttaggcctggcctgtaacagaagtggggaaaagagattccctcaaaaatgagctcctgaccaagagcacagcgtttgcattcttttggtttctgcatatcatattcctcggagattccatacccacaaagcttccgcacatcctctgagctggcacgtgcttctagtattctcgcccttctctgcttcagagcctatagaaatgtatttggcccaaaggaatgaccagcctttggcagtttttgctccaactttgaa

SEQ ID NO: 142870 - DNA, 427 bp, Homo Sapiens
  misc_feature (354)..(354): n is a, c, g, or t
tttttagttttatctgaagccagattttattccgtttatacaattccagaatgagatgttcagaaccaccttgatctccaagagttgatggtaagtggtttttaaatggaaaggctccatctgaagcctggcagaacagcataacagttaagagcacactccttttttacttagatggacttcagttcttaattcctgttgcaccttgctgtgtaatttcgggccgtttaagcttccttgaacctcagttttccagtctgtgcagtggtatggtgaaacctacccgcagaatgccgttgtaaggatttggtgacataaagatgtcaagtgctttgcagggtatgcggtacacangtaggcgtttaatatcactgagatgctggctgggacagagtaggggtgggtgtggtgtttcttgcattaccag

SEQ ID NO: 142871 - DNA, 1172 bp, Homo Sapiens
  misc_feature (842)..(842): n is a, c, g, or t
  misc_feature (939)..(939): n is a, c, g, or t
  misc_feature (968)..(968): n is a, c, g, or t
  misc_feature (981)..(981): n is a, c, g, or t
  misc_feature (1081)..(1081): n is a, c, g, or t
  misc_feature (1105)..(1105): n is a, c, g, or t
  misc_feature (1123)..(1123): n is a, c, g, or t
  misc_feature (1137)..(1137): n is a, c, g, or t
cgaaatgtcatatcttctttagtctcatgaccgtttcctatacaaagtcggctaatacatcgttcactgtcccttcttgacttctgtgaatatctcttctttttctctggctcaatgtcctagcctatgcacccatttagcgggataattctaggtgcttagggtaatcttttctcaatatacgcaccgaccagggtttaagcagaatacttagaaattgggaaaatcttcatgatagcaactagtcagtagtacttaatcttttctgctgtgtttttattctcaaaacatattttcacatgcctcattcaaaattaaagttcttaagttttttagacatagaattcagtatatcataaatatgaaagagacagaattacagcttaattttacaatgatattaagattgaaattattcattaaaaaagtatatcagcttacagtgacttctgctgtagctgtagcttttgttcaatgatgtccgagaaacgaggaactttttttgaaatagccacacggatatcatcactcagattaaagcagcttctggactttgttttgaaatgtaaaagtgatgaaaatcccaactcacaaaggtatgtagttgcaaatggcataaggatttctagagctgtctttgccaggtttggaaatgctgtgaattgggcacaccagaaatcctcaagcttcattgtctcaaattccattaggatttggccactagctcgtaattcagcaagatcatttttcattagatagctatcatcatcaaaatcgatattaataagtaatgggatccaatatccatttacttgcctcattaagatctccaatggtaaatntccatgggtagatgtgctcaattgttgcagatgcagtggtaattcagctgcattgaataggcatcattatctgtaacaatatttctcaagtaaagtnaattggggtaaattctttcacaatgcgtnttggcaaatgganctgcctaacaaggcgatactctctcagctgaactgtgtcatcaagtctctgcaagtgcctgagtcatagagtgttgaaaaccgcaggtatgcagtggatntaacccttatttctagcaacaacnatacagcctgtgtggtgnactggttatcacancatactaatgtgagagtatggcccggaagcgccac

SEQ ID NO: 142872 - DNA, 421 bp, Homo Sapiens
gagcaagaaaagcatctttatttggagagccagcaagtcaggaagatactggacccatgtcctaacgaaccatctttaaaggcatgaatctcaagcttctttgtacattgaaggggtacactgaaggggaacaaggaggagactgaggtgaggggggtggctggtgaccacagacacttgggcatcagcaggggcccaaggagattgcaaaactttgtccttgctcaggtcacagcgctcctacaagtcttcaatataacattgttacttgtgtgcatgcccttcttatctcctcagaggttagttttggaaaggaactcttatcatccttgctttccagttaaactgtaatctaagttctttccatgattaacttggcccgtgtgcagaagtgcctaaaagcagttagcttgaggagtca

SEQ ID NO: 142873 - DNA, 1071 bp, Homo Sapiens
gacactttgaaaaaaatattttatttatttggagtctagtgcataaattggttctcgggatacttgattactttccagctattgaaattaggggagggggaaatgaggatgcaaacctaagaaggttctgggcgggatgatttgggcagggctttttgaaagcagcgcctgctttgctgtttttactgccttctttctagacacaatcgacttttacactggggagaccagagctcacttttctgcattaagtaacaaaaaataaactttgaaagaaaactgacaatcaaagaaaaaacacaagagaagttgtaagaagaattgagctatgaaaaagctaaggtgtagaaaaagaaaccatcatttggagacgcgtacctaagctttttctctaggaaatgctgtcatgaattcttcctttgtagtgatcattagttcatttctaaagaaaacaaacattccccaagatgtaaagtaataatatttcattaatgaaacataacaagtataaacaccttgtttactcctgtttcttatacaaaatgggcaaaaatgtcttcaaggatttataaccattttgtaaatattaatgtggcttctgctaggggtggacaacttcccggcttctatgggaggggccacttagaaaacgccttcagataaggttcaattcttttgtatttcagcaaagtcagcccacgcatctctatttggtttgacaaataatgcaactcctactacatccccgatgacacgaagtgaaattcctattgtgtggaaataatttaacttctaatcttctggtggaacaacaatcatttctatttggatgtttgtatttcactaagtaatgatggctcaaaataatatttagtttccttgttcctttgtgctgtttttaaaatggcatgttagatttgggggtgggaggggatatccttttgctaaatttcactttatctgagcaggtttaaaatatatatgttgtagaagtgtatcaacagaataaatgacttcaatcgaaggcacattttacccactttcaaggcttaacattgttttctatgaaat

SEQ ID NO: 142874 - DNA, 492 bp, Homo Sapiens
tttgatttgtgaatgaaagtttattagttaaaatctcttgaaagaaaacaataaaatggtttagatcaatagctaatacagattgtaaacaatcataagataataactagcagtaatcatcacacataagaatttatataggcacaactccccacatattttaacccaaacaaatagggatgaaaacttgtactacctaatctaatgccatctaccagcctatcttccttgattttcacacctttaagcttgtctcagaatgatgagcccctctcttttctgccatgctatataataattggctttaacactggtcttaagaagatacagaaaagggctaatttgcataaaggatcagccactcactccattctcctggaggagatgcaggatttcaatcagcgatatccagtcagtggactaaactagttaataattctccatctaattgagctttcagatacatgacttatgtcaatcgcctaccagctg

SEQ ID NO: 142875 - DNA, 466 bp, Homo Sapiens
tttgaactttatatcagttatatttagcatgacatatacaaacacatacccatgttttcaaatctgaaaattttagactggattattaatgtttttctttgtgggatgcttttaaaggctacggcaatatctcagtttacatgaagactcagttctgtagtcagtgggtgaggtgaaaatcattagggcaaaattatcttcaagaatctcatgggaaggcatcttgttagagagccatgagcttcctttctttaagtccaacacagtcagtctttcctcccttgttgaaacctgctgagtttcgaaaggtgttcctgtggtggtttctcatgttgagtttcaaatgatacagttagcttatatttgggggtatgttcagtggtaattcaaatctttagacaccagagtctcattcagcatgatgagatacttacagtatttcaggtattctgaaaccagtaacatt

SEQ ID NO: 142876 - DNA, 751 bp, Homo Sapiens
  misc_feature (639)..(647): n is a, c, g, or t
gtgctcatgtttagatgaggcagaagggtctcctttgatattgttgggagctccgataaccctgaccagaaacacaggggattatctcttccaagttattttaggaaaaacaaattcgcataccacgttctctgtctgtaaaagctgcaagtgttctgaagagttttcttaataaggaccctaaggaacgattgggttgtcatcctcaaacaggatttgctgatattcagggacacccgttcttccgaaatgttgattgggatatgatggagcaaaaacaggtggtacctccctttaaaccaaatatttctggggaatttggtttggacaactttgattctcagtttactaatgaacctgtccagctcactccagatgacgatgacattgtgaggaagattgatcagtctgaatttgaaggttttgagtatatcaatcctcttttgatgtctgcagaagaatgtgtctgatcctcatttttcaaccatgtattctactcatgttgccatttaatgcatggataaacttgctgcaagcctggatacaattaaccattttatatttgccacctacaaaaaaacacccaatatcttctcttgtagactatatgaatcaattattacatctgttttactatgnnnnnnnnnttaatactactagcttccagacaatcatgtcaaaatttagttgaactggtttttcagtttttaaaaggcctacagatgagtaatgaagttatcttttttgttta

SEQ ID NO: 142877 - DNA, 898 bp, Homo Sapiens
  misc_feature (166)..(197): n is a, c, g, or t
gtgatgtaggaggaaattcatttttatttcatttaaatttgctctcctcttgcaatctggctatgggaaggtcccttaggaatggatgggctaggcagggccagggggattttctctgcctgcccatttcatagagaagggagggggcagattagctaccatgagnnnnnnnnnnnnnnnnnnnnnnnnnnnnnnnnctgaacctggatcctaagaataaaaaccaagagagcttctctgtcctgctgagtagaagaggtagccactggagagaccttggtacagaggaaccagagaaggcatagctatatgccccaaatcacagtttgggcagagtagcccaaggagagtacacagattgggcagagtagcccatcgtaccccactgtgcgaaggagaacctagagaccattcttgggaggactctgggaaggtatgacggtcatgttgtttcagcccaaacctcagggcagccacgtggcagctgttaagtgctcttttggaggtaaatgtgtgaaaccaggactgttccaagggcaaagaaagtccaggattcatcattaagatgggtttcctgtggtccctgaaggcctcagcatcacaggagattccagatctgctgctctggggatccacatgaggcgggatgatgtgcctgctgaaattaaagggacagggtggtgggaaaagtctccatcccaggatggcaggcttccacagccacagcaactcatgacaggcctcactgggggatgagcagagctgcgtcctttggagccagagacatcaggtctcaggtagtgtgaaggatcctagccatggagtggccagccagtaaactgtgttgggcagcagaggagtaagaagctgcatgtccttccatgggcaagaagaggca

SEQ ID NO: 142878 - DNA, 1066 bp, Homo Sapiens
  misc_feature (360)..(368): n is a, c, g, or t
ctggtacggctccggagttaccgggatatcgtcgaccacgcgtccggtttttattgttgttgaataacaagctcactttaaatttgaaggagttgagggaggtggagtgtatatttatttagctctgggccagtaaggtattcttcaaattacttaaccacgccattattggcaggggtacaaagtagtttctaacagggtcctttctataagtcaagaatattctgttaacagcatttcgttacacttctatatcacagtaagtcttttgtgtttataaatacttgagtgtccactattttgtttattctttttctcaatagcaaacaaagccttgggtattgatgaaaagtatgtatnnnnnnnnntacgggacaagcatcctgttctcttattgagtttatagcttttgaaggaagtcacaatttctaagtcatacctgtacatattttgaagctcacttagttgtagggacccagagctctttttttatggtgatctttgattggtgaagtagccatttcctggtgacccttaggctcgtgtggttggctgtaaggtgtttattttgttttgctcctacacttctttactgactgcgtttccgtatgtattttgggggaagattctgacttcatttagtcttagtcttgagatactgagttgctggttgcaggcagcagagtgtccaccacagtgcctgcactgcccgcagagctgccctccggaaagcatgcagtataacagctagtgctggaaggaggaaaaccaaataggcctggaggctgaggttgtactgccagcttccttagatgtgagcaaatttcaactacaacttccatcacaggctaataaaaccaggtgtgtgaacgctactattttaaattttcttttttaagatggcattttattttgttccagaaaagcgcctgatgtagaccctccctctgagaatagccgtggagccatgtagagaggtgtagctcagcacatctcaactaccagtcagcttccctttgagaacttctgtgctcacttcctgttttcagagattccagggcagggg

SEQ ID NO: 142879 - DNA, 456 bp, Homo Sapiens
ggtttttgtttcgcagaataataataattattataataacagtatcatacatcaaggacaaacccagctgccccaagcctactgcaaaatctgtatgtacagtatagtctatgtgggtggggtacagggctgcctgcctgcaccctcaaggccttactcataccagcttcctgaggaggggccggcccctcctcttgcccctgttgaagcttggcacaggctggggaggctggcactgccaacgccatccctccatgttgggcaagcctgttccaaggggctggactcacctcccccattgtggcctggctgcaagggattgggggtgagcttgttgagggacaaggcggtggcagctgtggggtgtgtctcatctgagtcccctttccacccctaccggctcttcctgcgggcctgcccatggcaggaaggggccagggacactcatggcacaga

SEQ ID NO: 142880 - DNA, 327 bp, Homo Sapiens
tctacacaatgtacaattccttttaaatggatcaagaaatagcttatatacatgaacgagtccttgttataacatctcggcagcaaatatcataagctaatgaaggtcttgatggaaaggatgggagcctaggacgggggtgggggtagggggtgtggagaaaagggttatgccttctggaggagtggggagaaaagggaatgattagggaaaaggaacaaaagtaaaatatcaagaagcatctttacaaagcagttctatagctaattccttttaaaggggaaaggaaaggtaaccaaagcaggaaaacatttatctctgtgtctt

SEQ ID NO: 142881 - DNA, 1341 bp, Homo Sapiens
  misc_feature (512)..(544): n is a, c, g, or t
agtccttgctgagagcttttaggagggagtactctctaatgaataatactaataaaaataataacaataatagatccttactatgccagacctattctaagacttttgcatttagttctcacaaaaaatcctaatattactattcagtttttacttatctttctttccttttattatcttatcctgtatctatatgcaagtagtttgttggtcagcattgaacaaactatttttggtccccaaaacactttgctcacccaagagtcttcttttagtcacagaccactctgaactactgaatctagtttcatcgtcatgttatagttagggctgaagaattcctatgtagtctactcactaaggggtgtcctacctctccttccaaattgctgccttcactgcaatttctggttaggttttcagcagcttcctctgatcagcctcctttttcctgctcccaccaagaagaactcttcccattccagacacagccttgtgttttactgactgcnnnnnnnnnnnnnnnnnnnnnnnnnnnnnnnnnagtctaaatcggagcccttatctctcctgtaaatgatgcctttgagtagtcagtttttaaatattgttcccaaactgttgtttctgggttattggtgactcagtacatctcacccttactccttctagctcagtgggttacatcatcttctatgattaatttggactggattcagcaaaatttttctttcatttagcaaacttttattgaacacacgctgtgtgacagcaccaatgctctgtgaggtgaaaaagatattagtgctacctcgggccttagtttccctgcttatgacacatggctctctaataagggatgaatggagcttaattgacagtattcgaagtagaaataacattcagttttctagattgtagggtttatacacatttatttacagttaagtaggtgaacctcaaattcttcaggcacctattaagaaactgagtctatatagaatattggtcacgattaacagcctttgaggcttccacattcggcaaggctttaatattgtgcctactagaagggtgatttgtttttcttcttgtccttcccaggcatacccagagtatcttatcacttaccagatcatgaagccagaagccccttcccagaccgcaacagccgcagagcagaagacctagtgaatgcctgctggtgaaggccagatcagatttcaacctgggactggattacagaggattgtttctaataacaacatcaatattctagaagtccctgacagcctagaaataagctgtttgtcttctataaagcattgctatagtgaaaaa

SEQ ID NO: 142882 - DNA, 983 bp, Homo Sapiens
tacggtagagcctgagatttcagatcggcacgagggcgggtgagcgtgtagcgggcgggcaggcaggcgagtgcgccgggtattggcagctgaggagtggaggctgggcagctccgactccctgacgccagcgcgaccagatcaatccagtgctccaggagaaagcaggcgggcgggcggagaaaggagaggccgagcggctcaacccgggccgaggctcggggagcggagagtggcgcagcgcccggccgtccggacccgggccgcgagaccccgctcgcccggccactcgtgctcccgcacggacgggcgcgccgccaacccggtgctgactgggttacttttttaaacactaggaatggtaatttctactcttctggacttcaaactaagaagttaaagagacttctctgtaaataaacaaatctcttctgctgtccttttgcatttggagacagctttatttcaccatatccaaggagtataactagtgctgtcattatgaatgtgacaagtttattttcctttacaagtccagctgtgaagagacttcttgggtggaaacagggcgatgaagaagaaaaatgggcagagaaagctgttgatgctttggtgaaaaaactgaagaaaaagaaaggtgccatggaggaactggaaaaggccttgagctgcccagggcaaccgagtaactgtgtcaccattccccgctctctggatggcaggctgcaagtctcccaccggaagggactgcctcatgtcatttactgccgtgtgtggcgctggcccgatcttcagagccaccatgaactaaaaccactggaatgctgtgagtttccttttggttccaagcagaaggaggtctgcatcaatccctaccacttccagcatttcatcttgcaatgcagcaactgcctcctgactgggtcaccccttcagtccattgtctacagaaagggatcttttaagatgcagacatgatcctc

SEQ ID NO: 142883 - DNA, 949 bp, Homo Sapiens
  misc_feature (925)..(925): n is a, c, g, or t
tcttagaggtaaattgcctgtttttggaacaggcccggaagtactacaggcttttgactcttctatatgttaaggaatggaggcagacctccttctgcttggaccccaaaggaacctcgcagcattcccagtggttcttagtcaatggtggctctggaagatcggccagcgccacacacggcagtaaatgacatgagccagtcccttccgttgggagaccttgcagcctgccaatccagagagcggggaatggtgacacagttactcggttgccctgggcagctcaaggccttttccagttcctccatggcacctttctttttcttcagttttttcaccaaagcatcaacagctttctctgcccatctttgtcttcttcatcgccctgtttccacccaagaagtctcttcacagctggacttgctaaaggaaaataaacttgtcacattcataatgacagcactagttatactccttggatatggctgaaataaagctgtctccaaatgcaaaaggacagcagaagagatttgtttatttacagagaagtctctttaacttcttagctttgaagtgccagaagagtagaaattaccattcctagtgtttaaaaaagtaacccagtcagcacgaaaaggatgctttctcaggagatggttctgagaccggcctcaattttcagaaggaacgcgcctttactggttatcttgcaccgtgtatttaaaaattgcatagcgggttggcggcgcgcccgtccgtgcgggagcacgagtggccgggcgagcggggtctcggcggcccgggtccggacggccgggcgctgcgccactctccgctccccgagcctcggcccgggttgagccgctcggcctctcctttctccgcccgcccgcctgctttctcccctcgtgccgaattcaacacnaggcctcgtacctaccgtatgtcc

SEQ ID NO: 142884 - DNA, 350 bp, Homo Sapiens
ttttttcggtgcaatggtgtattggttaaaaacttaagacacctaaatgtccatcaacagaaatggagagaattctggagtatctggaccgtgaaataggtagagctccatgcatcaacatgagtaaatctcaaaaatgtaatgttgagtaaaaaaagccatacagtaatgatatacagcgtggagctacgtgtctatgtagagacaatataagacatgcatggaagtcatgaacacaacagtcagcttactggctacctctggagaaggatagaggggaaagggtttcagggaggctatgtgggggcctcacctacagctgtaacatactatttccttggcaatatggc

SEQ ID NO: 142885 - DNA, 537 bp, Homo Sapiens
ttttttttaccaaagaataaatgtactgtattaacatgaagactaatgacaaatgcactgcagtagtaagcacgtcatagatgcatagaatattctctatatagtctgaatatggatataaaataagttatactcattttgttttccatcacagtaggagcatagcatacaaagtgattggttcagtggccatgaagcaagccaggggagagaccacagaagagaatgtagggcattgagtacagtggggatttgccaaggacactgcagagtccctggggaccctctggggaacaaggccccaaacctctcaagttagccttctgagaatagtatgaggtcccacttgacaagagacagtggctgcatctgagctgggatgattcaggcaactgggtgggaggcagagcagggacaggcacgaacagcatccagcaggctagcccactctcctgctggtgctgttggatgtctatgatgctgggaatatggggcgcagagccagaaggcacggtttgcttctgtgacgtgacagat

SEQ ID NO: 142886 - DNA, 536 bp, Homo Sapiens
ggtgtgtttttggtgtatgagaaaagtacaaggcagtaacatatacagtttcctctgcctacaagccagtaagggagatggaagttatgcgcaattatgcagcatattcctatgtataaggggcaggcaataatctaccccagtatatacagcctaaacatcctcttatataacaaagattacaaaaccaataatattcacagatgagtatcatatagacgcataacctagggtattgattatactggctgtcatatacacactgaggaaaggataccaagaggcctcactttctttgcaagcctgggaggtgctcctagaaactttctagtcactcttgcgagggtagaaatcgcttctcaccccagaatcagtggatggacaggcaccctggtttatggaccctattttttgctgagtactgcaaacattttttttcacatcctatgtatctgatatttttaagtcaacaaaactgttattttaagaaaatgggaattaagtgtcaaatctcctttcagaatactgtgtgtgca

SEQ ID NO: 142887 - DNA, 483 bp, Homo Sapiens
ttttttttcctgggtttccatgtattttattccattccactcataccaagagacaattctttttgaggtgtgtttagctctctagacttaattactgctgtgtttgtcacattggctgcagtgagatcgtgacattaggattcctgggagcctgcgctgggcggaatttaagatggctcctccatgatcttcactctctgggtgaaaactgtcggtcagcccatgcccaggattgttgatcagtgctgaaggtcctgaggctgtttttagcatagtctaaaacgcgagggtccgtggcttcattcttgaagtcagtgagaccaagaacccaccaattccggacacattgggaacttagagcagtgcttgggacatggttatcagcgtcagatatttccttaaactagcgtgaagtcgactttaaccttccagcagtgtgagtgagggccctgaccctagaatcaacgcccaaagagctgtccc

SEQ ID NO: 142888 - DNA, 322 bp, Homo Sapiens
  misc_feature (310)..(310): n is a, c, g, or t
aaaaatataagaatacttttaaattagaatactcctatgaatgtgagaataatttcatgtttgaaggagtatcttctcatatttttttgatgacctaaagaaatttagtgttttccatgaactttgtgaatacttacagcttcctcatctgagactgactttccaaagaatgaaatctcagccattttttattggtatttgtcatttactctggccatctgatttgttgctaaatatacacatttgcatttcataatcttctcttttctcttcctttttccttgggcagtccttaacatcccatcaatantcttttttcttc

SEQ ID NO: 142889 - DNA, 440 bp, Homo Sapiens
ttgtagagacagggtcttgctttgttgcacagcttggtttcaaactcctggcttcaggtgattcttccatcttggcctctcaaagtgctagaattaggcatgagccactgcatttggcctcaaaacttttaaaaatcacacatagcattggggaaaagaatgagttacatttctaacataggtaatgtatttaaaaactaatacatgtgttactggcaaaatattttgtattcattatgaaatatacacaaaatccctagaaactttaaagggtaagaataatagtattttcttcccatgtcctggagatttgttttgggctaaacgaatggccttgctaactactatcagataggcctacaagtgattaattccaaaatcagattcatcatttcttggcagacattctccatctcatttgattggcttctactacacat

SEQ ID NO: 142890 - DNA, 422 bp, Homo Sapiens
cacagcggccaatgtctggcagtgggcacatgggggtgcgggggtgtaggtgccaagcgccatggcttagacccgagattggagtccggccgccccccgacagcagccgcctcctgccctccgtgcgccctaggcgccaccatgtcgggagacaaacttctgagcgaactcggttataagctgggccgcacaattggagagggcagctactccaaggtgaaggtggccacatccaagaagtacaagggtaccgtggccatcaaggtggtggaccggcggcgagcgcccccggacttcgtcaacaagttcctgccgcgagagctgtccatcctgcggggcgtgcgacacccgcacatcgtgcacgtcttcgagttcatcgaggtgtgcaacgggaaactgtacatcgtgatggaagcggccgc

SEQ ID NO: 142891 - DNA, 760 bp, Homo Sapiens
aagttttttaaagtaagatttctaattgtttattagtatttgatctgagattgaaattgaatgtcagaaaaggaaaatcactaaattgctattgttgctactaatgaaaaatgcaagtggctttgccagtagttaaaatagtagaacagcaacttttatattcagagttttatgtggcacatacaactttcttttcataggtcttctgattctggtacagtggtatcatctgtaggttcggttgttatcactataggaatattctcagatatccatcccttaggagtcctattaaaggaccgtctgccagaaaggggattgacaaaggacataaacctgggatctgttagcaatagtagctcaaaatctggaactttaaatttaaccattcttgatgctttttcaaaacctccaaatggtgtggcaaccctgttaaagcctcctgtaatcaggcagttctgcctttccttcaggcttgaaaagtttaggatataaagcctctaaaagctccggatcattgctaatggcttgttcccagggagattgatagtacttagggacagctgtggtgttgaatttttcaggaggaatttccttcagtggtccagaatatcctggagcaatgttgtctggatttggagggcttcgtggatctggggtgttgggaggagtcaagggggcttgctgcgaaccaccttccaagttacttccatccactttcccattctgcatagcaatactgtgatttatttgtgctcta

SEQ ID NO: 142892 - DNA, 557 bp, Homo Sapiens
ttttttaagtactgataattaatatttcaagatttatttataagtttaaaacagatttcaagtgatcaccatttatctggttggcaattaagttagtgtggctttctacctgaaataagattatgcttttgagttaaggacaattattagctagatcctgccctatatatgactctaccaaactaagcttagatggggcaaaagtaatgtcagagccaatgccttaacttccaaactgggtatctttaatgacatcttttgtgaagcactcctatcaagaaattttactgtgttatattcaggaacattctggaaccaaagtttctgtttgctacattgtaggaaagcaacaatagtatgcactgctgtaacttcttttaaagtaatgttgcagcttctctgaggaatgttgcaggtggattctccaaggttgcttggtcccctgtgacaagggtggcagtagaccattcattcattctgagtccatggattagaggctggtttattctgattgggagaattgcaaaaggcttcacaaactacgtaatatttaaact

SEQ ID NO: 142893 - DNA, 592 bp, Homo Sapiens
tttcactgaatgtattttttatttttgaaggtatttttaaaatctgggcacaccatatctatctgtaggaccctgggtccaaaggtcctacataactgatatgaaccataattctccatattaacaaaggctcggaaattgaaaccaagatcacctaactcgctcactttggccaatatagtacgaatttcagcttctttacaagagaagagtcctgagatgttaatatgcagcaattctgctgatgtgcattttaactttatgcaccaaggaagaaaggctaaggaattcacaaaagtaaaatcaccccctgaaaaacagatgctggtgattggagaaaaaagagcagtagaattaaggtgttttataaaccagagagtgttttgtttctgataggtaaagggatttcttcatatgttattttaataaaagggaatttcataggtaaaaaccaatattcaaaattataaaacaaatagaactgtttgtgcacaatcactgcatcaaaaatttgcaagagactcaacagaaattctttagttggcaaatgtggtttgaaggggtaataaaatctttttatggctaaaaaaaa

SEQ ID NO: 142894 - DNA, 565 bp, Homo Sapiens
  misc_feature (39)..(39): n is a, c, g, or t
  misc_feature (54)..(54): n is a, c, g, or t
  misc_feature (240)..(240): n is a, c, g, or t
atcattttcatctttgtgtccttagtaccctacccacgngttcttcgcacctanaggaatttcagtcctgtgccatggaagccttgaattccagtgcccgttacttcttctgctgccagtggctcccatttgtgttctcttctgtggcatcggattcgatgcagaaatgggatacctgtgtactcatcagctcctattcctccagctcaaccaaagttcttttaacagtaaaaaccaatnatgcaaagaagaggaggaagagatggaaccatcaagccctcctgggctcagaatatgtgtgtgtgagcgcacatacacaggtgcatgcagctttgcaatataagattaaactgtacaatgttctataatctccatttttccattcactatattatgaacatcttccaaatcaccatatagttttgtataacccacattttgatgactgaacagtaatgtattctccacaatttgtattaccaaatctttactgatggacacaagttatttagagttttgatcattaaaaacatagctttaataaacattcatatatctttgcaaa

SEQ ID NO: 142895 - DNA, 467 bp, Homo Sapiens
ttttgagtctaatcaatttatttaagagtttcaggaaccaccagtagaggaggaggaaataagattaaaaaaatgtaggcagaatgtgttatcaaactcgttaccactacatgcaacaggagtttaatcccacgggggtttcagatagcatgaaacacacacctcagggttgtctccagccaaagaagaatctggaatatataaataccagctcctgtcagtcactgttcgagggtgctggccctggtacaggcatgtttccgttggaaccaaaggtagtagagcttgatagaggaagaatataaaaattctgtaagtgagaaatcttgtgtaatagtggagaaaacactcccacttggtccttgattcctggacccatatattcaagctttggaaaaatcagcaccccatatcacacgctgattcaaatcatctactatctttaggacagtgcttctttttttctg

SEQ ID NO: 142896 - DNA, 587 bp, Homo Sapiens
tttatattcatttccttttaggatatgcatttttatacatctgactttaactgataaatgactgtaaagaggtgtatctttatggaattgtagaggatttgtttccaaaaaggagctgatgctgccgttctcagtgacaaagttgatgcgtgtttcatgtctgtctgctcccaggtacctcaggatgagtggggagggtaccccaccggtggcaaagatgaggagattcccttatattcacagaactccataagttatgtcctgtgactactgtcctcattgtacgttgcatagattaagagatttgtccaaatgacaccgttggcgagaggttgagccaggatctcaatgtgggctttcaggcatcaacacatgtgctccactgtgcatacaaactgccttctgcgcaccatgttacttccgacctgagaggcctcctccacctttctgctgcgtgacactcacagcccgacgtcttccacacttttacatctgaagcactcagaggttcacagccctgcccgtcacacttgctctgttctttcacagacttcttggaagtgcccagctggagcggggtcacatct

SEQ ID NO: 142897 - DNA, 334 bp, Homo Sapiens
tttcagaggcaaataaaaaaacacttggatttattcatgaggttagagtcatctggtcagttctactgttctcagctgatcttggtggggcttactcaagagtggtcaacagtatttgggccaggcagctctgcagatcagaggagggtgcttacatgtctggaggcttgactgggatgaccaggctgattcagcgctgttccacttgccgccttcttcagcagtctgtcttaggcatgttctcatggggaaggcttttctccattctgaagaggccattccttcatgcctcctcttcctcttctgccaggtgtaaacgtgtgtatgtgatcaa

SEQ ID NO: 142898 - DNA, 525 bp, Homo Sapiens
caagttgaatgttttaagttcactgtctaataatttgagtaaatgcagaacaataaaaagacggcacgcagagatggaaaatgaaatttaaaagagaaaacgttaatcctggttaatcatcagtattgacgagaaccatcaactcaattcctcagcaatatttactgagcagctcccaggtgctcagtgctgagtcacggatgagggatatgtgatgtttccaggctggaagtggggacagatgcaaacaataagacttgtaaatgtaataaatgctgcctttgaagtttgattaaagaactgttgaaataaaggagcagttaactaggctcctattatttgagagcattgtgctaagtcctagtgaggcaagctgatataaaatcatttcttgccctcaaggccctgataatttatttgaataaacagggcctgaacctaaaaagatgtgttcgtagcaataaaacagcacatgctgagtgtgaagtagttgctccactttaagtgctccaggaaccggtcaga

SEQ ID NO: 142899 - DNA, 454 bp, Homo Sapiens
ttttccacatcaatattcattttatttactctatcatgtaaatactagaaaatgacattttaatagtagcccccttctcttttttttaagaaagcagagcaattcagaatatgtaaactagactctgagttttgtcagatgaaatgtgccattaaatagataactcttaagttctgttcagtgatacctgtattcagatttgctcattcatttcagctgattggtcaaacacagaatgtaaaacttggatgttattactctgcttattagcaagaagcttggggtaatctgaaatgtctggcttctccggcaatgacctataaggttttgctttgatttcaccttcagcaaacataggctccgaaagcacaggctcagaaaaggcttttctacaattttcactctcctctctgttttgccttatggattcttcttcctggaagatgttctttac

SEQ ID NO: 142900 - DNA, 386 bp, Homo Sapiens
ttttcacaaacaaagatggtttaatagatttcagcatgtttccacttgacaatgttatacgaaaatagaatctttattaaaatagcaaggcataacaatcactgctactcaggaaacactgtgtttattctttttaatcatcaaaatcaatgactttgggcaagacctgtgaaatctcagagcctgtttctccatctggagaacaggcaggtagggcattgccagctccctgtgagtgggggccactggtgggaggagatggccctggtcgcccatgggatgagaaacttactcctgcttctgtccctggagaaggtcagggagatgccagtgtggccttaaggcaattctaacacttgcttatctcgttttgtaacagagaagag

SEQ ID NO: 142901 - DNA, 1135 bp, Homo Sapiens
  misc_feature (150)..(199): n is a, c, g, or t
  misc_feature (778)..(786): n is a, c, g, or t
  misc_feature (1046)..(1068): n is a, c, g, or t
tcaaagcccgaccctcactcctctgcttcaaaccatctccttctgcacagaatgtccaggtttacctctgtctctctaggacctctctaagtcctccaggcctctttctcctccctcccagaatgtaagtattttctcactgggataaannnnnnnnnnnnnnnnnnnnnnnnnnnnnnnnnnnnnnnnnnnnnnnnnnggagcaaggtaccctcgtggctccaactgcttctcttttgtctgttattttttggggggtttttgggggatggagtcttgctcttgttgcccagactctgtctccaaaccaccatctaccaccttttactcttacaccactacaaaacctgtcaatttgatgacacttggaaaatcagcaatgcaatgtaaaaatcacagtggtcaattcaccgaacttttccagatttcagctggttgtctgggatcatgtagatggaacagggtactcgtgatgccctaccaaggatgctgaccatgtttaagtaaaaacacacacttttggtgccaatataagaatcttatttactgctttagtcaagaaggagatgttatttcacttgtgacttcctcccaagtgaatgagtatacaatttaacaaactaacacagttcagtttattaagttacaatctgtaaccacctaatgtagctcagtgtatggtggatactagatataaacaagagtagggaagtctttggcacctgcatgatgcgtgccggcttttaaattcagaaagatgagaagctacaatgcaacnnnnnnnnnaatctacagataccgccaaaagaagaaatgtttatcagattttgaatgacatagctgtaagttggcggttggcagctttccacataaaatttcatcagcaagtgaaacttgattacagcccaaactagacaaggcaattcaggtgcccggaccctgaagtccacgtgagactacaggagaacgtgcattatggtgcttgccagccagtctcttgaggaactgcctgtaacagtcacggttgtggggagaaacaactccannnnnnnnnnnnnnnnnnnnnnnatggtattaaatataagtcttagcacctttggcatttttgtccaaacagacttcgacatatgaagtg

SEQ ID NO: 142902 - DNA, 518 bp, Homo Sapiens
tgaagcaacaaaagcagagatttattgaaaatgaaagtacactccacagggtgtgaagagccggaacatggggctcaagagcggggcggccgggttatagaattttctggggtataaacaccctctagaggtttcccattggccacttggtgtacaccccacgcaaatatagtggcccacaatcagtctgatagcggaaagcaaccaatcagagcctgaagcgaagttacaaaggttacaccctatgcaaacatttaattagttatggaaagcaaccaatccgaggtactttcaattttccgtctgccacgcagaaaagggcggtggtgggggagggggccgggtccctttgttacttagctgtggaaagttggggctttccttttgatttagttctagaaagtcagcatgaatcagccgtaagttccttgcctccagaccctattgtcctgcctcacagctatgtagtacagagtctgtcacaggctacccagaaatgtacacagagactgttaaca

SEQ ID NO: 142903 - DNA, 412 bp, Homo Sapiens
tttgaatgttatgtaatttactatttccaggttagggtctcctgcaaatgtggtaactatgccttctttgacctcatcccaattaacagtgtccagcaggtcagggcagcaagcaaagacttccctctaaggaacagacttcattctgttaatcaaaccctgccaagttaagactatcccacaaactacaaatcttcagggcaccagcatctggctcatagtccccctttcttcaatgaggccatcaggagacattctggcaaatagcttggtgagatcaaggtatcctctgggaatctattagtaaacaaatgggtttctaaagccagaagaaaccctagtacaatcccattattctgcaggtatttaccacctaataaccctgccaaggaaagtacggttcatgccgact

SEQ ID NO: 142904 - DNA, 560 bp, Homo Sapiens
tttgaattttaatgtctttactggaattgtaaacactgattttctttcctcgcccacccatctgttggtgagtttcagaaggtggatgaactgtgctgcagggacagagaggagggtgcagcttggcctctgggacctcagctgagcactgagtgactgagctctctccgtttcagacgtccacacggaagctgtccaggcggctctatttttcttggttgttggtaacagtggttagatcttatctcagtttcattgctcttcagagaatattcttgaagtttatcttctatgaaatgactggctgctgaccaggatcatagtttctggagaaactctcattagcattgtcacaatgctaatattccatgggtgaaactttcccttaattttcaaatgtaaagatacaagaataatttgccaaaacttctgcttctagccatgatgagataacagggacccaaatcacacctctgccataaacaactgtaaaactgcacaaaacgaatgagttggctgttttaagtctgtgactacagctgtgccagccagaacttgag

SEQ ID NO: 142905 - DNA, 946 bp, Homo Sapiens
  misc_feature (465)..(466): n is a, c, g, or t
ggggcctcccagggtcttagggccccttgggagtgggggagttattgggaagggaaaaaaggaggcctttacgttcaccagggttgggggcatttgtggggagggaggaccgggcaaaaatgcaagggcatgaaatggggaggggtgtcccttccatccttcctcttgcaaaggggacaaatggagagccaaaggacagggggcccatggaaggccccaacactgagaagaaagcagcaatttggccaacatctgggggttccaggggagcaggcctgctcctcggcagagggcagctgcaaggttccatgccaccccatggctgtcccaggccaagcctaagctagacctggctgtcctgctgccatccagtgctgggcagcggtgctgggactcatccccacagcacgacagagtgaccggtctatgacacaaaggagctccagggcccccttgaggtgaagnncgaagggcccagctcctgctagaagacatagatcttgtcccgctgcacagtatccaggtcgtcatccagtgtcagcaacaccaggaaggacccgaacatggcgatggaggagaggaagtgccagatgtcgtggtcgtcaaagaagtcgaggaggatgcagtcccggttgtgctccctcgactctgcaggggttttctgccaggtgctgagtccctggaagaagaagaagagcgcgaagccccagaccacggaggtgccaacgatgcagagcagggggatgagcttgatcctctccccactccggagcttcatgatgatgtagaatgcgaagtaaaggagcaggttgcagatgccaatggccaacaagtaggaagcgaaatcattggggcgcatgataagcccataggcagccagcgaccagttgatgacgttgcccatgaccagcagcaccatgcggtccacgtagagcggcccgctgca

SEQ ID NO: 142906 - DNA, 435 bp, Homo Sapiens
taaagccaagtaatatttcctggaaaactttttgcacttatttttatgaatagagtcaaacgtatagcattattttctcattttctttagatgcaacaaattaagacgttttgaaaggagcattgaatttatatagaaatttacagagtagagttattttagagaattagctcaacttctggtctctatgagctggctttcctaatattaattactaacaaattaacgaaactagaataaaatgggtacaaaatgagaagccttttgaaaagaacagcagttggactgagtgtggtgcttttcacacgagcaagtagttgagtgagatttctgtgaggatgtccaatttgaacactattttgaaatcagcccaacttagaaatgaagagccctgcacatactcaatccacgatcccgttcctcttggtccccttc

SEQ ID NO: 142907 - DNA, 542 bp, Homo Sapiens
ttcaaatgctgagaattttattcttaaattaacaacaaaaggatgacttcaaacagtacatgctgtttgtagatgggtggctttcggtaaatgttgattccttgatcaggtctgtggaaatgctggggagagcgggacgtggttggagtgtagctgtggcggctgtacacaggggagttgatggagccctggctcgtggaccgatggatcatccgatcccgaacatcctggtacccttctgctgatggagtaggagacaaagtcctcggagactctccaaggctctgtctctcctgtttgtcatcatagcccgaagtgtagaaaggctcataggtaataagatctggacgttcaatgtcataaattgccttgaccttcggaatggctgctaaatccttgtaatccaggatctcattgtctacttttgcatagatagtatgacctggtgagccaggaatactggagcctggcctagaataaatactttccgaggatgtcctggtaggccgcagcttttcctcggtcttcgtagatggcttaca

SEQ ID NO: 142908 - DNA, 458 bp, Homo Sapiens
tttttttttgcagaaggctgtaaagctttattgggagaattttaatgaacaaatttccaacataggagcagcctgcatcatttcaacgtgccttcttttaacactgtgattgcttttcaccttcttcaggcgttttcacctcctctggatttggcgggtccatctcctgcccatcaggaccatcttcacactcacacccagtctgtgggtgaccctgttcctggctatgagcttcaggcttcggcccttgacctgcagatgctccctcatcctctccctcctgagcagctgcaggatcctgacgttgagttgctggttccccttcttcaggtgttgctggttccacttcatcactgaactgctcgggccgcataggcccaatcatttcaggaggctgtacatagcgccttggtctaggccaataataggtcgatcttcctcgccaactcatatttcac

SEQ ID NO: 142909 - DNA, 583 bp, Homo Sapiens
gcgcaagacttctttgcagaaggctgtaaagctttattgggagaattttaatgaacaaatttccaacataggagcagcctgcatcatttcagcttgtcttcttttaactccgtgattgcttttcacctgtaacagaaacataacaactgggaacattacttaacagcagtttatttatatgattctaaaggcatgtaaagcatactacagtttgggttttattaaatagacaaaaaaacagaaccctaaaggtgatcctgtgtcttacatccaattaaacctctgtatacactttgagggtagacctccagaatttaaaggtaatttcttacctatacatcaagtacctcctttaaattcagaagcacttataatgaatggtcagcaatttggaaaacacatatgtaaaacatatttcagttgattactcaggaagtactaaagtcatggtctttgaacttcaaatcttatcaactcatgtctcaaaatctgaaacttacgtgtaacatttgatatggttagaggtgattatatcactctatccacagtcttattagaaacagtggctcatgcagactgactg

SEQ ID NO: 142910 - DNA, 494 bp, Homo Sapiens
  misc_feature (447)..(447): n is a, c, g, or t
ttttgatgttttacaaaattttatttttcaaggttgaacaatgattcattgtaggctttcagatgaaacaattagcagtcttgaagtacacattgaatacaaattaatttgatttcagtaggcacatttcttggaacaaactgaagagtacttaaaagatcccattgaatgcatgtggcattattcctagtttacggatactgtttgaactaaatgaatcttgggagagggcagttagtaattaatgcatttagaaactgatagcgctaaaatattaaaacttatgcattccaatgtttacatgtgtatgtgtgtgtgcacatgtgattctgctttgcctgttttactatcttaatgattatcccttcttactgtttcctctgaggatcttatctcacttctactgacagtcagaaattttcttatcagcccttttatccatcattntctagttttcaaatatttccaataatgccttttattttagacaaggg

SEQ ID NO: 142911 - DNA, 424 bp, Homo Sapiens
  misc_feature (196)..(215): n is a, c, g, or t
aaagcgaactttctttatgtctgtggactagatgaaggccacaagattagaagttactataatacatgttacactgttaacttttagcaaattttacttttgttgaaaaccttgtaagtttgggatttcaattattctttgctattaataagagcctgtttagtctaaattaacttagaatttgtatagatggccnnnnnnnnnnnnnnnnnnnncctgttagcaaagcagctgccgctacagattgaacacatctgggccatccgcaggttactgggttaagggtttctgataggaaggcctcagtgctttccggatacgcccttgtttacactgacaacaaagtggtattacagtgttacagggttactgagaatacctttaattatcaattataggttttaaatatgccttggcttttaaa

SEQ ID NO: 142912 - DNA, 332 bp, Homo Sapiens
  misc_feature (158)..(169): n is a, c, g, or t
aaggatgatttaatattaacccctgaaaattcccttaacccagcaggtttcctaacaggggatttaaatcttaattactatacaaaggttcgaccagacctaggaggaactcccttcaggacaggatgatcgatggttcctcctgggtaattgaaggnnnnnnnnnnnngccatctataccaattctaagttaatttggactaaacaagttcttattaatagcaaaggataattgaaatcccaaacttacaagtttttcagcaaaagtaaagtttgctaaaagttaacagtgtaacatgtattatagtaacttctaatcttgtggccttaga

SEQ ID NO: 142913 - DNA, 398 bp, Homo Sapiens
  misc_feature (74)..(85): n is a, c, g, or t
  misc_feature (90)..(150): n is a, c, g, or t
  misc_feature (310)..(321): n is a, c, g, or t
aaacaaccagttaatttatttcaggacaagaatttaccatataacactctttttatgtaaattctgccccttcnnnnnnnnnnnncctgnnnnnnnnnnnnnnnnnnnnnnnnnnnnnnnnnnnnnnnnnnnnnnnnnnnnnnnnnnnnnaggccacaagatcagaaattactataatacatgttacactgttaacttttagcaaactttacttttgttgaaaaccttgtaagcttgggattttaattatcctttgctattagtaagacctcgttttgtcaaaattaacttagaattcgtatagatggcnnnnnnnnnnnnctttaattacctgggaggaaccatagatcatcctttcctgaagggagttcctcctaggtatggtagggcctttgtac

SEQ ID NO: 142914 - DNA, 450 bp, Homo Sapiens
  misc_feature (429)..(429): n is a, c, g, or t
tttaggaaagaaggggatttattgctgtaactggatacagagagaaggctggagataactccaccagaccaactcgaaatgttacagtattcttagtgtttatataggttggggttatgtgtctacgtacagtatagcattcgcctaagtccactgataactaattttgtttcaactagaaggtcagaggcaaaaaatgcttgctaagtctgattaagctgtgagggccctggtaccttcaaggtctgtctactgtggtacctgaatgattatttctatcttacctcccttacagcttggtctggagactgccttagaccctccgatgaatctattcaaacagctgcctctgttaccttgactcgtctcagattccgtcgacccgagacaaggaatataagactgtctctattattttgacttgctccnagttagggagaagcctatgca

SEQ ID NO: 142915 - DNA, 582 bp, Homo Sapiens
  misc_feature (365)..(365): n is a, c, g, or t
  misc_feature (463)..(463): n is a, c, g, or t
tacttttgtaaagaggtttttattgatttgcttaatataaagcttactatagaatactacagatataacacatgatataaatgtcactgttagagccatcaaaataattcctatttttattaatgattgtggttgaaattattgagaaatgttaattatgttatcagagctcaggaggagttaatggtgctaactgggggtggtggagatagtcctatgagaagcagagaagccaaatctacttccccagcactgatttggtcatctcctctatattaccaagtataacactctatacagaccatgagagagcacaatgcacgtacagaatccctgattatttatgcagcacattgggatgaagncccgtcttcatttcagggttctatttgtaaagtaatttgaggtctctggtgttctggggcacagctttcttaaagagcaaaccagaagtccttagggnaatcaggctcgacttacggtctcatcccgtgactcagcctttagaacgatggggttttctgttagaggagttctccaagcgtaatttcaggggactgtgttcttacagggtcgaagaga

SEQ ID NO: 142916 - DNA, 527 bp, Homo Sapiens
ttttttgtgaagactaattgtaagcttttatagttgattaagtcacacagtgcaaagaaaggtccattgacccttttggtaaagggagggctggaagccacacagattaagttcaatggatagtccgtatatacatgtgatgaggaacacccaaactaaatttgtgcttcttaggttggtcattctgaatcccgatgcacttctgaagcatcagctcggcaaattgggcaagtacgatttgccttaagccatttgtcaacacacttggcatggaactcgtggttacagggtaagactctaagtagctgccttgactcaaaatcacacatgcatactacacacaaagtctgttctgactggtggttgttaggattgaaccgataagaaaggaagttgttcaatatctgctttagtcagtccacgaggctttgcctctcccagtcgctctgccaggtttaacagggcctcgtaattttctacttctccatcttctacatctaattcaaagctgaaagttgggcccactg

SEQ ID NO: 142917 - DNA, 1189 bp, Homo Sapiens
ctttttctaaataagtatcagctgatttaatctcgcccaattgaatgcgtctcttttggttgatcaatgcgatagagaaactctgcaggtaagaagtatccaagatattccactatatctggagtagtgtcataatggtagtgtccaccttctccatgacgactaaaaaaatgagtgtgctccagtcgcaaatcaaaccctgggtctctggagacaaaaactggtagacaaaccaaaggagctttcatttcataaaaatgcaaccatttattcacttcttcatcagagttcaaggggcaggaataaaattctgcaggcataatgtgagacttcacttttcccttctgaattatgaaagtacctcccattcctataggcttatttccataatgtttttccagggtctctctcatacaagtcacaaagttaagtggttccagttcttcttttggctttcacctcaattaccttgccaggttgggcttcactggcaaaaagattagccagtaatgcacactgaaaatcatgacatttctcactgtatttctccagtaggcaccctccatctgcagggttcacatgggcaaagtaacttccatttacaggaggcttgtgttcactttctgtctgaataactggcataaactcagaattgaacccgagagtctgaaatggacctgctcctgctccaagaataaaggctccaggcagcttgatttcttttgcaattttattcagatcataaacttttttttggtttacaagaggcaataagtaaggcacacctccaacttctgcaattctagttttcccacagatgccttttacaggaaaggtaaagggttccttagtcaaatcagggcaatcaactacagagacctggacatcagcaaagttatcttttaaccccttctgcataactccagcaagctcttcaagacttggtacatgaaaagaaaactcagcacaagccattttctttcttctttaggtgtgaggttggacaaatagagctactcttggttaattatcacaagagtccacagcgcaccaagtatgaacagtttctgttctaaacggtcacggtagcaaaacacccagagtccggatcttcgcctaggccaaccccgcctcctcaggatacgcgagctagagctccgcccacgttatcagatcccggaatccggcc

SEQ ID NO: 142918 - DNA, 663 bp, Homo Sapiens
gagtgagccaccatacccggccaacccttgttttcttatctgtaaagtggcaatagtgataccagacctcaaaggatgagaattaaatagtatgtatatcatgtaactagcgtaatggttggtgtataacactgagaaaagctgagctgttgttattttcctcctctgtgggttcagttaccaaagcaaagccattggactatactagttctcatccattttctgccccagcccacctgagtatcgtaacattctcatgagaataacctagaatctccagaggaatgtttctcaactagaggcacatgggattctttgagacagaggaaggcagagaagcttcagaagctctccaaatgatttggctacaggtctctagggaagtgcgggttcccatggagagtgaacggactacgtgatctctgagggcttgttcaattgcctctgggactctctgacttgcccgtgaggactggaaatacctgtgagaaaggaaacaccaggtgttcctggagactcctccaaaccctcacacaaaggcgtacaattaggtgcgaaggattgtaagctgaaccccggctgtgcgagacttcttatatctttacagcttcaagatgtgcagcacagtggaataaacagtaatgactgtgcccaagcagccac

SEQ ID NO: 142919 - DNA, 517 bp, Homo Sapiens
atcatttttgtctggtttattacattagagtcgattttaaaatttttattcaaccagttttaccttagatttttctatgactttaatgacagtatttaaaacaaaaacaaagataaaaatcaaatgcaacactaaagcaataaagattgcaagtgagtgagagggaaacagactacaatcggtcctaatgaagagggagaaagatgaagatatgaagatgactccaattttagttttaatcaaggtactgatttgtggaggtatctttgacacatcagttgacctctgagtttcagattctatacctgtgaaatgttagaataaaaataacaatatcttacaacatttacttgaatattaaatgaagatcacacatatatatggaatatattttataatgtggaaaaggctaaggctgtatatgaactaactcctatatttcataaataagattttgatgatgatgagatttgagattactattactaatattggttaaaaagtttgcatttcataa

SEQ ID NO: 142920 - DNA, 2845 bp, Homo Sapiens
aggctggtacggtctggaagtttgggatcggttccggacaaccgtgcgcttttagtaaaagattggggttcgcgcgggggagaagggctgccccgggccctctggttctcgtcccgcagcgtccgctcccccgcgccactgcgccgctcccaggaaccctgtactccggggtcgccggcttctctcctgcctccggtcccgccagacacctcgagctccttaagtagctcggtccttgacgtccctctgggcccttcccgcgtctatcgcctgagtccccgggcccctctagccctctgttccctcccctcttttgttcctccctagagccccgccgccctcagggctgacagtgtggacggcgggagtctcctcgctcccctgctgggattgactgaccgagcgtttagtgactgcccagatctggctgatgggggtaccgagaggtggcctgggccgggaatgtccagctagagtcttccgtggaagtcagacatgaaactgacaggcctaagggaagctaggaagtcccctcaccgctcagccagggtgatgggctggactgacagactccagtgaatttgagcttgcctgtcaggctgattggctgatagacagccctggattggctcactaagactgaccagcccgggaccaagcagttctggggtcccaacctgggtggaaggtctgaactgatgacccacccaggctgaccaggccagcccacctcactgacctcctgacccctgacctcatcacctgtgcagccatggagaagatgtcccgtgtgaccacagccctgggtggcaggcgtgctgacaggccgtaccatgcactgccacctggatgctcccgccaatgccatcagtgtgtgccgctgacgcatgcccaggtggtcgtggcaggccgtagcatcttcaagatctatgccatcgaggaggaacagttcgtggacacagctgaacctgcgtgtggggcgcaagccttcgcttaacctgagctgtgctgacgtggtctggcaccagatggatgagaacctgctggccacagcagccaccaatggcgtggtggtcacgtggaacctgggccggccatcccgcaacaagcaggaccagctgttcacagaacacaagcgcacggtaaacaaagtctgcttccaccccaccgaagcccacgtgctgctcagtggctcccaggatggcttcatgaagtgctttgacctccgcagaaaggactctgtcagcaccttctcgggccagtcggagagcgtgcgggacgtgcagttcagtatccgggactacttcaccttcgcctccacctttgagaacggcaatgtgcagctctgggacatccggcgtcccgaccggtgcgagaggatgttcacagcccacaacggacccgtcttctgctgcgactggcaccccgaggacaggggctggttggccactggagggcgcgacaagatggtgaaggtctgggacatgaccacgcaccgtgccaaggagatgcactgtgtgcagaccatcgcctcggtggcccgtgtgaagtggcggccagagtgccgccaccacctggccacgtgctccatgatggtggaccacaacatctatgtttgggacgtgcgccggcccttcgtgccagctgccatgtttgaggaacaccgagacgtcaccacgggaattgcctggcgccacccccacgacccctccttcctgctgtctggctccaaggacagctcgctgtgccagcacctgttccgcgacgccagccagcccgtcgagcgcgccaaccctgatggcctctgctacggcctcttcggggacctggccttcgcccgccaaggagagcctcgtggctgccgagtcggggcgcaagccctacactggcgaccggcgccaccccatcttctttaagcgcaagctggaccctgccgagcccttcgcaggcctcgcctccagtgccctcagtgtctttgagacggagccaggtggcggcggcatgcgctggtttgtggacacagctgagcgttatgcgctggcttggccggccactggccgagctctgtgaccacaacgcaaaggtggctcgagagcttggccgcaaccaggtaggtaggtgctgagcctgggggtccctgggccacgacctcagggcaggggctggttcctccgtcagctgcgctcaccccacctcaagctccgcaatggactccagccagtcgcaccaacaggccttgccttggtagctgagggtgtcaggatcacacagggccagggctccagggtgggccagggctccagggtgggccagacccaggactgtcctctgaggggcgggggtctcgggagtcgtgtggctcaagctctctgttcttccccccttgcttctggagctctccaggcaccagcagcggtggagccgggagctgccattcccatgcccatctctagctgccccgcaagtccccactgcccaattctgtttttcctctgtgctgctgtagggcggggaccggggttttttgtctttcccatgagcctcagctttcctacctggggtgggcctggacattggtgtactgagggcagctgaatgctgagggctttgtgactgtcccaggcagagagggacctgcatggggtgctgggtgtccagggaacgcccagcaagtgaccagtgcccggccctaaggtggcgcacacgtggacccatgcggcggaatcagtctactggagggccggggcctagtggcccaactgcaaaacctcgacacacagggtgggccaagcgggggccccggggagcgacggtcaggaacaggacaccgagaaggaaatggccc

SEQ ID NO: 142921 - DNA, 120 bp, Homo Sapiens
cctggcctcagactcatttttaatagctgcattatacacacacacagggaaaatgcctaagatttattaagtttaaaacacaaattacaggacatatttcaacataattcaatttttgtt

SEQ ID NO: 142922 - DNA, 897 bp, Homo Sapiens
  misc_feature (52)..(60): n is a, c, g, or t
aattttgtattaatataattaaggtatactaattctgtgatccttgaagttnnnnnnnnntctggtctagctccattgtatcattgctggctatagatgtctgaaacataaaatgtatctaatgaattttacacaatacgttattaatattcaggatgtggcttatttatggaggttgctggttttaacagttccttttacttttgcttccctcccttcccttaacatatttttaaatcgttatccatattccttaaaggaaccctgacttactagaattacttggatttatgaactcaacaaagaatttatttcaattcttagcattctctaaaaggttactacttaggcttttacttgagaaagaggaagagaaacgtctgtgtttgcagtaaaatgtatgcccttccatttttgcttttaaacattcgtaggcatagctattctttccatcagagtggaaggggtgggtgctgggtgctgtgtggttacgatgtcaaaattaagatggatgagggagcaaccaagtgaaacatccaattcctagttttaaaatatcccctcccccacctccactaagcaatattggcaaagcaattttataatgtgtgaaagccacacgaagagatgagaatgcagccctccgtaatattgttagtggaagggctctaaaatttgttccctggcctatttgctcctattttttcaatgggtttcatatgattttagaagagtcctgtatgtaaaatgtcatcattttcacaccaaaataaattttacaaaaatagaaacaagaatttataaaacaatggattttaaaaaggcactatcacattaaatcctgtcatttagtgaatgcagaaactgagatttagagagggtaaactgcttcgttac

SEQ ID NO: 142923 - DNA, 368 bp, Homo Sapiens
  misc_feature (43)..(59): n is a, c, g, or t
tttattttgttttctatattttgagggattttggtgtttagannnnnnnnnnnnnnnnngagaattccttatattagctgcctaaacctgtcatgaaattacctaaaccagtgggtctcaaacctagcagagcttccggaggggctttttaaaattcaaacacttaggcccacatgagattctaattcagttattctgggatgaaccccagaatgactttaatgggaggcagtggtacatttatatagggagccccgagtcctaaatactcttccaatgtgaagctgagtggtcactggagttgatgagccaggagtttacatataaatgagccaacaaactaacagtatatgaatgggctaagttca

SEQ ID NO: 142924 - DNA, 338 bp, Homo Sapiens
gtgtacagtagctcacgcttttacttttttggagtcacaacttcttaatggcttgatttcatgacatattttctttggtcttccagaactttcctcttcgtaagaagaattatagatccttaaccaagttcacatcagccatttagcattctatggagggaggttcccagttccatatcagtggcctttggaggagactgtggtggccttgccataactccagggtggctctgatggtggttttacattaagagtttgtcttagtcaccaagtggtagctacttccattgccttcatccccttgatattccagataggacacagatcacccttcgtgt

SEQ ID NO: 142925 - DNA, 433 bp, Homo Sapiens
gacctttgagattgtaacttcttaggaaggtttgctgaacggaagaggaagtcttaggacaaggatgcaaacagaagctgccagatcttcagggatgtgtaggcagaaagccagagttgcgggttggtccttttatcgttagtgctctccagctgctggggagttgtaactctgacaaatcagtgaagaggtcttcttatctgttcactgtgaattttaactccattttaaccttcgtaagaagaattatagatccttaaccaagttcacatcagccatttagcattctatggagggaggttcccagttccatatcagtggcctttggaggagactgtggtggccttgccataactccagggtggctctgatggtggttttacattaagagtttgtctaagtcaccaagtggtagctacttccattgccttca

SEQ ID NO: 142926 - DNA, 1004 bp, Homo Sapiens
cagattaatcgcatatttatgtttttccacctttctttaaatcgtaacgcctgggggcgatttcttccacccacacattcttgattctgaaacacccctatactgtcagacgaaacactttcccgcccaattgagggcccttctgttaagttttaaaggccccaatgggccagtatttatttcacccggttttgcggaacccatccccattataacagcctcaggacactgacctggcaccattttaataaaattaaaccttaccaatgatatttgtaacaccactgtcaatcatataggagacagtgtatatcaaataacatcaatatattatattgtgcagttttgatcatatacaaccatattcataccaaacagtttgattatcctcagaaaccaacaatgcagcttctgtgtcatcaggatagaggcatgcagaagtgacaagattgttgctatttatagaaaactgtaggttactgttactagggttctgatgatcagaaaactgttcattttctttctgtgcaggtttatccaaagaggcagaagcctggtcagttattctgatgactggcctaggaggtaacccacttatgttactaactaattctgtattcagggataagaatggctgagatgaatgggccacagtaaatggtcctatgctatcttttgccaacattccgaatgcatcactaggcatcctaatagtggcaaaagtttggtttagaaaatgtgaccttcctgttcttgagtttctagcctgggcatatagaggctcaggcatgtctatagctaaatcattttgggcacaagaacctatagtatgtgttgggatgtcaagtatatgagaggaccactggtgtaaatggtactcactagatgctgcagtggtgttgctgtcagcagcagcctggtggtgaatcaactgatataggcagtctactgtcccgacgcgtggtcgacgatatcccgggaattccggaccggtaccagcctgc

SEQ ID NO: 142927 - DNA, 535 bp, Homo Sapiens
caactccaaatgtttgtggttcagtatttcccacctacatttctgtttggtgacattgctcattttaacaaatatgaccgagtctagtttttctttaaaaggatagtttatgagtaatctttaaaaccatttccataccatctgtatataaccatttcggtagagaacacactacactgaaccctgctttagagctgtgtgttgagctaaaaatataattttttaaaaattgactagcaaaatctatggccacactgagaagcctttgaaaatggcaaatacttttcatcaccaattgcccaattcatctttcttctgcttcctcagccttgtagcaaaggctacacagcagcccacagtccacagtctttttgggaaaattggcctgccaccttctttaagctcagtttatttttgacttactttctttgctgtagttatgaaccttggggcattaaaatcccatggcaaggagcataagagatgttctcgtagctctgcgttgtgtgaaatgtccatcttagttttgttaaaa

SEQ ID NO: 142928 - DNA, 437 bp, Homo Sapiens
  misc_feature (135)..(361): n is a, c, g, or t
tttaagcaaaaataatatattgtgaaatttattctatagaaatgagacacatgacaacaataggacacagaagagtaaaatggaagtaatattacttaaaggtagactgtaataagttaagatgttatagtagannnnnnnnnnnnnnnnnnnnnnnnnnnnnnnnnnnnnnnnnnnnnnnnnnnnnnnnnnnnnnnnnnnnnnnnnnnnnnnnnnnnnnnnnnnnnnnnnnnnnnnnnnnnnnnnnnnnnnnnnnnnnnnnnnnnnnnnnnnnnnnnnnnnnnnnnnnnnnnnnnnnnnnnnnnnnnnnnnnnnnnnnnnnnnnnnnnnnnnnnnnnnnnnnnnnnnnnnnnnnnnnnnngagacacagaggagggatagacagagaaaggagaaagaagcaaagtgactgtgaaggtagatatttaaagtgattg

SEQ ID NO: 142929 - DNA, 458 bp, Homo Sapiens
  misc_feature (233)..(252): n is a, c, g, or t
gcccgcccctggcagagctcttggcggggagggaaggggagagggaaatataaccctgaggtggggatggttcagctcccaaccccggaacccctggtgtgtacgggtcaggcagacacatgtggctgggcggctgggctggggagaaatggagcctaccaggtgctgggttgcaaccccgctgcccggtgtggaccccaagtctagatttaggcaccccttgctttctgtcnnnnnnnnnnnnnnnnnnnngagacagagtttcgctcttgttgcccaggctggagtgcaatgagtatcatgcaggctggtttggagggagacctaacgatctccatgttgatcctctaaagggcagtgctatgggcctctcacaggctggacttcactctctggaacttatttgtaatatcagccttagccaccccaagctttacgccttcttctggtctctctct

SEQ ID NO: 142930 - DNA, 964 bp, Homo Sapiens
  misc_feature (108)..(145): n is a, c, g, or t
  misc_feature (538)..(557): n is a, c, g, or t
  misc_feature (576)..(633): n is a, c, g, or t
  misc_feature (645)..(712): n is a, c, g, or t
  misc_feature (776)..(784): n is a, c, g, or t
  misc_feature (894)..(920): n is a, c, g, or t
tccaactggaatcgtttaatgtgtctacttcttccacgcataattataaaagaataagaatcgacaaaaatattttctttccataatatgtagaggtggtttgtttcnnnnnnnnnnnnnnnnnnnnnnnnnnnnnnnnnnnnnngcccgcccctggcagagctcttggcggggagggaaggggagagggaaatataaccctgaggtggggatggttcagctcccaaccccggaacccctggtgtgtacgggtcaggcagacacatgtggctgggcggctgggctggggaggggacagccgccactgaccagcagagcgtggaagttcggtgcgtttcagtgcctgcctgaaagcttggggacaggagggctgtccacaggtggtgccccccgcgggccctggccgcttctcctgtggggcccgcatgaccctctgctcgggcttgggaagaaatggagcctaccaggtgctgggttgcaaccccgctgcccggtgtggaccccaagtctagatttaggcaccccttgctttctgtcnnnnnnnnnnnnnnnnnnnngagacagagtttcgctctnnnnnnnnnnnnnnnnnnnnnnnnnnnnnnnnnnnnnnnnnnnnnnnnnnnnnnnnnncgggttcaagcnnnnnnnnnnnnnnnnnnnnnnnnnnnnnnnnnnnnnnnnnnnnnnnnnnnnnnnnnnnnnnnnnnnncttgtatttttctaaaaaagacggcgttttcccccaatgttggcccaggcttgcccttgaattnnnnnnnnntcaggtgaacccgtccgcccccatacctccccaagtagggtgggaattacaaaacgtcgaccaacagcgatccgggccttgtcttttaaaataacctccgcccaaaatannnnnnnnnnnnnnnnnnnnnnnnnnnatttcaaccgggcgtgccacgatttccccctaccacctcaaata

SEQ ID NO: 142931 - DNA, 452 bp, Homo Sapiens
  misc_feature (372)..(383): n is a, c, g, or t
gaaaccacaccaaactcctggttggtgatgagagggggagaatattctgctggtctgcagatgggtaggaagagagaggcagcagaggctctggcacaacagtgccaggctgagggtggcagaggtgactggggcctgagctctgcctacagaagaaacccccagggcctccttccccacagttctcaaggaagggcctctggcaatcacagctctgcagcccaaccctctccatggccgatgggacttctatgaaaaggatgagcacacacactcggagggctgagcagcacgctggaaactgtgacttggtgatgcccagctgcacacgaaattacacatgactcaccttattaagggctattgcactgnnnnnnnnnnnngatgggtcgcttactggaaattattgtattgtctttattttattaaagcaactatgttttaaatgcaaa

SEQ ID NO: 142932 - DNA, 366 bp, Homo Sapiens
cacgtattctttcttcccctcacattttcaggactgaaaattagaaacacttttctcctacacacaaaattactccctcacacacactttattttccccctgctttgaagtgacagttgctgcaagaaaaggtttctctcagaagagcacaggctgtcctggccagaacgaaggggttaatttaaaatacagccagctaggtagtcctaggggcatgctttcccttggggttgggggtggtatctgaaaggttggagggggtgctcctggggctctgctaatattttattttttcatctgggtgtgagatgtacagatgtgttcactttgtgaaaatccagtgggctggatacaggatatgtggtc

SEQ ID NO: 142933 - DNA, 365 bp, Homo Sapiens
tttacttaaggtgattatatttattgatacttacatattaggagttaaaacaaatttaaaacatacgagtactgtacacgcaagcatgcatcccctgagtctgagtgaggctgtcactctagcatctggaatgctccgttgtatattcaggaggggacagtgaaaaagacaaataataatgtctttgtattatgaaaagttttgatctcatagatctcctgaaagtctcaggtatcccccgggggtccctgggccacactgtaaggaactgctgcctactttttcccatggaatgtgaatcaaaacctgttgaattttagctgtaacttaagcctagtttatatttgtaaaaagaaaatgtacag

SEQ ID NO: 142934 - DNA, 458 bp, Homo Sapiens
tttttaccacagacaacaaacatttatttctcacagttcaggaggctgcaagtctgagatgagtgtacctgaggctgggttctgccttctcactgtatccttgcagagtggaggtccagggtccagggtcccttctataagggcaccaattccattcacgagggctccaccctcatggcctaatcacctcccacaggaggtgtatccatgatgacgttgatatacaacactgggccacagtgagggaactaggagacatccatgggatgccttttctttccttcgtacatatggtcaagcccagctcagggaggccagcgggtcactcggcagctccaccatgacggaaccacgagcactgcagagctgacagatgtcgggggtcctctccctccatgctaagggtcatctagcctgtccgtagactctcctgtgcagcattcctgacccgtgacgct

SEQ ID NO: 142935 - DNA, 567 bp, Homo Sapiens
gagagagtaacaaaacaaagtttatttggcgttggagactattgtgttttgcctacacaatcatttccctttaattccccctttctttcctggaggactccaattttgttttatagttcattcctatcttcagccatatgcagttgtttgctctgagaaaattatctttctccaggctcaggagtggtgaatcttaggtagtctaatccagtcatgataattccactttcctcatcagtaaatgacttaagaaattccatgggaccaaatttgtccaatgaaacatgagtagtagtctagaggaggaccttctggtaaaagtatcctacatttgtaatagatggagattgaaaagacagatacctccagatgttggtggattaggataacatggctgaaactgctgcagccatcttgggaccatcagggtgggaattaccatgctgagtaaaatgccttggctaagtgaatggtctttgcattctttcttgagagatattggctttgctctaaaagggggtttccggatcccacaaagaaaaagaaagttaagaatccttggaactt

SEQ ID NO: 142936 - DNA, 424 bp, Homo Sapiens
tttgaagatccagtttttaaagttagcccttgtattcgtttccttgggctgccataataaattccacaaaattggtggcttaaaacaacagaaatgtatgctctcacagttctggaggctagaagtctgaattgaagagggtgttaggattggttttcattggaggctgtattggagaatctgtctcgtgcctccctctcatcttctggtggttgcctacagtccttggtttatcactctgtcactgcaatctcagcctttgtcatcacgtggactttttccctgtgtgtgtctgtatctccctcttataaggacactagtcattggatttagggcccaccattatccaatatgtcctcatctcaactacctagatgtgtaaagactatttctcagtaaagtcacattctaaggttctgactgg

SEQ ID NO: 142937 - DNA, 557 bp, Homo Sapiens
  misc_feature (452)..(452): n is a, c, g, or t
  misc_feature (496)..(496): n is a, c, g, or t
tttgatttgctaaattattttttaatggagaacttctctggagacaggaggctggctgggcagggagctgaggcagggaggaaaagtctcccaggagccactggttgaagggtggacgggaactgaggacagggccagtaccgtgctctgtggaactgtccagacctgccgggagctgcacctgggaagcgaggctatccttccagcgtcgaaggtcctgctgtccctggggtttcgtcactcctgccgggtctccaagcagtccagcaccagtgcagcctgggtcttggcttcctgcaggaggctggaaacacgatggtggatctggtccttaaatgcctcgtctgtgatgtccctcaggttgatgagcacgttgaaatatgcgccaaacacgcccatttccagggctttgccgcactgggaggtctgaccggcagcccagttccacacgnggccagtttctgcagcgccggccacagcgagcccccgtcttcgncagcgtcacggcacagagacttcccgcctaacccctcctgaggccccctgcgcctgatttt

SEQ ID NO: 142938 - DNA, 382 bp, Homo Sapiens
  misc_feature (139)..(151): n is a, c, g, or t
  misc_feature (348)..(348): n is a, c, g, or t
tttttgaaaatcaaacatttaataaactgtggggctgggggtggggagaacttgccaagggtggggagcacgaagcctgggcctatggcaggggctggacttgctacattttgggagttcagcacaaggagctttgggnnnnnnnnnnnnnctgccaagatgcattatagaaccatgaaaaacaatttctcagtgtggcccaaatggtggcctcacagtcttctcctggagactgtcactaaggcgtgagtctcccggcagctgtcagcattcaccatctctgttggtctgtacttctgaagcagtggcctgagaagtagtttcagccacagaagaaacgaacacgtnctgggggcttgtgagttgccgggacgtggttggg

SEQ ID NO: 142939 - DNA, 414 bp, Homo Sapiens
ccccaatatgcttccccgactgcaatgacaaaagtttctaaataccaaatgtgatacaccaagactgctgatggttttgtaaagagtcatttaatttattcacaaatgggagttgaaacctgtggctgccttgcccatgaaatcttggcgggctttctgagcctgatcccggcctgggccttctacagcggtgccttccaaaggctgctcctgacacactatgtggcatacctgaagctcaacaccaaggtcaggtagccaggcggtgaggagtccagcacaaccttttcctcaccagtcccatgctggctgaagaggaccagaggagcagaccagcacttcaacctagtccgctgaagatggagggggctggggtcacagaggcatagaatacacattttttgccactttaaa

SEQ ID NO: 142940 - DNA, 593 bp, Homo Sapiens
agtgacctgggaaagcctggcgatggtggtttgatgaactgtgggttctgcatgacagtatcactggtgtacagctcactctcgccccggatgcggcggaaccgagggatcttcccattgtattcctgcttccggatggtggaatacacctcgtccccttcaaacagaaccagggagttctcgtccgggctgaagggggcatagcctctcatctcgccaagtggcaccacagtgccattcaccaggttccagcagctggggtgccgggcgttggtgccacaggccagcagcccctcactccgcctctccaggagagtgatgtagttctcgcagtcccgcttatccagacaggacccctttgtggagccgatattcaccgtgcgcacagatgcgttcttgccctcggggaagtcaaagaggtagaccttgccacgtcctcccacccacacagaggagctgcctggctcgtggaaaagcaccgtgtgcggctcagtctggccaaagtccacccggtcctgccctacatggcctttccagacggcgaagatgcggggtccgctccttaggtggccctgggcggaggcggcggccgc

SEQ ID NO: 142941 - DNA, 686 bp, Homo Sapiens
  misc_feature (48)..(72): n is a, c, g, or t
  misc_feature (203)..(216): n is a, c, g, or t
  misc_feature (229)..(229): n is a, c, g, or t
  misc_feature (345)..(346): n is a, c, g, or t
cccgttcctggagttggtttccaaaaaacggtccggggtggccccgcnnnnnnnnnnnnnnnnnnnnnnnnnaatcccacgcgccctttatttgtgtggccggaggatttttttgggggaaacggggggtggcccgcggttgcctgtccccgtgaggggggcccgggcggcaacaagaaaaaggtttgaaaaaagtttttgannnnnnnnnnnnnnccccggcaaaaanttaggagtggtggatagggatagggagagaggaatggggggagattggttattatttagggaggttggaaatggagtggagaaaggggagttggggtggggaatgggataggggtnngctgggtgttttgagctaacataaaggttttattgaataaatacatgcactgtcacgtgaaattagtttaacagaaaggaggttctctactttttaacccccatcccccaccgctgttctctatttgcagtggggggtccagctggaggtggaataaatgcggcaaccacagaaaaaacacacagctacacacaggcctgcatttggcttatgtgcctgaaaaagaagggccgacctcttgataaagaatgtctgtaaaaggaattcttaccgtgcagaatatattatcatggtaaatacagttacaaggctgcttctattttatttattttttgagacc

SEQ ID NO: 142942 - DNA, 457 bp, Homo Sapiens
ttttattgtttaatgtaatcagttttcattttaatatctttgaaatctttttcaaaggactgtagttttgtaatggacttttcaagccttccttccattgtttttcttccgttcactggctccacacgtttcctggggagtagcctcttacttgaaggtttttaatatgttttgataactttaataacttcaggtgatgtctgtataatttttaaagtgcagctctctctaacaaatgtgccttacaactcctgattaaacggcgtcttgaaggttttaaaatgtgatcgtgtatactggaattcaaagaggcttcttgtcagcagtcaagtgatgatggaaaactgtaatagtttgtaaagttcctctttgctttttccttgttaataagtaattccctcatgatccttttccccaggaacttgggtgagaaatcataaccttgtcctgatctttc

SEQ ID NO: 142943 - DNA, 394 bp, Homo Sapiens
tttacacacacacatatatataactttattaaacatttcacaaatgtcttacatatatcatttgccacagatttaaatccaaattcttccaaatgctatttgatgtttatagattatacgtaactttaaaaaacatttaattcaaatgtgccaaatgcagcaaagggctggaaaatagaggtttcaaagtaaatagtcatttagagacaccagcaaatagatctgaccttttcgagtggctttcccaaagagtttccaatcagtttccagtcattcaagacttcttcaactttggaaataaacctttcccattccgaggcagtggtgaagtccgtgatctcaaatacctcggattcgatcccggaaatgccggaccgtgccaaccatgggagaa

SEQ ID NO: 142944 - DNA, 645 bp, Homo Sapiens
tttggtgggtaataaaaatttattgaaaattagggaaaaaaatcacttattctaattcttctgaaaggcattactgatgttgcatatgaataaatccctccttccccaggacgaaactaccatcctccaccatccaaccctctaaacagcacgaatttaaaaatcttgcaattttatttgcatataaaggccgctagatatagaatatcacaataaatttaaagaaacaactgctttcctaaatttcattaacaaagtaacataaaatagaataaagctcaacagcatttacaatgggaaaacagaaatgactattagcgacaatattttgtgctagcgaagattgcatcgacacacagtgcaaaatgggagaggggagaggaagtaagaagacaacttggggtatttaaatagaaaggacaactaagccttattttagttagcttccattgcatccatttaagtctatacatgcctgtaactgtacctagatttaactcaagctctttaagaccttgagctctgagagaatgtgtcagttccttccgacttctgatgtgttgctatacagcatccctttgcagttgtactgtccttgacaataataaactcctaacgtagtcataatacacaaaaaatacttat

SEQ ID NO: 142945 - DNA, 450 bp, Homo Sapiens
  misc_feature (416)..(417): n is a, c, g, or t
tttttaagggacatatttattatgaagacacaaaaaccatcacatacaaagtacaatactataacatcctgaaatacatatacacacatactgtacataaatttatattatcaatataaaaatacatcattaacatttctaaggatgacaaatactaaaccaataaatattgcaattctaaaacatctacttacattaagtgctggtgaataggatgacggtaaaagaaagaggacaaagcggaccagaaaaccaaccacctggcttccagttacagacttgagttggtttgggggaggtatcccaatcaatttccccaaacactgaaaagtgcctgatgtcatcaactctcaaaaacagagcaaaggaagaatttgacattatggcactattttttggccacatgcgcgcgcganncacacacacacactcttcaaccgcatttagtga

SEQ ID NO: 142946 - DNA, 651 bp, Homo Sapiens
  misc_feature (276)..(276): n is a, c, g, or t
ttttaacttaaaagtttttccttatattatgagataccataaagctacaaacccacaaaagatattgttgcctagtcatataaggttaaaaacaaaatcaaacgtttcctgtcacttgaggctgaatttactcattttccacaaacaaattttctttttcttctgggttatggaagaggtgaggttcatgcacatcattttttgtcagcaagctttcagattgcttcaaagagagattcctgtgggtaataaacaggaactatatgatgcattgtnttgaagttacttatgagtgaattgcttgcatcctcatttttactgctcctttttttgctgattttcttggcatctttggatgctttccaattcattaggaattgtctttctatatttttaatttcttttccatcaagaaattccagtgatttggacaccaatatcagtctgtccctgtattttggtttgagacaaacaggatttccatttagatcaattttccacagcttcatcaacttgttcagtaaaaactccaaatccttcacatgcagaagttggttgtcaacggctatgagctgattaagattctctagtagttctaagtctgtaatgtcatcaatattattattgctgatattcaatatacagagggat

SEQ ID NO: 142947 - DNA, 377 bp, Homo Sapiens
ttttttttagaaaataaaatgtttattttgtctttcaggttgtggccaagccagtccattttccaccttaacaggtgaaaatttaaatcccaaattaatctgatttgtggcagtaaaggtccttaagtgcttttagctcctcaatcaatgtcttgttttgattttcaagcactgccactctgttttctaaacatttcacatattctttcttctttctacgacactctcgagctgcttccctgttcttcattagacggacctctctctttcgtgctgcttcttcacaggctgtgtgggaagtgctggggaggatgccataacaactccaggggcaatagtgctagtgggtgctgtgcgaatctggtatgtttgtacgt

SEQ ID NO: 142948 - DNA, 351 bp, Homo Sapiens
ttttttttgcttttccattataaaaatttatcaagggaataatttgagtttttagaggcttggtttagcaaggtaaaaaagacaaccaaattattaaaacactttataaattattttaaaacctaccaactggggcctaaatgaaataaaccccctattaccttaggaaagagacagctttcctaaatcacagaagttggtttccaagctacactcttacttctaatgccttggaaccctaaggagaactaaagctcaccagcgatggctgctctggaagtcaaggtgggaagaacaggcaatatcctgacacaggctagatacagactctgagccaaaagccctcgtgcc

SEQ ID NO: 142949 - DNA, 456 bp, Homo Sapiens
tttttttaaatcaagcaatgataactatatttattttagtatccaaaccaagaaagactgctaataaaaactgtgtttgaaaggcaattcgaaagtgggactttcctggggaatccaggatatgtagtcacaatagaccaaattcattgctggtagtttgatagtattccagaatgcaattattccattatttagtcaatactttcttaattaatgttcactgaggttgtttctagatctaggccacaaataggtccttatcttcaatgattgccatctcaacttcttttttggtaatgattgtgcacgtgaaaggaacttgaagaaggacgctaatctcaccaaaggactccttctctttaagtttccccatataaacaagtttttgagatcttttcactttatttgatcgtagtttcacaaatcctataatacttctataaatgttacagcatc

SEQ ID NO: 142950 - DNA, 1306 bp, Homo Sapiens
  misc_feature (66)..(74): n is a, c, g, or t
taaatgtgaacaataatatctttaatataactgtttttgtgtgcatagaagtcatataagtaaatnnnnnnnnncaacaacatgagattacataggtggttataatacaaaagtgagaaaaaaagctagtgtctgagtattgcatcctggatataattcctgatatatggtaaagcataaaagagacctatttcttcaggagagtagctgacccacctcagggccatgactgctcttctctttccccacagccttagtactttttgccaaaaggcccagatttgagtaaaggggaacgccgtgagcgtaggatccgggcataagggctgcagtctgttgagctttggcaggttggtgttcggggaagtaaatttcgaagggaatggtttcttccctggtggttgttggtttggttgctgattttcctggttggtaccaaggcgctttttggcagaaacctggccttggagtttcaacacagtatgatactgctcagcaatacatgctgccttcttccgaaggtccagtttcactagcaccatgttgttctgcagttcagccagagtctggtcctgtttgattaagatgtcatcacaagtggtcaaggcttgacgaagttttcctgccccagtgctgtggcaacaagctctctctgctgattggagagactcaccaagtttctgaagctctgtccgcaacagccttatattcttctggccctcttctaacttcttgtccacatcaatggtgaagggcttggctgagggtggtggttctaacattttctgatacttatgcaactcttcagtggtagagtttagctctgctttgcactgctgtaatttagctttaacctcctgaagctgctgggtggaggcagaagctgccaacctttgtgaccgccgtagggccaattcagaccctgattgctgatgggccactgactgttgtctggcttcctgcaagagagcttctagctcttcaatcttttcatcccgctcctgaatctcttcttggtaaaaacttgtcagtgactccttgaggatatttagtttttcttcatacatttcctccaatagttccttttgggtgtccaaatgttcactgcaccactgttcccgctgttgcatctgttctaccatctcattgcaaatttcatctcggagatgcatctccagctgtagcttttcctgtcgttccttcaaaagcagtgtcttcatggcttccacaacttgtaggagctcctctttgccatacatggagatgtcagcttcattttcaatatcatcatcaaggcctgtgtccc

SEQ ID NO: 142951 - DNA, 432 bp, Homo Sapiens
  misc_feature (115)..(144): n is a, c, g, or t
ttttattctatagatcagtgggttttgtatctgtaattctttcatatcagcaaagaggaaataaactctcatgtaaatcattttccccccatctgtagcatattaaaaccatgcnnnnnnnnnnnnnnnnnnnnnnnnnnnnnnccgtatttgcttatcagttcatccaccattacattttaaatgaaattgcaagacccttgtccctcccccaaatttcagcctgatgtaggaaagtggaaagcagacttttcttgccttagaatagtgacctagattcaattacagatagacccagaagagagaagtgacacctcacaattttcttagaggtcctgaaaaaattagaaatctcaaaacaatacttaatggaaaagaatctgtttatttctccccattttccatcttatttcttctctgccttaattgcat

SEQ ID NO: 142952 - DNA, 634 bp, Homo Sapiens
tttttgctgttcatggttttattttctctactagacaccagtaaggcacccccagaactcgctgtgttaagcagattctggttggatatagaaacacaggcaccccaggcggaatgcagatacgcctcaacatgtggattaagtaagagccaggaagcagagtaatgaagcaaaaataagatgtccagagtcaccttttaagaaaatgtgggttggtggttgcttaagaggggaggagacaatttagatgggatgtatggcgtgagcaaagggcaagaatgagcacggtgtaggcacaagtccatggaactgcttggctggatcgggatttttttgtcatagagtgttaagaaatagtcgatcagttgaggagtagaggagtgaagaccttggaaagttgccaaaagcctcgagaatttctctacatgtgtgacatgttctcaggactcaactttttcttttaggtttggaagacccgcagtaagtgtgctttagaattaaatgggtgggaaggggagctaggcaaaacacctcgcacttagcactaaataaagttcgctgttgccctaagagactgaaaagcgttactttaacaaagggggcggggttaacttaacgtagatgtttaactcgt

SEQ ID NO: 142953 - DNA, 541 bp, Homo Sapiens
  misc_feature (258)..(258): n is a, c, g, or t
accctggggatttggtcatttatttggaaaatactcttgatgtattattataattcacaaatcaccttccccgccaaaatctcatttggtaacaacttcgtatagtagaaaaggtatgcattatccctattttacagatgaaaacactgagagtcagaaattaaatgatttgccccgttacacagctagcgagtgatgggagtaagatggcaaacctaggacctctgctaatctagtgattgtcccaggaggccacantgacgttcgcctggaagggctctggagcgcaggaacattttcggtatcctctgaacgggctaaatggaggtccttccagtctgggccctgacaaacactggatggagtgtggcaacggtcaggaaaatatgattcaccaacatccatctccgatgcctaatcatgttgttaacaaacagttctgctattaagggtgaggtgacgagagaacatgtgcctgggtttaggtattaatggcactgaaccttctcaagaatttaataaatgaaacaactagggctca

SEQ ID NO: 142954 - DNA, 355 bp, Homo Sapiens
tttgtaagcacaagcttggagatttttatagtccgtgtctgtaccagtgttggccatttcaacaacctgtggtttaaagaagtcactctgatttgctaaagaaagaagagaactgagaaaatgattcttgttaaaattcatgaagaattcctatgctttctaattaataactgcacaggtccttctgggacagacttcataatattccaggcatcaaagtgcatgagcccaaccagaggtttcccattaatagcaagaatttcatctccagcttctattattccagcttgttcagccgcaccacctcagccttcagagtagctgctaccacaggcatacaccaccatgcacagct

SEQ ID NO: 142955 - DNA, 898 bp, Homo Sapiens
  misc_feature (821)..(855): n is a, c, g, or t
tttctagctaaatgtttgtttgtttcaaataaagaagggtgtgtcacatcttgtatccccatcagtaaacataacataaaggtaggggacaggcactggaacgaaggaaccctcccggcctgggtgacgcaggtggaaggcttctggagttaatttcattgctgttgcacatacagttaagtcaggcttcatgtgtaagcacaagcttggagatttttatagtccgtgtctgtaccagtgttggccatttcaacaacctgtggtttaaagaagtcactctgatttgctaaagaaagaagagaactgagaaaatgattcttgttaaaattcatgaagaattcctatgctttctaattaataactgcacaggtccttctgggacagacttcataatattccaggcatcaaagtgcatgagcccaaccagaggtttcccattaatagcaagaatttcatctccagcttctattattccagcttgttcagccgcaccacctttgtacactcttttaatgaccaagggcccatctcccgtgaccgatgattttgccccatccagactcagtccgaggccagccgaggtcttgagcacttgaacacacagagcatcgtgtacagccacacttctccttataacagcacttgagcccagtagcactgattggcctcccaattctggggctggcctcctggctgtgttgctgctgtacttgcatcctttgttctgtgttttcaatgccaggctccagggggatggtctttctggacagccccggccgtaatggccgaattcccgggcaatgtccggtaccgtcgactgnnnnnnnnnnnnnnnnnnnnnnnnnnnnnnnnnnncggccgcttcctcgctcacagactcgctgcgctcgtcgttctc

SEQ ID NO: 142956 - DNA, 518 bp, Homo Sapiens
  misc_feature (456)..(456): n is a, c, g, or t
  misc_feature (458)..(458): n is a, c, g, or t
  misc_feature (465)..(465): n is a, c, g, or t
ttttcacgtctggtcatatttttttaattgcatttcacgtaattccacgatgttccaaacttacactcttgtgacactatgttgaatgactaggagacttttaaccctttattaatgaaagtgatttgttttcctttcacaggctgttcacagatgcctccaactctgggaagacattatccaaataccactgaaatgacttgcaacccagtcgtttccttaactcaacacgctcgcgaatatttccgtaggtgacatatttcagaccaggctttcgaagaaaaaactgctccttatattcatccagccaaacgtgcaccagtcttaggtagttatgtgtcatagcactgatgattgtagacggttttccagtttgtttcttactgatatgtcctactcgagagcaggggattataaaagagtttgcctccacacatccagatccttagtgaaagntncaacttnttctcttcccaaaaatccatatccttgtcatactgtccattttcattaaaata

SEQ ID NO: 142957 - DNA, 448 bp, Homo Sapiens
ttttaataattaagcaaagtgttttaattaattcttataacaagcattcctgacagcataggtatccacccctgaagttcctattctatagcacaaaataacaaataagtattttttggttccataatggtcacccacagcctgtgtatacaggaccacgcataatgggaatcagctttattttacaacagagcttcactttacccctccagcagttaatggattctgggtatttattaaaaactttacatttaactcaaagacagttaaataccaccagcccagctctggcaaagactgttggctttggttatctccagcatcattcaaatacactaccaccccaatcccagcccaatctttggccttggggaaaaaaacatgaactacgatgacaggacaaagcagtaaaccttctccagtactatcagagtaccctttttggggt

SEQ ID NO: 142958 - DNA, 279 bp, Homo Sapiens
cttgccctagcggcgtccccccggcctctcgccggcgccaccgccgcagcagcccgcgggccgtccccggccggccgcccccggccccagcgccgctgaccctgtccgccgcgggcggggacgcgggcggaggaggcgccgcggcggagcccccggacgcgaccatgtcggaggtgctgccctacggcgacgagaagctgagcccctacggcgacggcggcgacgtgggccagatcttctcctgccgcctgcaggacaccaacaacttcttcggcgccg

SEQ ID NO: 142959 - DNA, 653 bp, Homo Sapiens
ttttaaaataaaacttattaattattcaaggcaatgcagaattactatgttcttgaatcactgatcagattccctataaattaccagtagagattaatgagatttttttaaatcaataatgatacctctggataaaacagaagattgaaggccagttttgcagacagtctgttattttattgcacagatttcacttcaagaataaaatgcaccatcagtatttggagagtttggggtctcagatactgatataccatcagtgtttacacccgtaaagccaaattcaacagtacaatttatgttaaacaacatcacttcaagatggctaacaatacaaatagagagaaaagtgggggaaagctttaaaaatgtgttagtttgaagcatatgaaaatgtacgattaaaaactacatcatacaaacctgaaatcaaaaatgttttgtggaacatcagttagagttatactcacttgcactgttatttattgcataaagtctatgtggttcatttccttcatattgatgaattgaggatttcaggaaaaccatggttataaaaatgatcaatcttgaaaaagtatgtacagataaatgtaaaatcacaaactaaaaaatatccctacccctggccctcaacttacaaaagggaaagt

SEQ ID NO: 142960 - DNA, 483 bp, Homo Sapiens
gagcagtaggatataaataactcccacaagcttagcgttccaataatggaacactaggcataaatgggttaagggcatctttatttcatagtaggcttgttaggatttttctcagttcataaattaagggtagagaaagcactcctcccccaaggggagggtgaattcccactcttcctccgggatcttccctgggagagggcccttttttagctagcgtggtggtgagccgggttagaggttgtctctgaagaagttaagcggttggtatttcctcccatgtgcagttcttctgaagcttggtcctcgggcagggaggaggcaggtcctcgggcagggggcagggaatcgaaaacctgcgtggtcacaggggaagagaagagaaaggtcccggcaagacagtgtacatctagggacggcttccaaaggaccggcaagtgacaacacggaaaatgtgaagacaagcccagggtcatcttccga

SEQ ID NO: 142961 - DNA, 323 bp, Homo Sapiens
agattttataatgggacacccgtatagggcccttaccatgaatggagtttgcaggactggaagttgctctgagtgagtcagtgagtgaatgtgaagacctaggacattattgtacgctactgtagaccttgtacacattggacgcttaggcgacattaaatctacaaaagaatatttttctttcccttggcttactatatcttttttattactattttataaactttttgactcttatgtattaacacttagcttacaacacaaacacattgtacagctatacaaaaatattttctttcttggcaaggcatggtggctcacac

SEQ ID NO: 142962 - DNA, 557 bp, Homo Sapiens
atggaggaagtcgggcaaattgaaagtataaatgaatgggccatgagtgttcagagggagaaaagaaaggtttaatatactccttcagttgagttttcttgtcttgaacataaaaagtgaatacaaataaattcagtaatactaaaacatacagagatactgaacttgctggcacatttacttctggtaagcataaagcagagagaacccaggttagaaggatgggaagagaaaaggagcagttttattgcttatagaaagccgttctgaggggttggtggggtaagctcagtctattactgagacaatagtgagatggcttatatgtttcccctgttaatatctggttaaattatgtatccatcaaatggtatgctcgcagcattagcaaaattaggagtttcatctttttcattgaatcacaggtggagactcctattttcctttctgttttcaggcctttgagcccctgggagcccaaataccactcaattattttgtatttatgattaataaaagttcattttttaaatttgtatttttatacaacctccaaa

SEQ ID NO: 142963 - DNA, 451 bp, Homo Sapiens
acaataaggccaaatgtctacccagtagttagtatcccagaaaatgtttacatgcacccaattatacatacctaaagtattatttctattatcttccacttgtattataattaaggccatgacagtaagctactgtctcttggcttcaaacccactcttttgaattctgcaagcatttctgtctccctgttaggctctgccaatagagggaccagcgtgacacttcacaggtagagaaggaagaaggaatttgctgtttccttcggatgggtttcttaatcctgttaagtctcactctagcaacaattcttcactccgaaagcaatagtgcctgctagtagtagcagctgattgcaatttgggggtttcccaacacttatagaaccaatctcaatgtgccttcttgagatgccagcttcaattactgggtgcttcttcctcagatacctgg

SEQ ID NO: 142964 - DNA, 573 bp, Homo Sapiens
tttatacttaagggggaaaatactttcttggggaagaaagttacccaaatcaatttaatttaacattgaaaatatatataaacaaatcttggcatgggaaaatatcaaacatgaaaagcaatacatatacagataataagaaaaagcgtggtatctattatacagtataaatacaaacagcaaaacccaatacctttcccaacgacagaaccaccatatcatcctgccatttctgggctttccctacctcccacttggtgtcaatgaagtccacctcttaccaatagtcaccaaccttactaatggaggctgtgctctctatggggaaatctactctctctgtagtgatgagaaagaaatatagcaaattttcttggagtgttgtttaaaagtattggtaataactttctaaacactgaagtgtgtgataaaaagcatcaaactcatagatgccttccctgccactggtgtcaatgtgaccaatctagcaccccaagactctaacagggcagatctcaattagcacctgaaagcctatgagctctcttcatagctaaatcctagtgctaaacc

SEQ ID NO: 142965 - DNA, 607 bp, Homo Sapiens
catcatcacatcctagatttattacaactgacctgcaggcaaaaggatagaactattacataaacacttcgattccatgtatatatcttaaatagaggaggaattcaaacaagaatacaggataaaatattccaaagctccaagaagcagttatgttactgagctccattttttacagacaaataaggcaatatccctgcacattagctttttgataatttttatacatttttctatggtacaagagaaaaataaccagagctcacaatgtacagttcttacactattttcacagtttgtgaacactatacacccttttgttttaataaagatacattgtaataaactccttgcccttaagtttatagtttataataatctatgattaatacactaaaattgccttcttatgtggtcatccacacaatagaacggtcagattagctcctggaagtcagaattgcttttatctccatttgcataatggcaaagtgaccctatgctgagccagatgggatgttgacagcagagaaacagattcctcttgagtccccgggagcaatggaggatgatggcttgctgtggtcgaaggcagacatagagcaat

SEQ ID NO: 142966 - DNA, 384 bp, Homo Sapiens
tttttttaatagtataatttgtatttattaaatgacaaatggtattgagaatgttttcatatttaccaagtttcaaagtttgtagagttgatttcctgcttgctcagacctgatgtgtctttcccttgttcctgatgtttggccagctttttggctgttggaagtaccaggtctcttgtttccaatgagctgcctgtgttggcctgtctttgagactatcatgttacaaaatctgaagtttattttttgtcttagcctcttttcattccttcttggctttatagggccagtgctctcacgatgtaattgctatagaagtgaaatctctcagatacttgacaagggtcttcttgtgaaagcctcatttcttgcgaaagccttctt

SEQ ID NO: 142967 - DNA, 607 bp, Homo Sapiens
ttttttttaattctaatactatattttacttaatatatcaaaatgttatttcaacatgtcattaacataaaaattactaatgagctattttgcattttttctttgtactaagtctttgaaatccagtgtgtgttttactcttaaagggcatttcagtttggactagccacataccagtagctcatagctgttgtataagacagtacaggtccaggctatttattttttaagtccagtgcaaacaacctctcattctttgcactttgataacttgaatatttgagcctacaatcttcattcattcattggtcaacagccgctggagtgtttactgtgcacaaagcaccgtgctagaagcaccctacccgaggcttgcaacactgcctggcacagagcgggcctggggagtttactcgggctgaaatgccttccttcattctttctcctccgggcctcccatctgcctcagtgaactggaaaaagaggaagagtgccagccatagccttccatgcttccaatggcctctggagttcacgaacaggtcttcacctttctgggctgcttccaagtgtacacaatggagctcaccactccccactgcccagg

SEQ ID NO: 142968 - DNA, 441 bp, Homo Sapiens
cgtagggacttgggacaatctggctttgctgctttctaactgctaggcacctctctctaaccctcattgtcagagggaattggaggatatccacagtctgttcctgttctgatattctgagcagagaaaaggcactaacggttcctcttagctatttaattatcagaagcaagtaatctttccccagataatattttgccctagaagaagccgtgatttagctcttttattgtgcttacttggtccaaatacatctgtggggtgttttgtcatttcttaatgaatgaatcatagttataaccaggggccaagctgcccaagaggctcttcagagatcatggatgctctctttctggaagctgtggcctgatggagcagccccatcccgggtcccatctgcccggagttgtgtatgttcaagtccggctcagtctttatttc

SEQ ID NO: 142969 - DNA, 350 bp, Homo Sapiens
tttaactgatcattcttattgctccaggaaaaaggaacaataagccaaaggaggatttaagccaaatctttggctatttgacagggtcttgagagtgaatccaactgcctactccgtcctgcccacctccacgtctgtgcctcggtggggaagctggtccaaccagtaggatggcagtcgtcaggggcccagagtggctgacctggggccctttggctccccctggtgacgcctcacacaggtctcagtggaagaggagggaaggaagctcccctcttgcttccttccaggtacaccctctcggacccaaccccagcggccgaccccagtcctcagcactgggaaagcca

SEQ ID NO: 142970 - DNA, 1080 bp, Homo Sapiens
tttctctctcctaaattttttcctctctcctcctcctcaaaggtgttcttttgaggaaacacatggtgtagaaaacacagcttgattgagtgacatgcaggtctcatcacctgctctcatcctggaaggaaggcaccccagccctacgctgcccctgtcagcatgcacaaaaccagagctggcaatttaatttggcgtcaacttaggcaatgcagtttttctgtgttttatctttgtgctaaagattataaatcccttttataattaagacaatttggccaagttgaggcatatactaacaagggtggaagatgctgcagaaaatgagtgatttttagatatcaaaattgtgaagttactctgttaaatgtaccctaaccatgagaaatgcaaacggcgtgtgaacgatcggaacacggctgtgctgacttgcaccagccccatgcagccgtgctgcggggactgtgggtcacgtggaaggcagcatctccccaacattcggcgtccatcgtcacctccatcgacttctctttggcataatgccaaggcattttcttgtaaagcatgagctggtaacaatttttcctccgagaggtcgttctcctccgcctctctctccatctctttgcaccagccttccatcctctttgtctctgcgtgcagcagcttcaaaaaccacgagccatccctgcggcacggagacatcctcccagtctctaccgtgtcgatggcgggctccagccaggggtctggagggggcagggtggaggtgtccacttgggtccgatagtcttctctatagctgaagagcccctgggtccgtacagttctcaccgcgctgtactgggtgggggtgctgggctcggagtgccgctggaaggatgagccgaactgaaggcctttgtcctccgtggtgatgtggcctgtgaacccctccagctccaggtcagcttggacggcggccgtgacgctgttagaacgtgtaaaacgtccgtgtcgcttctcatcttccacttgcaccccgacagagtggtattcccgcagaccacggctctccgtgtcagaatctgtggccggttg

SEQ ID NO: 142971 - DNA, 548 bp, Homo Sapiens
  misc_feature (258)..(258): n is a, c, g, or t
tgcttttagtattatgtctggcaatagtctcctatcccagaattatgtcaatatatacttatgttttctttcagtatgtttatgatgttattttttaaaacatttaattctttagtccaggtggaatttattttgattgtggtaggaattgaacctttccctcaaattgttaagcagtcccaatcactgattttaaaaacattttccctaaatgtttaacatttctccagttaaaccttagattgacttgggtctgtnttctgagttgttctcctccattgggttcgtgagtggcttctgctgctggctccatactgttcccacgactgtcttggaggcacattttagggttctggtaaggcaagtaccccccacattacttcacaagttttctgactatgttcaactcgtttattcttccagatgaaatttaaaaattcaagttcaaacaaaactcttttggattttgattggtgattttgcttaaaataagatacttgggggaataaaagcggtctttgcattctcaatattctcccccaacacgg

SEQ ID NO: 142972 - DNA, 529 bp, Homo Sapiens
ttttttttaatttgttaatatactatatttgaggtttgaaaatcactgatcacagctattaaataacaatgcaccaaagttttacaatatttgaacatctgcaaatgtagagctttctggtatgacacaaatttgaatacaaatggaagttcattgaatattaggtttatcagtaagctaggggaaacaaattacatacattgtataggtagtaacctatgaaaaaagtggagattaggtaaaaattattaagtgaaattattcatgtgctttcagtttcatctttctcctgggaaagccccaaaacaggcctctggaaaaccaatttcatacatgtacaaaatggcatctgctctcaaatagatatagctttccttcaatggtagataagtcacagacgtatctcagacattcatttcatgcataaggatttttgagacatctattccactgaaatattataaaggaagtctacaaaccacttctaggaaaaaggcacttcactgtgaaagttggatttaattacgtc

SEQ ID NO: 142973 - DNA, 420 bp, Homo Sapiens
tttttttcaggttttcaaagctttatttctccagcaccacctttatccagaaggtggttcatagccccctgcaaattgtaaaccaatattgctcttttaaatttaatagaaagtcttctgcattgtttatgtatgtaagtgcagaaatttaggattattttggaccatcaacaaggaagttgctggattctttgactttcttacgttgtaatttgcttacttgccaccgatacaggtgagaagggccaaacacataatagtgcatgaagactttaacacactaagttatgactctgacattgccctaatacaactaagctttcctctggagtacaactcggtggtgaggccagtatgtctcccacacagcgcagagcctctattttcctcggagatctgtgctgtgaccggatggggaag

SEQ ID NO: 142974 - DNA, 393 bp, Homo Sapiens
  misc_feature (29)..(29): n is a, c, g, or t
  misc_feature (36)..(36): n is a, c, g, or t
  misc_feature (92)..(92): n is a, c, g, or t
gttgaatggtttttatttttgtgtattanaacatgnacagcccaataagaaaacttgtaagagttttatagggtacagtttaggtcacaganatgaagttcaacataacttgtttattttacattgattgtttaaccagtaattatccatatgacatcccaatgcaaatgctgacatccatttccaaaagagttgtttttttgtgctttttctaaggttacaaaggtttttgtggtttaaatgttgttacatattttacagcattaggatctatggaatattttgacaactgcaacagttcaatgaagttggtaatttcttcttttaattatttttcattgaacagctttggagttacatttctacattttgatttctggtatattataagga

SEQ ID NO: 142975 - DNA, 488 bp, Homo Sapiens
tttgacaagtacttgtctgtttatgagtcaggtatcagcatattagttaatacatttacagaaatgaatgccaaacaatagctttgaattaaaagccttcacagttcaattagtatttccttccaagcctcttcaactttctttctgttttcttcattccaggtcattattccaccgtgacttttgagaagcaattttcttaagagagtacaaattggattatcccctcttactgaattgaaatttttcaggctttccactaatgagatattgtatccacgttaggccagaaaagctagtttgagtcatttagttagcatgtttgaattagaagttattgatgaaaccttcactaataactcaagccaagttgagtctaaaaaggattccacgaggtgctgttaacacagccttgaaaatttgtaaccgatcaaaagcagcaacagcaggaattagaatgagtttgaattagtcacatggtaacacgg

SEQ ID NO: 142976 - DNA, 963 bp, Homo Sapiens
  misc_feature (849)..(883): n is a, c, g, or t
tttcttcaacagtaaccctagttttatacatgttttaaaaaaagattctaaaattcaagcttaagtggcattttgacattttaatgttttcagttatttaatagttttaacaattactttacacagaacccccaaattgtccacaaacaccataggtacctcattttgaaaaggatatttttgataaagatgactagctaagaaataaagcaagaaaagcaacacccaaaatgtgtgcccctagctcattctggaggtatttagtggacagtctctcttgaatcctaagcaggctggtcatgcttggcccagaattcccaaataatgatttgcgtctgaaatttcccataaggttttgcaatgttccactcatacctatgacagtccagaacaatactaatccagaagcatttttaggtaattgagagtacattttttaaacacaatctatgcacaatacagtgattaggcatattaggggtaaagagctttacaaaacattgctgaaacataattgcgagtctgaatcaaatcaaaaagaccacagaaatattcagtattgtatcttagtttctgttaagtactttcaaaatgtatttaatactaaaagtaattagtagaagagaatttgaattcttgatttttgttctgaaaatttttactctcgatatattaaacaaacatggaaaacttctgtattaaagtcttccacatgtaaaccatttgtcattcattcatatatttttctactttacttctttaccaaaaatcgtgtgatgtctgatccatgctttgatgcccggccgtaatggccgaattcccgggcatatgtccggtaccgtcgactgnnnnnnnnnnnnnnnnnnnnnnnnnnnnnnnnnnncggccgcttcctcgctcaatgactcgctgcgctcgtcgttcggctgtgacggtgagcgccctatatggtctgcagttctt

SEQ ID NO: 142977 - DNA, 618 bp, Homo Sapiens
tttcattaaaaagttactactttagtggaagatctggagtagctacaggaaaaactctttgggaaagtccaggtggtagagagaaaatacacatttaagcactaggaataactgtgatgccacgctcagagcaggtgggagaaagcagttctctctgtttgacttgcagaaggcaatctttcttcacagagaggaccacagcattcagtcctctagaaagttctattagtcttgatcttgtcttgttttgctttgtattttgaagcatccctgggttcactgctgggattgctccaatcatcggcttcaggcgtggtcttgtaatggcgccatgcggacttattaaaaactggaagtctctcaaatgactcacttgaaagagccttcaaataaatgacagcatcagtacccactccttccattgaatacaagtttcagatctcctttgaaatatctagcatacagacgggaaattggcaaaccataaccaaatccagccaaaggggcagctctggtaggctccaggctgggtctaggagcagtagaatacatgtagttaaaaagacgatctatttttcgaagtgggacaccaccacctaggtcactgatcttaatgga

SEQ ID NO: 142978 - DNA, 601 bp, Homo Sapiens
tttttttgcaagttaaagtccattttattgtgtgaatttttagcagtgcagtgcagtggtgttcttttgcatacgaagattgatgaatcctacacagggagaaaaagatttgacagcagtttaaggagacgttgttagcaaaaaccaaggcgagccgagtaagtggcttctccccgaaagcaattcttccctgtctaatctctttttgcagctcattagttctctgggaatcagaaaaaggttgtttcccaattatcccgccacaggggcacatcatggatggaagccggggctccgtggcacagcatgtgaatcggcgcgaccccatcccaagagccagggctctccttatctctgttgcctgggcccagcgtggtgccgtggatgtgagagtttaggcaggaccacggccccggctgtttgtttgggaggcacttggcaccaaggccatgcctcttattactacccgtggccttgagcaagctcatgaacctctctcagcctcaactgtcacgttggtaagagcttctcggcagtgttttgagaatcaagtgcctgacccacggcaggcacctaacacatgctccatggcgcatgggca

SEQ ID NO: 142979 - DNA, 561 bp, Homo Sapiens
ttttttaaacagtaatgtttaattgagcacctcatctccaccctgactctcagggctgtgacagctgcacccacagcaacctgggcacggaggcaaggggggcccacaagtgagggagggcacacagagtcagagggcagcaaggaggctgaggggcagtgggagtgccaggagcagggtcctggatggggctggcagggccagggcctgcccgttgaggcagtcccagatccagtgttggtaggaggagacctgtaggtagatgggtggggcctcgctcttctggcagcctgcaccccatctcaccaatcccaccaggtaccacgtgccctccatggagcagaccaagggctctccagttagctcatagcagaacttctccctgtgggtgtcctccgcacacatcatctgggacttgatgatctgaaccagagtggggattttggtgaaattgaggtaaaagatagcacactctaggttgttcaggatgattactaccttctcctgaatggatctgaactgaggccacatgccgtcagccatgtagagttcccagcccga

SEQ ID NO: 142980 - DNA, 510 bp, Homo Sapiens
aacaatgggggacaccaaacagaatataaaacccatgattgaatacatcaaattgctaacatggcagtaaacagacatgaggtgaagatggagaagaaggaaacccaggacgaaagtcagcctcgcatttggaacccatttccctgagtttcattgctgaattccagaaggaactactgagatgcaaagaagcacagcagcttttgcacacatgcgtgggattagatggaaaacaagtggattgagggtctgccaatgaaagcgacccatactgaagtccactggctctggttgagacccagaagagtcatgcatcagaataaaggtggacaggaaataccctggcctttgtagggactgagcctgcaccgatgacttcaattgcagcctgtatggaggacccctgaccatcccccagaagtagactcccatctcttctgcagcaagataacatgctactaggcctcaattcattgctaaacattttttaacaagtatctcacatttaac

SEQ ID NO: 142981 - DNA, 583 bp, Homo Sapiens
  misc_feature (355)..(367): n is a, c, g, or t
tcctggttgatgtccccgcaactctgcactgcatttccaaagcggggtactgcctcatcccgtgaaacagtgtccttgtttcccctcatcagatgatccctgtggcccctgcattcccagcacacacccagtgcacagagcagccacgcattctgacccctgccgggagctagcacagacactggccttccagaccatgtgcatggaacccagagctccctggttccagcccaatgtactagaaagagcacagagttctagaagcttcaactctgccattaactcctgcctgagagaagaggaccaacaatcctatttgccatatggaaagttacatatagtgtgtaggacacannnnnnnnnnnnncaaatggatttttgagccagttctgaatacaagcagcagttaacagttcagctgcttcaataatggtttggggttgggccctgtgtgccttgggcaccttgagcaagttttccccctctctgtgcctctgtttcctcatctgaaaaacagaagtaataatattacctacttcataggatcatcataaggattaaacaaactggttcatgtgaaaaa

SEQ ID NO: 142982 - DNA, 607 bp, Homo Sapiens
tttgctttctgtgtatgtttttgactcgcgtgtttttgcttcgctaatcagattgcgaaaggaaacatctcacgtttgcataggacttcacagttcataaagacctttcccacccaccacaaaaaaagtatgacaagtttcccgtcatcttcattttataggtgtggaaagggagtcaaagaaaagttaatcgataccatttatctagttaagcaggctttgagcagttcatctcctcccgtcctcaaaacgaccttctgaggtgtctcctgcaaccctgctctgaagctcagagcgagacggcctcacatcccagggggctcagctctggcggggccgccacgcgcctccccgtgcctttggacgggtgaggagagctgctgccccggcggggaccacgtggaggggcctggtcagcaagtggcaaggacgcggcgcaaagccaggctttctaatgtacaatccgcggctctttcgatactgaacacccacctcttcaacaaattcgagcgcctggcaggccctgcaccaagcctagggtgatggcgacccaggcgggtttttactctcaaggagctcaattctagggcagggagaagaaaaatta

SEQ ID NO: 142983 - DNA, 469 bp, Homo Sapiens
ccggtgtaatacccagaaaagaatctctttaatatcttgtagccgtaagactgatacaactgaaaacataaccctaaatttgattctgcaggttgcagttacaacacaagttgaagtcacagccttgccggaactcttatgtaaagtttagggcattggatctggaaggagtgggaccctgagaatcgtaaagggatatttgggtggacttgagcaaatccaagaaccctgaactgaggaagagcagtgtgagtacatggtcaggggctccatgaatattcctgcctgcaaccccagcttcacaggcaattcagccttctccacactggcccggcactggctagctgctcaccttatggctcgaggcaggaccccccgcagccttgcagctgagtgggaagttgctggaagttgtatctgtttattgcttttaaggctgtcatgagcagacataagacctcatatcaca

SEQ ID NO: 142984 - DNA, 461 bp, Homo Sapiens
ttttaatctcttccaaagcttattttaataggaagtctttatgcatggcatatgtcaagattaatggtacatggaacacattttgtatcctatccatgagtcacacgggaaatcaccttccaggcctttctctgtgaggtctccctgtccactgtgccctgatcaaccctccaccccttcactgtctttacttccctcatttcccttaagcagacaaaagtccaggtctctggtccacagcttcagacatgacaaggaagaggcccagtatcaaggtgaagctgaggaaggccaagggaaagccaggccaagaggcacccgttggtgatggtcacaggagagagggtgatcagtggagcccaggtactgggccatcctgctatagatcacactgctgagttttggttgtatttgttttagaagcagccatcattcaccgagggggagagaggaaagggaag

SEQ ID NO: 142985 - DNA, 570 bp, Homo Sapiens
  misc_feature (106)..(106): n is a, c, g, or t
  misc_feature (296)..(296): n is a, c, g, or t
tttatgtgagtgtatcattttatttccttattctatttcaacaatagagtatatggctccatatgaatagcttcagctgtcatccatttccccaacaattatgccnctttgtctccaggtctcattctctctccacttctgggccttcaagtcctgaggatcagtttctgatgtgggacagggatacagccacccctcccaggcagagcatgtcctgcaggggtggctggcctgaggaggtgctaggggggaaggccctccaaggaggcctgcagggtctgggccatgctgtggtncagccaggtgtcccatgctctggagctgctggaagaagccatgcaggggctggagtgtgggtgttcgagagggtagaacaggtcagccaaagccacaccttgcagaacatcacccacctcttcatgagagaggacactgctactccggtaccgcataaacagggtcatgagcctcaaaatctcaggtctgaggaaggaattctctccagcatccaagagggtaaacagcaaaaaccgattccaaggctgggaggccacgtggagagcttcaaga

SEQ ID NO: 142986 - DNA, 387 bp, Homo Sapiens
ttttgtaccaagaatgagtttattgctaaaaatgaaaccaaatgggatacaaagaaatgcatcaaaagcaacatatcaaagggtgtcataaaggatgagggtagcgtgtcatcccagggtttagtgaccactgccatgtctgtctccccaggcatggagggaaaggtgagggtcacctcgtggtggggtcacgtagactccacagcaaagtttaaatgctggaggtttggtgagagctatggcttctgccttcaaagcaagagaaagaggcacattaactgatgttctgaggagacctggaaaggtgattgtggtggatgaaacaggagaataggcagagacacaacttctgagtatctgagagaactcaagtttggcaagacaagt

SEQ ID NO: 142987 - DNA, 576 bp, Homo Sapiens
tttttgtttcttaaaatgctgatgtttaatgatctacactacatgattaggctcaagatgtgtggattttctaaaacactgatctgagatctcaaacacatgcaaaataggataacaaacaagtccaaagctgctcagccactgaagagtcctcaggagagtagtgctgatgtccacggaatgtgggagcagcacatggacaagcctgtgagtgggtttcactcagtggaatccctccaagcaggtcttgttcaggaggctgaactgagtcatccagggcctggtgctgatggtgaagaagcaggtgaaagtattgttcagctctgtgctttcttggaaatggcagttgtcaatgtcgtcttcaaatttcccacacctagttctccccagcagtagctccattgagaatacagtcttggactccacctgctccttccaggaattcaagatgtgccccagtctgtaggcatagtagtccttgctctgttggttgaatgtttggacatcaaactccactgtggcagggaggtaacgagccatgacattgtgttcatcacagtccctttgctcgtggaa

SEQ ID NO: 142988 - DNA, 498 bp, Homo Sapiens
  misc_feature (355)..(382): n is a, c, g, or t
gcggccgccgtcccggccctgtgcgccgtgctgctgtgccaccgcgacctcgaccgccccgccgaggccttcgcggccggagagagggccctgcagcgcctgcaggcccgggagggccatcgctactatgcgcctctgctggacgccatggtccgcctggcctacgcgctgggcaaggacttcgtgactctgcaggagaggctggaggagagccagctccggaggcccacgccccgaggcatcaccctgaaggagctcactgtgcgagaatacctgcactgagccggcctgggaccccgcagggacgctggagatttggggtcaccatggctcacagtgggctgtttggggttcnnnnnnnnnnnnnnnnnnnnnnnnnnnngttatttgagacagtcttgctctgtcacccagactgaagttgcagtggctcaattaatgtctcactgcagcctcaaactcctgggcacaagcaatcctcccctcgtgcccgaattc

SEQ ID NO: 142989 - DNA, 511 bp, Homo Sapiens
ttttaaagttttatatgatttaatttattagtttcattgtagaacgatttttaaccagtcttgtccgagactcagaattttggttgacttttgtacttaaatttaccacggaattttctttccacttgtaagatttaagtgtttaacaagtacttgctggtaaaggcgctaacaaaagcgttgctgagtaacaccagaactgttcacacactaaaaggctgagacgggggaagagcagacgagggggatcttctctggggaaaagatagaggctaggatgtgccacccctcggaagagcagatggacagcacgactgctgccgtcccagccaccacggtcccagcaccagacaccggcttcgagtggtttcttatcttcacttcttcctctatctctcctcccactactctgcaggtagtgctgaaatcctggatgttggagctggaaacggtaattcagtacacactcccttattttgcagaggaagaaactccccgggcagtgttcccc

SEQ ID NO: 142990 - DNA, 933 bp, Homo Sapiens
tttaagagcaaagcttttctttttattgcagttattagtgaaagttatacttcaaactgaagctaagcaacactaaaaccattaatatttttaaaatcaaggattaaaaacaaaaacaacatagaactctccagtaggcagaatggcagaaaaaagagtagtggttctgtcacagaacatttcgtgacagtttggctcagaaagaatcatgacaatttcttttgttgttgttgttatttgcctcccaacaggaaacaatgacactttctttaacacaaaatattatatgagctgcttaaaaaccagcttcttcaagcttctcagtctcactcataacttgttcgtagtataataatttctgtggggaagatagtttaactgaagtataatattttttgtggggaagatagtttaactgaaaaagaaaatatattaccaaattttaaatactgaaaacaagggcttttgttcaaaaactttatttgccttctgctcattataattacatataatcttcaaggagtttaaatgacaaccaaatccaaggcctggcccccaagaacacagtgataggattcagcatttggtgtttctaattatacaatgactacatatatatcatagacttgctctcatccattctccaccataaagtttcaatttcctcttaaaatatggcagtcaagtttagtctcattcaaaatcttatctggtcctacagcatattacagacttagactcactcttctgttttaattgatgttactgtgtagccgaagattttaaaaaaagatttatagatatacacttgaaattctgcagtcttgaaatactacaataaatttttcttacttatgaaaagccaacaacaacaaaaaaggccaggccaggcataagacagaggggaagggaagatgaggaaggaggtttgga

SEQ ID NO: 142991 - DNA, 375 bp, Homo Sapiens
attcatattccagatttatattttctggagttaaatttggatgatttctaaattatcacaaagtgggacctcagcagtagtgatgtgtgtgtctcatgagcagtgagcacagtctgcattcatcatgaaacactatcttctaccaggaggaggttaatgtaaatcaccaaatcccaatgccttgtgactttcataggattcctgatcatgcatgttgatgtactggctcttcactttgggctttctgatgtttattcacacctttggagagttgcaacttgccacatacgaaattagtctcatagtgtagtgaacttcaaccccaaaattttaaaaatgtatttccccccagttttaaattgcctttgaaattta

SEQ ID NO: 142992 - DNA, 977 bp, Homo Sapiens
acaagaaataaaattaaaatgaaaaacatgtttttcgcatgtaattctgattttaatttccataaaattaactctacaaagatttctcaaagaaatctgaccgccttcaaactacatgtttgttttgtattacatgtaatagatttccacatatgaaaaaatcataaaatgaaggctacgttttccaaccgctatttaagtactgtttagaaactatcgttgaatgaatgaacctgattttgcctcatcgtgtttatctaaaagagtctttgaaagatatttattttccattttctttacacggtccctctttttcaatctgtaaataaaaattaatgagcaatttaggacacaatatcacaacacaattattctgtaattgatctgataaccaaagacacataagaataggatgatctataggatagatgtttccacacagcatttgtctgaaatcagattattttaaatgatgccttgacttttgaattcaattctagaaccaattatcctaaactaaatcagagtattacaaatgaagatattccaacacaaagacttgtaggattttgtttagattgtcaatggttgattcatccaaattttcttcattgtcatccatggtgtgccagacttcagggaaaggagacggtatcagatgcagaactggaacacctcttcttaaaaatggaatatggtcatcctgaatcacacctccataactgtaattctggaaataccgcccctccaaagagtgatccttgagcaaacccaattcatgaagttcatgtcaactatgctcgaagtcttttcgaaccacctggctgacgttggaaacaaattgcgcaacgttgggtgtggagctccatcaattcatagacaatcactcatgccatggcgtggtggatcttccctcaggggtccgggtcatgcatcttgcgctaatttgagacctagaatcttgggacctaaaaaca

SEQ ID NO: 142993 - DNA, 963 bp, Homo Sapiens
  misc_feature (55)..(55): n is a, c, g, or t
  misc_feature (71)..(71): n is a, c, g, or t
  misc_feature (77)..(77): n is a, c, g, or t
aagaaagggggctttggagggctggccatctcgtacagcagacagccccaagganccagatgtcggactgnaaagtngtagccgttctcatggatctctccgggtgacatgtagtagggcgtccccactagggagtgggctgcgtggtctcagagctgaagaagcgccccagaccaaggtcaccgagcttcacgaacgcccgtggctgtgatgaacacgttgccaggcttgatgtctcggtgcatcacccggcgtgaatgcatgtgctccacggcgctgcacagctgcacaaagtacttccatactgtcctctccgggatgagccgcttctgcttcttaaagtacttgatcatctgcgagaggtcccctgcgtcagccaactccagcacaatgttcagctcgttgtcttcgataaacgagtccaaatacttgatgatatttgggtggttcagttgcttcaagaggccgatctccttgacacagtcctgcctcgccttggcgtccatcatctcaaagatctgcaccttcttcagagccactgtcttcctgtccagcaggcaggtggccttgtacacctcgctgaactgtcctcggcctatcttcttttcgatctggaagtccgccagcgagcagcgaaaagacagcgtgttgggatgcctctgtgggtcaggaggatgcacaggccccagggtgtggcagaggttgttggaactccctccatggggcatgtggccgggctgtcctgccatcctgcatgccagcctcacgagggcacgaacggcgcgcgggcgggctcggctgccgctgggggaccggtgcgctggcccgcgggcggctggagcggtgcgtcccacacgagtttgcggcgcagcggccgcacgcccgtcagctcggttccgccgccgccgccaccgcctgcgcgggcccgccctcgtgccgaattcgccacccaggcctcgctac

SEQ ID NO: 142994 - DNA, 592 bp, Homo Sapiens
  misc_feature (492)..(492): n is a, c, g, or t
  misc_feature (511)..(511): n is a, c, g, or t
  misc_feature (559)..(559): n is a, c, g, or t
cttttattctcttctttttttaaggtgagcacggctgtcttgtctgattcgctgaggcagatcccatccagggggctctcacctccacaggacaccgacacaggggccttctctgcagaggactccagcagcccaagcacagtggacccgtcttcttccatcttctggcacgtctccttctctatgcctttcacctcggcaccagctgatttctgaccacatgacgtggatgccagtttctcctcatcagtagcatggccatccctattagaaatgtctgaaatctgggagatcactgccccttcatcccgagaacatgcatccagggcgagagactgagtttcatgcttcttcaccttacagccactcgttattaaacgcgactttgccttcttgggtgattctaagatttcattaacgtgattaccagtgggagaacaaaagtcactgcttgttaaagtcgtagttggtttaaagggatccatggattcntcaaagttatctgggtcanagtggtaggagccctcaaaagaaaagggggtggtgttctgcaaaacanagtggctcccaaagggttgaagctgggcttttc

SEQ ID NO: 142995 - DNA, 490 bp, Homo Sapiens
tgccctattttctaaattatgaactgcatatatttgctttcaaagaagtaatcattatgtgtttgagtagtatagatagctcttcccaggtatcaatagccaaatttgacatgatactgtaatttactagcctttttagaggaaatataatgtgtagacagagcttttaaattatttcccctgtatttaatttggctttttattcctgttgttttaaagtatatgatgctataattccagattatttgagagtgtataacttaatgggataacttgctcagaaatgtttttggtcacatagttttgtttatctggacacttgtgagatttaaaaattttcggctggatatggtggttcctacctataatactggtgatttgggaggctgaggtgggggaattgcttgagcccaagagcttgaggctggagtaagctatgactggctactgcactccagcctaggccacagagcgagactccatctctctc

SEQ ID NO: 142996 - DNA, 1419 bp, Homo Sapiens
gcacctaatgaaatgtagcccagcacagcttctttgtagcactccgaatggtttggaccgtggccatagaaagagagatgcaatgtgtagttcatctgcaaataaagaaaatgacaatggaaacttggtggacagtgaaatgaaatatttgggcagtcccattactactgttccaaaattggataaaaatccaaacctaggagaagaccaggcagaagagatttcagatgaattaatggagttttccctgaaagatcaagaagcaaaggtgagcagaagtggcctatatcgctccccgtcgatgccagagaacttgaacaggccaagactgaagcaggtggaaaaattcaaggacaacacaataccagataaagttaaaaaaaagtatttttctggccaaggaaagctcaggaagggcttatgtttaaagaagacagtctctctgtgtgacattactatcactcagatgctggaggaagattctaaccaggggcacctgattggtgatttttccaaggtatgtgcgctgccaaccgtgtcagggaaacaccaagatctgaagtatgtcaacccagaaacagtggctgccttactgtcggggaagttccagggtctgattgagaagttttatgtcattgattgtcgctatccatatgagtatctgggaggacacatccagggagccttaaacttatatagtcaggaagaactgtttaacttctttctgaagaagcccatcgtccctttggacacccagaagagaataatcatcgtgttccactgtgaattctcctcagagaggggcccccgaatgtgccgctgtctgcgtgaagaggacaggtctctgaaccagtatcctgcattgtactacccagagctatatatccttaaaggcggctacagagacttctttccagaatatatggaactgtgtgaaccacagagctactgccctatgcatcatcaggaccacaagactgagttgctgaggtgtcgaagccagagcaaagtgcaggaaggggagcggcagctgcgggagcagattgcccttctggtgaaggacatgagcccatgataacattccagccactggctgctaacaagtcaccaaaagacactgcagaaaccctgagcagaaagaggccttctggatggccaaacccaagattattaaaagatgtctctgcaaaccaacaggctaccaacttgtatccaggcctgggaatggattaggtttcagcagagctgaaagctggtggcagagtcctggagctggctctataaggcagccttgagttgcatagagatttgtattggttcagggaactctggcattccttttcccaactcctcatgtcttctcacaagccagccaactctttctctctgggcttcgggctatgcaagagcgttgtctac

SEQ ID NO: 142997 - DNA, 936 bp, Homo Sapiens
  misc_feature (238)..(238): n is a, c, g, or t
  misc_feature (242)..(243): n is a, c, g, or t
  misc_feature (248)..(252): n is a, c, g, or t
gccttccagaacttccccatttcgggaatttggttacagaaacccttcgggtttcccccccggggcgttttttattttgggtgggaaatcccaaggcccctatgtcatggcccaggattctccctaggaaacaaggtatgacccatggtccacttccttacggggccccgggggccaaacgaatggtctagaaagcttctcgagggcccgaggcggccgacaggtcctttttgtggtngggnnttggnnnnngtagtaagatgctgcagaattttattttttaaatatgccgtttagagcagacacagtcacaataaaagttaaaaagttacaatgtgtccagtgtatatacccaggaaatccattcttggtacttttcaagagctgctgttatactgagtctctgagaagtccccttagataatagctgccacttttcagtatggttcagaatgagtatcttagtattctttctattttgctatggttctagtttatcaacctactttattagctgaactgttggccattgcttgctgaccagtagaaactcattgtgctttagttattggaaagtccccaacttcacgtccatttcattctctggtacagggaagagccatccttgggattatgttggcgatcacagttctgggacagttcttcattaacctcaatcagtttgatcctgaagtaggcgatgaggaggagcagcagcaaagtcatggggaggaagaccccaaagaacaggacccagccagggagctccctcatgaaagctgacagcacagagctcattgccaaccacacagaccccacggggaccatgggagtcacactcaggaccagggcagctttcctctgagtctgtacttgttttcttctccccggccgtaatggccgaattcccgggcatatgtccggtaccgtcgactg

SEQ ID NO: 142998 - DNA, 697 bp, Homo Sapiens
tttatattgaagtctgtgtcttcgcccttttaagtgcatctccttagcattgggatcattaaagctgcactcgcataatttacaatggaaccgaattacttttccttcatcatttcgtacctcttccacataatcatggcccactggctgcacatcactctgtaaagcagcaagagatgcaggtgtgactggttctgacactgtgtcttgctttacttcaggaatctgcacagcagaagtgacaggagtacttttaacacattcggttccttttgtgtcttctgctttatttcctgttgactgcagcttattaccaccaacaaaatttattttgggggtagatgttttcttggcagccatatttgtaggcactgctgatactttagtgttagatgtgctattaagagacgagtttcctgtagtcgtaagacccttcattgaagacgttgcaattgatgacgtattcacagtacaattgtttgctgcaatgcttgaaggagaggcagtcggctttgaagcagatacagctgttgaagaagtagcttggctaaccaacatttggtctgttgatggaatgggtttaccaagttttgtgtgtaacttaaccactttctgatgcttagcacccacgaatgtgggcagcatacgcatctgcttctgtacagacaccatcgagagcctcacacgtaactgaatt

SEQ ID NO: 142999 - DNA, 516 bp, Homo Sapiens
tttttcgtgagaatgtgtgacgtttattgccaatcatggcgacaggctgtgatcagagtgtgagccgtagaaagttctggattggttctcctaagatggaaagagcagccaggcagggcagtgcctctgtttacacacaccgatcccacccctctccccatttcaggcaagggggtgtgagtgtgttgggggcggttaccagaacagactcagtgtggcaaattgcatccagacttcaatttttcctcctcccacagactcctacgggttgttttactaaagaagggtttttgagcacaagtccagttgtcttaactctggtgcccggctgggtacacacggctgtacttaggcctccaacttttttcactccgtggtctcctgcggcacctcttagcttctgcgtctccaaaagggataatgttcttcttgaaagcgtcttttgaggattaattgatgtttgctctatgctttgaagagagagagaatcccatcaagtggctctgctgtcctcaa

SEQ ID NO: 143000 - DNA, 698 bp, Homo Sapiens
tttttaattttttaaaataagaagagcactttaattcacatacaagtaacagttcctcattaccaaatagcgtcctttccttagacatatgggcttaggggaaaatgttaaaagggctgagtgaaaacagcaagacaaagacaggtgcgttctacctgagttggaagaaggctatactttgtattaggttacaattttgcaaatggtctttacagaaaaatatcagcagatattctctgggaacctggacattactttgagttagagtgaggtcaggctttttggccctactctattgcctaagccttttataaatggctctgatacaagctgtggtaatcctctttctccatgaggagtggctgcttttcttcaggaagctgctttctcttgtgacgacacagcaagctcacaagccctgccagcagggcagtgaggacggcccctaccatggccgccccaaggagccatgaccagatccgacttgcttgttccaaataggacttaatgtagtcttgaaaagagtctgggtctgaatcttgtagatagctatagtcatagcccagatctttggatgaaatagagaaatcaccgtttctgtacagtggtataaaaggaaccatgtaggattcccggttatgtccatgggtgcatggcttcggataaactcttgaagagaggggccctcgagcactgct

SEQ ID NO: 143001 - DNA, 534 bp, Homo Sapiens
ttttttgggtgaaaagttttatttggtagcagaaaagatctacaatgggacctttacaaaagatgatgaacaagaggggagaaataaatttatacatatgattttgttgtcaaaatttgggatgatcatcagtaatcaagaacttacataaaaccacatctttttaagtaaaggaagtagaagctatgttaataccttgaccaatcagtttgctgaaactctgttaacagagattatactgaaccggaataaaattaagtctatagaagacaaatgaaactatttttaactgtagtaatgcatgaactatttagacagattaaaaacaactttctcaagctgacaattgatttctatcatatcaagtccatgatgtccacaatattcatttataccatggcttctcatagttcagtttttaaaattatatatatataaatgtgcatgtaacatcagatgttattgacagtagttgttaccatagaatgcatgtatctttctcactgtgtgtatccacttaatttgttcatatgt

SEQ ID NO: 143002 - DNA, 342 bp, Homo Sapiens
  misc_feature (299)..(299): n is a, c, g, or t
  misc_feature (306)..(306): n is a, c, g, or t
tttgtctgttttgcttttgccctcttgtcctcgtggtggtgattgatttttgtatagtcgactctttaaatcatttttaactagagagaatattttcccagatacaaataaatcgtcatgcaggtggggtgccgggtccatgggaaccgaaaggagaagccgtgcttgtcctagaaagtatacaattgtcacctcttttatgttttctgcccgcaacatcagcgtttgactgtctgttggcgtcggggtcctttggggtggccgtagtggtagatggtgggttgggggttgtgatagtngcgggtnattggtattttcttggtttttatatatttttggctg

SEQ ID NO: 143003 - DNA, 527 bp, Homo Sapiens
agttctggtggccggacgcctccgacaaggaaggcgaatccagcgagaagtcccagtggaaaaacaaacaaatctttattgtctagaaatatatataaaaaaaatcccccacaaaagatgctattctctcatttccccatcttcttcctcttcttccacacctctgatataaaggacattattacaccttattaaaacttcacccagatgtccagacaaagctccatctatgtattcttctgtatttgcaagctgcatgttcatgtagccatctacagataccagatagcccttgtactccattccccacttaagtttcaccatcactggctttcctgttagtccattgaggaaaggtttgggattgaggggtaaactcatcgtaaccacggccgaatgttgcaggctactctctgccgaccaggccgccgcccgtccctcgtgactacagcaggtaccgcaggtcccgagccgcagtttcaagagaaatggccgccaaacaggactatgacctttcacctcccccc

SEQ ID NO: 143004 - DNA, 500 bp, Homo Sapiens
taaaaggtctctttttacagtaacaaagtcactccagtcaatccctttgactcacctacatgaaaaatttggatgtctgtaaaagtcttatgctaacactagtgagaaaaactcgtgcatctcttaaatttgtgtagccttcttaggacagattttgtttgttggttggttggtttgttggtttcaaatgaacaggtcctaatcatcaacagatctgcacagagtattgaacattacatagataattcaaagatatgctaatgagaaagagggaaactaaaagtacttatttcttcatgaaaccaaataaaacttaatacatattctggatggtgaaagtagatggcatttggggaaatattcaggggatcagtgttactcagcttgaacaaatttccatttcagataaggtaatttattgattgatacgatgagttaacagatgtaaaagtagtctgaaaattttaaagcagaatatacaatgttatcgcctgtgttac

SEQ ID NO: 143005 - DNA, 458 bp, Homo Sapiens
tttttgaatgcatttttcagacgcttttactgtaccttataaccaagatcgggtgaggtgtgcaaaccaagggccctgtcccctccaaaccagcagagcccggggcatgaggatggcaagcgaagtgacaacataaacacaggtgtctccatcatcaaggatgggagtggaacggacagcaagggccaggtcacccccagagcattcgtcagttgtcaagtccaaagctaagaaatcagttcataaatgttttttgatttgcatgttggctcaagccctctttttaagtccaaggaggcagtccacattaagtgtgcaggcaaaaaagagatggaaaaaggagtcagtttctcccctgccctccctctctccctttatcaagctgagcaccttgagttgcatttgaggaaatgaaaactataggtgacgcaaccccattgtgtcgaattctttcttta

SEQ ID NO: 143006 - DNA, 997 bp, Homo Sapiens
aggtaacagcagacaccacgtgagagaacccagtggcctctggctcgcagcttagaaggtgaggcttgtgccaggccagccgagccgcctgtatgagcagagttccggtgtcctcggattcagggcagacttgggcagtgcctgtcctgcagttgggggcaggaactccctcccctgcccccaggcgtgcccctgaggcctggccccagcttgtcgctgaaataagtggagaacaccagccttgagcctcacagttttattttctcctcgttatccatccttcctttcagcaccagtaaggaaaaagaacacctctcttcgcaaaatattttatcaggtgtaaagacttgtttttcttctagggaagaaccgtctggatatatatttgataatgtttttaccaaaaccataggtgtgcttaccatagaaaacccctaatgtcccatgaagatacaatacagaaaaaaatacagaaattaaaaaagtttttataacagtatttctaaatctcagcaagttaaaaagcaatagttaaaaagcatcaagattaatatacttaaaacttaaggtggttttggacaaatgaaaatgaacatttccttcctcagtggcccccgcgccttgtggcttcctttgagactgggcctagggcaggaacagagtcttggtatgggcctcgggtgacccgtgtgcccacccctgctaggccttagatgccacagaatctgagatccagcaatggttcactttaaaaaatcagtggaagggcctggcctgcacacaaggcccgggagtccataggcagccacaatgagacacgtgggtgggggggtcccggtcttggtgctgagggaggtgtgcgggtgcctgggggccgcacatccttactctggacgccaggacctgactaggcagaggcgaccttgtgatgacagaaaatgacttgcctaaggccgcctgtgaggtgggaggggaggagcaaataaaactgtgaggc

SEQ ID NO: 143007 - DNA, 486 bp, Homo Sapiens
tttattcttagaagacatttttattataagtggattaacttacttggttttgtctctatctcaaatacgtaggtgagaaaacacaggtaattatactttgacaattacagtagccacaaaaagttagtgttttcttcaatttatggtactgaagagtatctttgtaattaaaatgtgaagcaatccattttcatgtcagttacccttgattgccaggttggcctataaatctatattgcttggagtgctgtcttttcattacttaatagtttgcattcagtggaggaggatatccaccctctaagtaacagagaatggaactcatctttcacttctgaatgagctcctcactgtaattgatggcatttcctgaaatggctgcgatcattagggctccagtgacatgaaataggatgtttctcttctttcagctagttgtacgaaagtttccagtggatggatgtgtcacagagaaaggggcactgg

SEQ ID NO: 143008 - DNA, 392 bp, Homo Sapiens
gatctgaagcgtttcttcaaggaatgaacaggagatgaaacatgactttaccactacaatcctgaagaaaaagcataatcaaagtaatggcaagccggacaccacctgtggtccaattaaataaaaacaaaccaggtcatgagcaaaggtcatggcaaaagttttactggatattcaaggcattttgcttgttggctttctagggggtcaaaggcaataacatgagcttactatgaaagtgttttgagaaaatcagccaaagccttagaagaaaagcactcaggaaacctttaccagagagtcctgctcaattctgtcatcaaacgagggcaattttgccagagttttgatgggaaatcattatatatttaaattacaatcctgatttgaaa

SEQ ID NO: 143009 - DNA, 727 bp, Homo Sapiens
ttttgaaaaatatcaaatttattttctgaagtagaataaaaggatgcatttgaattcaccttgcaatatacattgacagtaaaaacatttgccccatgtccttcttgtttccatttaactcctaacactagcatctggaagaaagaaaagatttctggcccttggttgcagaacctaaaacttgcaaaagaatgtgtgaaatgtatacccccaaactcaatcctcctaggtcacctcagaggcttgttaacaagctccatacagttgaaagataaagagcttcttcctgcctccttatccaaaagctcttgaatagtcatttgcagtttgaggtcttaccacaattttcactaatgcttaacccatttgaggtacagagcatgaaagaatgaaattctcttctgtttcaaatgaactaatatctaaatctgaaattatcaaaggtgacatctttcccttttaaaaaataaaccacccaaatgaaagtattagtttgaaagatacttgctaataaacctgacaaggaaaaattaaaccatccccttttttgccataataatatgaatttatacaatgctaacgtaagtcttggggaagtggaaccacacgagttctatcaaaaatagatattgtgatgattagatctgatctgagctcccctcagaagactgggggacctgggaagactggcttatttgtgaactattcagactcatgctcatcaaga

SEQ ID NO: 143010 - DNA, 556 bp, Homo Sapiens
tttcacaaaatcaaattttatttgcctagaaatgttcggcttacaaaacctgaaatgaactctttggaagctcctctatggcattattctgatgctcagggcatcaacatgctgggacactcccttgcctaacctctgtgcccaggggccctgcctgaggacgctggcaggattctctagcttgctctgaaaaacgatgcctttgctgaagccactcttctggttgtccttttatggcctgtccccatttcagtgattcccctgcaagcacgttttgatcatccattcgtctgctgatgggtccttgtgttgtttctatctctgtcagcttgggctgcttacacaattgttggagcttgctgaacactctgtgtaaggctgttgcttctgtgtttggtgttggggccttaagtcagcagcgcaggcagttgttcctaatggtctctctggaaattacagcttttgcctaggaagatacacatatagaaatatatttaagttcaaatatatttcttatattctatcctcgtgccgaattcttgcctcgaggccaatt

SEQ ID NO: 143011 - DNA, 729 bp, Homo Sapiens
  misc_feature (538)..(595): n is a, c, g, or t
ttttgtctttataattttaatagttaaatttttaccatgtgcctcaaaaccgttagagaattaatgagctctttgaaaaatgcttctaagtttcttgtattgctctaatagaatgctatctatgttattatttatttctgagactaaaattgtttacatctttaaactggttgtccttttgtgtattttaggatggaagttccagctctgatagtgacctaagtctgtcttcaatggtctttcttaaccatagcagtggctctgacgattcagctggagatggagaatgtggcttagatcagtcccttgtttctttagagatgtccgagattcttccgagatgaatcaaaattcaatatgtaccggctctactttggaagctcttatgaatcagaacttgggaatgggacctcttctgatttggtatcttgtgcagtcatcattatacagttccaatttctttcggatcctacgtatggcagttcagcagtgacatttccatggtattttcttaacttctttaggcctcatttttccnnnnnnnnnnnnnnnnnnnnnnnnnnnnnnnnnnnnnnnnnnnnnnnnnnnnnnnnnngtcagcttgggctgcttacacaattgttggagcttgctgaacacctctgtgtaaggctgttgcttctgtgtttggtgttggggccttaagtcagcagcgcaggcagtctgttcctaatgtctctctggaaatac

SEQ ID NO: 143012 - DNA, 902 bp, Homo Sapiens
tttggaattttacatcaccgtttaatttgtagttttaaaatatgtagacatgatatgtgggcctccatttgtactactgactcagttcttgcaaatattaagggtagacctgtccctgatcttcgtgtgtaaaatagcaccttctctgccactctattcttaccccagtctacatttcttcataacatcggtcaccatctgatctacatttacttatgtatcatctctttacccccactggaatgtaagttccacgtccctagagtctatattttgtttactgccttatccttatacctatacaagtgcctggcatgacaccactcagtaaaacttgaataaatgaataaccaatctaggctcaaagctcttacaggtgaaaggggctaacctggcagtcacaaaggaaaaatatcactgtgacaaccgtctgaggagcaccttctccccttaaaataactcactcaaaacagtggagctgcaaaggtgaccagagaaaatccattaacaccttagtgcccatgacaccaggtgagttgatcgggctacttgcgagagggacatgtgagtgagcgtggagagctctgagtaggctgaagagctggatgtgggggatctgggctgctgggaaccccgaatgttggaatcgccctgacaaccttatgagggtggtcagatatgggtcctgaggaaactgattccacggcaactgcccgccaacccagcacaccccacagtgaagaggggcttctgatccatgagtagggcccctcaaatgatgttcccctttagatggtcatggtcatcagcaggggtgggtgcatcgatcctgtggggtcttggtggtcgcagaccaagcgtccctcttctcacatctaattcacacgtctcatcgctccgcg

SEQ ID NO: 143013 - DNA, 391 bp, Homo Sapiens
ctgttctgctgaaagagtctacaaactcttaccctagacaagtataaaattccatgcagaggggacagaaatgacgattaacagaaatgaacaaaagcatcagagacatgctagtaaatgctagcttatacattctgctgttcatgtatagatctttatccttcataaataatgtatctatacaataaacctgtatttcatcttcctactcataagatttaatacattcattttttaaacatatttcctatcttctaagatgttttttcacttaatcaatggttttcaaactcgaatatcagtgaaactctttgttccaatgaaatctcatagagaaccccaacatataaaacagttaaaagcagaactgctctgatacaaaggggaaggg

SEQ ID NO: 143014 - DNA, 431 bp, Homo Sapiens
  misc_feature (246)..(356): n is a, c, g, or t
aatattaatttttattgttacatattctgaataatgcagttttatagttattattataacatgacacaaatggtagagattttgatgcctacatttttaataaaaatgttcaaaaccatatttcacaagatgtatcatgctgtaaggttgcaacagccctctcaaatagagttctgcctttctcttgccatttaaactaatgctatctgagagtgcaacagaaggccctcattacatgctggtatnnnnnnnnnnnnnnnnnnnnnnnnnnnnnnnnnnnnnnnnnnnnnnnnnnnnnnnnnnnnnnnnnnnnnnnnnnnnnnnnnnnnnnnnnnnnnnnnnnnnnnnnnnnnnnntaaagtgtaaaattatccttccatattgctgcaagtgaaatgatgttattttttatagctgtgtagtattcattg

SEQ ID NO: 143015 - DNA, 102 bp, Homo Sapiens
cttcaaccccattttcttccatttctcccacctttttaatgccagtaacctcactgagaatgttttacagtgatggaaaataaactctgttccaagttcaaa

SEQ ID NO: 143016 - DNA, 487 bp, Homo Sapiens
caactagtgctcctaaacttcaactctcttttgagtgttttatgtatctactcagcatccagttgtaaatatgcaaaaatcaatgcctactgtatttaaaaattactaaattcacaataaccacacagaatctataataaatagaatcaatgtaataatgactcagatccaggggaagaaaattataaaattttggaaaaaatgatgagctattaattaagaaaatagtttgttccttggtgagaagactcaatgtaaatatgtcagttttctcctgacttaagtcttcaacacaggcctaataatattgcagtggcaaatgattgccaggggcaggaggggatttggggaagtggtaaaaatgatctgtgtcttggtagtggtcgctgcacaactgcatacatctgtgaaaactcactgaactgcgcactttaaaagggtgaattgtaatatacatacctcaataaaccttacttaaaaattaaaa

SEQ ID NO: 143017 - DNA, 655 bp, Homo Sapiens
aaagggaagaaggatgcctggagtgggataaagaaaatatagaaaaggaagggagtgtcttcacatcccagcagggcacatggaggaggaggaggaggtgctgactatggacagcaagaagcaacatcaccatcacaaaacacccacccagggcaggggccctttcaacaaggagcataagagactgtttctgcctctgatggaagcccagcattttgtttttctccacatattttaatcaatatttaccaagccataacaatctggctttcactgtcaccctagggttgagtttcatgagtaactaccttttccactggctgcagaaataatgactccatgtatgattggcagaaggtcattcatttgagcataggaaaacaagcagtttcaagaaaagagctggcatctctgcatgagtgaatcagtgcacatctaaaatgcagttactgaaattatagacgcctctcctcggccaattggcctcctttggaagatatggcctcacaccattccatgtgcatgtgaaatgtctagacgtgattatagagttttcttgagagctgatgcatccaaggaacatttaaagtaagaagcaaagtaatgaaaaacgtttctcagaaaataaaaattgttaatatggtcttaccacaaa

SEQ ID NO: 143018 - DNA, 441 bp, Homo Sapiens
catggcagacattttatttaaatgaagaaagtaaattcaaaacagaaattttggtgaatatgtttaaaatcttggggtaagaaggactttctgagaataacattaaaggcaaaatcacaaagaaaagtacagatacatttgattacatgaggatgaaatgcttttatatagtgaaaagcaagacaacctgggagaaattgcttatattacataaaatagaaaaaggatcaatagatttaacttttcagtccaaagacagaaaaggataaatgaaggtgtgtcaaagaacgtgcattagaacaaatatatttactaatatcagagaaatcaatgatggctagtgttaagtgtgggaggggagaaatgtacactttgcatcttgatgttaaagcacatatcagtatcaatagcgtcacaatcattccctttgacacagaattt

SEQ ID NO: 143019 - DNA, 998 bp, Homo Sapiens
  misc_feature (64)..(74): n is a, c, g, or t
  misc_feature (108)..(119): n is a, c, g, or t
  misc_feature (136)..(241): n is a, c, g, or t
  misc_feature (279)..(299): n is a, c, g, or t
  misc_feature (338)..(351): n is a, c, g, or t
  misc_feature (425)..(467): n is a, c, g, or t
  misc_feature (945)..(945): n is a, c, g, or t
accccaccccaaacaaataagaggggtgtttgtttttcccccacttttccgccgtaaagaaaannnnnnnnnnnctctcctcccccggccgctttaaaatggcgggcnnnnnnnnnnnntggcgcccaaaattagnnnnnnnnnnnnnnnnnnnnnnnnnnnnnnnnnnnnnnnnnnnnnnnnnnnnnnnnnnnnnnnnnnnnnnnnnnnnnnnnnnnnnnnnnnnnnnnnnnnnnnnnnnttctttatattcccccctccttagtgagcccccttttnnnnnnnnnnnnnnnnnnnnnaaagtatgtggcccccccgagggtatttttaaagggcgnnnnnnnnnnnnnnattttttcccaatctgttccctgcctgaattcatggatgatgttttctaggttctttagcagttattttggggnnnnnnnnnnnnnnnnnnnnnnnnnnnnnnnnnnnnnnnnnnnttgcccaggctaaagatttttctttatttaggtataaaaaaatacagtacttgtcatgcaccagtttggccaatatatagacattatctgtagagcaattactacaattatagaaaatagaaggttacaggaattgtttttccaactaaaaaacctgaattaatattgttaacctaaataacaacctgcttattatgcaaaaacccttattctatatgtctgtgagagctagaaacttgtaagtatcattagtaaaaaaatcattataagaagctagttattggttaaaacaaacaagtcagtgttatctacaatcccttgcagtgtgaggggctttgcccagagtgggaacctcggtccatgacgaagggtgagcttggtgtctccttccctgcccctctctgttgactgatgccacttctccaaggtgtgtttgcagtgaaacgttccagtggaagatgcattgggtgaccaccanaggttgggcagggcagggccttgccttctgcaaggtgtgccctgaggggtcag

SEQ ID NO: 143020 - DNA, 504 bp, Homo Sapiens
ttccaggctaaagatttttctttatttaggtataaaaaaatacagtacttgtcatgcaccagtttggccaatatatagacattatctgtagagcaattactacaattatagaaaatagaaggttacaggaattgtttttccaactaaaaaacctgaattaatattgttaacctaaataacaacctgcttattatgcaaaaacccttattctatatgtctgtgagagctagaaacttgtaagtatcattagtaaaaaaatcattataagaagctagttattggttaaaacaaacaagtcagtgttatctacaatcccttgcagtgtgaggggctttgcccagagtgggtttggacattgtccagttttgctaaaggccacatcttgggttcctctaaaccaagggataaggagtagacagagaaaagaaagagagcatggattggcgaccaggtgaggcagagaaggggagacgtcttctgctccgggaacatctgccccttctc

SEQ ID NO: 143021 - DNA, 538 bp, Homo Sapiens
tttgctcatcgtttgttgtttagataatatcatgaactgataaatgcagttgccacgttgattccctagggcctggcttaccgactgaggtcataagatattatgccttctctttagacttggtcagtggagaggaaatgggcaaagaaccagcctatggaggtgacaaggccttagggccaaaagtcttgagggtgaaggtttagggcctgcgcagcttccctgccatgccccgcaaggtctcgcattcgcaaggcttgtgacagtgggagcctcattacggactctcctaaagtccatggtgtcctcttttcgcatttgcgccccgtgggtgatgcccgatgccgcccttcccatcgctctcttccccttcaagcgtatcgcaactgcaaaaacacccagcacagacactccattttctatcttaatgcatttaactagcacaacctacaggttgttccatcccagagactacccttttctccatagacgtgaccatcaaccaaccagcggtcagaatcagtcagcctctgtcatg

SEQ ID NO: 143022 - DNA, 513 bp, Homo Sapiens
ctgagcgagagaataagacgggaagagactcatgagagcctatagaatgggcgggggacctaggagagggacgataattgcgaagaccagagggccggaagaagaaacattctaagcgcatcaagaattctggccgactccccacagccccgggttcccatggcaaccgcctggcgcttgatggttacatctttcagcacaagcgtggaaagatttgtgtattcggctattttgtcatccgcatatgatagcacaggacatgctctgcactgtaaactctcagaccttcccgatatttgtaactttggctgctgccactggccccggctccaaaccttcagtgtcctgtattttgacatttctttgtgtccgtctctacccacttcattctcccactcctacccctttacacacaccacatcagagcttttttgtggggactgagtaaaagacctttaggaaatttcaggtatcgattccttctatgcatgcagagtagatatgaacagcaaa

SEQ ID NO: 143023 - DNA, 705 bp, Homo Sapiens
taaaaatttaagaacattttaatgacctggaaaatgctacaatgtaatactaagcaaataaataggataaaaataatctatgtgtagcattatactaattatgttaatttaaaagtgcatagaaaagactacataaagatacatgaaaatattggttattgttccctcaaaaggttcatgcttccattttcttgaacacttattaagtgccaggcatagtgagtaaggcaagtgaagtgccttacagcagagaacatgaggcctgaaagaaaggccattgatccagagacggctgggagatcagcagagcaacattcttctctcttctctgccccagagtccctggtgacccttctgggctacagtactcctctcacacaaaggggagtgtgacaggtgccctctctggggagccatccagccttttggtgttttcctcaagaaccacctgtacatgggccgaaagctacacatccaggatgctcctgtcaatattgttcgttgtagtgaaggcctaggaacaacttgagtatttatccacaggggaaagagaaatactgtagagtcgttacctgctgggatactccacagcagctggaaggaatgaatgaggcctctattttctatttctcatcctgggtagattttgacaacttaatgataagatggggcaaatatgctcctctgctatccccattgtcagaa

SEQ ID NO: 143024 - DNA, 436 bp, Homo Sapiens
acttctacttttcctcttaaaggcactttactctctccccactcttttcttcctcttcaaagtatttaaatttcctaggttttcatgaaaaagctggaaagcgatcatcatcaagggctttgcttctgtcttagaattgagctagcttgagtcaatttctgtgcctgcaaccaaatgaaaattaatatagtgagttctttcaggagctttctctgtttttctattgatacctctatatatttttaaggcaatgtcactttgttttgtttacaaatatattgaatatgtcaagattactattttgttattgccctttgtgaatttccttgtctattttgctcgcttgttctttcaggtgaaatttattattttattaatgttgccaaaaattataagtaaaatatcaattatagtaataaaatgttttgtgaaaaaa

SEQ ID NO: 143025 - DNA, 588 bp, Homo Sapiens
gatgagtgccaccgatgcgctgggaacgtcttccaggaggcaagcttgctcttaatctcatcacacacctcttcaaaagttggtgacttgctccacaggcactttctcctcttccttcaagggcgtggcgcaaggtcttctcaacccgctgcagcaggaagtcaaaggcggcaggattcatcctaaaccggcaagggatatcgctgcggaaaaccccagactcgagggcctccacgtggcccccgacgtaggtctcagagtccagcacgtgtccgtcgtccgtcagcttattgaactcctgctcttgcttgttggggaagatgatgttggcgtggaaggcctgcaccatcagcaaggcctcacacagagtgccagagcccttccgcagcacctcgtcgggctccatgggaataatggtgcacagagcaaagatgaatgggtggacgtacttcatgtacaggtagtaagtggcgacagcatctgacacagaatacgtggccagagtctggggctgctccgtggccatccggcacatgtcctccgggtctagctccacgggatcatagcctagcttcgcttggcggccgc

SEQ ID NO: 143026 - DNA, 766 bp, Homo Sapiens
tttgaagtttttgaagagaggacctgttgtctcttaaggaaacatacagagtggagttctttctgatttatgcagctgaaataataagagcaataacataagcagtgagaatgagacaatggagtttgggaagcaaaaaataagtcattaggcagatgatcaacagccaggataaaaatgagtgacatgaaaggatacactcaaggacccatccggcccacaaagaaagaggtggcctctgactgcagcgcacatgaagcctgctcaacagcctctgggcatgtgaaatctgttctatacgttgaggctttatagagacgcccactagctggtgttgatctcccaacataagtttcttctggcgggaaggatcaagtaactcctgatagtgtgtcgcagcacagcttggctcaagccttgcaaatgctcgatgagagagaaagtatcgatgagacgtgaacgaatggcatcagctcggggaagctgcatctgcccttcttgttggtaagcggccatgtctgctcagcccaggttctcttcgcccactcagtcctgacttcacgcttccacctccagctcaggcgccccctgagcccggctacccctacgcaggacgagctcagggccggctcccagcctcactgcgccccatttcccgccccgcccgacccccaggtttcggctcaccccgggacccggccctagcccctgcccccagcccaggaccgggcccagccacgctcgcccagacactcgccgcctcccc

SEQ ID NO: 143027 - DNA, 471 bp, Homo Sapiens
ttttttttgtctgagtcaatttattcagcacaaagttttcactctcatagtgtgttgatttccatgctgcaaaatgcagttaaccaatcattcatagcaataaactcttgcatttagtttttcattcccatattaacttttatccagtatttgtgaatagcacctaacatggaaggctagtatctgagttaatgacaattttatggaatttatctccatcagttgacactgtaaacagaagggtgaaatgccatcatcataaaaagcctgaagctcaccagcagatatatcttttccttcaattccctgggggtaaagcagcttgaattacatctagcaaatgtatttaagtacaactgcacaataagcacaactgaaaatatgcctctttcacagtaactgacacttccggggttttcatttttttctgcatactaatcattaacagtattataccaaaaagccatttta

SEQ ID NO: 143028 - DNA, 535 bp, Homo Sapiens
ttttattggtaaccatcatttatttaactcgtcatgtttgaactgttaggttgtatttatcgttttctgtattacagacgacttgatgacaaatgaccaatcctctaatgttcaatataaaaatatcaattgcataaggagataaggggcatttggctaaaataaaattcagtgtgccccaccctctccacatgtaatttgctctaaaaaggcatgaatgactaaattagcccttctattctccagcgcagctcctgagcccagcggtgggtgcaggtgcttagagcctggctctgctcttctgccgccagaaggcgaagggcacccaacccaggattctcctctccttttttattaatagaagagtgctcaggctcagtgcatgagagcagcgctctctgactttgcacttatcagagtaacctagggggcttgtttaaaaatacacattccctggctgagctcccagaaattggacttcagtggtttagcgggagtgtgcataggccaggtgattctgaggaccaacaggggt

SEQ ID NO: 143029 - DNA, 1852 bp, Homo Sapiens
aaagaacccactcccctgccttgcctccctccctgcctgctgtgcagcctgggagcatgagacagagaagcagaggagcctgggaagcttctcgaaggatggagggcgcccacctcctggaccccttgggtctccttggcttccccacggctgttggcgctggtggacaggacaggtgaagacacaggcagcctgggggcgggggccacaccgctgctggcctccacaggacccagccacccagcaggcatgggggacgcaagtcttgcgcagggaaggaggacgctggccctgtgagggcacgtgttggcgaatgcacgaagacgtggcatctgttgtgctcctctccagccagggcagtgagcaggtccgggttcagttctcctggggtgataagtccagagcagacatcctcctccagtgtgagggtgacgcttggccaggatgcacaggcccatctgaagcccactgaccgccgggcgatggccatgacacagatgcttccagagagactgctgcttcgagcagtgacagcagaggtggctgcaaggatgccgtgaagcccaggtggggactgtctcttggatccacagactggctccgccagtggccccgagccacctgcccaggcctacatgccttggtctggccttggggctggtcttgggtttgacatggtggggtgcagccatgaatgggcaaccgggggtctcaggcccccaccaatcagcctggcgtctggtggtctgttctgtgcagacgtgggcagttccaggaagagcatgcggctccggtgggcaggtgatgaacagacggaggcagtgagggtcccagggggcatccttcgcttttgagttcagacggtcttgagccgggaccgtccaatgtggttctcgccctttgggaagggagaacagagcccctgcctgctgagggtccccgaccacgtgcccaccccagatactggtggacatggttcacaatcaggcatttaatgagactccaggatcctccaggcccagctccccgcccgcccagccgccttcttggggggacaagcgctgggaaggcagagtccatgcaagctgaggagctggggtcctccgactctggacagctggtgtggcacggtcctgcctggcaggtttaccggatcctggtgaagaggttgagcacagacacagactcctttgtcgaacgggttttgctaaagacgttccagaacctcagggtctcgtctccagcaccagtgacgatggcctccccatcaggggacattgccaggtacagcacgcggtaggagtgcccggtcagcttggccacctgggtcagggaggggtacttccagacaaggatctggttctgtgagtagccgtgcgtgctcaccagctcgttggcgtgcttggaccaggccagattgcacacttgggagcccgtgtcgatacactgcagtggttgtcctgtcagcgtgttccagaagcggatacagcggtcagctgtgccgccccccgaggccagcagcccgtgctgatgtggggaccaggcgatggccttcacggccgccaggtgctccgtgtactgctgcacggggctcaggctcgagtgattccagaccagcagcttgttgtcgttgccccccgaggcgaggagctggtggtctgtggaccacttgagcccgcacacctcctgccggtggccctgcagccgccgctccgactgcagtggcggggtgcggatgtccctctgcaggatcatgcggtcgcggctcccggacgacagctgctcagcattccaggccagcgccccgacgcgtgcctcgtgccgagaatcgccacccaggcctcgctacctt

SEQ ID NO: 143030 - DNA, 969 bp, Homo Sapiens
tcgttttaacccgggcccgtccaatgggttctcgcccttggaagggggacagagcccctgctgtggaggtccccgaccacgtgccccccccagattactggtggacatgttcccaatccaggcatttaatgagactccaggatcctcccggcccagcttccccgcccgcccagccgcctttcttcgggggacaagcgctgggaaggcagagtccatgcaagctgaggagctggggtcctccgactctggacagctggtgtggcacggtcctgcccggcaggtttaccggatcctggtgaagaggttgagcacagacacagactcctttgtcgaacgggttttgctaaagacgttccagaacctcagggtctcgtctccagcaccagtgacgatggcctccccatcaggggacattgccaggtacagcacgcggtaggagtgcccggtcagcttggccacctgggtcagggaggggtacttccagacaaggatctggttctgtgagtagccgtgcgtgctcaccagctcgttggcgtgcttggaccaggccagattgcacacttgggagcccgtgtcgatacactgcagtggttgtcctgtcagcgtgttccagaagcggatacagcggtcagctgtgccgccccccgaggccagcagcccgtgctgatgtggggaccaggcgatggccttcacggccgccaggtgctccgtgtactgctgcacggggctcaggctcgagtgattccagaccagcagcttgttgtcgttgccccccgaggcgaggagctggtggtctgtggaccacttgagcccgcacacctcctgccggtggccctgcagccgccgctccgactgcagtggcggggtgcggatgtccctctgcaggatcatgcggtcgcggctcccggacgacagctgctcagcattccagcctcgtgccggattcgccacccaggcctcgctaccttg

SEQ ID NO: 143031 - DNA, 510 bp, Homo Sapiens
tttttgacaggaggaattgtctttattcttgcattaatgataaatgtaatctacaagatggccttcatggattagaaaaaggaatcagaccacaaggaaaaagaaattgctggttttcactcaagatttatctagaaaagtgtactgactactggaataatagtttacccctgggttgtaccacagaatgagaaattctacaagattatacaactctttttctacaagattacactactcatattgtttttattccattccggaattagaaattaactttctaaatatcattttttttctccaaaaaaatcctcttaccagctaacctggatatggacaaaaatatcttgattgctgtaaaggtctatctccctagtaaaaatgaataaattgcccttgaatttattcaaggcaatcactatcagctgtggaacacccaggtaaactaacacaactaggttcctacacacaaaacaaatattctaaactgtttccacagggcagccacca

SEQ ID NO: 143032 - DNA, 353 bp, Homo Sapiens
tttgtgggagactggagttttattattactcaaatcagtctctccgagcatttgaggaacagagtttttaaagacaattgggcgggtaggagcttgggaagtggggagtgctgattggccaggttgaagatggaatcagaggttgttggagtttttcttgctatttactcttcctggttggtttggcagaactggttgaggcagattatcggtgtgggtggtgtcagctgatccactgagctgattcaaggattgttgtctcatgcctccattttcaggattcacaggctcttatcaattttgtttcagagtcaaaccatggactgaattccttcccaaggttagttgggctt

SEQ ID NO: 143033 - DNA, 1443 bp, Homo Sapiens
  misc_feature (289)..(289): n is a, c, g, or t
  misc_feature (366)..(366): n is a, c, g, or t
  misc_feature (1431)..(1431): n is a, c, g, or t
ggacccaaattttttaacaaccaatggttagttcctcagattagatagggtcccccctcggtaggagctggcccttttttaaaaaattaaagggaaattttcacaggaagagtgggtgtcataccctgccctagaccagttgcccataaccacacgttacgagggcacgcacacttgccaaggcaggcctcccacccccaaggcccgcactctccagtaggtgcctggcagagggcacatgtgatcagcagagactgcatctcccatcaccagacccacagagtgctgnagatggaagccactctgggtggcaggagagctagactccgtctctctttagacccacgtgctggggtccccggggcntgcagcgccctacggggctccctaagttgtcacttcctgtgctctaagcagactgcggtctcacgccctgcaaagtcactcctttcgccatggagctcagggccgcatcagtaaacacacacttcagtcggtggtgatttgtgaaataggtttagcaaaaatatattgagaataaaaatcagaaactggtaaagaaaagccaaatgaaaaaaatatacaaagttatcccccaaatgttgataagaacctagcgagttcagaagataggcccaggtgagaagtaggcccaacccggccaggcctcgaaagtgctccgcgtaaactacacgttgaaagtggacgtgttattggcatttcattcaaatccatgaggagaaaaaactacgggaggaaatcttacaacaccattgctgccaccacctgcagggccagcttctcactaggatggaaaagaagcgtttctgaggaacaattcacattagtacaaaaaaatgatacagccatttccaaagagcagagtaatgatcacaatggcagtttcgaggaatccagggtcagtcctcacacgggcctcacccagcctctcccgagtggcgacggcgctgagagccagaaagggggcaacgcgaagacgagtttctagcgacccttgggaaaagcctacgctacacatttcagaggagattaaaacattccatatgccaattaactttaacctaaaaaaatagagtgggagggaaccttgacattcggagaaattcaagtgtggcggtaacgctgaggagtgaggctgtttgtccaggaacgctgagctgggctcagacggtcatcagtgcagacgcagcggacgctgctgaggatggctcagtggtggggaggcgctccctcccgaggaggcctgtacgtctgtgtcctggcggctcgagctgggtcctccgggccagttcatgctcgccctctcccgcaggcagggccggccgccctgcaccgcccctggatccggccaagcggccgcctggcgctatttgccctctgtgactctccgccctcgtcggaatcgccacncaggctcgctcc

SEQ ID NO: 143034 - DNA, 445 bp, Homo Sapiens
  misc_feature (426)..(426): n is a, c, g, or t
ttttaaagttatctatatattttaatacaagtgatgttttgtatagatatcaaggtgtaataatagtatatacaagatttcttctacaaatgggcttaaatattatcacgttttgagacttgcgaagtagacaaaaagatgttttctgtatttgtgagcaactttgtctactgcttgaattgttaagagagagtcatttgggtctcattaaaaccaatataaattcatcaaaatctcaatctatagattccaaaaaagccaatgtatatatctgggataaatgagaactctgtccccatttccagctaatctgagaaggactatatccatagtctcgaggaaagtcagagctgtccaatccctcagcaccttttagatttgctccaaattagaaacgtggggactatgtgttctgggcaatcacangtctggaaaatggctctgc

SEQ ID NO: 143035 - DNA, 556 bp, Homo Sapiens
cattattttctggaatagtgtttgaatgatgggcaaaccctcaagtggagaatttgctttcacacacgtagcagcttcaactgctgagatcatgttgttcagcacccattctaatccacatggaaaggggcacgggggtgttgtgggtggggaggggtggtgcagctctgggccccaggggtcttgggagtgatccatttctggatgtctgcattgtgtggggtcccgtcattcactctgtcacttgctctgacttgagttcgctctccagatcgatttcattttttttacaggtgggaatcttgttactccacgtcccatccttcagacactcaatctggaatgtgtccatctccacattatccttcagcactttgtagcctgtgtcacagctgacgagcacttggtctttgaagaaatacttggcttgggagggctcgattttcccatggacaggaggcttggagctctggcactcatttcctgcagccctggatgagaacctacagccacggttctctcccgaggtggcactatgggacaagatcaagacact

SEQ ID NO: 143036 - DNA, 474 bp, Homo Sapiens
tttaaataaccaaagcaggaatttattgaaaacaaaagtacactccacagtgtgggagtgggcctgagcagcagctcaggggcctggatacagaatcttcctggtccaaatacccaccagaattttcccatcggccacttcatgctcacctcatgtaactgaaatggtagccgcaatcagtctgattggttgcagaaagcagccaaccagaggctgaagtgaagttacaaaagtcacactcctgtgcaaacaatctgatgagttgcaaaaagcaaccaatcagaggctaggatgaagttacaaagttatacttctttgcaaatgaagacttgaccagcaatcagtcttacttgttgcagacagccaatttcccatctgcctcacagaaaaggtcagaggtagtagcctctggttcttttgttacttagacatggaaagttagggttttcttttcattttggttctaggaagtca

SEQ ID NO: 143037 - DNA, 858 bp, Homo Sapiens
  misc_feature (179)..(213): n is a, c, g, or t
tttggatatagataaaaatatttaatgcttctatttcatctgctcatgtaggttttacaatattccatgtatattccaatgtggatggtactgaattctgatcataccagtttccatcaggatttatcagatctgaaacatcctgcagataagctggttgacaatcccacagcagttcnnnnnnnnnnnnnnnnnnnnnnnnnnnnnnnnnnnaaacagagaacaaagggattcactcagagatcagaatacgaagcttcctctcagcatcatgggaggagataaaataattcattctatggtctttgttccattaagacttggtgctttcttcagtaacagtatgtgaaatgtggctgactttgagtcccccactgtgtaagtggaattatttttcactgcagcatttctgagtctttttcttgttccttactctgaactgtaaaattaagttcataaaggcatttggcaagggtggaggaagcttccatgttactaatggctagcactgataagttattttcatgtctctttaacaatctgcgaccacattctgaatatttaccaatattttttaatattaaggcagctgttagtcggatgtgtttagttattggtccctctttttcatctgtaaaatctcgaaagacaaggtttcttgatcctctcctcagagccataagtgcagcactgggatgattcacaatggccttttgtgctctaggagttgagcttgtgccccctacagttggctgcttggtagaagacttctgacttcctgcttgtcctggttcatcttgttttaatcctgcaagtagggcatcctttgaacagtgcttatcctgcaagtgggtaata

SEQ ID NO: 143038 - DNA, 442 bp, Homo Sapiens
aaagcagttttaggctcacagtaaaattgagctgaaggtacaggtttccatatacccttttccctcacacatgcacagcctccccattatcaacattcccaccagggtgtactgagcatgacacatcattatcacccagactccagagttgccactagggtacacttggtgttgtacattctgtgggtttggacaaatgtataatgagtatccaccctcacagtatcatacagggtggtttccctgccctaaaatcctctgtgctctgtctagtcatctctctcccgacaaatcctggcaaccactgatctttttactgtctctatagttttgctgtttctggaatttcatatagttgaagtcatacagtatatagccttttcagattgtcttctttcacttggtaatctgcatttaagattcctccatggtttttcatggc

SEQ ID NO: 143039 - DNA, 549 bp, Homo Sapiens
tttttccatgaaagatgtttattgatttaggaggagaaggcagtacattccattcaatactgtatttgactctgattacaatttccatgcaaagctactgttacatacacacatgaaaactgaagaaatgcttacctgacaatatttcaagtcagaatttctcagctaatttagaaagcaattaaaagtgaatacagaaagacactatggattcaaacattcttcccagaagagctttctaatgtataaagacctcagagaaaagagccctttccattcgagcagctacagagggcggtgtttcctcctgccctgtacttggggagaacagactgtgcacccatgtttatggaccgaggttactccacaggcatttcagaccaaggctccgaggcctgcggcttcacgcggaaatgacgggggctgggcatggttaacaggcaggcatcttggctgcggtccagtcctgtaagggccctgcacagaaccctacacgatgagctttcaacctgactcatctcccttccatgaacaaggccctgagacagg

SEQ ID NO: 143040 - DNA, 431 bp, Homo Sapiens
ctggtggcttgggtaatgtggcagccccctccccaggagtccctgcactggccactccaggcaccaggattctttttgccttaatgaattcccctcaagtctccggttagaagtttcctgctccaatcttgaatatgcatcttttaaaatactctgcaaatttgagggcctctcatgtatcatttcaatcctccagctattagagaaattggggtatcatatagattacggaaaaattactttgggcagagaaggaggtagaagatcaaacgcttatctgtacaaataaattcagtgcgatccacaattaagcagcatttgacatttaaaaaatatttgatccatgttttggcttccagagctgcttaagggagctgcgatgtgtaaattacattcaaatcagggttaaatatagttcccagagaaagata

SEQ ID NO: 143041 - DNA, 445 bp, Homo Sapiens
tttatggaatttattaatttgatgatacatgtcagtgtaatagatttggggagttattatcagtttgccaatcttcactcctttggaccttagtgccctgaatcttgcgaggcacttcagagattttcaagttcagggtgcccccatgcagaaatctccagggtgatcagcaatgggagtctcacttttaaaacaatgtgatcactcattgttgggcatctccaactgctaggaagttttccctcatgtgacactgttcttccttatctggttctagagtgtgaggtgcaaagtgatgatgtaacctcccaggctatggatggccagtggtcctctcagtcacataggaacaggtggtatagatcacatcagatgacagtgaacccactgcagtcatgggtgggtcataaccattttcattcatttgtatatttttgtgagtgtg

SEQ ID NO: 143042 - DNA, 548 bp, Homo Sapiens
aaacccaaggacttttggagtgggccctctcaaggaaggccagccccttgtgattgaaaataaagtgtgcaatcgctatgagtctctgaatggaagagtccaatccaccgaactctgtgctgggcatttggccggaggcactgacagttgccaggttgacattggagggcctctggtttgcttcgagaaggacaaatacattttacaaggagtcacttcttggggtcttggctgtgcacgccccaataagcctggtgtctatgttcgtgtttcaaggtttgttacttggattgagggagtgatgagaaataattaattggacgggagacagagtgacgcactgactcacctagaggctgggacgtgggtagggatttagcatgctggaaataactggcagtaatcaaacgaagacactgtccccagctaccagctacgccaaacctcggcattttttgtgttattttctgactgctggattctgtagtaaggtgacatagctatgacatttgttaaaaataaactctgtacttaactttgatttgagt

SEQ ID NO: 143043 - DNA, 472 bp, Homo Sapiens
ttttttgcagttggaacatctttccagttttattttcagttctcctctctgcactccaaggtcataggatttccacatgcccttggaagagcctttggaaggtattttcatccttcctactggtaaaatggcatcaagggtccccaccggttcaagatggggaccttgactatatggcaatgaagacagggacaccctggcagtagcaggtagcctttggccatctctgcagcaggctggtgtttgggatccacgaggcacggaaagtcagcactctggaggacctggttggggtcaccctgggccaggtgcagatcgtgggaagctggatatgtgaaatggcaggtgctggtgaacttgcgctcgtcctccctcgtggcctcatgttcctgtgatgggaagaagccggggagtcccaggtctttggcagtcatgtggggtcttttgaaagcagggtacccatctgttagct

SEQ ID NO: 143044 - DNA, 560 bp, Homo Sapiens
cagctcgtctacttcacgaaatcactcctgtaccccagatccagaagaggagtccaagtcggaggccagcttctcagaggaagagactgagtccctcaaagcaaaggccgaggcccttaagacagaggccgagcccaccaagacaaggaccgagacccccatggcacagagtgattctcagctgtttaaccagcttctggtgactgaggggatgaccctgcccactgagatgaaggaggcagccagtgaaatggccagagccttgcggggtcccggtcctcgcagctccctggatcagcatgtggcagcggtcgtggccactgtgcagatatccagcttggacacaaacctgcagctttcagggctctctgccctctctcaggctgtggaggaggtcactgagcgggaccaccctctggtccgtcctgacagatcgctgagagagaagctagtgaagatgctggtggagctgctgaccaaccaggtgggagagaagatggtggtcgtgcaggccctgcgcctcctttacctgctcatgaccaagcacgagtggcggccgc

SEQ ID NO: 143045 - DNA, 584 bp, Homo Sapiens
tttaattgtcaaacttttaaattttattaaaatgtttggagtaatgcacggaatgaattccagacctacataaatacactggcagctgttggtaatttgcatttttatcagttttgaaagagcacaatgtacttcctgcatcttattttcagaatttgcatttttatcatctttggctatccactacataacatggagtacttgagtatctcattctttgaattttcatttttgattgtaaatcagatgatgtctggcaattttttctcatttttctctctctcaacctccaggtttacttgctcccatttcttcttggctctggatatatcttttcactttttgaatatgtttttgaaaaaggaattcgttttcgccaggctgaatcattatatgatgttgacgtatatttgtctggactgaggttgggtttgggttccctgttagcatggactttattgtaggacccatgcgtgggcctgctgcgggaaggtgcattcaacgcgacagtcctgacagcatctctttgaacgtggatataggatgcattctccgcatttcgatttttattattgcggtgataa

SEQ ID NO: 143046 - DNA, 474 bp, Homo Sapiens
ggcttaaacaactaacatttattttctcacagtcctggagattaaaagtccaagatcaaggtgctggcagggctggttcctggtgaggtctctcctcctggcttgcagatggcagcattcttgttgtgtccttacacagcatttcctctgtgcacatgtggagagacaaacctctggtgtctcttcctcttataaggacactagtcctatgggattagggcctcactcttatggcctaacttaaccttagtttcttaaaggccttatgtccaaatacagtcatgttggggtttaggacttcaacaagtaaatttggtggtggtagaggccagcatttggtggtgctggtgggaacacaattcagaactgaattcacaattcaattcacagtgactcttgtgaataaagtataaaatttaaccagcattccactttaacaatgcataaaaatagtctctaaatttggttatgagc

SEQ ID NO: 143047 - DNA, 597 bp, Homo Sapiens
atcttttacctcttgaacaatgaatgcagatgccatgactacatctgtttgttggggaccagggaggctgccagtgaggattcagggtggaagtagtgtgtacccaatacctattgtgagatgtggcctggggagccctgagattgcctggccaggctcactcactacccagacaccctcttcctgcatggcgagtccctcagcccctccaaggctcaattctcagacatcggagtaatccacatcctccatcttgagttactcctcacaaggcctgcaagttttcctaggaggaagggaagacagggttgaacccacacaattctagaatctagaatttggaggatttctaaaccatttctgtaagtcagcccttgagaacttgtagattttctcatcatttgcagcatgagagtctggagtagactgtttggatttgactcttggttccttgggcaagttacttaacctctcagctgtgtgtcagtttccttatctaaaaagtgtggttaataataactgacctctcagaggtattgtgaggttactgtgatgattaaattagttgattcatataaaatgtttcaaagagaagaa

SEQ ID NO: 143048 - DNA, 926 bp, Homo Sapiens
  misc_feature (656)..(666): n is a, c, g, or t
ggaccgccggggtacccgaagcccggtttgcaaaagccctgaaaagattccctcgggagccagtccgaagaagcacccaacccgcaagcaagcaagaaatacggtccaagtccctcaaaatcatcatacccccaaacgtgtttggggaatggttccttattccacctttcctgactaggctttcccatccgtttccggatttcctccttgcctgagggccatttatcagggcctggggagccctgatgggaagccataggaactccagagttgccaagccatagctgagaagcctggtggtttttcctctcccagtgaaaaaatgggttcagggtcttgtccttagctactagctctagaaaagtcccaaaagcagcagaaggtgaagcaggaagcacttggttttctccttcctgatatagtcacctgttggaagtgttaaaatttcctcgacaggccttaaatttactactacattagggtaccacattttaacttaccatgactttgctccttcctttcctgagaaaatatttccactggattttttccaccagtccccttacagccctcattgttttaggaatctctctcaggtttttttctgacctaaaccagcaggaagtcgtcctgggctgtaagcaccatcacttgcnnnnnnnnnnnctgatttcacaagtgtggtgttttcccaaggctcccttcccaagctcagtgcaaacctctcactcccaagtttctttgaggccacttgcccccaagcacttcacaatagaccctcgagggcttgtgtccatttggccttttacaagtgtaatgccaatttcattgatttttgtttcttttggcctgatttgtatctctggaatgcatttattcttgaaatatttgtgtgattttacaaaaagcttttgtaatcagttaaa

SEQ ID NO: 143049 - DNA, 1164 bp, Homo Sapiens
ttgtgtggggttgtgtggtgggtgcatgtccgctgtgttggtgccttcgatcgtccgttgccttgtgcggtcgtgactcttccgttggggagcctgccgtctgtcttcgtggcgatgtgcgtggctcgtgaccaacctttccggggaccggcgtccttatacgttgtcccacaatgtgtcactgggtcatgaagatgcttcagcttgggttattcgattgtgaaatgtccgaacagattctaaggttgttctttcagtttggccaggttagcacattagcaccacgtttaagaatggctgatctgagatttttctgccgtatggattttagcatcaagcatgtctcgtaaatctgaacactggtactctgggaaatctcacacgactacgatcccctccgtaaagcatgagaaggtaaactcaggaagttttttgtaacgaagaaacttactttcttttacagtttctgtcctagcaagctggtatgtgcatgcttgagtattagtaacacccagagaactggaagtttgggggtgctgtcacagggactctgaaggcccccagaacagaaggatggacgagagttaacaatctagatatagtcttttttagagcagctcacaatgagaaattgggaacacttcacactataaaaccacaatatttattttgccacaagaatccacttcgtcagttagcaagtagctgggaaaacagccctgttctaactcctattataaaacttccagttcccattttttatgggctgttgctcatccctgaacctattcattttcactggacaaataaaactcttttagagccattcagctgcaacccttatactactgtgaaaaggtgagtccagatacaaagtttcggggagacatcatcgttttttagtgccactgtttccaccgccgggtttgctgaagctcctactcatttgaggaaagtgcacagttggggttctttctgtagggccatataatcccaagttcctggcagtagcagatttccgcaggggcttgacgctgggaaaagggctaaagatgggggtttttgagttgctgccttggggagctttgctggtggctttgttttcttcgggtgcactcggcggctctgggcagtgccgctggcagggtgggtgcaccctgagct

SEQ ID NO: 143050 - DNA, 1236 bp, Homo Sapiens
ggggatccattaacccttaatagtcaatgtctatgattttaatgttattactagattcacactgttcattatttcccccagttcgtttaaatctgcaaatactttatgttcagttttacatctgttaaagcaagatcctcaagggcagggatggaattctactcacttctgcatcccttgacattgcagtgtgtggaacagagatgacaaatacaggttcaaatttgtgccacctgaaagagtgccatctagaagcagttgcttcaaactgcacttcaacgggacccacacgccctgctaagcaactcaaactcatcatgaaataaatctgcagaagaaatgtgtactctctattcaaactctgaagtaaataaaatgtgtatgattgacacaatcacaaaatggcatttaagtggaagtctgcttcctgaagaaataaaagccagagcaaacagatttggggtcatatttttgttcactgaaaggaccaaccagtttcatcaaacaagctttagagaaagagaaactgagtaattcatcttgtcagttacagttcacatatatgcacacacatacaaactggctcagcatcagtgaaacataactattcaaatacaaaagtataaaaaacctctttaaaaaaccaatagcagccaaaacagaacatttgtaaacaaaaccacaactatcagccctgtgcttaaacacagaatctgcattcttttgaaacattaagtatatgcaataaagagaatatagaccatctttttccttaatatacaatacccaatatctaaaacaatgtcaccaataatagacacaaatcggtgttatcataaggcatgttgaacagtctttttcacagtactcaggggcatcatgttgctgcagaggccacactttccagaagttttctcctcgctgtgatcctcgcacaccgggggcactcggaggactggaagcactgtttgtgaaagcaagccctgcacgctgaacatcttctacatgttgctgtctgaaatgggaagatgacagtcgtattctggcaaaattcacaaataaagccctttccttgacacagctcacagccagccacatgtgcaagggaagctttcagaatgtccttgagtaagggtgccagcagccctttcttgatcctgaccaggtcctcaagggagaacaggtggagctcatcagtcaagtgtcccggcacctgctcgaactcctttaatgcac

SEQ ID NO: 143051 - DNA, 406 bp, Homo Sapiens
  misc_feature (361)..(361): n is a, c, g, or t
ttttacagaacccgcatgcctaaatatttatttcagttgttcgtatttcccacacttttcaaatgtgaacttgtgtcctgaaggtggagctttagtacacaagaaaattgggaaggggcaaacatgtttgtacaaaatgggggtagaatcagcaaagaatgcatttatatgcttcctcgtcgcctacgtttttcatgccaaaaagttagcacagattctgatttctttcaccgtaggagtctgcatacaattaaatgggaggcaaaagaagcccactcttaagagtggggcttatggtcccagtagaatggcagggaactgtagccatcaaagccatttatacttcttgtgggtagtattntaaagatggttgtttctttttcaaaatgaagcagcatgactaagt

SEQ ID NO: 143052 - DNA, 431 bp, Homo Sapiens
ttttttatgcatcgactcttttatttctttaggactcaaattccactcggatggggtcaggcttgggtctggggaccgggctggcacggggctggttcgggtcgctgctcgagcccaaggtggcgtttttaattcacgtacagcctcttgctccggcgcttcttgagcccttcgatgtatcgctgcagctccttagtcaggaagtggtccctgccgatccctaactggtagctccggagggctttggtgaggatttccagagcttcattctccatgagttccatcaggggcagtggcagcctgctctgctgctctgcccagtaggctcgatggggcatgtgcttcgcaatattgagtgatgacattgaggaagacttttcgcctcgactgggatgcagtgtccttctcccccaattgatttcatggagctg

SEQ ID NO: 143053 - DNA, 1103 bp, Homo Sapiens
tttctgttaacacaagtatatttgtgctatagctgatgtgtatttgtggcttacacttggtgagccctcatgtgctggccatcagttctaagtgcttcacatttatttatttaatcctcagaaaagccctctgaggtaggtgatgccaattttacagataaggacaccgaggccctgagagatttttctgaccttcccaaggtcacttaggtagtagatggcagaggtgggatttaactcaaggtagactggctccagagcctacctctgaatcctgacgttgtacagcttctccacttttgtgttttcattgttataatgaaaaacatgcgcacaaactttctaatcaatctttagatgcatttatttggagagaaacttgcaatgggatagtttccaactttcaacatccgagtaacggtctcatattctgggactctgctgccacccaatggctacaggcagtattgctgcttgttgtgtacacgctgatggcggctgaggctcgagtggcaccgaaaggctttctggcaacgttgacactgataaagtgtctcctgggtgtgaactctcaggtgctggttgagatgggcactgaggacaaaagctttgccacacacattacaggagtaaggcttctcccctgtgtgaattctctggtgctgtgttagatttgctttctgggcaaaggctttcccacattcaccacatctgtagggcttctccccagtgtgaactctccggtgaatagaaaggcatgagctctgggtgaaggctttcccgcattcctgacaaacataaggcttttctccagtgtgaattctctggtggcggacaagctcagcactcaggccgaaggccttcccgcagtaatcacatacatagggcttctcacctgagtgaattctctgatgcttagaaaggcatgagctctgacggaacgttttcccgcattcgttacacaccaacggcttctttctggcatgagttcgctcatgctgaacaaggtagtttctctgggtgaagactctgtcacacttactacatttaaagcccggccgtaatggccgaattcccgggcatatgtccggtaccgtcgactg

SEQ ID NO: 143054 - DNA, 363 bp, Homo Sapiens
tttaaaacattttaaaattttactaacatgggcaactaacatatctacttagaaaaatacaaaaatcttctccagtaaaagctacaaatacttctacttctcttgctttgttttccagatatttctagaaaaaattacaagtatacaggtctcatcctgtccggacacttttcacctcatcactgaaggtcactgaaggtcactacttcatggttctctggatgatcttgcttcctttctttcattctccttccaatctctcatcatgagggctctttttaatgtgttcagcacagcatcaagttcaaagcataataatcacaagggttgtacctgcttctttctagtaacattcttcaaaga

SEQ ID NO: 143055 - DNA, 636 bp, Homo Sapiens
  misc_feature (175)..(185): n is a, c, g, or t
gttctctatcaacttgtatttgccaatctggaagggagttttacaaacaggtcactcattaaaagtttataggatgaattcaggaaggctgatcctgagaacaacagtgaaggttttatagagcattctgggtgggcataagcattgagcagaatccaacgcctacagaaaccannnnnnnnnnnagatattcatctagccactcagtaagcattcagttagtgcttacccttaagtaaacacatgtaatctctgtttcttcttcttaggaatcaagagaagaaaaacttggtgacacaataattaatgaagtcatttctccctcataccccttctgcagatgtgtgaatgctgatgaatgccagacctcatcactgaaggtcactgaaggtcactacttcatggttctctggatgatcttgcttcctttctttcattctccttccaatctctcatcatgagggctctttttatgtgttcagcacagcatcaagttcaaagcataataatcacaaggttgtacctgcttctctctagtaacattcttcaaagacatgctagcaaataggtgtaagtagtcccagactttttctatgcatctcaactgcattctgcggagttaagagaaggtcgaat

SEQ ID NO: 143056 - DNA, 498 bp, Homo Sapiens
cgtggctaactgaagaatgaccaatttattttgaatagaaaacatgcagacagaaaaactatcatgaaaatttaaacatgtgaacagagggtaggaattttaaaacggtaatttttcttagaactttaaagttcaagaaaaataccttaaaaccaacataaagaatagcaggcactgtactaagcagttcacccacagtatcatgttttaatctcaccacagccataaggcggtaatagcatgcatagatatcattccaatttttcctgttgcaagtaacagaaaaccagaccccatctggctgaagccagtaagagaaaagactaacaggagggccagcctcaggactcaaatacgtcaccaggacatgggttgcgtcccagtctcagctctgccagttcctgtagaaccctccttccaaggttcacagggtggctaccatagcttcaggccctcacctcatgataagacagcaatacaactgccatttcatgtctg

SEQ ID NO: 143057 - DNA, 511 bp, Homo Sapiens
  misc_feature (437)..(437): n is a, c, g, or t
gcggccgccggctcttccccgccccccgccatgggtcagcccggggagcagaatgctgcggaccgcggcggaggacgcgcccggcgcccctgagccggccgagcggcgacggaccgcgagatgaggaaaatgaggcccaaagaagtgatgccacttggttaaggtcccagagcaggtcagaatcagacctaggatcagaaacctggctcctggctcctggctccctactcttctaaggatcgctgtcctgacagaagagaactcctctttcctaaaatggagtcgagtaaaaagatggactctcctggcgcgctgcagactaacccgccgctaaagctgcacactgaccgcagtgctgggacgccagtttttgtccctgaacaaggaggttacaaggaaaagtttgtgaagacccgtggaggacaagtaccagtgtngagagtgccaccttggtgctgtgcagcccgaagcagacccgagtgtgggcacccgcttctgcgagagcctgatg

SEQ ID NO: 143058 - DNA, 985 bp, Homo Sapiens
  misc_feature (121)..(121): n is a, c, g, or t
  misc_feature (123)..(123): n is a, c, g, or t
  misc_feature (132)..(133): n is a, c, g, or t
ccgggaatccctgttttttctccctccaagggattggcctttttcctggcccacaccaaagtttggggcacctttccagaaaaagttggcagggagcaagtgggcagaccagcaccctttntntccctagcnntattaacacacagagccgccaatggcagggcagcatggccagaagtcaccttatatattgtagggacagcaatagaactgtccctgcctgaagggttcagaagcccatgttggcctgggcttctcctgctgtaatggcttgtacatcagtgacatggccgatgcccttggtgacaccctcccggaacagcagtttggcgcccaccttcaggtactctgggtgtttcaggaagcggaaacgtaccactgccttctcgcctgtccgcagtttgtccttggcatggatcttttccaccactgccgtctgacgtacgttgcccacgtgtactgtcacctggaatcctcgtcggaaggtggtggcatggaacagtaagactatctctgcctcaaacaccgagcagatggtaggattcatctccgggctcaccatcaccatgcccttgcgaagcagtgcacggtcaaagtccccaagcgccagtgtagcagcctgaccagctcgcagcacacgacaggcagagcggttgcgctggatgctgcatactctcagctccaggaagcagccatcatccgtggggcccaccaccagctggtccccctcacggcaaatcccactggaaagtgttcctccaacaacagtccccacctctggtactgtgtagatttcatccacctggaactccgtcagctgctgcatgagttcctcctgctctttgctgttggtgagtggcggcagaatattcagaaagactttgaggaggtcccgactttctccagacacactggacatgtgaagatgggggtgacattgggtgactgagcaactgctgggcagcagtgacggcatcatcctcag

SEQ ID NO: 143059 - DNA, 377 bp, Homo Sapiens
tccatttcatagtaaaatttagtgttattattagggttttcttgtaagttgaatgttcacaatctcagagaatatatagagataaacagaacttatatactctacaggttaaagacctattatcccatcctcagcaatgaggaacaatttataaattaattattttgtttacatttttattaaaataattgtttactgatttataatgtgccttgatgatacttttagtatatgaaacccagaaaccagaattctaatttgattatatgtttgatgaatgcagaaaactttaattacatctaacaagtactttgagagtagaatcggttcctcaaatcctattgaatctgctaatttttcttaagtcactgtacata

SEQ ID NO: 143060 - DNA, 599 bp, Homo Sapiens
  misc_feature (575)..(575): n is a, c, g, or t
gcggccgccagccctgggaccggcagggcctggatgacgcccaacaccagggcggtcttgaggacttgctcttgaagcatggccttcttcttctgcaaggcctccagcgagatgtcggggagcgacagcaggccagcgtggcgccggtgggagggcaggtcgtgctcccaggtggacaccagcgtgggaaagtcgtagcgggccggcgagaggttggacaccaggaagatgcgagggtcagccacgccggcctcccgcagccgctcggcacagtggtctcggatctcctgcaggacagcggcctctctgaagcccgacggccgctgggtgcgcgtggccgccaggtcctcgtccaccttggtgcgcacaaagtagaacttcttgccctggcacaggatctcagcggccaggcgggtctcgacggccccgcagcggcggggggagaccagcaggaagaagtcatagcggctgaagtctacctgctttaggtacttgtcagccgggcagcctggagagccggctcctggcaggtcccagaggttcacgtcagggaactgtggtgtggatagggcacngttgcatctggtctccatgacgcc

SEQ ID NO: 143061 - DNA, 537 bp, Homo Sapiens
aaggcaatgatactagacaacagcattttatccctgggatcactagacacagggccagtaccattctgctggcaaattaggaacttggggatgagagtcagtggacaggtcacttccaatgagactagagcagcaacactggactaaagacgggaatgattcctggaagttcagcaacataccctgagaagtaagaacaactggatctttgagagcttgaaaatacatatggagaacataaaaaagcaaccatgtacttcatttatttacaacttacttgatttacaaccatttatttgatttaattcattttacacatacatacacatgctctcattggttaagatcatctacatatgattcgtgttgctataccattttaaagaaactcatcacaattttatttttaaaaaaacctctttgaaactactgcatacaccagaaaataatttgaaactctttccttattatattttcaaattctttattttgaaattcactgggtttaggctttcaattctgaaaaagttaccttat

SEQ ID NO: 143062 - DNA, 1317 bp, Homo Sapiens
gctggaccggtccggaattcccgggatatcgtcgacccacgcgtccggaaaaggtaatctttcgattgctagacttggttaacttagggctgcaaatctttttcttctgtcaaggtcacttaatatggaatgtttttgtcagactgtcctttgttggaatactttagctgttcagctactttgactcctaggagagaatttagttaaggttcaaagtaattaactggctttgccagtggtgagtcccacaccattattcacttagtagtcatataaatgtttttatttaaacttctctctcttcaatgctgagaataaggctttaaattactgattcacctttaaaggaatgttgtgagaattgatgtaatttctgtttctgtttccatctaaacttctttataaaaagagggattagtttttttgttttggggtaagcacctaatttatccagtaaccaacaaccctaaccattggcatatatagtctttcactcagaaataaacaaaaactgtttggtatatctgtatcattgctaatcttgtgcactttactttttgggcagtaccatacatagtctgaggctattgacttaaaccaataactgtactttatgtaatgactcttaaatttggttacctgggttcacagcttgcttgaagagaaaggatgctagaataaagtaagcagctgaagagcgagcaaatcaagacaaaacacagtggtctcagatttttcgtagtgtgggaacagtggttttgctctataccactgaaaagcactataacataattgttgtccatgatactgaagcttttcccctcacttctaggttgtttacattcagagctctatcaataagaggaatacatattacagtgaattcgacaaccgcacaagttggcagtaggtatccccaacctaatttatcttggtaaattcaccctgtttcctagtgctgctggataaaagagtgtttactttttattgctcttagacagagtagtctagataagttttcaatttatcaacatagcctagacttctgtaagtggaatgttcattagtaactcatctttttgttgttataattggaaacagaaacgaggcttattgctattgcagaaatcccaaactggcaaaggccagtatatatggtattccataatataaccagcttttgaaatttatgtgtttggattagtgccttctggttaccagtattgactctgctagtttgcacctttccgttcttaacagaaaatttgtatttgttattcctcttaaattttgtcgtaactagtgaaggaagtaaaa

SEQ ID NO: 143063 - DNA, 258 bp, Homo Sapiens
gacattgtaacttctgtcaacattcaaagaaaattcaaccctggtcaaaggtgacagttgacaatcctggaagctaacatcctctgtttatttgaacaagtttatactctgcacagggaattgaagttcttcttgtctgtgacttgatctcccaaagttaaagcactacgctttagggttgtgaattctgtttccaagacttaacttcacaatccactcccaaggaaaagtgctgagagaaagtaagcatcataaatg

SEQ ID NO: 143064 - DNA, 1478 bp, Homo Sapiens
tttcacagtcagctcagttacagtctttattgtaaagaaggtgcagtcggaacatgggacactgaaaatacacaatctctggtctttcaggagagggagagagtgatatatacaaaaattgtaaacatgttcacttaaatatccacacagaattggtctaggctacaatgtaacaaggttgtcactcaactgcatctccagagggaggtgtctgtctgatgaaatgtggcaaccacgtttggtgttgacttaatgtgaaaagccagctttgagcaatgcatgagtagtcagctatgcagagggactccaacctgggactgggccaggaagcagggtgcaggtggagaggcagggactgggccaggaagccaaggtaaagggaaccacacaggggccatcttgtggggcacggtggccagctggagcctctgggcctcttctcctgctgaggggctatgtcttgccatggacacccaggcatccttctcctctcctgggcaaaggtcattactagacggggctagcgacagggcctggtgtcttggcccacagactaccattgtgccttccctggccagaaccatccacacctgggcaggggccggggccacagagagaggagcagcttagtggagtactaagaggtgaaacccgaagactggaccatgatacacaagactgacagaggctagggcgtgactagcaggcctcgtgagagagacgtggagagtcgacaatccggaccgggggacgccagccagacaatgacaggacaagcgcagaacacagtaccagtagagcaaaagagagcatggggaaagggcaacagtgagccagagaagacccaagatagtttgagagccaaaggaaggagtaacaccacgatgaacagcgcccggtatcgcccttaagacaacacccgagagaccatgatacataaaagagcaacagctggaaacagacaagaacgcgacaaaagtcaggcacagcatatatggccccgaagaaagcggcacaagaccaatgagcccgagaggcacggtgcccaaccaaggggctacgagaacacaaaatataacagagagccaaagccaaccaccaatcagaaaaaggaaccgaacgacacgtgatggacacgggaagcgaaaggtcaactaagaagcaaactctgaacagggggaaggacccaacgaaacaggcaggggcacgaacgtacgctcagtgggcgcggcaaagaggcaaaataagcagcgacagaatacctgggcgacaggaagcagagcaccagcaagtgaacacaggaagtgtccccaacaagagcatgaggaccagggaagtagcgacgagccgcaagcacacaggcagcagcggagtgaacgatcaaccatagacgtgaggtgctaaaacaggggggcaggcgtcccgagatggtacagagagaggacaaagagacggaacacgaaacaggacacaagacg

SEQ ID NO: 143065 - DNA, 306 bp, Homo Sapiens
ctcctgcccttggaaaacaagactccaggttcttcagctcttggaaatctggaacttgcaccagcagcctcgtgggggctctgaggcctttggtctcagactggaggctgcactgtttgcttggctggttctgagtctgttaaatttggactgagcctcagtactggcttctctggttctccagcttgcagacagccccttgtaggactttgcctctgtaattgcgtgacccagttccctctaataaatcccctttcatatatatcttattgcctctgtccctctggagaaaccctgactaataca

SEQ ID NO: 143066 - DNA, 534 bp, Homo Sapiens
ttttttattgggtttaaaaggtttaatgatgggaaaattaatacaatataatgggaagtgaaatgagcagaatgtaaattccttttaggggttagcagaagatggagttgtattgaataagagtcattgacttcttaatggaaagtggaagatggagttagagcactgcgttcactgagcatctggatgcttggacccaggggatttcaagggatgccttgatttgggatggcaagctaggacacacagacagcacagaacaaggagcagacaggatattcacttcctggttgcgtcatctagtcggcatcagctgttccctggcaagaccaaagccaagggcaggcggtggagggggtttgctgctgtactccacttgtgtgactcccgggctttcctttgggatctcatgcggctgctcttcaccttggcgttcaccatgataccggagccagcgtcccttgaaatgatgttcagcttcatgaatggctgactcagtgtccccttggatcactttaagtaaaattgtatttt

SEQ ID NO: 143067 - DNA, 161 bp, Homo Sapiens
tttgagagacataggtatatattgcattgccagcctttggaatgcgggatgcggtccagataaggccatcgcagctcagagaggctgttcagccgcatgttcgattcctctggtgacaagaacactctacttttggaagtagcacttctattagagaagtt

SEQ ID NO: 143068 - DNA, 402 bp, Homo Sapiens
  misc_feature (329)..(329): n is a, c, g, or t
tggatttgaattatctgactttatttagcatgcaatgcaatttattctggcaataaattaatatgtgcagttataaaaaatgttgggtactttttccaagaaaaatgtttctgaatgtgcacactagaatatatgcagaatcctttaaacagtcgacttcatattttaaacttgtaagtgtggtaacatcaagttttggaagaatggactttttctgtaattcatgatttagtttgagtttataaaggttttaattgcaatttcagttcctacaagctaccaagcctgaaattagagaactgacagctgagaaaggcaatcacctgatncgagtctcctaattgtacagctgaagaatccaatggccttgccaaagattacgaagctaaaaagagacatagc

SEQ ID NO: 143069 - DNA, 669 bp, Homo Sapiens
ggtagttgttgaaccagtaaaggaatttttggacaccagaggatcagtacaaattgcctcccctacttccttgggcattctttcgagaccagggaataacattgtatacacctgaaggaatcccagcctggcttgcaagctcagccagggccagggaggagaagggcgtgtcttcggcaggcttcaccacgacagtacagccggctgccagggcggcccccaccttccgggtgatcatggcactggggaaattccacggggtgatgactgcagccacgcctatgggctgcttgaggaccagggcccgcctgtcctttgccggggtgtggataatgtctccgtaaacacggcgggcttcctcagagaaccactctaggaaaaaggcggaatagagaatttctccatgtgcctccttcagtggctttccactttcagctgtgattattctggcaaggtcatccttattttgtatcattaaattgtaccacttccgaagtaatgaactcctctccttggcggagacctccctccagcggcagaaagcctcgtaggcagcgcgcacggcggcgcgggcctctcgcaccccgcagtcggctaccatgcccagagcggcgccgctggccgggtcttgcacggggaaggtggcggcggccgggagccagcggccgc

SEQ ID NO: 143070 - DNA, 426 bp, Homo Sapiens
ttttttttgtacctgtaaatagttttatttcctctagattgtaaactacaagaaaggaatagccacagctaaatggaactgtaaattttacagattacaatggggattaggaagggaaggaggaggcagcaccaatgattaccagatccacaactttagctcttatctctcgcttgagattcagatctatattttcaacattttgagctctgtacagtaaaaaagaggagcaaaccaaggtcagatactagagggcaaagcaggggcaagatgcccaaacttgggctatgggacaaaagtggacataaatttaggccaccttagtggcagtctgctcgttcatgcagcctgtgtccaaatctccactctgtcagcctgcattgaacccacacatgtatatatacatatatgaaatagatgcgtgat

SEQ ID NO: 143071 - DNA, 495 bp, Homo Sapiens
tgtcataaaatgatagaaaattttattttcaggcagtcatctttcaagtctatttgttgctaatttgctaaactgggattcactatgaaatctacagctgatgtctctgtctattgaagcaagcattatctttctattttcaaaagtaagctgtggcttgggcttgctgtcttcttcccagtaaggtcaggaggctgggcttgcttccacctgcgagtgtatcacaaaccaggcgcgcgcacccgagccctccctccaccagggcggaaaccagagaacacaacccaaacaccgaaagtttctggtcgcaaactctactcatcttgccgtgtccagagacccggcactgggaacggcactggcttttgttccagggtcccccagctggcgaggtaaacgccacagcagtccttgatccccaaaggttgtgagagattctgtggcacgggaattttggagcctcccgaaaggagcccatttctccgcaatccatgc

SEQ ID NO: 143072 - DNA, 415 bp, Homo Sapiens
  misc_feature (342)..(342): n is a, c, g, or t
  misc_feature (351)..(351): n is a, c, g, or t
  misc_feature (362)..(362): n is a, c, g, or t
ttttttgggctcttgtggctttattgagggactggggtctctcttggacccctgattcttaaccctcaaagcacttcttaagatcagcgactctgggccggctgctgggctgggacttttgacagttgctggtgggtgtagcaggggaattcagggctcctggttcctcccgtggctggaggtgagcgcgctctgccagcagggctttgggaggccgggctctggggtcctccaaagaactggggtctgaggaaggatcaaggggctgggacgtccaggctatatcaaagttgggctttgtgggggccaaaatttgggggctttctggagggctgggctcantgggtgcantggagagccanggagtggggttttcctgggctgtaaaatcttcagctgccttgtgggaaggggt

SEQ ID NO: 143073 - DNA, 531 bp, Homo Sapiens
ggggtgtctggggtgatttctgttggaattctacaagagaatttggcagcaaaccacttattttctcatgcccttcattccctcgtccctccttaagtcactttcccttcgtcccctacagccttacagggcttgacccagcattctgcatgtagaagacactcaatggacaataacagcagcatagacttccttagtgcttcctgcgagccagtgctagttgtatgcacttaacagattttaactcacgcaattctcacactgacccgatgaggtatatcatcatccagttttacagatgggaaattgaggcataaagggggccctcacgaatgaatgaattcaccagttccacctctggtgtctctagaactgcaagctaacaaaccacataaacaacactgggctttgagtcaggctggaataagagagccatgattacattcagcattttcctaattataagaaacattacatatagaaagtgaaaacagaaaatttctcttatcctactatctagagataaatcag

SEQ ID NO: 143074 - DNA, 519 bp, Homo Sapiens
tttttcaatatatattttgcctttaatacttatttcagatacaagagacacaaaattgtctttataattcttaaaagatgttctaaattgcagcactataaagaatccattcataacaagacttctcacactttaatgtacactagaatcaccttggggatcgggttacaatacagagtttgcaccagtaagttggggtcgagggggccttgaaattctaaatttctcacaagctccaagtaatgctgatgatactgtccttcaaaccacagttcgagagggaggtatggagatcattattttgttaaagcaatttcactttcaccaactctttcttcttccctgtgaaaattctcctttccttctggtcttggcccttcaagatgctatcatctttcatatttagtgacttcaagtgtatcatcaagagtcctgggtctccttttgaattatttgatagaagcttggcaatttatttctggattggtctcgaggtttacctcatcagtgggagaagac

SEQ ID NO: 143075 - DNA, 603 bp, Homo Sapiens
  misc_feature (225)..(233): n is a, c, g, or t
ccattttctttcattcgttttattgtgacatttattacaggaacttccgggtcaattttcctttcgcacagacaccaatgtgcccaccccttgccacgcccccttcctcccacggctgggtggcctggctggtaggcgctcataattacctctggaaacgagtccgtgcatggctgagacttcccagccaatgacctggcccggccatttttctttatgcgttgnnnnnnnnncctgctaggttttgcctgcacagcttgtaggatcttgttcattggatgctgccactgaaaaactgatcaaaagccatatgctgctcatgtttcctaatactctcacacctttaaagttggggatagggaggggaaggtctcccaaaaagcagttggtctgctggttcctggccaaggcgagcaatggaggatccagaaaaacttggcccccaaaggtctgaattctcggaggagctagtggcagccacaagccccgaccaccatgtttctgtatttcttcaggatgacgttggagctggcatccaaagaaagacggaaaatggatggagctgcttgggcgcacagcaggctttggcaccgtttccgggtt

SEQ ID NO: 143076 - DNA, 917 bp, Homo Sapiens
  misc_feature (65)..(128): n is a, c, g, or t
  misc_feature (225)..(283): n is a, c, g, or t
  misc_feature (369)..(441): n is a, c, g, or t
ttctgtcttttgttcgcttctttgtcgtttcttcgtcgtgtgtgtgcggccttttgtatgcttcnnnnnnnnnnnnnnnnnnnnnnnnnnnnnnnnnnnnnnnnnnnnnnnnnnnnnnnnnnnnnnnntgtgtcctctcgttgtttgttgcgtcttcccttgtctttgtgcttgttcttctctcctttttgtgtcgttcgtgcgtgcttgttttcctcctcctcnnnnnnnnnnnnnnnnnnnnnnnnnnnnnnnnnnnnnnnnnnnnnnnnnnnnnnnnnnncgctccctgttgttgttgttactgtgttgtcttttcttttggtgtgctcctctcttgggttttatgtttgtgggggcgcccccccnnnnnnnnnnnnnnnnnnnnnnnnnnnnnnnnnnnnnnnnnnnnnnnnnnnnnnnnnnnnnnnnnnnnnnnnngctgtaatacacaaaagttttatttttgactttcttcttttctgaaggcaaaataaaatagaactgaacatcagtgaattttgtacaacaaaaacagcttttaatatggaatagtccatgaacattttaaaatctcggaatggcttccctttttcaaagtcatgctttcttgcggtccacaaggagttggcacagaggagatggtggcagcggcgggtgaggtgagtggaggacagggcttctctcagatccgtgttagctggtgccacagactggatgggaggatgctctccactttctccatgacaaagtttaagggggcaaacaaagtgctgaggaaagcttttgcgaagacccccataagttccgggaactgatgtgtcaggagggccagcatgcgtgtgaaggaacataatccagcagtaaagagaataaagaagggaagctccttctttgggtaaactgagcctcgtgcc

SEQ ID NO: 143077 - DNA, 442 bp, Homo Sapiens
agaggctgcctagaaacatgcattaacaggtgcttcttgggccaccctagcctgaagaaggacaaccagagagtataacagtggcacctcaatgccttggccttgaggaccctcagtgtcccttcaggcctccagatttgaggggaggctctagcatgttctggctgcagctattgtcttcagggattctgcagcttgtagctgcttggggtacttctaccaattggagctgggctgttggagtcatctccactgcctaccaccaggacaagcagagaagttacctactagaaatgaaaagcttaatcctacccccagaacatatcctgaagagaggagacagtgaagcaatagcatatgcattctttcatcttgcacactggaagagagtggaaggggctttgaatcttttgcattgtacgtgggaaggcacttttcgaaa

SEQ ID NO: 143078 - DNA, 1108 bp, Homo Sapiens
tgagggtcagaggacaccctagaaatggatcaatagaacagcacacaggaaggggtatgcagggagctgggagggctaaaggggtgatgagttcagttttggaaatgttgagattgaggtgccggagggatttccagttcatcttcaacaagcatgaaaatactcttgcaattccagtccctgaactctgccgagcagaagatgtcaatcatagcttttgcgaagacccccataagttccgggaactgatgtgtcaggagggccagcatggctgtgaaggaacataatccagcagtaaagagaataaagaagggaagctccttctttgggtaaactgagacttcatggaaagatggaagcagctctcggtctgctgtttctgtacagattgggtaaggataaaataggtgccccttttccaagggataagggatcatccgaaaagtgccttcccacgtacaatgcaaaagattcaaagccccttccactctcttccagtgtgcaagatgaaagaatgcatatgctattgcttcactgtctcctctcttcaggatatgttctgggggtaggattaagcttttcatttctagtaggtattttggcacatgaggattgaattccacagctctatgaatggcctctactgcattcatctctgctgtgctcagcccccgccgagatgcagcctcaggagagaatttgtcagagacagctcttgctttgagcaaagcagctgtgtagcatattgttgctgactttggtaagcttatatcatcatactttgctaagactgcctgaacatcagcatatgcttgtagttccagaagggcttctaaaaggttttcatggatattgaacatactcagaagggggaactccttcattaaatctctcatcattttcactgcttcctggtcctcccgagtcttctggcacacattgctagccttcttttgatgtacaccaagacattggtgtctcgtctatgttgggcttcatactgggatccatgatgttgcgacgcgtgggtcgacgatatcccgggaattccgggaccgggtaccagcctgcttttttgaacacactgttctatagttcaccaaatagc

SEQ ID NO: 143079 - DNA, 476 bp, Homo Sapiens
cccaaggcagtactgggctcacttgtcagagcacactgttgcacacagtggtgcatgcatacatctataaaagatgcgctgcgtacacagtagtgttttagccaatgtgctagccaatgaattctgcatcagtggttatctcttgctacacaagaggtgaagaaccattccttcaagcgtcccagagctctaaggcgaagctgctatagaatgatttgcctagaacttttccttagggcaaacctcaagtactgcttttatgaatgaaatctaatggtggccttgtccctggtgcgggcatagtatgtactcagtgttaattgtttacaccaaaagcctggaagctgcattgtcttttggccttcagaaaccttgtatcttaactgttaagatctgaacattgggaatcattcacctctgacctgttgggctggttttattccgctctataaagtacacccaggtgctttaggaaa

SEQ ID NO: 143080 - DNA, 452 bp, Homo Sapiens
  misc_feature (240)..(240): n is a, c, g, or t
  misc_feature (250)..(250): n is a, c, g, or t
ttttcaaaagcaatagcttgggctttttgatcctttaattaaagttcttgttccaaaaaacatgtgcaaacacaacctttaacagctcaatttctaaaaattatttcataaaaggaggagagtgaacaatcctctatgtatatgttctacaggacaaatcttatcaccaattactaaagcagggaagtgcagcttgtcaaaaagtccttactggagaggcggtgggggatggggggatgngagaatatgnaaaatgtcattaagggatgagagcctagacactataaaagatgcagcatctcagagcagcccagccaaaatgagaggtggcaaagctactcttttgtctgtgaaatttgcatgcgtttcatttcctttaccaatgccacctgagtccaagccacctcaccttctgttgtctccatttcagcctaaagacaccccaattatgg

SEQ ID NO: 143081 - DNA, 400 bp, Homo Sapiens
tttatgcttttttaatcttttaataaattgccaaactgttttccaaagtatctgcaccattttacattctcatcagaaacgtaggaggggttccatttctccacattgttgccaacagttggtattgtcctttttaatagccttctagtgggtgtacactggaatctcattataatctaatttgcatttccccaaggactaatgatattgagcatcttcttgtgtacttgttagtacataggtaagaatgaacttagcgtcctccagtctgcatttccaaatgggcaggcaggtgggtagggggtttatattttcccagatgaggtcatgtgatccctctgtggatgagatcagcgctggctctgaggagatccttggtgtctacctgcaggaatctcag

SEQ ID NO: 143082 - DNA, 567 bp, Homo Sapiens
gcggccgcccagagcggtggcgtgggcggcggggcgcggggctccaggacacagctgagccggcggtcagagcgagacctgcagcagagacgacggaggcggaagcatctcgatccgggaggcggcggcgtggggagccggggccgcctggggagccggggccgcctgggatgttcagtcatgaaatgagtgcgtaccgaggagatccagatggcagtgtcctgctacctcaaacgctggcagtacgtggactcagacggtcccctgaagcaaggactgcggctgccacagactgctgaagagttggcggccaatctcacggtacacagagaatctcattgtgccgacatagtgtctgcagtcccttgccaggcagagccccagcaatatgaagtacagtttggacgactggggaattttctcatcgattctgattccccgcatagccacgaagtgatgcctctcctttatcctctctttgtctgcctccatctcagcctggtccagaacaatcccaaagtaccgtggaaagttttaccggcgtttcattgaatgtttttgcgaagc

SEQ ID NO: 143083 - DNA, 579 bp, Homo Sapiens
gcggccgcccagagcggcggcgagggcggcggggcgcggggctccaggacacagctgagccggcggtcagagcgagacctgcagcagagacgacggaggcggaagcatctcgatccgggaggcggcggcgtggggagccggggccgcctgggatgttcagtcatgaaatgagtgcgtaccgaggagatccagatggcagtgtcctgctacctcaaacgctggcagtacgtggactcagacggtcccctgaagcaaggactgcggctgccacagactgctgaagagttggcggccaatctcacggtacacagagaatctcattgtgccgacatagtgtctgcagtcccttgccaggcagagccccagcaatatgaagtacagtttggacgactgcggaattttctcatcgattctgattccccgcatagccacgaagtgatgcctctcctttatcctctctttgtctgcctccatctcagcctggtccagaacagtccaaaaagtacagtggaaagtttttacagccgctttcatggaatgtttctgcagaaagctagccagaagggcgtcattgagcag

SEQ ID NO: 143084 - DNA, 413 bp, Homo Sapiens
tttgtctttctgtttctttagtttctgcagagatagctgctatttctttttcaagctcatgaagttcattcttctttaggaaatccttgactcttcctttctttgttgtctgacattttctgtgtctgtaatctcttttcccctttttgatttaccttctttactcctactcaataatctatattgataatctttcacttttgttttttcctgttgtatattggtgatcctattatacaccagtaccgctgaatctgctgacactagggattacttccttttctggccaggcaatgagattagagtttcagggcactccctcccgcctcccagcagctggcacgagggaacctggccgtcaggtttcccctgggatcctgggacggtatcaggcggggaatctgtgcggccgc

SEQ ID NO: 143085 - DNA, 1327 bp, Homo Sapiens
  misc_feature (325)..(377): n is a, c, g, or t
  misc_feature (893)..(911): n is a, c, g, or t
  misc_feature (916)..(1197): n is a, c, g, or t
  misc_feature (1201)..(1242): n is a, c, g, or t
tttcctgatcagcaaaggaaattaattttattttctttaataaattactataacttgacctgaagatgtaaaaatatattattagcttttgaaactttaatatagatgtaatttctgacaagcttttacaaatactgaaaatagcttccaagtcctctttcttcttttaaggatctttggagattcataaaaactactgaatttgctgattatttaagttattagaggaagatgaaaattcagtgacttctcaaaaattataattcacatttaattacaagtcatgatttttctttactttttcaacaaaatggtaaatatagtnnnnnnnnnnnnnnnnnnnnnnnnnnnnnnnnnnnnnnnnnnnnnnnnnnnnntctaaggtaagactacaaagcagcataacaggttttctgttcacttgtaaactggattagaagggcaatcccccagaattccagaccccgttgtggagatatgatttttaatttacaatctagaaaaactgcattcaacaaagtggtccaaggatttgggttttagttgccagcttgcatggtacaatcttgagtaagtctctcaacttctggatataggaaatcaaaggccccccaacagaatgaaaggtgttaaatcaggtcatcttgaatattcttcccagctctgttattttacaacgccatgaaatcagagtaacatgttccaggctgtttggggtttgggattttagaacctgatgcaatgtatagcactttttaaatttctactttttggagtcttattcgaatatatacatatatatatgtcccccatgttcttctgtgcatgtagtatatttttctatttaacagcctcttcaccattagcaataaaaaagtttctcaaggatgtannnnnnnnnnnnnnnnnnncgggnnnnnnnnnnnnnnnnnnnnnnnnnnnnnnnnnnnnnnnnnnnnnnnnnnnnnnnnnnnnnnnnnnnnnnnnnnnnnnnnnnnnnnnnnnnnnnnnnnnnnnnnnnnnnnnnnnnnnnnnnnnnnnnnnnnnnnnnnnnnnnnnnnnnnnnnnnnnnnnnnnnnnnnnnnnnnnnnnnnnnnnnnnnnnnnnnnnnnnnnnnnnnnnnnnnnnnnnnnnnnnnnnnnnnnnnnnnnnnnnnnnnnnnnnnnnnnnnnnnnnnnnnnnnnnnnnnnnnnnnnntcannnnnnnnnnnnnnnnnnnnnnnnnnnnnnnnnnnnnnnnnnccaagatcttcttctggagttgtagaagccaaaagcttcaccggacgcgtggtcgacgatatcccgagaatccggaccggtccag

SEQ ID NO: 143086 - DNA, 428 bp, Homo Sapiens
cagtaaggtaactttccattatgcacatactataccatcatcattcattgggtggagattagctgggaagtagctgtatatttttagtgagatcactgatggcaatggatctctggatcgtgctgctgcttatggttaaatcatatctaatgtgaaatttcgaattacatccagagctccagtatcaaagccgcacatatccaacatgcctctatcatctgggtctgcaatggtgaaaccatttgatgtcattccacaaacaatcaatttagctggaatatccattttctttcgatactccctcagagcaatagcaggatggacacctccagcaaaggtctcattatcagtgaatacaatgaagacatcagcaggtgtgtttgtcttctgagcccagatcattggaagagagcaatcagttccacctg

SEQ ID NO: 143087 - DNA, 1025 bp, Homo Sapiens
  misc_feature (647)..(658): n is a, c, g, or t
  misc_feature (905)..(939): n is a, c, g, or t
  misc_feature (943)..(985): n is a, c, g, or t
attctcttaacgggggcgttgcccaatagtggtgtcctcctgctatatattggcggacaccgaaaattgtgcgccccgagtgccacatatatggatccacttgccggtttattgtacaagaattcgtggtgttgccaaccgggatttatatgcgaacccccggttttaaattttggtgctgtatttctttaaagtctaacacttcctgggaaaaggggaattgtgttaaaatctacattgcataatttgaggtccaaagtcccctatgcgtgtctgtcgttgtttacccccttggtataaaaggtttacagatgatgttcatagtgtcatgcacaggtatatggtctaagtgcatttcagagtatttggacattgatcgcaagctgtgcctttgccccaatgaagaacactgtaagtaaacgcttaagcacttgctcaaggtgacactgatggtggaatgtacacttgtttgctcgtacctcttttagggaacacaaggaagtattccaccaagccaaactatgtttacagtgtctggttaaccaaaagttcgtctattagatagaggaactacagtatcctgaagctatttcccccagagctagtttagtagatagacctttgggcccatcttaattgttccttcnnnnnnnnnnnncagtaaggtaactttccattatgcacatactataccatcatcattcattgggtggagattagctgggaagtagctgtatatttttagtgagatcactgatggcaatggatctctggatcgtgctgctgcttatggttaaatcatatctaatgtgaaatttcgaattacatccagagctccagtatcaaagccgcaccccggccgtaatggccgaattcccgggcatatgtccggtaccgtcgactgnnnnnnnnnnnnnnnnnnnnnnnnnnnnnnnnnnncggnnnnnnnnnnnnnnnnnnnnnnnnnnnnnnnnnnnnnnnnnnnacaaaggagctagcgccctatagtgattataagtttcttt

SEQ ID NO: 143088 - DNA, 401 bp, Homo Sapiens
ttttttttgagacggagtcttgttctgtcacccaggctggagtctcaaaggaaaagatcatccatgggacactttattggaagcttttcttgtttaccaattaaactatgacttcatgttatcacaacgctgacaaggtgtacaaactatgtaacattttgcaactacaggacagtctcgcctttcacatatcacttattaatctccatgaactattagcatcacgccatttttcaaggctctttatcttcattttaactgcaaaaaggaattgctttttccaggttcttgaggattcttttcattggtgaaaagcggcatgtaatgttacaaagaataacccaaaaaaagctttcagttatgaatgtattttcctatatcatgaatagttctaaaaacga

SEQ ID NO: 143089 - DNA, 775 bp, Homo Sapiens
tttttagcaatcaaacaaaaatttaattatcgaaagtcaattaagtactaaaacacacacatacatacactccctctctcacacatttcaaaaataagatgcaaggcacataagcagcattatatcaaaccagaatgcattaggatattgattatatttaaataattatttttctttttccttctgtaggtgacgatggcttaatagaatttaccacagttactttagagtctccgaaagcatggctggtggaggcctgactgggaggcaggggatgcgactccttactttgcaaaggctcctctgagccttttgcaacaccaggacttgattggtcagttttcaagacatagcctgatccaaagagttcttccatgagactgcttttcttatctctgaaagttgtatccttcacttttattctggaagacttaccaaatgagggctcatacccactgtcagaatgctctagctccatttcctctctgttactgagatgcttgcctgtactatgactgtacctcatgttgccggcattggctggcccccctgaagcaggaagcccatgatgcaggttttcagttgcttctgtgaatgagtaatgtcttctttgtctgagggggcctttcgtgtagggagcagtgcctttgccaagtgtgtcatccacaccatttctctgcatgcttcttttaaacttttctcttactagaacatcttcttgattgctttctctttcaggatgaataacttcaattattttttgttgtagttcttg

SEQ ID NO: 143090 - DNA, 639 bp, Homo Sapiens
tttttaaacgttaatgtgatctttattatacagcacatctggtatttgtgtatcccaacaagtatacagaatactctataaaaccaaacccaacccttcaatattacactaatgaagattaacccagagtcgcatctcttcaaaatgcacacaattaagacggtcctgctgtaacaatattatggaaagagccaggtagcacaagaaaggagagaggataaagactgaagtgtgtgccaaagtcattgtcttttgttattgcacttttattctacacacttagtatcttacacttttatttaacactgtaataaacattagtcctttaaaacaaagaaaaaacattacatgaagacaaaagacaacaggctgcccagaccaattttcttttcaactatctgggcaaggtggcctccccagtgctagatgtcctgatgcacctctgagatcacctcaattggactggatgttaacaaaacagatgaagttaaaaatgaaacccttttaggaacagtagtgctactggaaacctccaggagagtttggaatacaagtgtctcaaggccactccctccttacccactttaacatcaaacaagctctattcatcccacctccataactgaaggattaaccttc

SEQ ID NO: 143091 - DNA, 391 bp, Homo Sapiens
gtgaatacctttgtatgtacatcattttgtgcatgtatctataaattcatagaagtggaattgcttgattaaagggtatttgcattatgatataataaactttacatgaaaaaatttcattcaggggataatgggaccaggtctgttttaggaaggtccttttggatgatgggcaggagaagaggcaagtttggagagtgctgtgattaaaccaggtgagaccgataaggggaaatagagtgaagggcaaggatgggagagacacaagtaattgatcagatgttactaataacatggcagaggagaaatcaaagccggcttggatatgcagagcccccccacggggatagactaactaagaaataggaggtgtagcttttaacattttctt

SEQ ID NO: 143092 - DNA, 384 bp, Homo Sapiens
tgattgccatctctccttcatctcaacaacctgtaccacactcactggagcacttcgctttgcatctttagtcgaccagttcagatatatacaacctataagaccctgcactgatggatccgctggtgccacccagatcaataaactggctcatttgattttgtggcccccatccaggaaccaactcagagcaagaagacagcttcaactccctatgccttcatttttgatacgacctgtcaacacgccccactccctggccccctacctgccaaattatccttaaaaaaactcccatccctaaattttccgggagaatgatttgagtagttaactctggtctctcgttctggctctgcatgaattaaactctttttctattgc

SEQ ID NO: 143093 - DNA, 500 bp, Homo Sapiens
gcggccgcgtgacgatgccctgcagcctctccatcagctcctgtggcagtgaggagggcctcaggccggtggaggtgtggcagccagggggcaggaagaggggagatggaggcggagcacgtctgtctttggcacttgacttggtgtcccttagcatcgccagccctcttctgggactcacccggacaaacccccatcccatccccaaatccacaggagagggggcggctggactccagtggtcactccgccccacgggggactgtaggctcatgcccccttcctggcttcactgtccttgtaacagtgaccctaacaggtttgcagatgatggagttggggatgggtcagccccgagatccctggtccaggctccaggtgacaggctgcccacccctgagttggtggctttggtctgcagggtgggctcctggtggggagggggcatctgcatgagcagaggagactcacatagcccaggtccaggaactcagccttgt

SEQ ID NO: 143094 - DNA, 909 bp, Homo Sapiens
taattttatgagaatgagtctgaaatttaaaaactacagacaatagcactattaatgtcagaatttaaatagaaaacttaacagtagtatttgatattcatcaataatttatagcaatcattagggacataacttcacaatatagaaaggaaaatgaaagtacaagggaaagtagacaactcgagaatcatggaaattccttacaaatttattgactaacctgagttgaaaagggggatataggaaatttgaataacacaattagcaagttaaaattgaaggctgtttagcgaactttgaactcagaaggcaaaatagacatactgctctcaggaaatatctgaggctagcataatttttttgctaaaactgagcaaggaaaatacaaaagagaaagaaagcttaaggttattcatcattctgccttgctccttagattctaatacactgaaagcataaatctcaatattagcaagtcatattcagtagtgtattgaaagaataatgcactgtgttcaaaaaggatttatccctagaatacaaagaaaggtcagcataggaaaactttttgaaaagatcgttattaagatattgtaataattgtaaaaacaagcagttgcctaattgccaggcaccattttaaggagaaaaccatttgatctctatagatgaacaaaaagtatttgataaaagccagtcctcattccttataaaagtgggggactcatcgccaccttagaatggattgcccttaatgccataaggttgtatctgatgacaaactaaatcattgtagtagttagtaggaaaatactagacacctttctattagactgaggaacaagatgaagttgcctatctttactactactattatgccttgctctgcaggtcctaatatactaagag

SEQ ID NO: 143095 - DNA, 734 bp, Homo Sapiens
aaaatgaattcacatttatttgttgtcttatttcgttaggtggctatacggctgatagttctctgactttgaaagtttacttgcaattaatgaaagcacccaagaaaagaaggggagagatgaatgtgggaactgtggttgctttcattaaaggtggttttcctgtagtaagttgagatgctttgtgtctactgagtataatccgtgtggcaacctcctccaacttcataggctctactctctctacaatatttgtgaaggagaaggtttatttcacattcatttctgaggcctcagtttggcaaccaattttccacatggcatcccctccactgcccccagttccggtatgggcttctaccttctggaactccatctgttctccatactagggtgctgggctggacttcacgttgctgatgtagaaattctatacatcttttattactatgtgccgtaattccctcagagcaccagcagtcatcactgctgtgtgggtggaagttttccctgaagaatttggagttattaaagaaaattcactcattggaaacactgtctgctgaagaaatctctcttggttctttcatagaaacatcaaaaaaagcgagaatcaagatctctagccatgtccttgctgatatttagcagctttctgggaagaagccagaggtcttggtataccttgattaagtttgtgcatcaatagtttgacatcttagacttcaatttcc

SEQ ID NO: 143096 - DNA, 696 bp, Homo Sapiens
tagcgaggcctgggtggcgatctcggcacgagggcggcaggtgcggctgccggaagcactctacccagaccctcccggccccagggtccacacgtgctcggccgcaggaggcttcagcaccagcgattacgacgttggctgggagagtcctcacaatggctcggggacgtgggcctattcagcgccggatctgctgggggcatggtcctggggctcctgtgccgtgtatgacagcgggggctacgtgcaggagctgggcctgagcctggaggagagccgcgaccggctgcgcttcctgcagctgcacaactggctggacaacaggagccgcgctgtgttcctggagctcacgcgctacagcccggccgtggggctgcacgccgccgtcacgctgcgcctcgagttcccggcggccggccgcgccctggccgccctcagcgtccgcccctttgcgctgcgccgcctcagcgcgggcctctcgctgcctctgctcacctcggtgtgcctgctgctgttcgccgtgcacttcgccgtggccgaggcccgtacttggcacagggaagggcgctggcgcgtgctgcggctcggagcctgggcgcggtggctgctggtggcgctgacggcggccacggcactggtacgcctcgcccagctgggtgcacgctgaccgccagtggacccgtttcgtgcgcggcc

SEQ ID NO: 143097 - DNA, 541 bp, Homo Sapiens
  misc_feature (52)..(62): n is a, c, g, or t
  misc_feature (347)..(363): n is a, c, g, or t
caaacactggtttggtatttaagttgctcacccccatccatcaccaatgtgnnnnnnnnnnntatatagaaatacaaactacatagcttgacaacttacccaaatataaaatattttcagattatttgaacaagggaaaaaaacacgtactaaaagacttaagtattctaagattttggaatattttgatttgggacaagtaacaagtattttaagcaaaatcctgtttctaccctggataaggaactgaagtcaaaatccctgcttcacagtattttctggtgaggacaagggacgtgggttgagagtttattccttaagtaagaaccaagctttatttatttacnnnnnnnnnnnnnnnnngttgggggcaaaggggaagacaagttttacacaaaagtactacaatggtaactccctttggtaaaaagtgtaataaatgtcttgtacatctgttcataggtactaaatctgaagccacagtactatggtacacaagaagctagagcagttatgctagcacatcaaaacatatttcttt

SEQ ID NO: 143098 - DNA, 365 bp, Homo Sapiens
tttgtcaagaaataaagaatttaaattttaggactttacagcacatggcatctgcactattaaaattgagatggttgccaagagcaacttgactgtgcttcagaggaaggcctgatggttagaggtgttacctttccaagtttactgcaggatgtagggataggtttgaggcactaaggcaaggctgccctgaacactgaaagtacagtgccttctgggagcaggaggaatccatcccatcatacacagaccagccacaggtttgtcaccaaccaatgctgtcaatcgcttgcttccctttaacaccttcatggcctttgttctcctgacatttgtgggaagcagagctctgcagagtatactca

SEQ ID NO: 143099 - DNA, 497 bp, Homo Sapiens
attttttcatgctgtagtgtggaactatttttggggtgtcccttttagtgactttcttggctgcaaatacgtagaaagtgtaaaaatatatcagcaactatgagggttgggtaaattcaggcaatagaaaacagtggcaagtaaggcagatgtgagtagtagatgctaccatcctcatatgccttcataattattccctataagatgaaaaaagaatagtatgtttgtttaccagggccagttatagctcattaaacattagtgtttcctgaagaacttttttcacattgtccaaatatatgtgtcaaattttacttgggaattgcataaccagatggactttcccaaagctctgtcttttggaacaacaaaaattagaaacactactttctaatccaagaagactttttagaactatatgtacggactagctattttagtccagtcacctccgcaatgatacttcagcaactcaagtaggccatctgaactgaagt

SEQ ID NO: 143100 - DNA, 378 bp, Homo Sapiens
aataacagaagggtatttcttttgaatgtgaaattttaccacatggtatgaattagtccaagtgtttttatactaaatttacataatatacacttttcaagtaagtacaaagaggtataaacactgcttatgaattgaatgttaaaaaataaatctctatgcattacttttgtctttccccataatctcacgtatacacataaaacaaaaaacaaggagacccagttatagttgtggtatctgctgtttctgccttgaaatttccagcttacagctaagcaacaactactgtgcatccagaacttacatctatgttcctagagtacttgaaccccattctcaagtgcacccttcttaccaggtggaaatagttcactg

SEQ ID NO: 143101 - DNA, 584 bp, Homo Sapiens
tttttaagtcaattgacttctgagttttatttcttcatatacatcaaatcaaataaagttgctgctgtacaagaggtgaggacatggctgctgttgttgggtggaccagtccctgctgcccccgcggagagctggctgggtgctggagaggctgtggaatgtgactgtgattgctgctgtcagtcttctccaggcccctgtggtggggggggaggaggggcaggaagcaacctccacacccaggaccttgccatcctctccggcctcgacactctcccctctagtcttgggcaacatgtcagctttgactgaactcccaaaaacagaagcagaaggaggaaggtggaggtacactgtgccacagtgcagtgtgacagtcatggtgccatgggaagtcaagaaggcatagtgactggcaagggcttcgtggcaggacagcccaggctctgtggatgagcagctggatgactctgggcaggtcctcatctcacgtcaggctcatccaatcatttaacaatttaaatttaacaacatgtgcggaacaccacagcgagccaggtaccacggtgggtgctgaagctgca

SEQ ID NO: 143102 - DNA, 383 bp, Homo Sapiens
tttaaataaattacttttattttgagcgttcattcttacgtatgttataggaagtaattaagaagcattccttactccttagaattttgtttataagttagtgatgaattggaaagggtagcttgcccctggaattctctgataagcacaggtgatgaggaaaatggagaaatccaagaattcctttgtctttccttgaaagtagtcaactttaagtgcagtgcaggcgtgccctctagcggccaaataaaaaataaagaaatacgggaaaccttcagcattgtaacaatcgcacgtccccatctagtggctaacgtgtgtaaatgcagcttttctaatcacaataacgaatgttacttgatttatatgtctcatgaggtgaa

SEQ ID NO: 143103 - DNA, 350 bp, Homo Sapiens
tttttttaaagttataatgatttaatcagtggcacagaatagacgatacacataccatatagtgtgtatatatgtgtgtacatttaatacaagtccaaaatctttgatcatacacacctttggggttagctggggttcataaatcagaatattttggatttctaaaaaataactcaaatgtatgcaccatatgccccccagttgagtctggaacagcagactaatcaacattactataaatgagataaagactgttaagtagcctcgtgtcatttcaggtcaggtttgccacagaatgagttctgatgttaaatctaggggaaaaaaattggttgccggaaccttttggg

SEQ ID NO: 143104 - DNA, 564 bp, Homo Sapiens
  misc_feature (58)..(212): n is a, c, g, or t
  misc_feature (549)..(549): n is a, c, g, or t
tttaaggttttaaattttgtttttaaagaggaaaaaaaatataacatcatggttacannnnnnnnnnnnnnnnnnnnnnnnnnnnnnnnnnnnnnnnnnnnnnnnnnnnnnnnnnnnnnnnnnnnnnnnnnnnnnnnnnnnnnnnnnnnnnnnnnnnnnnnnnnnnnnnnnnnnnnnnnnnnnnnnnnnnnnnnnnnnnnnnnnnnnnnnnngcatgcaaacaaaacagattttatgatcgagtcatagttctggaaaggaagaaaaacccagatttgcgcacacaagtgttaagtaaatgtgagccctcactattgttcatacaacatggcagtgacacacatacattagacaagagattattacacactgagcctccacccagtctccctattatcctcccatgggctcctaattgatgactaaacagtgcattgctgggtggcttccagtagtttctttcttcactttgctgcaactttgaactgaaggtgatccacatggtacatgacattcttcctgttttcttcacaagacaaggatgatgtntaaatgggcatctgt

SEQ ID NO: 143105 - DNA, 551 bp, Homo Sapiens
tttttagagctcatcacgtaaatttattcattcttcttagtatgtttctttttaacattatctgaggcaacatctaccggctttgaggccaatgacccaacgccattggaaggtgactttgcttcacttttcttctcacatgatgaaaacggctgctgccagccaaatagcatccaactcaatgtatcctcaaaaggagcaaatgtcatagtagaagtctgtgtagtcatcatggttatctttgtggccacaataaagatggtataaaggaacataagattatgctttgatattgccagatgctgggtgtgctggaatgtgaagataactgaccccagcagggttaccttggcagggtatgacatcttcagccattcatcaccttctggtttccaatctccttttaccaacctctcaaaattcgttataatggtaccacctgcacctggggcccatccaatagctatcatgactatccagccatttttgtaatagctattagcatgtgtgactccacctactattttccaagttctggtgactttctttat

SEQ ID NO: 143106 - DNA, 562 bp, Homo Sapiens
ttttttcattctgcaaatatccttgaggcctgccaattgtggcttcagggtttaagaagacatggttccctcttgaattacaggcaagtaaacgagattacaaaacattgacaaaggcttggatcatgctgttggacctttgcttgagctgttcaccgtccgttgttacctctgtgaagctgaccccaggcctaaccaaatgttccttttatgctgttctggggacgtcttctgcatgtcacttaaccacatagtatcacacctagttggttggttctgcattttccttccccactagaccgcaaactctcagctgttgttggtactattgagcttaagtacagggcctcaaaaggagccggagtacagggctaagcgctcagtacacagggtacgaaccaatcaatgcaagaatgaacgtgccaccgggtcttgcaggcttgagaagtgtttctccaagctgattttgctttccgtgcccgggcagctcccgtgaattgcacggtagaggtcaggagtttccttgggggccgtggggagccaatggaaggatgaggagaaa

SEQ ID NO: 143107 - DNA, 592 bp, Homo Sapiens
gatttgcatatattttattttcctactcttccctgagcaaatataagcagtaagcaagcaggctaggtgtgctcaataaactcagcaacacctgggatgacctttgcactcgaggggccactgcaatctttgtcaaaggcataggatgctcctgctctagttgcacttgacctaggtgccctttctgctacatgcaaatggcctctaagaagaacgaggaacgtatgtgtccaggttggcttgatttcaccagttcactcagctatggccacgatttactgacatcagctctgcaattgagaggtcctgtctccagggggaggctcgctgggcttgctcctgacgaggggacccccattgagggtcagttcccagaggagagtgggtgggttctgtaaagcccgagggcaaagttgaaggactctcctgtcgtagcgcttgttaaggccaagttctgctccctggctccactgagctcgcctgacctgtgagattgccagggttccctgtggcacgcagcacttctgatcaagttgaagttgagcctacctccaggcattttgtgtctgggctgttccttgacaacagacaa

SEQ ID NO: 143108 - DNA, 330 bp, Homo Sapiens
taagttgtctaaatttattcacattttgaaaaatccagtgtggggtacattgtaatatttttaatggtgaatcacatgataaaaaatacaaatgtattatgtgcaaatttttactgaactgtggtatagccagaagacgaatcatgccttacccaatacccaacacatcacaaatttgagtcaaatacataataaaggctttgtgcatacctactttcctttcaacagtcagccttcttaatgccccagttttatgacataatttttatgaacttgactctgaactgttccaaagttttacaattgagaattattggagtcagactggtt

SEQ ID NO: 143109 - DNA, 524 bp, Homo Sapiens
ttttcttaattatttctttttattttaataaagcaaaactacaggtaaatgttttgccagatgacttttgtgtacttatgttctaacatagcacatgtttggcaccaaaagatcttagaaactactatgaaaaaccataagattttaagtagttttctgacagaaatgaacatttctgttgcatccctacttgtcactggctttcttaaacacagaaatattcatttccatagtctttatcgctttttggaggatctctaagattggtcccatagccttgacaatttgttccaacaaatctgctgctgactttgtgggatttttggaatcctcagtttttagtacatcctgcagttttttcaaggtgtctatcagtggttttggaagaacctggaggacttctggttctctcagatgtggtgacatctgattgctctttggtgtcttctgtatagaagtcacttaattgaagattcatgatggggaatttcatcaagtgtgaaagagaagattccagactccca

SEQ ID NO: 143110 - DNA, 506 bp, Homo Sapiens
ttttttgaatcttatatagcttttatttcagtgatcagaagaatgcagtaaatggaatctacactaactaacattaggcatgcacctctacctgaaactgctgttagcttctgattggcctaaatctttataacttatttaggcacatcactgaattttttgtaccctgatatacagggtaagttaatttcttccttgtggcagtctagtaataagaattatgttcactggctagattcctttataactaaaggcctctagactctcaggctgcctaccctaccttgagacttacttaatatggatatttaagcaaatcatcatataggaaagggagatcatcaagataactgaagtgtactgtataaacactcttacagatatttttctccagcattgacaatcaaacactagataaggataccaaattattcttcccctacttctgccctttctgataaacacaaggatctcccctgaaatcagaaatgactccacacaaatga

SEQ ID NO: 143111 - DNA, 495 bp, Homo Sapiens
tttttcagtttttctattagcagatttactacactttctttgttcataatttttattcaaaaatctgttcagtggaattcagagtcttgtcaaaatggttgataaacccacactgttaggtttcctctagaaaagccatggagaagaaaaaaagaatttaagaaataatacaataattcctgtgagaagaaaggctgtctcggactggcatgtggagggtgaaaggagaagaaaaggctagcctagggcaaaatacactgggctgtaaaaggatacattagagaaaagcagtttaattctgctctttcttgctgctttcacaccttaataatgcctaagggcagcctcctatgcagagatctgggagaatgctcaggcccctagtgcaggcatccacaggagtgagattaaggtgagctggagccctgctcagctgtcagcctagccttcagcactgagacctccatctttccctctaaaccccagagctggtgg

SEQ ID NO: 143112 - DNA, 375 bp, Homo Sapiens
gatctcgttccagttccagagaacgttcgagatctcgtgggtcgaaatcaaggtgaatgaggtagcatctctctgtaaagcagagagaaaaatatttaaaggctgcagaaggtgttgctgctttttttccccttattttgcttctacttgtcgattttattttagcattagaaaactaatgcacttgcctcagcttaattttctcaccatgaaatgtttccattgccagcagtgtgccaagacattcccatgattgaaatcaggtggctattttgcaatatgcagcgtttattattttggcactaagatgttatgaagtaggaagatgaagccaagtcttatcgccacatctctagtatattaagattatatatg

SEQ ID NO: 143113 - DNA, 1467 bp, Homo Sapiens
taaacagctgagaaccaggataagccagctggcttgttaaacactatcctttggctttgcgaagagaacccatagttccatccttttttctcagagacgaaatgtcttctcaataggactacagtatggagaaagaaaggactttctggagaggacaatgtttgttattccgatgttcatctttgacttgagtgccaagcccaatttcaacagtgcaaaaaaagactctcaggaagcagcatgggggtcaaaggcttgtgtagtagctgtctacccactgggcaaggcctcgctccaccagggaccggtttatcaacaccacttcatctccaaccacactccacagctgaatcagaggaagaccagttggactgtaacttgtcacctgagcaagcagtgctgtattccccgtcatctcgctcatggcggcatctgcttccggtgaaaactggtcatcgtctgacaggggcatcacactgtccagaaggacttctgctccctgaaacggcagggtgacaaagtcagacctgatttgccggagcacgtctactttcaccctcttatatccgccgtagtccacgtatcgaatctccacttcgttggtctcctcgtaggaggcaaccactttggctcgccaccaggccccgtccgcaccaggggcggcacagatgaccgttatttccactggggtgggcaaggtggggattccaggctgagagttacaagaggtacatctgctggtcgagtctgcgcagcgcgtggaaggtagggtgtgtgtgctgctgcacgaacaggtgcccggcattgacctggttgaccacaatgacctccacggtgatgccatcaggcagcatgagccaggatgtcatcggcagagaagtcagtgccagtgaaggcaatgggggagcgtagatattggtgaggttcagctctttgaacttcttcccaatcaagttcagcgctttgtctacatgatgttgagagccttctatgtggcagatctggacgctctgggtgtaaggcagggttgaaatgtagatcttggcaccagatgtttgcttcagaaaactcacatagcgcccctgcttgccaattagccgaccgactaagtgctttggcacctcgatctcccagatgatgaggtcgaccttcttagggttggagcctgcctgggcattttggaagctctcagtcttcttgagactgcaacagctatccacggaatccatgctgttcctgtcagaacctcctgaatgatctgcttccgcatccatggtccatccatcctcagcccccaagtctgacaactcccccttcagcaccccattgctgaagggcacagtactttctggcagtggcggggtgatggccttgtcctggggctcgagctggtctctgtgcaagagtccctcgtgccgaattcgccacccagcctcgctaccttaaaccgttatgagttactgcctt

SEQ ID NO: 143114 - DNA, 499 bp, Homo Sapiens
tttgatttctagatctttatttacagggtttttgtttcatttgccagtgatatagttcgaatttttttaaaaaggcttgtagtatattatgacccattgagatgcatttgctcttccaaaaagcacgtgtacaggtctcttctgagcacatctgctcctctttatgcacaccaggaaaagattaactcagctgttctgttttccagatttgactgaagaacgacttggagacggcaagtcggcagacaatacagaggtcttcagtgacaaagacactgaccagaggagttccccagatgtggcaaagagtaagggctgcttcacccctgagagccctgagatagtgtccgtggaggaagggggatacgctgtccagaaaaacggaggcaaccccgagagccgccctgacagccccaagtgtcacgcggagcagaatcacctcctgattgagggcccctcggggactgtttctctgcccttcagcttgaaagccaacaga

SEQ ID NO: 143115 - DNA, 374 bp, Homo Sapiens
gagataattgatttttaacaaaagcttaattgctttcttgcctggaggcatgggtcggagtgaaggggagcaaacattaattggtgtcttgacctgacaagtcaaggtcacattcggatttactggatttatctcaagcaatagaaaactgtgtttttaaactttggttccatggaatcatacagactccttttattctaattgtttttatcatgacctgtgtgttcacctatgaaattattcatttgaaattgttactgactagttggtgatattcaatctgattttctcatgaaaattaataagtatgtttctgaaaatctcctctcaattatgtcattctaaacaatttctgcaatgttaaggcccagcag

SEQ ID NO: 143116 - DNA, 623 bp, Homo Sapiens
  misc_feature (116)..(344): n is a, c, g, or t
  misc_feature (611)..(611): n is a, c, g, or t
ctacttacaatcaccattttattataaagaatacaaatgaagagccagacaaagagtatgtagggtggcaagcactggaagggcccagagctcaggagcctttgtccctgtggaannnnnnnnnnnnnnnnnnnnnnnnnnnnnnnnnnnnnnnnnnnnnnnnnnnnnnnnnnnnnnnnnnnnnnnnnnnnnnnnnnnnnnnnnnnnnnnnnnnnnnnnnnnnnnnnnnnnnnnnnnnnnnnnnnnnnnnnnnnnnnnnnnnnnnnnnnnnnnnnnnnnnnnnnnnnnnnnnnnnnnnnnnnnnnnnnnnnnnnnnnnnnnnnnnnnnnnnnnnnnnnnnnnnnttggcaactccttccttgaaactaagggcccaccatgggtaaccttgttagcataaacccagggatgggtgaaaagggcctgttatgaatacaaagacactcctatcaggaaaacccaagatttttgaaagctgttgctagggactaagcacaaaaatccagaaacatctttattgtttcacaactggtataggcacagtgataaaagtttagatgggggttgtgagggtaagccccagacctcaagtatctttaggtaaaccccangaaaaggctttt

SEQ ID NO: 143117 - DNA, 729 bp, Homo Sapiens
tttctgggcttggtgcatttattcaggtttgagagctgaggagggcagagctcgcacagctgtgaggcagggctgggccggacaggagctgcttcatccttcaacagacgctggcctggggtgaccagcctggtgggggagatggagtcgggatggaggacaaagggggagcaggggacagagcccaggaggaagcaagggagggcacaaaggaggggcaggtggcttcaggtgagaagcaggagggagaaaggggaccagcagtgggtctaggggaaggggctggggtgagggaggctgagaaggggcagaagatgtggcccacagcggctcccaacagccccaggtcctcaggaagcccctcacctgtccctgtccccatgggcccccagactcactgcagacccaggaggcctggcatagcgagtgtgcaggtgtgtgcaggtgtgtgcagaccagcacgtgtgcctgtgcacgggtagacagcatgtgtgccagtgtgagtggcgtgtgtgtaagtgggtgttcgcatgtggaggcatgtgccagtctgtacacgtttgctcatgcgtgagtgtgtgtgcatgtggttatgcacatgtaaaggaccagaggcgggaatcagaagggcacggtgggcatccctccaggaagaggagggactcaggctgacctcgccctcccacaagaagagtcaggaccttgggggccgcggctgtactgagtggt

SEQ ID NO: 143118 - DNA, 412 bp, Homo Sapiens
tattttttctgggcttggtgcatttattcaggtttgagagctgaggagggcagagctcgcacagctgtgaggcagggctgggccggacaggatctgcttcatccttcaacagacgctggcctggggtgaccagccagtcacatctgggaagactatgttgtcatccgagaggccctgagctctgcccaggcagatgaactggtccagcgtcccgggaggcagcaaccagctcctgcccagcaggctgatcctgaggacggccagcctgctcgtgtgtccacacccggtggtccacagtgaactgcccaggctgggctgccggtatcagcacataagaccatgtgtcacagtgctggcctcgagtcatcgcattccacacctcaaagcggccatcatcacttagctcataagt

SEQ ID NO: 143119 - DNA, 457 bp, Homo Sapiens
tttttttcttttccatccacctcgctggtgtgtgaataatttcatttctcagaaagtgttctttcatatccatcttacaagatgagaggccttttaacatcttccattcatatatgatacaagtaatggaaaatattccagcttcatgaatatggtgatacaaatagttatccgtctaacctctgtcagtgccaaatgtttactcagtgaattactcagctgactggtaatttcttctgaaatcactaatgagaggatcagaggtctggctgttgtctgtacctcgtacgactcccagtgcagacaattgtttggagcacagacagttgaatggattgacttcctgcctagaatagcttctgctgtgcttcttatccttcttgtggagatttcagattgtctgaattgcttttctatcttaagaaaaaactcaacaattgtcccacctgagaggaat

SEQ ID NO: 143120 - DNA, 771 bp, Homo Sapiens
ttttgaaaatcagaaatataacagagatacaggtttttatttttccatcatgcatgcaaacttacaactatttatactgtttaagaacacagaaataattgcgttattaacagggtgtcaaattaccaagtagaacaaccagttactaattattttggggaggttattttcacagaacacagcaacaatttccaaattattcttccaaaaccagagttatgagaccagtacaagctgataacaatgctaatggtcacacaagtttccatgttacacagaaaaaaagattgacattctggtgaagggtctcaagtaccttaccatatcagaatttttgaaagagttttacaacagaacagtctctctcttgttttgtagatgcaagggaaaggaagcatccctctcatttctttttgagactccttgttaattcttaaaacacatttctaaggcccatctctggaacttcattagttaacattaaaagcaaaaagcagacctgatgtgattatgatagtgcaccccatcactatcaccatcaaaagagactaccaatctcccaaagtagtcacggttgcattggcatagtgtcttggattttcaataaacaatacaggtgaaaagagagagatacagatgaaaccaggttgaccatagctgataagtgatgcagctaggtgatggacacatggggtccaaggaccatcctctccacttctgtgcatgtctgaaaatgtccataacacagaagtggagagtctccgtcgaact

SEQ ID NO: 143121 - DNA, 1474 bp, Homo Sapiens
cgtgtgttggcgtcgccggtgtctccgtgttccttgtggtgtgtccgggcggcgtggggctgtgggtgtctgacggtcggtggcgtgctgtgggtcgtttttgcgttgtctgttggtgcgtttttgtgtgttttgtgggtgattggtttggtttgtccgtttagttcatattttattaggaagccatatcagaaaattaatcagttatacaactttaaacattgaatgaatcattcttatcaaatacatcaagaccagaagccaagtcaaatatggcatttcattttacaaatatttttacatttaatagtcatgaaaaagaaaagaacttgaaaaaacaacttcaactctgtacaaatgttaatatcaaggagcagctgaagcttaattttaagatatgcaagataagtgaaatgaaataagtaatgttttattaaaatatccttgtctttttccatgatatacacatattttttctctttaaataaatatatattatgtatttttaatgacagcttacttaacaacattcatctggtgctttggggccatggagttcacttggtaaggaagacaaaataccaaaaacatcaggtacaattggattctcctacagcagaagaattggcttgatttttggaatgtctccccgcacctctcctcacatcaggacttctgagccttctgaggagtcgtcagcaaacaaaagttcatcgggcaatgagcttcccaagggcagcatgctcgaatgggaccaggagaccccattcctaacaagtctctcccccggtaaaacactgttcttttcagctgtgactgcagcagagggggcagaagtcagatcttcccattcctcactgcccccattacaggatgtaccgtccttcatgaggtttgctgtcatgaacttctgctgtgaccacactgatggcagcgcggggagtgcaggaggcaattatagagtcagggtcgatgttcaagtccagtggagcaagggtggagcctgggccaggccctcagagctctccagcaactgtgtattgacgtaaataacgtctgcttggttccgaacgtcaggcaaactttctaagagtttttctagctgcagcctcaatactgaaaaggtggggcggtctaagggatcggttctccagccaagagtacattatttcatacagttcatccaggcagtcttcgggctgcttcaacctgtggccatggagaagatagtcatacatctcatggttctggaccccaggatagggagtcattccccgcgtagctatttcccacatggtcacgccaatgcccacacatcacttttacttgtgtagactcggtctgcaagactttctatggcgatccatttaacaggcatcttagcatgcggccttgccgcacgcgtgggtcgacgatatcccgggattccggaccggaccagcctgctttttgtaccactgttcatagtcaccaa

SEQ ID NO: 143122 - DNA, 387 bp, Homo Sapiens
tttgctcagcctcttgagtagctgagacaacaggtgcatgtcactgcacttggcatggttttccatttttcatgtggctgctttgacttcatgttgaaaagagaagataggcaatctcccaatttccagtgcctaggctgacaaaactcaaagtatattttcgttgtcttctaatcacagggaaagagttatatagacagaatgcagcctgtgaatagatactctatattttagaattaaattgagcaaaacaaagtgtcattattgcctagtctcagattaaaaccacaaaattatataaaagaacaatgtttttattagagtttaaatttcacttatcaatacaccatttgagcatttacgtctagataaccaaacaggaatgct

SEQ ID NO: 143123 - DNA, 437 bp, Homo Sapiens
  misc_feature (50)..(72): n is a, c, g, or t
ataattgtaagtcatccacgctgttggtctgcaaacttttgaggtaactnnnnnnnnnnnnnnnnnnnnnnnaggattttagatttgaaaatgatgttttttactcatttcaaaatgtactgtaacctttctttggttcttactgttttcatttaactttctctgttttcaagaaaaattgtctttattgacatttgtaaaaaagaatgtgttttgcccagttattaagtattttatttttatgcaatttcagaatcacaatgaggtatgccatttcttcatatacatgcacattcacctcaacttgcacacacatcacacaccaaaccttatgcaaaggggaaagctaacacttagagtggattttgtcccttaaggaaatggattgttcctgcatatattgctggtggcagtattcagtcttgtgttcttttttt

SEQ ID NO: 143124 - DNA, 446 bp, Homo Sapiens
tttacaaaaaaattaattttattttttcagatttcctttacttacattccttattccctcaccaacagtaatcctcatttttatagaaggtaagagagaagaagtacgcagaggttacagacttgggtccaaagaaaattacagagtccaaactgaggccaagcctgccaatactctcagcagcagttttctcctctaacactcttcctctatctgccatgatgcccaggcatacaaagggagtttttcattgtttccttaaggttaactgctctggatgctctcagttcaaataagatggttttaaaattcccctcctccttgccttacagcaaagaagaggaaaggagaaattcaaatgaaaataaatcatatacacaaatatcaaggttcaaaagctggaggatttaattcaatcaatttagcaaggcccaaaatgaaacctg

SEQ ID NO: 143125 - DNA, 353 bp, Homo Sapiens
tttgtaatatattaaatatgtttatttaaaatgcacaaagactgttcgaaaacattagtcactgaattagtttcctggagctactttaacagttctaccaactgtgtggctcaaacaacagaaacaacgtgttgtctctcagttctggaggctggaagtctaaaatcaagatggcaggcttggcatcttccgagtgccgtgaaggaaggatctgctccaggcctctctcgtcggcttgcaggtagtattctttccacgtccttctaacctgatcaggagtccctctggggtccacacaagcctgcctcctttggagagcccttgagcatcactgttgtgaccggggtgcacac

SEQ ID NO: 143126 - DNA, 562 bp, Homo Sapiens
  misc_feature (492)..(492): n is a, c, g, or t
  misc_feature (530)..(530): n is a, c, g, or t
  misc_feature (537)..(537): n is a, c, g, or t
tttacttgaaagtcaacaaaaaagttatttattaaacttatatgtctgaaaggagttttaatcaatgaaaattaggagtcggattagaaaacatcaaaaggatggaagacagacactgtaatttctgtttgatgtagtctggtaatttttcattttctccatacctagttgtttgaccatttggtgaggtataactgatagaagacactcctgcctgcacaaccaactgggacccatcattaaactgaacccacacagctccactagttaactgtgtagcccaaccaacatttttcacaaaaacagatttcaaaagttgtgctgatttaggaagacaatcttttagactattagaagagatgtctgttccagaagctgtagttgtaagaccaagtccttcatttgtaaccatagagggattaaggattggtgcctgtgttggagaagcagcactatgcatgaccattctgttgaaagatgctctctctctcngtgggtaatttgaatccacagaagggagaggtgataangccttangtgaactagtaccaccaggtttctt

SEQ ID NO: 143127 - DNA, 273 bp, Homo Sapiens
aaccaataatgagatttgtttcatgtagggaagggttgttgagtgagttaaagcaatggaataattctgctcaaagatctttaaattatataaatatccaaatatctgtaaataaaattggttagatcagttttccctcaaactttagcttcctttttccaccgtttcctttgacctccacctggagagctggttagacacaaattcctgagctctactctcagtaattctgattctgtaggtctggggggataggaggggcttgagtttgca

SEQ ID NO: 143128 - DNA, 730 bp, Homo Sapiens
ttttttttaaccattaatgaaattctttattcaataacctgttatttcctttttaaaaaaaatgagaaaacccaaatattctggataaatcaaaagtttttgacagtgagatttattcgaagttttagccccctatctaatggccagccagaaggtaaaaggagaaatctgtatttctgttgggaaggaatggtctaagttaaagaaaggaagcctcaaagaacccagacctgattattaaagccatttctgggcacttgagaggtaaagctggtcctcattaactctgcatatctcttcccttatctctaagtttgcagcagcatttcctatatcccaaagaaggggaatgttccctttaatatttgtgccagcatcaccttgacattcaggaagtaaaatataaatgcagctccattttcccacctcccattttctttcagtaattgccagcaagccttccatcatctgcaagtggggtgggggcagtgtgaaggaattctgctaaaagcgctgctgaaaaacccacagtggcctttggccatccaagcagccatggctaacagaaggcacctacttttctatctgaagactacagggccccccagacacgttttccttgccagcccctacctaagctaagatggcaactatcccctacccagttagggcgttgcccactttcaaaacaaaccttggacaaagaaggatatgcttgtgggtcgcttaa

SEQ ID NO: 143129 - DNA, 404 bp, Homo Sapiens
ttttacatcataattatctgttattagatatactttaatgaaatctactgattcatctagtaagttactagatatgtgaaaacaacataatttccagagttcctaaatatgtccaatatattgaacttagggatccaagattctgaacatgccatcaccaaaaaaaattgcaaacctttggtttacaactttaaaatgtttttaatcttgaagaggaaggaactggggcagcacagacacggaaacacatgaaggcctccctctcgctggctttgccatttaccatgcgggctgaagtggtttcaggacgaggcgatcgctcaccttctagtcagaaatcagatgacctcaaaacaacctcatttcaggctgaggcctcatgtctttcgcttagagcctttgtg

SEQ ID NO: 143130 - DNA, 399 bp, Homo Sapiens
gcttctcatttttcactcacagcaggtttcagctgctctgaagttgtggccgttgtcaggatagggcctgggaactggggaggggctggtcagggcagacttatctgtgaggtctgaatatctttaaaaagaaagatcctctgggctcctgggggcggggtatagggccgcaggggacattggcagtcgcccaggtgagaggactcagatctgggtacattttattgtagcagagatactgcacagggggagtccagatggcttggggcatctggggttctggcagtgacatccctgggggctgacatctgcctctgccctgaggcctgcagaaggagtccagtcttctcatgccaactagcgagacagaggtcggaagtcacgagcagcccccctcca

SEQ ID NO: 143131 - DNA, 485 bp, Homo Sapiens
atggtccatcagctgctggttcattatagccttctcttaagtactgaataagacaaaatataaatcttggaagaacaaattcagacatcatcagtaagtctttagggacacagggaatatttgaacttgatttaatttgatgccttttgcaaaacccgctctcccgcatcacgttgctgtccccgcagtcgcaggcgcccccggcctggctgcggaacatgttgaagtcgtgtccggtgtggtcgccctggtggaagcactcggcgcacagcgacatgcagggcgagatgccgcacgtccggcagcggtaggccacgaagttggctgtccagaccaggccgcagagcgccgcgggatcgtaggcccgcaccgccgcgcagaactcgtcgtagccgccgccgcccgccagaaggcacttacaccactccagggcctcctcctcggccgcccccggaccgcccccgcctccggccgccgcaacatcc

SEQ ID NO: 143132 - DNA, 234 bp, Homo Sapiens
cgttatttgaaatctttgctcttttatttttcagctcccagatcctctccctctctttagctttcactgtgtttgatatcaagaatatgaaatgtgaattccacggtccaagaggggaagagtcacctttcacaaacttcgttgttctcttctttggaagggaaattagtgttctaggcgattgagtcccttcattaatgaaacttgaaaccctgttatgcattggcaaatcac

SEQ ID NO: 143133 - DNA, 591 bp, Homo Sapiens
  misc_feature (255)..(275): n is a, c, g, or t
ttgtaggaaaatgtctgtattaaaagccaaaggaccacataagtacaagaagaaacgcccaccaggccacgtcactggatagatcaacttggaaaaggttcataaagttcattttcagcggtaacaatatatcggtgttaaatccttcccatgccctccccccaattttaaataaattaaaaaaccacaaatttcaaatacaactatgttcagatacaaagagcttctcttactacagcaatagcaatttaatcnnnnnnnnnnnnnnnnnnnnnactaaaactttcatttaaaacagttattaaatatataaaacaaatacacaggatttggtcattttctgccatgaatctagggcacgtgggtgcggggaaggagtcgggcagggggatgcaatagaggggaaagggccccatttccctcctctccgtcttcggagctgcgatcccaccctcagtccaagggcttaaacatctgcttttcggaactggaagcgcagcacaaaccttgcttttcaaaggcgctggggtctctcggcggccccatctcgggaagaggaactaacgataactacagcacgaagcacaccgg

SEQ ID NO: 143134 - DNA, 316 bp, Homo Sapiens
tttgtcatttcatttagtttattagacaaaaatatatgatttagacaagttcgctgacgcgctatttacaatctgaaaccactctatatacagaaaaggggggaaagagacacaagcacgtgggggcatttaccgaacccgataatcgcagccactggagccgccggcagaggcctggccacctggacgcgagctcgggaccgaagaagcccctttctgcagaaagcgacggatgcgagtccttgacgtcgttgtcatatttgtcctttacaccagtctgaaatatttgtcttaattcctcccacattcccttcct

SEQ ID NO: 143135 - DNA, 302 bp, Homo Sapiens
acagttcagtttgctcttgcttttctagttctttgaaatgtatcattatgttgtttatttgaaatttttcttttttaatgtgtgtgcttactcttacaaacttttctcttagtactgctttcactgtatcacacaggatttggtttgttgtgtttccattttcatttgttttgaaaaattttcaaatttccttagtgatttcctcattgtatcagtggtcatatgaggaatatattgttcactctccatgaatgtctatggttgactaacctattcttgtctttgatatctagtattaccgt

SEQ ID NO: 143136 - DNA, 480 bp, Homo Sapiens
ttttttaaaatgaacaatttatttattgcttaaagaacatagaccataaaacactaataatatacctagaaaaaaacccaaacaagattgttaaagaagtcttcataggcattatggcatcttgttcttcctaaccttaactgatgagggttaggaggagaaggctcagaataaggataacagttcataatttcttcatctctgctctaactgttcccttagttggtgaataacaaccagctccatcctaaaaacaacagaacataagcagcagcaaggaatcatccttgagcaggaatgcagtcctgttacctgaacagagacagaacacaatctagtattaactgctgcaaggtaggcacttaaactcactatggcaggtcctagtgcttagtagaaatgacctcgttttttcccctatgttttaggaaatactaaaaaccaaaagaaaagctaaaacatatgcaaaccaaacagctg

SEQ ID NO: 143137 - DNA, 297 bp, Homo Sapiens
aacatttctgagcctttattttctcaccctaaaatggagataacatcaatattgtctccatcactccgaaacccccttacagtttggtaagaattacatgagataaaatatgtaactagcacagtactagcacaaaataaggagtcagttaatattagttcttcttcctccaccagctcagctcctttgctcttccttatccaggaaatacagaaatatatggattcactgtagaagctggacccagctcttcagatgcagcagatggattgacccactctgtaatgacccaggatg

SEQ ID NO: 143138 - DNA, 418 bp, Homo Sapiens
tttataacaaggtaatatttattgcatttttgtgtatcatgcactgtgctaagcccacagcatgtattatctcatataccattatcatccctagtttataaatgagacgagaaaaatattgctcagagaagttaaataactcattcaaggctggtcacagaaccaagatatgaatccaagcctgtctgactctagagctgtgtgcttcaactactaccccacactactgcctctgagtattcgaggaattcccctggagggccttctcactgttctaggagctttccctctggcagagcactcacactaaagcaggccagcagctccatcttgcttataccagagctggggttgacagtgggttcaaagcctgatggggttggctgctcctcatcttgttccaggtattccccaatcg

SEQ ID NO: 143139 - DNA, 494 bp, Homo Sapiens
ttttggcagaaagatatttaattacataaaaacattcattactttcaaagtacacactaaccataacaccacatctgtgatactctttataaccattttgaggtttttacaagaaatcctaaaaaggcaaagaaccacagcaataagaaaaagatcaattaaaaatgaaaaacatggcatttaaccacacatattctccagtttataacagtagacacccagtagtgaagacagaatagagctcttgactcacataagactaagtattctgtgtctcttaatttagaatatctagagaataattaacctataggggtatcacctgttgtgtgaatgtggctggtacatagtttttgttattctggatccttgtatcactaaatgcctaatccagatgcttctgactggttccctgaaatttaaatgcagaattcactttcctacagaaacaatgtaataaataataaggcataattgacaatcacagtagtact

SEQ ID NO: 143140 - DNA, 376 bp, Homo Sapiens
tttgcagagccgatttattttattggctattcctgaaaacaacattaagattttaaatgttatcctaagattggaatgtggaataaagaggtgagaaatagttgcataaatcatgtctcaagttcagcattccatttgtcagaggcgttgctgtagctctcaccctgcagatgtctcgcaatgttggatggtaccatgattttacttggacaaatcattgctggaaaactgctcatcccttcatttggctattctttgtttcaggcagcaaagccacttatgaaatctcagaagagtcttggctccatccacctttgcaagatgccagccttttgctgggttacttcatactcttctgatccattccccatatggt

SEQ ID NO: 143141 - DNA, 459 bp, Homo Sapiens
  misc_feature (138)..(149): n is a, c, g, or t
  misc_feature (381)..(390): n is a, c, g, or t
aaaaaacacttcattatgtttaggggggaactgcattttagggttccattgtcttggtggtgttacaagacttgttatccatttaaaaatggtagtggaaattctatgccttggatacacaccgctcttcaggttgtnnnnnnnnnnnncatacattggggaaaggtttaagattatatagtacttaaatataggaaaatgcacactcatgttgattcctatgctaaaatacatttatggtcttttttctgtatttctagaatggtatttgaattaaatgttcatctagtgttaggcactatagtatttatattgaagcttgtatttttaactgttgcttgttctcttaaaaggtatcaatgtaccttttttggtagtggnnnnnnnnnngacaggctgccacagtatatttttttaatttggcaggataatatagtgcaaattatttgtatgcttcaa

SEQ ID NO: 143142 - DNA, 602 bp, Homo Sapiens
ttttttacttgtgatactaatttattcataacagaaaacttccttgccaaaggactttgaagacaggctttcagctaagacatagcttcccatgagactcacttccatgagtgcagtaaatagagggaagactttgaaagaagtcattgccccagcaaccccatcagcaacatttctaacatgtcattttaattgtgttaaaatgcatcatgctacacccgaggaaagcactgttgagatgatggtagagcaaatcaatctaccagcgttcttttgagttctgtggactttgggactgtgctggttcctgaggaggacattatgggttcttggtctgtggcgttcagtgaggaggaagatcagtgaggcatggagtccttcgagaaggcttgctaaaggaggtggaacctggactttggctgtgggtagaactgatagtgagtaactatgctttatctatgacagtgtcaatgcatgggccacggtgtccttacacattctctattctcctctgagatatgtgcaattcagacaaagaagattcactgaagattctggttgatagcacccttgtggcaggcattaatatgctacacagagaa

SEQ ID NO: 143143 - DNA, 484 bp, Homo Sapiens
ttttcttttttaaaaacttttattacgcattgctaaataacattgcatgatgtattgcacacatcatgtggtaaacagcactccacagtaatccatacaatagctcgtacaatgaccatcaaaatagtttgaaaaccgttatagttttcatccgagtgagtgtctttatattcttccatgcaatctgatttcataattaagattactcttccattctacaacaaccaaccgaaaataattttttataaaagcccaaccacaacaaaaggtcattgggacattacgaaaagtcggaaattagactccaaaatatcacaaggtgtccgtcttttgaaagacttgtccctaaaatttgtgtgatctgacacttgggttgcttttaccgccagcagcatgtgacactgtacttactgagaaggaacagtacattgacatatcgactgaaaattcttgaggtaatagatttttaaatttcactgcttaa

SEQ ID NO: 143144 - DNA, 769 bp, Homo Sapiens
ttttgatagtttttggaatttatttataaaacaatgcaaatactatgtggaattaggaagcatttcccatttttattcataaaattattacttaaaattgcaaaagtagatttacagaggcacaggtaacaaaacaggaaatgaaatgttccagacattccgaaaagttcgaaagaaacacaccctagcctcaaaatctccggttaaaccgtggttgcacaacaggttctatttattcctgcattttctcaataagttcttctttatatttgcctttctcttttccaacttgtcgagacttggctttgcgttcaagaatttttttccgatccttgtccagttttagcctggtgataaccaccttgcttgggtgaatgcccacgtggacagttgtgccgttggccttctcacgctgcacccgctcgatgtagatgacatatttctttctgtacacctggactaccttgccaatttgctgacctttgtagtgtcctcgaactacctggacctcgtcgtccttgcggatgggcatggagcggacattgtacttctgccgcagctccttggagagcggggatgacatgatcttcctgcgcacgtgtgagggggcattgaagtgacgtttgcggtttttactgcggtccgaggtaacgaagggattgaacttcatggtgaccctccggctactagctgcctcagaccctgagtgcgccctcgtgccgaattcgccacccaggcctcgctaccttaggaccgttatagtactggc

SEQ ID NO: 143145 - DNA, 824 bp, Homo Sapiens
gaagataaaaggagatcacgtttattaagcattctgcacatatgttcactctttccacaatatttgcacacccagcgcatagtaaacacattaaatagtggcttttattactattagcagtggtagcagtatcataaaagtcctcaaggacaccacatggagagttagtcggagtcaccaggtgttccaagtttgcctttggcggtctcctgcctctcagctttcttcgaggttgctctggtacctcatcacctccaccacctcctccaccatcccgacctcagcctggccccattcctccccttcgagtctctctctgtagattttcatggctttgggcattttgttcacagctctgttgacattcccttgacctcagaattctggaggtgccttaattccgacttcccctatagacgcctcctcagggcaggaaatatgccttattcattcatcctgtgattccagtgccaggcccaggaagggcacatagtaggagctcagtcagcgctgattccctttcttctaccagcaaatcccagggatggaggcctgaaaaagaacccagtagaatttaggggagcagactctgtcctccaagagagaggggttggggaagaagggagacaggaggaaaggaggggagtggccctttgctatgcaggccaaaggatgcccgctgtcaccacacacaggcgcaaggtaataccagtctccatagggtgacatggtgctgactggttttactcagcgatcccaaggctgggagaacctctgagagcctcagcagagggccaagccactcttcctggtaggaaagcaga

SEQ ID NO: 143146 - DNA, 459 bp, Homo Sapiens
tttagtaaacacattaaatagtggcttttattactattagcagtggtagcagtatcataaaagtcctcaaggacaccacatggagagttagtcggagtcaccaggtgttccaagtttgcctttgggggtctcctgcctctcagctttcttcgaggttgctctggtacctcatcacctccaccacctcctccaccatcccgacctcagcctggcctatcagttctccaccaggtgaattctcccctctcatcctcggcaccagctcctaccccattcctccccttcgagtctctctctgtagattttcatggctttgggcattttgttcacagctctgttgacattcccttgacctcagaattctggaggtgccttaattccgacttcccctatagacgcctcctcagggcaggaaatatgccttattcattcatcctgtgattccagtgccaggcccag

SEQ ID NO: 143147 - DNA, 507 bp, Homo Sapiens
  misc_feature (354)..(412): n is a, c, g, or t
gaagataaaaggagatcacgtttattaagcattctgcacatatgttcactctttccacaatatttgcacacccagcgcatagtaaacacattaaatagtggcttttattactattagcagtggtagcagtatcataaaagtcctcaaggacaccacatggagagttagtcggagtcaccaggtgttccaagtttgcctttggcagtctcctgcctctcagctttcttcgaggttgctctggtacctcatcacctccaccacctcctccaccatcccgacctcagcctggcctggaagaaagtgcaatgagtgtggaagcacaagaccgatgcttccaccccagctttgccctgnnnnnnnnnnnnnnnnnnnnnnnnnnnnnnnnnnnnnnnnnnnnnnnnnnnnnnnnnnnctttctggctggcttcgtttattgtgagagtcaagagaataaacgtttgtgaaaatactttgaaaacagcccccacctatcagttctccaccagg

SEQ ID NO: 143148 - DNA, 1119 bp, Homo Sapiens
  misc_feature (672)..(672): n is a, c, g, or t
  misc_feature (679)..(679): n is a, c, g, or t
  misc_feature (685)..(685): n is a, c, g, or t
  misc_feature (694)..(694): n is a, c, g, or t
  misc_feature (819)..(819): n is a, c, g, or t
  misc_feature (940)..(940): n is a, c, g, or t
  misc_feature (967)..(967): n is a, c, g, or t
  misc_feature (1039)..(1039): n is a, c, g, or t
tactatgttggtgctactcaccaaataggatgcatgtacatcttgaatatacagcaacattcaccctcagctgattgtatacatttaagtgctgaagacaagatatataacaatatgtggctgattttttttacctttatttgaaattctagtttagtaagatcttttgattttgtgcacttaaactcccttattttcttggcaaagtctagacacaaatgcatttaacatgtttttcacttgagcttttacatttggttttcaaaagagttatgaaagataattagttggttctgcagtaaaaaactgcttttgcctatttcttccagctaatgattaatatctcatagggagatttgacattgaagcagcactggtttttgttgcttgagtaggtctttcagcgattttgcctgaagagcatgcttttaaaataatatcgttaagagtaaatgatgcgctgggtttatggaaatctgctttatagtgtgccttcttttagggtgtgagtttacactgaattgagaaatcctgatttcaccaattacggtggtggctgttgtactctctactcccctctgactattgttgaatttttaaatggaccattcaccaggcagccgaacacctgctctccgttccctctccttcactggctcccagtgtgatgcncagttgntttggnctctgtttntgctgatgctgcataactgttggaggtgggggtgtcttgccttccctaacataagaagaatttgtaatgtctttggatgtggcattccacctcattaggtgtcttaaaagatatcagtgaaatcncagatgtaatgtgcctagcatagagccgggcatgtagttagcattccgtagttcctccttacagtcatgcctgttttctaattccagttatgccatcaaggaatcctgtgatcttggattnccttgacctttctttcgtgtcttccancatctgttatatcttgaggtagtcccagaggaggaggggacttggcaattatcttgttgatttaaaccgggnccgcgagtctcgcccagccccagcctcccaacccactgctgccggccccaacttaggcgagcgcagtcgggacccttctg

SEQ ID NO: 143149 - DNA, 512 bp, Homo Sapiens
  misc_feature (466)..(466): n is a, c, g, or t
tttttcaggtgtggcaaaatacttattacaaagaaagcaactgcaaccctagagaggggtaagccttctctgggcaatagtcatggacatttacagaggggaaggaagtaaacgttaataaataattctgtaaataaatgctagtacatcataataacataccacttagacactaccatggctttacagcaggttttctctaattcactggaaccatgctattcctgtagagcagctgattctttggtcatagtaccttcaacaaataaactatggaactagagaaactttctaagggaggaaaaagaaaaatcaaagtgatactattagttctgaagttgtgccacttgcggagattttaactttagggattacagagtttcaaggttaggaaatcacaaagctctaggtctcagtgggctaaactttcactcctttctcttcctctacagaagaatattctgtntatcaccctgaacttcaaagggactgtaactggaacaagctcatga

SEQ ID NO: 143150 - DNA, 506 bp, Homo Sapiens
ttttgagggaagcagcggtctctgacgccggctttattataagcatgaggtggcacgaggcaggcgttggcgatgccacctgggggtcacattgagtctggagcttccttcagcccaagcgctggcagtgacggggacaaaggtctaaagcccagggaaaaaggggaggcgccagaggcagggccatgcttggcttcccagctggccccagtgcagtgggtggcaccgccgaggctgctgttacggctcatcttcattgatttgcctgcgcttcttattgcccccacagcggaatcttctgctgaggaggatgaggagccccacgatgaaggccagtccagcgaagatcaggcccccattgcgaacggtctcatagtcatagtagaacgggtccacgtcccccttggggctgccgccaccgtccattgacaacccagtcatttccccaggtgaatgggctgcctccactcccctcttcctgctgtctctgctttttggagagtccc

SEQ ID NO: 143151 - DNA, 826 bp, Homo Sapiens
tgcggccgccgagtccgtccacatcgccaggccaggagtcagaacaaggacgggcctgtgatgtgtctgtctatgacgaggaggacaatgtcctaaggaatggagcggaagaaagtgaagggaaccaggtccctggattccatgtggaacagtagcccaggatgtgcactatggactgttacaagagagagacatgatcttccttaaggcattgatttgtcatgagtctctttgttatagccacttaacgttaccttaatacacccacttcatggataagtaaaactgaggcttggagaagcccacattgacacagcaaagaaggctggggctcttgtgctggttaaatggaccttgatgtcttccaaatgttttcatgctggattctgagccactctcctggctgcaactctgaggccgggcagactttccgctggaaagagaactcaaatactggtgagaggtggatttgaagccaggagccccaggttttggctctgcaggtttgcacccagctctgtggtgtatgccctcacaggtcacccaggacctcctgtccaggcttcttcaggccacccatgatggagtagatttgaggaatgaggttttcaaagcagttagtgtgcgggagagtaaccctggggcctccggaaccagaagggagggatttgggggctggagcttggcagtccaggttccattgtcctcatgttctccccactggcctggcctgtcactccagtctctgcataggttgtcacatggcattctccctgtgtgtctctgtgtctcttctcttctttataaagacatagttataatggat

SEQ ID NO: 143152 - DNA, 532 bp, Homo Sapiens
tcagttttacttatccatgaagtgggtgtattaaggtaacgttaagtggctataacaaagagactcatgacaaatcaatgccttaaggaagatcatgtctctctcttgtaacagtccatagtgcacatcctgggctactgttccacatggaatccagggacctggttcccttcactttcttcctctccattccttaggacattgtcctcctcgtcatagacagacacatcacaggcccgtccttgttctgactcctgcaggggaaaggtgggcacaggggagtcagggaaagagaggcgagaactggagtcttggctgcaacagccagtgagtgcattctcagttcaagccactgcactgggctccagggacttctttccactgttattgattgcactctggaatgagcttcttccaccttcctctaattcctataaacaagaatccactgagacagtccacattccagggcccctgtgctgggccctgtccaaggtcctggcctggcgatgtggacggactcggcggccgc

SEQ ID NO: 143153 - DNA, 671 bp, Homo Sapiens
  misc_feature (109)..(141): n is a, c, g, or t
tttgactattaacattttattgttatacagcttaatggtggaagataagactgtggtcaatccatatagaaaattaagaagaccatgttttagaatattttgcagggcnnnnnnnnnnnnnnnnnnnnnnnnnnnnnnnnnccttcagtgtggtccttaagcatcaatgtttggtggttgtttctagcaagtcttttgcttcatttattttggctgctacgtaaggagatccacctttatctgggtgattcaaaatcatgactctcctatgagctgttctaatcttagccttgccagcagatgggcttacacctaaaataagaccagcttctcgcctactcattttctgttcaaatcctcctttatagtaggatgaaaagctaggagttgaaatcttctttgcagtttctgtgataacttgttctagaggtttccagatccgaaatgcgtagcgacctgcaaatgcaagagctgcaacacccagtcctacagctatcaaacttcttaccagtctctgctggtcgacgtcggcgtctggccgtttggccgagggctgcaagtactcagcgtagcgcaaactctcgccaactggagcgatgacaccacgggcagccatggcaaggcggcccggagactcaaggcgccgcggcagtgactacgaggcggccgca

SEQ ID NO: 143154 - DNA, 220 bp, Homo Sapiens
tacccccataccccaatacctccctcacagcttttctccctcttgagccattcctgcttgtctccttcacccatgaggctgcatgcctctccagggcaaggagtagacttagttctatgtctctagtgcccacttagggcttcacacagagaggttgcctggatgtgtagctggggctggtgatgaaagggaggtgcaggccaggcgtggttgctcacca

SEQ ID NO: 143155 - DNA, 470 bp, Homo Sapiens
ttttactgtctttatataattcatttggcactgttttatggcacgacatcattgatcaactatatttttgcttctatctcaaacctttctcaggccgtgtttttgtttttggcagtgttcttgttgcctagcacagtgccatctcacttatttgttgattctgtttccttaaaaacaaagatgagaccaattcaaatcctcattactgcgggcagcaacaaatcatccaaactctggcacttccagttctttcgagctttcctaccaggtcggagggttgtcttaaaacttgagggagatgaactgagtaagcgattacactgaaagcatgggagggaaaggacgttccaaacgtccaatccatcatccttttgcagcctcttagtcactgggattttgaaatctctttccaaagactagctatggccctaaattggaaataggctacttgagaacacagtggattcata

SEQ ID NO: 143156 - DNA, 621 bp, Homo Sapiens
caacaatgaagatatctgtattaaggactatgctgggtaagtgattgcaaggaggaagtgctttaatgcccctcaggtgctcgactaaggccagggaggagagaagaattctgatgtgttacatattcttttcctgcaaagtcaaaaatgaaacaaacgtcttttcttctgtaacatatctatccaataacttcttgaaggcaatgttttcttctgtaacacagctatccaataacttcaaaaggcaatctttttaaaatctccttcccacatataacacacagcacaaaaatgtgatgaatttgtgttgtcacgaaatatcaaaaatgtcaatgaggagaacttgacaagtcccggggatctgaatgcccggagtcctaaactgtacctagagtcttgcagcgtcatagccagaagggacttgcgattcttgtgcccactccactctacggtcccgttccctctttcgtttttcagaggaagaaactagtgttcagaaaggtaggggaaggatctgaaactggagctaggctttttgatcttcaaactttttaggtgatttgctggatgagtctgctcctcctcttttgcaggcaggaaagctgtatagaatgacaaact

SEQ ID NO: 143157 - DNA, 574 bp, Homo Sapiens
  misc_feature (111)..(127): n is a, c, g, or t
aatcctctctgggtgagtagttgtggaaattgccctaatttccacatctatgtattaatgaatctatattacgtttgcgtgaggaaaacacctctgtgatgcgagggtaannnnnnnnnnnnnnnnngaccacagaagtttttattgccctcctgctccgcaaagggaccttgcttctgctggcttagcacctcaagacgtctgtgatgttggtctcagacaccactttgccgtccactatcctgtgggtgttggtcttttggatgctttacaggtatttgctgctgtccagaataccaccaagattgaagtcctccccatcttctagcaggcggcagtaggtggcaatctctgtgaaatgggacacagagatccaggagccccagaccccacgcctcatagaagctcgccgcgctgctgacctgctgagcactttagctgggcgactggacagatcccagggacaggtagtagttgatggagaaggtgcggagccagtggtgaagctcgctgtgtacggggaggaaagcgagaggacaggactcaggttttgccgaggtcctgaagataatta

SEQ ID NO: 143158 - DNA, 524 bp, Homo Sapiens
ttttaaaaaagattacaaaactgaatttattgagattcacacaagatgcacttataaaattagtactgaatgccattaaaacagaagaaatgaacataatcccgaactcccaacagcatctgcaaaggaatggaaatcttctgaaaatgacagcgcagtaacagaataattcaagcggaactgaagatctatccaaaccatgttcctgctctgaaatcagggttgtgtttggcaaagctttccccaaactattccattcacggtggcattgttccttttgttggtaaagggagatggaaaaaataattctaaaatggggctccattaaaacacacacaaagcaattaaaacctttttcatttttaacttaaaatacttcctggtttcacaaaggcatgtccatacaatttcctcaacattaatcttcagatttctttagttaatgcaaaacattaaaattcacttacttttttgtatttcaaatgaacaagtcagaacattaaagcttgctttatatttcatcc

SEQ ID NO: 143159 - DNA, 652 bp, Homo Sapiens
  misc_feature (511)..(511): n is a, c, g, or t
  misc_feature (575)..(575): n is a, c, g, or t
tttggctgtttttagaaacccttctggagggaggattctctctttattgatttggataaggatatttagttgtcaggcatcatagcaagccggggggactttggagcggtcagacagggggacagggcagagctagcataactcaggctgttggggccagtggtgggcatgttcacagggctgttggcagagggcaaggggagggtggtcagcaccatgccaccctcatccaggaagcgcttgtaagggactggagcatcatttcggaggtcctggaatgccaggtaggcctggaatatccagacaaggatggagaagaaggtgaaggcgatggctgcctgggcactgctgctccccaggaggaactctttgggcggcgaatgctgcctttggttggccaggaagcagaaacccatgaaccagacaactgcccagagaacagccaggatgaagtccaggatctggaaggctgtcttgaagcgggtgccggcaatgcgggtctcctgtgtgntccagacgaggaaggccaggcagctgaggaaggccaggaagccggctccacggcatagctgcangccacgctgttgctggtgagaatgcagtggagctgcggagactccattcttgtcttgtagcccgcgggcagcagggc

SEQ ID NO: 143160 - DNA, 494 bp, Homo Sapiens
tgaataaaacaaagagccttactctcctagaacttgtgtttctacctggggagactgtcagtaaaccatccacaaaataaatacagcagatgctgttagaagatgatggtgctatggtgtgctgtggaaaatagagaaagtagagggaagtgagagggattgcgtacactaggattgtgactttacacagaagggtcagtggtgccattttagcaaagatctgagagaggtaaaggaataagctttgcagaagtgtgggagacaaatgttccaggtacagggaatgaccaacgccaagaccctagggtggcaatgtgtctgctttgagttctagagaaggggtatattatacatcgctttttgtgactcactttttggcaaacattatgcttctaaaatgaacctgtattttggaatatatctgtggttcattaattctcatctttgtacagtattctattatataaatacaccatgatttatttagtcaatta

SEQ ID NO: 143161 - DNA, 464 bp, Homo Sapiens
ttttttttaatgagtttgtccatcagattttatttctggccctggttcaacaacgtaatttgtgtaactgagcttttattttcccctggcaagctttttcagtattgtcattggcctttgtctgatccttactggttcttgagaaattttttgtagtcttgtaagtctagtgataattgaatgccctcattatgggaagacagcattctgttcttcattgctctgaattgagagtatcattgcaaagctttgcacaacctatgtttcctgggtaaactgccatcctcttttctctcgtgctttattgttttctgtgggttctgcctaataacatgtataaaagttaatttttgatcattatattaatatttcaaaatgatttaaatcttcttgatggataatgtgcacttgagagaaatagaaataaccacatgcaacattccctatgcatctttcttccctca

SEQ ID NO: 143162 - DNA, 949 bp, Homo Sapiens
tatttcttaaacccaccccatttcccaacttctgctcaactccagatttacccaatgccccccttctaagagccaggaccacttagcctcaactaaaatgtcccttatgtctgtttcttactgtcttcctcctttggcttgagagatgttattgattttgtaaaagtactggccaatacaccacaatggagacataaattatgtcataacagaattttacatatgtttccttatattatgttcattaatgtattacatgccttaataatttcactcagttaaaaaatgatggtatgatgctttaaagctgattcaatcatgattttataagcttatcaagagtgaaaatagaagactattaaaaatagctaaaaaggtaatgtgtcatagtgtttaatgtttctgtaattgttggtaaggcttgtatctaagtctgatgcagaattcttaatggcactcaaacagttcttttctcagccacatggtatccactgatgctatgagtctggaagagactggctatgggtaccacttcttgtcttcagctgtgactgtgcaatatcagcaagtgcgctttgtatcttctccagaagcatgtctcctcgataaacaacatcctccagacatgtagcagcttcatggttttcttcttctagcttatacaagctagcagcctgtaaagcagctgtagattcttcactgggtaaggaatctatcaaaacatcaatgtcttttgctgttcgtgcaatcagtgctgcaaaaagctgggcatactcttctgtagggttagctggctggtctttgttaattgctgtctgaatattattgaaagaggcaggaggaccacattgctgcaatactccaatggcattacaaaactgatctgcaagcgaattcacagcgtcctgaagctgcgtgagccgatccgccatgttcctgccgcagcccc

SEQ ID NO: 143163 - DNA, 722 bp, Homo Sapiens
tttgtggggaaaaagggtgtttattaaccaacggcagggggaggagctgagcccaggctccccactctgtcacatgcctgttccacccacctggttgtaagtgggggcattcctaaagaagtgtagccattctcacaataaatacattcattgtggggtggaggtgggagaggttgggtgaagggcagtaaaaacccgtgggattccacgttctcagctacaaaaataacagtcatcctcacccgaggggaatgggggagctcagtcagaattgattgtcccatataggcctagagacttcagaggcccctggcccctgaaagtgccccggtgaggtaggacaggggtaggagctaagcgtccaaactcccagcctctgccctttgcatagttccaagaatgggcttcatgtgccagttgagacatcagatttctcctccctttccctgctgtagtctagaggaagcaaatgcttgattcccccaaaagagaggctggctcattgagtgcagtgttggtcatccatcctaggcaagggcctgtgaggacagttaaactgggagggggatctccctctgaaatgtccacggactaaacccaacagacaggtccaagacagcaagggaggctcagaggtgcatgtgagtggaaatgtaagcacatgtgtgatacaggtgtgtgttaccacatgtgcatggggatgggacatgcctggagctctg

SEQ ID NO: 143164 - DNA, 492 bp, Homo Sapiens
  misc_feature (14)..(14): n is a, c, g, or t
tttacaacatttgnttgtttttatatttgaagaagaagaaagcaatgggaagaaaagcattagggagatagagttttgcatggctgccgtgccctttcatttaaatgactgaccaggtcagcatgttgcataaggacacgggcaaattacttctgctaaccgaggcggaactctctggtagcccaaattccagtgctccatccatccagggaggtgtctatgagatgacaggtcatcaaggcaaataatgagttgtttgtctccacggcatggatcctcctgggatcggaggtgtcatctgacaaggcatcatgggctcttgtgacgaacgatgaagaagcagggatttcatgcagcatcagcatacgcacaaggctgtgttgggaagaacaaggacagggctccagagaggactgactgcagctgcccctttaatgctggtcgcacatgcttgcttctgtctggctcccctcccggactgcatggatagct

SEQ ID NO: 143165 - DNA, 478 bp, Homo Sapiens
cagggtgtttcccctcgctccagctgggaaatcagagccggtttgggaaatggaaatgctgccagggaagccacagccccataattctccagcatcacatcctggtacagggctctctgagcagggcccaggccgatccattcgttctcagagaagtagacggccacatcctcgaaggtcactgacaatcccggcgcgccctgggctgcgcgggctgtcccgtgagcagctcgaggacaaggccgaggcgtgtcccgctcgccagcgccacggccgccatagcccaggtcgccctctgggaaagcgagggcgcgccagaccggaccagaggctgttggggtcgcggaggagcgctctgcacctgggcaggcctgacacggctaccctgcgccctgcagccaccggagtaagaccccgactccactccctgcccgccccacgcccgactccccgtgctccacacccggggagcggccgc

SEQ ID NO: 143166 - DNA, 425 bp, Homo Sapiens
ttttttttcaggtagaaaaatatctggtctctaatacggaaaaaatgggatgtttcacagtatcaacagtgcttgctggttctaaaaagtagccccaggctgccaagggattatgagccagttagagatgtcattctctggcctgtaggagttaggatggctgggaggtagggagggagaaggagtcccattccagaggcctcgggatgggtttgcagaagtggggtggatgggccacaataaatataaataaatttacacaaggtcacggtacccggcatggcccaggaatctgcgctaataaaattctaacagactatcggaaaggtggggctgaaggccacctggaccggctcccatttcagagttcagcttgtcctgtccaagagagaggctcaagcttctccggctccatttcccgccct

SEQ ID NO: 143167 - DNA, 394 bp, Homo Sapiens
gaagggcaatgagcaaggtaggctgtgtcactgccgccgcgggctcactcgcagcgccagccgaggagcgccacgggctgctgaacccctcggcccgacccacgcgccgagggctaggataatgcgcctgcgcggccgtcacgtggtgagggctccgcgcaaagcgggttaaaagtcacgaccgcggagagcccgcgagcgtcctgctggtcggtgcggcgctttccgcgtcctttaagacgagtttgaccgaggccgctccgcagttcccgcccctcggcccagctcagctccatgaacctagcggagccgcctagtaccctttctcgccgaccgcacaggcgcgcgaaaccgcgtctttcaactgacaatgaagccgtagccgcgcagctcg

SEQ ID NO: 143168 - DNA, 837 bp, Homo Sapiens
  misc_feature (209)..(212): n is a, c, g, or t
  misc_feature (258)..(258): n is a, c, g, or t
  misc_feature (260)..(260): n is a, c, g, or t
  misc_feature (263)..(264): n is a, c, g, or t
  misc_feature (267)..(271): n is a, c, g, or t
  misc_feature (273)..(273): n is a, c, g, or t
  misc_feature (276)..(279): n is a, c, g, or t
  misc_feature (281)..(302): n is a, c, g, or t
ttttccaaacaccctctcgtggtttccccccccgggcggctttttttatttgggtgggagattccaaaccccttttttcttgtccccggggttttccttgggaaacccggtattggcccctttttccctttcccttctggggccccgcgcgccccaaaggaaagggtttaaaaaaattttttgaggggcccaggcgggcccccccagannnnttatcttggaattttacactcccaaacgtggtgttgcaggtttctntntcnnagnnnnnangtnnnntnnnnnnnnnnnnnnnnnnnnnngaaacatttaaaaatttatttccaggaattccacctaaaacaatcttctatatcattctatattttggaaaacagtactttgggagttccttctggacactttgctgtgattcaacaccacattcccggtttgaaatttagttccttttctaacaggtgtctatgtttcatgcagaacttccatagttccttttgctgaagatgccttaatagtgatgcatggtctcaattagccattggtgtaggcctaatctccgtgtgctggtgctacgtcaagtgtggtggtggttaggagtcaccttccgtgtgaggtcaagcgttctggctcccgttgtccttgaagttgcatctcaggcttctgggcatggcagagcctgcgttcctgtgactcggctgaggccggtgtgatggagacttcccggcagcctcccggacctggtctctccaaggtcagatcttgaaacttctgggcacccatgcgagtgcctgtcctggtgtgccgacttgctcttggtctgcgaagcctgtggacccc

SEQ ID NO: 143169 - DNA, 517 bp, Homo Sapiens
tttgatgtggaaaatgcaataatttttcctgctttattgaggaatgattgacaaaaatggtatatatctacagtatgcaacatgatgttttgacatatgtatacactgtgaaatgagtaccacaatcaagttaatatatccaccacctcacaattatctttgttgttgttgttagtgaaaacatttaacatctactctcttcacaaatttcaagtatataatacggttctattaactatagtcactatgctgtacattagctctccagagcttattcattcttcctaacagacaccaaacatctccctatttcccccacgtcccaggccctggcaaccaccatcctactctgcttctgtgagtttggctttttgaaattccacacatctgtgagatcttacagtatttgtctttctgtatgtggcttatttcagttagcataatggtcctcctggttcatccacattttttcaaatgacaagatttccttcttttttaaagctgaataatattccat

SEQ ID NO: 143170 - DNA, 552 bp, Homo Sapiens
  misc_feature (376)..(398): n is a, c, g, or t
  misc_feature (446)..(446): n is a, c, g, or t
tttttgttgaatttttatatttgtttagtaacaacaccacaaaaataataccttgaggttttatataatttctttcttacacgaacacatttatcctcacaacatccctgtgaggtagggagaaattaggtattatttttgccaatttcgggagggaaaatcgaggcacacagaggtaaatcacttgcccagggtcacaaagtagagtaaaactaaggggtagggatgcccgcgggagtcatttaagaacttaaacttaggaactaaaacattttcaaatgtggggaaatttcactttcaagaaagctagaaatgaaccacctcacagtatcaaagactagaatatttatgtttttaaaagtaatctgaattctcnnnnnnnnnnnnnnnnnnnnnnnaaatgagggactcattctgtcacccaggctggagtgagattgtctcanacaaagaaaaaagaaatgaagacttgtttacttcattgagtaaatgattactgaacactcactatgtgccaggcatgttctcaatatgggggattcacaggtgata

SEQ ID NO: 143171 - DNA, 498 bp, Homo Sapiens
tttttttaacattcacactctgcaaatttgtttttcaaggggtctatacaatactctgaagactgtgaaaaaataagaacttttggactcagagtcatgtttttcgcaatttaattgtgtgccatgtatcttggatcagtatcctcattgtatgttttatgtttctcagacaattcatgaaatgacatgacaaatattggccatgaattccttaaatgtgcacttgtgccttgtgtttgacaactgacttttgactaaaggaatgaatgaatgttggaggagatgaatactgttgaattcaaagggtaacagagatgctatgcagtacgtagggaatacccttggaggatgacagcctttgagagctagagtctgacagggaaagggagcctgagaagggaagggaggtgtcctcatctccccagggcctgatgacaatgttttttgctgtaagtgctggatgcctttactcatcttaatttcaaattgattcttcat

SEQ ID NO: 143172 - DNA, 481 bp, Homo Sapiens
tttttttcttatccataaagtttaattagttgcaaacaagaaagggaaagttggagaagctggccagaaaaatacaagaacaggataattctgcatgtccaagagggagaaattatgggtaatttcttcagagtgtcgctttcaagatgaagccagttgcattcgcattctttgggcactctgcttctgtagccatttcctcgtttgcaataggaagagtttgaactgagctctattccaaacgttcttctgaagttatattttgatgttaagttcaaaagcttgattggggtcatgttgagaaaagacttgactgctttgcactaagaagtttggtcttcagacttaataaggagactacatctgttgttctatagttggcattttcttaggatgccagaaaggatctcatcacttggtatgtcccacatattagattgaaaaaaaaggagaaggaagagggggtgcagttgccaaagga

SEQ ID NO: 143173 - DNA, 518 bp, Homo Sapiens
  misc_feature (250)..(292): n is a, c, g, or t
ttttaattaacaataataaaatttattctaagccatgactggctttttctgtcatgttcacatccacttctttgtcatctattcacttggggctgcttctgaattagggaagctgcctgaacccacactccgatggctcttcagaaccaccagctcagctctgcagtcccagaagtgcctcttaagttatcctgttctttcctttgagatcctaacttccagctggtcaacaacataccacattgctccnnnnnnnnnnnnnnnnnnnnnnnnnnnnnnnnnnnnnnnnnnnctagtttgctggctaattgcaagcttcatttttctctcctgagaaaggcaagatatctgagaatgaacaccatttgtttttttaagtaatccttagagctgaaagttgggaggctggtcgtttctgaatgtaggtcaaatgctaaacaagcagcaacttctctgcagagtgtgagagtcttcctggtctggaaggatccctgaagattctgctggattctctcctg

SEQ ID NO: 143174 - DNA, 881 bp, Homo Sapiens
  misc_feature (505)..(573): n is a, c, g, or t
tgtcttccataggaagaattttctaacacaacaaacaggtgaggacacgactcgtctttacaagctctctgtggtgcttcccagcatggagcagatccacaaaagaactctgaggggcgtagcaaggagaccaaacacaggcacccagggagagcgcctggcatagccacagggccattgagatctgccacagggggtgtttgcccgctctcagtcgtctcccgagctgcagagtccccagcctggaaacaaggtttcagcattcccttacatggtccaggcgccgtcagcgaggtgagcaacggcacgtcgaggagggcaggctgcgtctggctgctgcctcttctggtcttgcacctgcttctcaaattttgatgtgagtgccacttccccacccgggaaaggctgccgccaccaccaccaccaacacaacagcaatggcaacaccgacagcaaccaatcagatatatacaaatgaaattagaagaaacacagcctcatgggnnnnnnnnnnnnnnnnnnnnnnnnnnnnnnnnnnnnnnnnnnnnnnnnnnnnnnnnnnnnnnnnnnnnnttgccttgcagatatttaggtacaatggagttttcttttcccaaacgggaagaacacagcacacccggcttggacccactgcaagctgcatcgtgcaacctctttggtgccagtgtgggcaagggctcagcctctctgcccacagagtgcccccacgtggaacattctggagctggccatcccaaattcaatcagtccatagagacgaacagaatgagaccttccggcccaagcgtggcgctgcgggcactttggtagactgtgccaccacggcgtgtgttgtgaaacgtgaaataaaaagagcaaga

SEQ ID NO: 143175 - DNA, 464 bp, Homo Sapiens
aaaatgcaggaggtctatttatttgtcaagtcaacgtttagtaataagggagaacaaagtttaccctgctatcagaaaataagaaatcagaatccagtcatatgggatgggagaagctcgcaagctattacaactgaactcaggaagcagataatcagctaggaaagaggtacccttaaatgccaggctgtatctgagagtgtatctcccttgatcagagcccagagtacaagctaaacaattccttcataaatcagcacacatcagcttctaaaatcagcaatatgtctccaaacatcttgaactgacattaagaaatgctgcaccattgagaaaatggtttccagttatttgaacttaaagaattaacttgttgaagcacatctttaatcattgataagttactgaattcaaagagaagtaataatgaatggtaaaccaattaactaggaattatatttcaa

SEQ ID NO: 143176 - DNA, 1167 bp, Homo Sapiens
ggggaccgcgtgccgggtgtcatggcggcctgcaggtactgctgctcgtgcctccggctccggcccctgagcgatggtcctttccttctgccacggcgggatcgggcactcacccagttgcaagtgcgagcactatggagtagcgcagggtctcgagctgtggccgtggacttaggcaacaggaaattagaaatatcttctggaaagctggccagatttgcagatggctctgctgtagtacagtcaggtgacactgcagtaatggtcacagcggtcagtaaaacaaaaccttccccttcccagtttatgcctttggtggttgactacagacaaaaagctgctgcagcaggtagaattcccacaaactatctgagaagagagattggtacttctgataaagaaattctaacaagtcgaataatagatcgttcaattagaccgctctttccagctggctacttctatgatacacaggttctgtgtaatctgttagcagtagatggtgtaaatgagcctgatgtcctagcaattaatggcgcttccgtagccctctcattatcagatattccttggaatggacctgttggggcagtacgaataggaataattgatggagaatatgttgttaacccaacaagaaaagaaatgtcttctagtactttaaatttagtggttgctggagcacctaaaagtcagattgtcatgttggaagcctctgcagagaacattttacagcaggacttttgccatgctatcaaagtgggagtgaaatatagccaacaaataattcagggcattcagcagttggtaaacgaaactggtgttaccaacgaaggacacctcagaaagttatttaccccttcgccagagattgtgaactaatactcataaaacttggctatggacgagactctatgcagttttacagcattacgagctgacaaagttgccagagcatggaagccggtcaaccaaacagtccgcagtgaagaataccggggagcgaaaccactgacaagaacacaactcccggcaaagccggatccccacgcaaagagcccgacatccgcacaggcgcagcaaaggccaaagtcgagcaaaaaagggcggacaggagaacacacggccacaggcacgcgcacggcaccccgaagacaggacggggca

SEQ ID NO: 143177 - DNA, 855 bp, Homo Sapiens
  misc_feature (637)..(649): n is a, c, g, or t
  misc_feature (718)..(781): n is a, c, g, or t
tttcactttggaaaatttcaactttattgttccaaacatgagaaaatccaacagttgcaaattatgccagcagttaaatgtgaatcctactcaagaacatgttccactggtagttttgattaaactctctactctgatttaactgttctctcttccatttgaaaaatcagagtactttttaatcagtctttgctaaacagcagctattgctattcaatggagacggtggccaccatttcccctgcatcgtctctcctacgtaatcagtccctgatgaactctcttcccataaaaatccctgtgtcctaaagtcatggcgtgctctatttcatggtcatttgtagagcacagcagcactgtgcctgtcaggaaaagtgtgtgctaactgcaataagcatgatgactgccatcacggttttgttattctctgtccacctccatggtctctaaatcagacaatctttaatctgaaaaggcagtgtccttattcctccaggaaactggatagaaacgctcctcatctaatgaagtcagccctgtcatcttactgattctttcccagaccacagtgaaaggcctgtagggaaggcacatgaagaaatttcaaagttcaggttgaagtcataaaaactagccnnnnnnnnnnnnngagacagggtctcgctctgtcacccaagctggagtacaaatggcaagatcagagctcactgctcaaacnnnnnnnnnnnnnnnnnnnnnnnnnnnnnnnnnnnnnnnnnnnnnnnnnnnnnnnnnnnnnnnnacatgccaagggcctggcttatttttttattttgtagggatgggccttgctacgttgcccatacttatcttgag

SEQ ID NO: 143178 - DNA, 457 bp, Homo Sapiens
catccttttcatagggccttttgaagaaaaaaagttcatttttttaattgactgtgcttttgatgtcatatctaagaaatctttgcttaatccaaggttacaaatattttctcctgttttttactaaaagttttatagttttaggttttacatttaggcctatgatccattttgagttaatttttatatagaatttgaggtatggatggaggttcattttaaggattctcctttatctacttaactgtctttgtatatttgtcaaatatcagttcactatatgtatgtatatgtaagggtctatttctggaatctctgttctgtttattgacctatacatctattctttcaccaatacagaatagtcttgattgtgtaacttttaaaatcttgaaatcaagtaggtgggtcttgcaactttgttgttcgttttcaaaattattttcactttcctagt

SEQ ID NO: 143179 - DNA, 594 bp, Homo Sapiens
gcggccgcctcccccggacgggctagctgccacagagcccgggctgctgcggcttcccccgccgccgagcccggccgccgccgaccggctggagaccccccggcccgccagagagcaggagggcgaggagcccgccgaggtagcacggctgctgctgcggctgctgctgttgctacccccgccgccgtctgtgccctggactgccctctccatggtccgtgggcgcccgggacgcgggtgcccgccgcggtggcggccccggcacggcggctgctgctgctgctacagctccggacgcccgggccgcgcgtgcctgctccaaatccccgggaaatgccttctcttccttcgtgtccctgcggcctctcaggccctcgggacactctaggaggccgatctgcagggtgggcacgccctaaatccacgccaagtcacccacgcattccttctgccaccctctcttggatccgaaggggcgaaagggaatctctgcacgtcactccccaccccttatccacctcgggacctggagggaggggcagcctcacccacccggtccacccggatatggacccgcccagcctgacaggctca

SEQ ID NO: 143180 - DNA, 478 bp, Homo Sapiens
  misc_feature (452)..(452): n is a, c, g, or t
gccgcggccagggccctgcccctccctccgcactagtttcccgggcaagttcggagcgggtggccggctaggcgagccctcttcgggttcctccttctcttccttcgtgtccctgcggcctctcaggccctcgggacactctaggaggccgatctgcagggtgggcacgccctaaatccacgccaagtcacccacgcattccttctgccaccctctcttggatccgaaggggcgaaagggaatctctgcacgtcactccccaccccttatccacctcgggacctggagggaggggcagccccacccacccggtccacccggatatggacccgcccggcctgacaggctcacacgcacactccctctctcggtcttccgcacacgatgctgcgccagacgctcctacacagtaacctggaaattatcaccggcggagcaaagtcacagctcanggaggccctccgcgttgtctggcgga

SEQ ID NO: 143181 - DNA, 936 bp, Homo Sapiens
ttaccacaccagcaggtatgctggggaagggccccccccagttggagttgcgctgacataggctctgctccagaggcggtctgactcagaagctccctgagagaggtgtctacttgaggtggggaggagtactatggttaatgaatacaagaaggtgtttcaggataaataggtccaggagggttaggtcattttggttttgacctattaatacttaacataaatgaagagttacataacagagtcagtctttccaagatgtgttctgtcatcatgagctgagcctattgggctggtgacatccagaatgatcccattcattggctggaggtaggacctagtgccgcagattgttctgggaagctggcagagaagatgatttgcacaatgaagtcaccactaagccactgcttaagtccagtcctcggccttctttttctgctctgtagtccaaaaacatttctttaaaagccagaaaatctgtgaaggtgagcagcatgtcgaatatgtcaccagccacttcatccttatggtgctgtaatgttgtggtgaaggctgccatgttgaactcaggaatccgctgcagcagctgttcttcaatgtatttttctaccaaagaaatgtattcattaaaaataggtgtgtagatgagtttattctcttctgtgtcttcaaactccaggtagtacttgtccatgaaatttctctgtaataactggaactcgtcatccatgataatgtcctctaaatatccaaccacagcatcaaattctgcatcagaggcggaggagaaagacagcgcaaagctctctccttctaaggcgtccatcgcagtcgccccgagtaggctccaaccccgcccgcggcccaactcgcatgcagggcccccggccgtaatggccgaattcccgggcatatgtccggtaccgtcgactg

SEQ ID NO: 143182 - DNA, 460 bp, Homo Sapiens
cagttctatgcttggcagcatatatgctaaaactggaaaaacaggcaaaaagaatctgtattctaagggatacgtaagatagagtgaaatagacttaaaataatattgcaaattatacatagataaatttcacgatttcttgattcaagaaaatgaaattcatttccatagttggctactgtaaaatgtggcataaaaatatttttaggagacatatctgtatttttaaattcttctgcccacatgtaaatgaaccagtaacaattaagaagtgtctatttttgaaattcacctctgatattgaaatagaacaacagactgtcattacatttcttaagctaagttgccagatatttacaaataagatataatttgtatccggacgttttcaactgtatctgctgctctcactggggctccggtgatgagagtaacttcggtcactttcactgtcagagcc

SEQ ID NO: 143183 - DNA, 572 bp, Homo Sapiens
tttttataataatatatattttaatatgtaaatgtgcagacatgaacaccataaaagatataatgaaataggtgtttacacctttatgtagaatcacataaatgtggtagctacaaatgcagactgatagaggaatgttgacttcttgtctcaaatgccatgaatagtgaagctgatgctgtctctgacatgtttttccagaatagcaaacctctgacaaaattctgaacaaaataccattttgttctcaacttacatcacagttacatttctggaaaatcaagtgtacattaaaactatgctaaaaatattttgtgtttatatatatgtaattagtttctaggctcagatatttataaacaggtttttcaccttcaagaatatccaacgggctattcaaaggtcatgcagaaggcacatgagagaactttttgtggtgatgggaatgttttatgccttgattattgtggtggttacacagatatataaatgtgtcaaacatcaaattgtacacttaaaatgggtacattttacttttgataaaccatacctcaaaaatggattattattat

SEQ ID NO: 143184 - DNA, 486 bp, Homo Sapiens
ttttcagaggggaagatttcactttattgttacatcagtctcacaaatgaacccaacacagccagaaacactgaaaggataaagtgccaatgcagagaggcctggcaacaggaggagggaggaatccagttcgtctcctccacgtccccagcctggcaatatatttctattacacaagagtgagggcagctgacataccaggcaacccattgtatagacactttgagctaagaaatagaaaattgtaccaggtagggtctgtgcagggcaagaaaatagaaaaaagtcagaaaatgttattttcccgagtcaggcatggaaatatcaaatgataaaaccaatatttttcaaactctgtcatttgagatagacatctaataaggaatgagacaggtctggtgcttcatgctactgcctattttcagaactatgacaccctttctcccacaccctcaatgtaaggtaccagaattttttaggactcct

SEQ ID NO: 143185 - DNA, 475 bp, Homo Sapiens
ttttttgccaagttagttaaagtttggatgaaaaacttccacaaaatggaacaaacaaacaaacacaccaacagcaggagcatttttcaggagataagaaatcaggagaaccaccaagtcaggtgtctgcagtagtctttgctcttgggaaccaaatcctgccctgcaacatgtacagctgttcccattgaaagtagcagaaagcagcactgttgcaccacaggaactgggcctcagggtcattcaatgatttgggggtgagtgagagctacagttcagcaggaattccttcctacacaaaagtgctccaaaggcaccacctgatgtggggaggggaaggggcgtgtgtggaatgggagtgtttgcacacactgccttcagcttctgcaccaagcctcttgcataagtggcaaaagaaaataattttctagcacctctgtaagagtcatcaaggataaggaaaccagcaagaaca

SEQ ID NO: 143186 - DNA, 585 bp, Homo Sapiens
ggaagggcagttcgccagcgtgcgaggcacaggtgcacgcgcaggcacacgggctgcatgaagcggcggccgcactcggggcacggaaagggcttctcccccgtgtggctgcgcccgtggctgcgcagctcgggtgccgtcttgtaggccttggggcatagcggacacgcatagggcctaggcttggccgcggagcctgacaccttctccccactggcttcctctgccttagcttctgtctctggctttggcttcacctcggccacctcttcagagcagtctgccggcccatgtgtggcagcgtggcgcgctgccctgggcgcgtttggaaatgtcttggtacaggacaggcacttgtagcggcggcccgagcgcttgtagccgggggctggggaccgggcctctgcagcctccacttccatggccttggtgaacggggtttctctgatgagacttgtgctgactccgtggcgtcggcgtcggctcctcgcaccgacggagcccggaccctgccaaacaggggccggcgctaggacccagcggggggcggggaggtgggaccggtggcgcggcgagcggaagtga

SEQ ID NO: 143187 - DNA, 983 bp, Homo Sapiens
taaagatagggctaggtacgaggcccgggtgtttaattcggcacgaggggggttgaagagagggactgactccgacgggggaggggagaagcgagggccggcagggatgggagggggagactgaactgggggggtggcggtcgtcggagggcgatttgggggtggagggctgctcagggtggatggatataggtaggtgtgagttttccgcagagggttgctggcttcgggtgggtgagactaagaccagtgggaaagtgtgtcaagtgggaatcagatccgtgtttggggtgggcgcggggtcacggctaggcctccgcaaatgaaactgaagatttgtaaacgctccctggcccatctcctagttggcttccccgaccaccgtccacaccaggcggcccaccccgctcctccctactcccagccagcctggaattcagcctcctctcccaggcttcctgcccaggagaagggggtggatctcaggagtgtgggcaggagcagtggggtgccccgggggagaaggtgtcaggctccgcggccaagcctaggccctatgcgtgtccgctatgccccaaggcctacaagacggcacccgagctgcgcagccacgggcgcagccacacgggggagaagccctttccgtgccccgagtgcggcgccgcttcatgcagcccgtgtgcctgcgcgtgcacctggcctcgcacgctggcgaactgcccttccgctgtgcgcactgcccgaaggcctatggcgcgctctccaagctcaagatccaccagcgtgggcacacaggcgagcggcttacgcctgggcgactggggcagagcttggtgaccttcagtgtccgaaggcaccgggtactcaccgctggctggggcctaagttgtgaacgttggggaaagccatgggaaccagggactccgacatgagggccaacgggaaaccctctgtccaggcggaaatttccgcaaccgacagaa

SEQ ID NO: 143188 - DNA, 683 bp, Homo Sapiens
tttttaaccaagaaaactaaaagggagttggtgaaagacatctttggactgcttctctcagttcctgctgtcagacaatctgaagtacttttaagtgtaacctgctcactaaccctcagcctgacacccagctatgtgtcgttgtcttgacactgtgtgggaagctttggttgggcaacacattgtcaaagttaaaatccaatgtatctccatccatgaggtcattccgaatgatggattccatgtcacagtctaagcgctcaatgaacatgccatccaagtcacttgggagcttctcctggtggagaaggcccattctgccatagccattgcagctgctcacggaggagtagccccccagggcactcatctgcatggggtggggcagaggcacttgtacaggtgtcttcacttgggtcaggcggttcatacccgaggtgtggggcatggtgcttaccgtgtggggcaggggacgcccgttaactgcagatgtctgctgagcatgtccagggtgggtatgggagctgggattcatcattttgttatgagatgcctggctgccataggttgacatgaccgaattagggcccatcatgacgttctggaccagtactcggctgttgggctgggctaccacatgatcaacatgtgtgataatgtcttaactgggacggagagtaaga

SEQ ID NO: 143189 - DNA, 499 bp, Homo Sapiens
atcttggcagatgttaaaaaacaacattagcagaaacaatgacatttgcaacaaatgaaaaataaagtaaattaagggactcggaaaagacaatgagggtaatttgtttgcaactctggttgttgattcactgggtgattggtgccaaaaagagtaaacaaccaaatatagtcactgaaaacagtaatactccatgaaagaaggaagacttgttctgtgatgaatcacagaagtcagtgttacacagaatcattcagaaggtttaattaaccagaaagccatcattatagaaactcatctataacaagtctaatggtatggacattgaagacagcattgtcctgggctccattgttgggaaaggcctggtttcatctagagttctacttttcagataacacccacttttcatatgccataagggctcatagatcttgggttcccattcttctccctggcttccgtattatctagatagataggaggtactggaaagaga

SEQ ID NO: 143190 - DNA, 432 bp, Homo Sapiens
  misc_feature (374)..(374): n is a, c, g, or t
caagtaaaagactgaaaggataagcaacaaaatgttaaacctgagaagagtttcaaaaacaaaatactggaaaagggcaacgtgcaaggaaagtatccaagaagaggaactataaaatgtgtcaaagattacggaataaagacagaaagatgttgccaaagctaaggaaacagaatttttagaaggagggagttgttaaaaacgtcaaataccacaaaagggaagctaaggaaactaacattttagataggacctattatgtcaggaacttgaactatattaatctcaatctctaccaagacaactaattggtatttctcatttaacatgtccaaaatagagctcttctttctcatcccctcaacccacccctncctgcagagttagccttctcagtaaatagcagggcttctctgccatgactctgctact

SEQ ID NO: 143191 - DNA, 381 bp, Homo Sapiens
ttttttaagcttggaaaattaacatttattgagtatctggccaggcactttacataaagtgttatcgccatccttagttcaccagaggaggggtggttttagagatgagggacagtctcagagaacttaggcgtaactacgccagcatttcactagtagtgaaataaatgacgggcgtgtgaagtccaggtctgtctggattccccaaagccccttacaccatacttggcaaagctgaagagcagacatcttcgtgcctccatcagttatgccctctgggagtctcagttcatcccttcacacgcgggatacttaactctgcgggatctaaacccgggatgcgagaacagagctggagagatttgacgcggagcgcgaaga

SEQ ID NO: 143192 - DNA, 521 bp, Homo Sapiens
tgttgtagaaaagtcttttattctatcggtcaggccccatctggcccaagaatagctgagcagagcccatccctctacccgctccctcctactccggcttctctttgtcctgcttctgctcctcctccagtgccaaggttcgctcacgctcctttaccagctggacgccacagtaggtgacaaacaggatggacagcgtggtctgggggaaccctgtgagtagcaggcgccgggcaaccagctctgtgaatttgaggctgttcaggctcacaaggttgtacatgatgatggcccagaagttcatggctccaaacagggcccggaccctacgggacatctgcactgacagagaggcctcaattcgtgctaggggcccccactctgccagtttttgcatccagagctcaaagttgaggccaaagcagttaaggaatgaccacaggtagacaatgtcacaaggcccaagccacagtgtggtgatggcaaatgtggccactgtggctgccagctctgggatcacg

SEQ ID NO: 143193 - DNA, 458 bp, Homo Sapiens
tttaaaaatgcttcaatccttctttatcatagaataaaaagctaggaaagcagctattataaatgggcctttgatgacaaagtttagttttgattctagaaagcacctaaaaggatagagaaagtgatggcttttaccctgtaattcaagctaagccactggcacctgattcatgacatgaagaggttcaagtggagagcttctcaaaatttttcagtggtaacagtctgtgatgctgtgtttaacatgcagtcattgtagtttttcctttgcagacatgccagtgacagccacaccattgtcaaccagagaatattccccttttcctgtttactcatattgggcttctgaagtaaggttctgtaggttccacagctaggataggtacttgaccctttcttgagagattggttgtcctgaatagtaatccaaaagacaagaaattgaagaaataccca

SEQ ID NO: 143194 - DNA, 1129 bp, Homo Sapiens
ttttttggcataaaaaataaagctagatttattatacttctttataagggttagctatatagggcaatataacatacaagtaactacataatatatacttacaaaacacatatgtaagtccaaaggaattttaaattctcaaagtatgttaagcttttaaacgatgatataaaatcttttcaatagccaatattatgtgatgatgctcttgccttcatatacttaattccttaataatcatgtttcattttctgttcaactccaggtatatccatgccaataccagtctttgggctacaggacgattcgaaggtctttaaggaggggagttgcttactcgccgatgataactttgtcctgatcggctcttttgtgtcatttttcattcccttaaccatcatggtgatcacctactttctaactatcaagtcactccagaaagaagctactttgtgtgtaagtgatcttggcacacgggccaaattagcttctttcagcttcctccctcagagttctttgtcttcagaaaagctcttccagcggtcgatccatagggagccagggtcctacacaggcaggaggactatgcagtccatcagcaatgagcaaaaggcatgcaaggtgctgggcatcgtcttcttcctgtttgtggtgatgtggtgccctttcttcatcacaaacatcatggccgtcatctgcaaagagtcctgcaatgaggatgtcattggggccctgctcaatgtgtttgtttggatcggttatctctcttcagcagtcaacccactagtctacacactgttcaacaagacctataggtcagccttttcacggtatattcagtgtcagtacaaggaaaacaaaaaaccattgcagttaattttagtgaacacaataccggctttggcctacaagtttagccaacttcaaatgggacaaaaaaagaattcaaagcaagatgccaagacaacagataatgactgctcaatggttgctctaggaaagcagcattctgaagaggcttctaaagacaatagcgacggagtgaatgaaaaggtgagctgtgtgtgataggctagttgccgtggcaactgtggaaggcacactgagcaagttttcacctatctggaaa

SEQ ID NO: 143195 - DNA, 496 bp, Homo Sapiens
  misc_feature (484)..(484): n is a, c, g, or t
tttttagaacatcaaatatttattatctcatacatctattcctgagggtcagcaatccaagagctgcacagctgggtgattctggctcagggtttttcatgaggttacagtcaagctgtcaaccagtcctacagtcatatgaaatcttgactgaggctgaaggatccacatccacaatgtcgcctaatttctgactggaggccttgggttcctaatggctgttggcaggaagcttcagtttctctccacatgggcttctccatggggatacctgagtgttctcatgacatagtagtggacatgtgatccaagaaagagcaggacagaagccttgtctgtcaaaatctagactcaggattgatataccatcaatctgctgtactctactggtcgtatagactaactctgataacatgtgagaaagaaatacacaagggcctaaatagtgggaggcagggaatgctttgcctttgggattctctantggccaccttta

SEQ ID NO: 143196 - DNA, 500 bp, Homo Sapiens
  misc_feature (464)..(464): n is a, c, g, or t
  misc_feature (472)..(472): n is a, c, g, or t
tttttatccatctcgtttatttgccaatagctgtaattttggatatagcggacatcccttcttcagttaagttgccactaaagaagggtcagggagacaacttcagaatttgggctgtgagaggagtaagtatggagaggctagtgggagggatggtgttcagcccctcaggagtaactgcctggccctcccagggggatgacgaagacagagatgtcatccccggaacccagcttgttgttggggagacgccagccacggtctcggggggtaccccgggcccccaggaccagagcttgggccagagctgtatacctgctgtggtcattaggctcataggccgacagcaccctgtccacagtggcagctacctcacagtcagtagtgacatcccacaggccatctgttcccaggactagcacatcatctgggcagtgctcatattgtgtcaggtcatacactcntacctcanggaagcaggaaaaaaagggcttgatggg

SEQ ID NO: 143197 - DNA, 812 bp, Homo Sapiens
  misc_feature (384)..(384): n is a, c, g, or t
  misc_feature (481)..(503): n is a, c, g, or t
aaaaatgatattgctctatatgtaatatatcctgaaagcattattttttgttgaataggaaataaaattaatgaagacagaggctagaaagcatccattaattaatgagacacacttaactacttatctctaaaccatctatgtgaatatttgtaaaaataatgaatggactcatcttagttctgtatataaatatattttctttctagtttgtttagttaaggtgtgcagtgtttttcctgtgtattaaacctttccattttacgttttagaaaattttatgtattttaaaataaggggaagagtccttttcacttttaaactactatttttctttccaagtcatttttgtttttggttcctattcccaagagtgataatttnggggggtaaccagtccccggcgcactgatcttgcaaaggagacttaatttcaaatctgtaattaccatacataaactgtctcattatacgtatgcannnnnnnnnnnnnnnnnnnnnnngtataaattaatttgttaattaaatatttcttaagtataaaccttatgaactacagtggagctacactcattgaaatgtaatttcagttctaaaaagatgtaataatcattttagaattaaaatttattctacttttaaataaattatgaatattaaaggtgaaaattgtataaattactttgattccattttaagtggagacatatttcagtgatttttagtaacctttaaaaatgtataatgacttttaaaatttgtagaattgaaaagacgctaataaaaatttattatttatttgtcatgactca

SEQ ID NO: 143198 - DNA, 1909 bp, Homo Sapiens
  misc_feature (692)..(727): n is a, c, g, or t
  misc_feature (1567)..(1620): n is a, c, g, or t
aggctggaccggtccggattcccgggatgtcttttaccttccaactatgcctgtctcagtcgaataagagctcagcttgcctctctgaatggcaagctcaaagatgcagagaaacctgtattattttttgaacgatctgtgtatagtgacaggtatatttttgcatctaatttgtatgaatctgaatgcatgaatgagacagagtggacaatttatcaagactggcatgactggatgaataaccaatttggcccaaagccttggattggatggaatcatttatcttcaagccactccagagacatgcttacatagaatatatttacggggaagaaatgaagagcaaggcattcctcttgaatatttagagaagcttcattataaacatgaaagctggctcctgcataggacactgaaaaccaacttcgattatcttcaagaggtgcctatcttaacactggatgttaatgaagactttaaagacaaatatgaaagtctggttgaaaaggtcaaagagtttttgagtactttgtgatcttgctgaagactacaggcagccaaatggttccagatacttcagctttgtgtatcttcgtaacttcatattaatataagtttctttagaaaacccaagtttttaatcgtttttgttttaaggaaaaaagatttttaaaatgaatcttatgcaaaannnnnnnnnnnnnnnnnnnnnnnnnnnnnnnnnnnnaaaaaagacatttaaagacaaagacattatttctcatagcaggaaatgtagaggtagatggttccagtatcagcatagtgactaaactacattataaaagatccagcttccttctgtcattcccctcttttgtcttcctcagcaggttggcttttttccctggtgcctctcacttcgttggtgaccagtttcttaaactgaaagctttaatgttacatagtaaatggtagtgtgtcctgtgtaaattagtgtacctattaaaagttgcaaagtggaattaaaggaatccctagaataaggattctgaagttttattttaaattattatcttcttaacagtttagtcccacctcttacttcctgcctcagtctgctttctctactgtctggattaattaggcagcctgctataaagttaaagtcacacatttctattttgcaaacactgtgattactctttgctttgtagtttgctttgctttgtagggttctgcttttaagtttttctctttttcagacaaattactgataaaaatgatattgctctatatgtaatatatcctgaaagcattattttttgttgaataggaaataaaattaatgaagacagaggctagaaagcatccattaattaatgagacacacttaactacttatctctaaaccatctatgtgaatatttgtaaaaataatgaatggactcatcttagttctgtatataaatatattttctttccaagttggtttagttagggtgtgcagctgtttttcctgtgtattaaacctttcccttttacgttttagaaaattttatgtattttaaaataaggggaagagtcnnnnnnnnnnnnnnnnnnnnnnnnnnnnnnnnnnnnnnnnnnnnnnnnnnnnnncttattcaaagatgataatttagtggattaaccagtccagacgcactgatctttgcaaaggagacttaatttcaaatctgtaattaccatacataaactgtctcattatacgtatgcatttttttagtatggtagtttggtataaattaactttgttaattaaatatttcttaagtattaaacttatgaactacagtggagctacactcattgaactgtcatttcagttctaaaaagatgtataatcatttagaattaacattattctacttttaattaattttgaata

SEQ ID NO: 143199 - DNA, 468 bp, Homo Sapiens
tgagccccatgatggctggtgtcaccctgttcttttacactgttgggccaggtgctgcttgtccttcttagggcatcatcaattgcaaatatttccttttgctccctttatgaagatgttcttatacccttgctttcccatatttttctggccaagcatgccatctcctttactctgggaacttacatcctgaatcccaagagggggtcacagtttggaaaaagtcatcagggattctggaactaagtctgataaaagattccagtgaagccctgttctgagaacgagcagactgcaggggaggccatgggattccccaggccagtgtctgtgctgatcgttcaagggtctgcaggtatgcaggtggcctgggctgctcggcagatactttgctgattcccagctgaggggagcatggtggcgattgctcagccattttctgacagacacacagacctgccttttctc

SEQ ID NO: 143200 - DNA, 514 bp, Homo Sapiens
gtaaaaaaatatatttattatataatacatttaaaaaattcagtggtgtaagtgaagggggaatcactttagaaaaaaatcttaaggtaaccaaaatgaaaaagggagccaagaactttaagattctttacttttatttttaaataatgtatcacaaataggaatattacttgggagtagaggggtaaactacaaaagagagatgcaaatcaatttctctgttgcctatttttaaggggtatgtaagttttaaagcctcagctcagcaactgaaagttgcctgggcatggcagagggagctgggaacaaggtacgggggtcactggtgggaaaattgtcaataaggacagtaacttgaaacaatatcctaaaaattaaagaactgttcaaaataaaccaggggcagtggtgtgtgcctatagtgatgtgatgtgggaggagcatgacgtgggaggatcactttgagctcaggagtttgaggccagttgggcaacatagcaagaccttgtctctt

SEQ ID NO: 143201 - DNA, 147 bp, Homo Sapiens
tgagccactgctctgggccttcctttattaatttcttaaactggcagatttagaatactaaacttccttctattcttagaataaaccctatataatcagctatttatttaaataacatggtctctgcaatttctcctggtttccatt

SEQ ID NO: 143202 - DNA, 1019 bp, Homo Sapiens
  misc_feature (914)..(914): n is a, c, g, or t
tccctggctgccttggacctctcaggcattcagacgagcgacgcagccttcctcacccagtggaaagacagcctggtgtccctcgtcctctacaacatggacctgtccgacgaccacatccgggtcatcgtgcagctgcacaagctgcgacacctggacatctcccgagaccgcctctccagctactacaagttcaagctgactcgggaggtgctgagcctctttgtgcagaagctggggaacctaatgtccctggacatctctggccacatgatcctagagaactgcagcatctccaagatggaagaggaagcggggcagaccagcattgagccttccaagagcagcatcatacctttccgggctctgaagaggccgctgcagttcctcgggctctttgagaactctctgtgccgcctcacgcacattccagcctacaaagtaagtggtgacaaaaacgaagagcaggtgctgaatgccatcgaggcctacacggagcaccggcctgagatcacctcgcgggccatcaacttgctttttgacatcgcccgcatcgagcgttgcaaccagctgctgcgggccctgaagctggtcatcacggccctcaagtgccacaaatatgacaggaacattcaagtgacaggcagcgccgctctcttctacctaacaaattccgagtaccgctcagagcagagtgtgaagctgcgccggcaggttatccaggtggtgctgaatggcatggaatcctaccaggaggtgcagcggaactgctgcctgacgctctgcaacttcagcatccccgaggagctggaattccagtaccgccgggtcaacgagctcctgctcagcatcctcaccccacgcggcaggacgagtctatcagcggatcgcgtgcactgtgcatgcctggtctngcagtgacacgacacaggaggcgtggcagatggcttgtctgacatctgactgatcaagaactgtgacaactgtacagtctgatctctgatgctgtgctccaagaa

SEQ ID NO: 143203 - DNA, 415 bp, Homo Sapiens
  misc_feature (134)..(307): n is a, c, g, or t
tttcttgtaataacaatgataaacttttttattccacaaatggatattctgctttgaaaaacaatctccaaactccatctgtggcattcagaatccaattagatttttattcagagctgttagttcaagacatnnnnnnnnnnnnnnnnnnnnnnnnnnnnnnnnnnnnnnnnnnnnnnnnnnnnnnnnnnnnnnnnnnnnnnnnnnnnnnnnnnnnnnnnnnnnnnnnnnnnnnnnnnnnnnnnnnnnnnnnnnnnnnnnnnnnnnnnnnnnnnnnnnnnnnnnnnnnnnnnnnnnnnnnnnnnnngtttaggaaactgcacgttttaaccatgtgcaagatggaaaatatataagcaaattctagcctaagacatttctcacaagttactttggggaaataaacctcgtgcca

SEQ ID NO: 143204 - DNA, 596 bp, Homo Sapiens
ttttctagttaatgccacagtttattagcacttgcttttataaaacactttgaaaatctgaaggcggggggaagaaaaatgaggcaaaagctttccattctgtgcatggtgttggccaaatgaattgattattttagagcatcacaagctttgtttctttgtgcctttccctgggtcatgtgaaaaagtcttccagtcgaagtcttccattcaaagcagtggttacgtattcatccagtcatcattttaaagtaaattagaagacacatttttctattctgtatttagacattagattggcttgatttattagcctttctcagcattatatcttgtggacatagttgtccctctgtattcatggtttcagcatctgcctgcagattcctgttttgaaggatatctggggtccttcaacttcagattgtttgaagtaatcacaaactattgatatttgtaatgatggtaatatgtccacgatccagctaggactagtggagcacaggacatatgcttgctcataggatctgcaggctcagtccaggagaaaacaagcctatggccacactggtgtgcaaagactgcaaaatcatcta

SEQ ID NO: 143205 - DNA, 294 bp, Homo Sapiens
tttgagcttccatggatgtgttttgaataacattaacatattaatgtccagttcctaacgtgttttatggatatgagtgacaatgcaatatccaagagtcctgggggcagaaatggtaaagaatccaggatgtaaaggtctggacaagagcggggagagaacagaaatataaatccatgagttctagaaggaattgggtattagcttgtcaggtaaggcatagcttcagtgtgtcagaacatctgcaatggaggaatcctaatagatctcaggcaagtggaaatcagtgagtta

SEQ ID NO: 143206 - DNA, 241 bp, Homo Sapiens
taatattaggaatttctgaattatcccaatcagaacaacatcaacaaaacccccaaacacccaacctcctagatttaaccatctttctttgtatctgatcgtctttccttggggtcagtattacatagaaccaccaacgtttacacactgaatcggacacaaaacgtagcattgttaccccaatgactgcttcactaagtggcaagagaatttcaacatgtaaacgattaacgtcaggctc

SEQ ID NO: 143207 - DNA, 504 bp, Homo Sapiens
ttttttttgaagactagattttaattattgctttttaaacaatatatctttcattctgttctcaccacgggatgtacggagagttgtgctaggtctccagtgggttttcagagacacacaccgcagtgtgtgggaacctcatcgagaatgaaaagataatccaagaagggggaagagaaggcaaaaggactcaggagagcaaagccagaagagggagggaggacggggtagtccctggcaccttggactgcgaactgaaagggacccttgaagacaccaatccgaatacaacctcaaaaattccccagtctccactgtctctttgatgaattttgtacaaagacaggagttttcaggagatactttgtgaaagttacagcagaagggaagctgaagtttgaaaacacattacattttgtcccttggttctcaaaccccctcagttaaaaatctaggcaaaattattatatccaatacagtgaccatctgtaaaacttcagaaca

SEQ ID NO: 143208 - DNA, 941 bp, Homo Sapiens
ttttttttagactgtctataaaggtgactttattatgatctttgcagcacccatctcagaccacatctttccatggttctcatgaaccttaacccctcctattaaatcttatacttcccgctttattgtcactatagatgtgagaaacagctgatggtcatctttgtttacaagccattacaggtttgaacaaattcaaaattgcctattattaagcctccgcaggagctactgggcataagcaaacctaagattttataacccagcaattatcctatagaaaatagtccagattattatattctgccacacctttattcatacttgactccaaaaagttctcaattattcacagggataatctagaaaataaatattagttttgctttcaaagacattactggaatgagcaggaacctgcatctttgttatattaattaacttattatttagttttcctgtctgcttagaaattggctgtttaggttgaaaaatgatttaagaagcataaactataacacaacaatttaaataaaggtcactattgctgtgaaatgggatgtcagttttgcaattcttctgcactttcccaccaagctgggatctgggtgagtctagagatatttgtgaaataagctaatttgaaaggacaccacaatccgtcaaaagcgactttcttcctcttccacagcacgatgaaggccagggataaatttcaagagttgctttcggacacttccctttctgctcttccggggcagggtcccaaacatgcttgataagttgccctcccacaagggagacatggatccgctgctggtgttactgatgctccggttcctccttggagatgacctcctcagaaaatcatccccctccttggggataaagcactcatcatctgtactcgtctgccgactgaaggcaagcctgctggagtc

SEQ ID NO: 143209 - DNA, 416 bp, Homo Sapiens
tttgtagagggattttattgcagaaggcattcacagaacaggtttacattggaagagaattgtacctcgtgaaattcctgcattcgcatgaatatgtgtgatagcaaatggccgaaatatctaaagtagaagaaacacagggagacatctgtatactctagagtgaacagttggaggcagactacggttctgcagttggcctatcagctctactgcaaggaagtgacgggtccaaattaacagtggcaggagctgcagaagaagacttgttgtcagtgctgatccagcaggacaagaagagggttcagagcatatcagaccaaactggctagggggacaggacccaaccagagttctgcgggtctcctagatgcagcagttaactataaataaaccatattgttcattccaggaag

SEQ ID NO: 143210 - DNA, 542 bp, Homo Sapiens
ttttttgaagataaactaaagtttttattatttttatatgaaagttatcaaacatacagaaaagatgaaagatttttacagttaagacccataaacccatcactagattctacaattaacacttaatttaattctgtttatcagaaatttacctgctactcatccatcaatctgacacttttgattgtataaaggtagattctacttgaggaaacatgatgtatacgcatgaaacaattactcagtattttctaggacgacgctaaatagtgagacagaggcacacatctggatggagttaagaaggtgatcatccgtgaggaataatatgttcagagactgtttcatggagggaagtgggcctccgaggcactgcagaccttgagggagctgggtgcctctcttgctgagtgactcatagtaggcattcaagagaaaggtccacagggatgagcttcttcatataaaaatgcctttctgtggaaatttgggcattcctttggctatggagagggtagtaggtcaattggcatggctgaata

SEQ ID NO: 143211 - DNA, 432 bp, Homo Sapiens
tttttctgttacatattgttttactatagtatatccagcttaatcaggtgcagggcgacagttgaaggagtactcctggaaaatgcctaagatatgtagatctctaggatcttgcaccttctggtggttgcatgaaattcttcagaggaatcatcagtgatagtaaatttacatgttacattcataacaactcttatgggaaatttaggatattcaaataggacaacaccaggaattgacgtatcacagaacttggtttacaacagtccgagcatggatcccatgcatcaccttcagcaggaggggcagatgggctggccaagtgcaagcttgatagagcgggataagtgactgcaggtgcaagagacatagcatctctaaggttagccaacccttggggagcctttgtagaaacaaaagaagatttaatgc

SEQ ID NO: 143212 - DNA, 511 bp, Homo Sapiens
ttttcattcaagcagaagagtgaatttattggaaggattattattagctaaagaattatttaatgtagtcacagaagtagggctagaaaacaatcaagagcaaagaaagcaaggtgaccaaatcaaagtaaaaatcaaactgcaaagttcatgcggtaagcaaatttgtatctcttaacctcgaagccctctgtgccacaggatatttgatatggctgaagccattgcagctgctgctgctaccagaactgcaaacaagatgctgctgttgctcctactgtgaacaccaaagtgaatcctttgctttttgtgattagttttttgttcctagttggagatttcaattgctaggcatatgcatttgatcatccaacctagaacatgtttgtgctggaaaagtgcatccttgtagcttctttgagtcccaaccagtcttattcagtgtagaatttctcacccctacgatgactaggcaggcctgaggcatcctgcagatccttttggatcctta

SEQ ID NO: 143213 - DNA, 530 bp, Homo Sapiens
tttttttaggttttagagttttaattgttgacaatttttcagttactaatagaaccccagtcatttcattttatttttccaaggacaagagtctattaagggaaccattaactattcagtccagtgaattactttcagattactaaggaaaaggaaagtgagcagttataagatgccaaacacctatctatctgcctgaaatatgcacctttcaggttggacctaataacattcacctccccttgctgaaaagccttccaacacccacgaggccatctcagtttccatgctaccttttctgtaactctactaataaccaaaccacatcatgtgttcaccaaattgagttatcccagtaactaccattatcatctttgtctccactggcctggcacacaaggtattcagtaaatacgttgaatgaagaatatgaaaatgcgtggtttttcttttttcacttattactaacccagcaagcctttttctcttcccatgcaaaggcccaagctgggttagtaataagtgaaaaa

SEQ ID NO: 143214 - DNA, 455 bp, Homo Sapiens
tttttattttcataaagcagatttttattgagtacttattaaatactatgtgtcaggctccttcaggcacagagatacagatgaggttcttgctctcatggaatgtatcttccattactgaatggcatcccgctgatgggtagtggaaaagtgtggggatactttcaagaggatgcattaagtaatggaaaatcttgaaatccaggtgtcagaaagattttgagatgcttgataggaagctattgggccctatgaacggaggactaagtggaaggggaaaatcccttaagttgcaaccattttttcctttccttcttgatgagcctcttatgtaaacctggcatttggaccataaaaatatggttattctttgttagtaaaccaaggaacaatttaggtggcattaatttagtgagcttattaccaggctcatacagaaatcaataaacatgtac

SEQ ID NO: 143215 - DNA, 518 bp, Homo Sapiens
tttgcaactttaagaaattgtttaataggaaaggaatcttcctaaaagcattttctgatcatcattaaagaagtcaatcccctcttttagcttagagataaataaagtcctgattactggagcaaagtaccttgagaatttcccatttattccccgatgacataatcctcatgccaataaattgaccatgtgatgtacatgctcctgtaatgccgtgtgttaatgtcagggaataaattcacaatctgatttgattttttctggagtggggagaacctgttactgcagccaccctagcatggggactctttcaggatgctcccaatgtcagcaaatccatgaggatttaaagggattctaggaagatggcagcagtgacacgggttttgaatctccttgaatcagggcatccagagatggaggctgtgcgatgagccgagcccaggcctgtggagttttctgtgctcagtgctgttgctgttgtcatcattagccaccgtttttcaaatctcggaagc

SEQ ID NO: 143216 - DNA, 473 bp, Homo Sapiens
ttttttgcaactttaagaaattgtttaataggaaaggaatcttcctaaaagcattttctgatcatcattaaagaagtcaatcccctcttttagcttagagataaataaagtcctgattactggagcaaagtacctttagaatttcccatttattccccgatgacataatcctcatgccaataaattgaccatgtgatgtacatgctcctgtaatgccgtgtgttaatgtcagggaataaattcacaatctgatttgattttttctggagtggggagaaccatcatttctcattgtacctgttactgcagccaccctagcatggggactctttcaggatgctcccaatgtcagcaaatccatgaggatttaaagggattctaggaagatggcagcagtgacacgggttttgaatctccttgaatcagggcatccagagatggaggctgtgcgatgagccgagcccaggcctgtg

SEQ ID NO: 143217 - DNA, 453 bp, Homo Sapiens
  misc_feature (27)..(27): n is a, c, g, or t
  misc_feature (241)..(296): n is a, c, g, or t
cctcagggccgggacccgggcccagcncaggctcctttcgatgtactgtctttcgttagcgtccccgacccgcgctcgcgggcctgtagggctctccgacagggcgtgctaccggagttggcctgaaaccagtcctcgctttgttttctggctcctcctctcccgcctctcccgctgtctccgccctgttctattttccctaagaatgtctgaactgggagggataccctagcgcccttgnnnnnnnnnnnnnnnnnnnnnnnnnnnnnnnnnnnnnnnnnnnnnnnnnnnnnnnntatccgtattttaggagccaagacgagatcaagttcaatattccaggagtggtactgactagaccttgtagttattttgaaaatgttagcctccaattacaaaagcaagcatttcctagttctcactcaacttctccttttccctgttcctctcaaa

SEQ ID NO: 143218 - DNA, 393 bp, Homo Sapiens
ttttaatatttcacaaatatttattataaataggaacaattaaacaacatcttagatgagtaataaaaatgtagctccttcaaagatatgacacctgcatacttttccaaaagggtagacgatgtgaaaactgggcagaatgctattccatttccgatttcaagaccctgtaggactgtgagaggaggaagagcacagggcatcgccgcatccagtatctacagaggcactatttgcactttctccaccgtttccagtatggaaaatccgattccttccttttcataccttgatggtctctattgaccttcagtcactgatttgcttctctttgtgagggtatttcagtcccaggaggaagttttaattcctgttttttactctcttctgatt

SEQ ID NO: 143219 - DNA, 511 bp, Homo Sapiens
atgcttaagtatttattttctaaagtaaggactaaattgtctctcttccttaagtaggaattaggcttggggaattcatgtctttaaaatgacaaagataacttaatacaaatggcacatcagcctttaaaaaggcttaatttggtttcattttgagacatcaggtaaacctgaataaacatatacagaaaagggataagctggattatgtgggatatttctaagaaatcaggggtcagcagaaagcttttctactcttagcataatatttggtattaaacttcaagttaatctaatagtatcaaaaaaactgtattcatataatagaatgtctgttaaaactgttaggtcacaaagtatgcaaagaaacagaacaggcaagttgctttttccatagtaatccaatcggatttttcttaaacaagttaatatctcacaaaatataaatatctacaatactcatggatgcagagtgctgacctaaatgttataatttattaacagcttccca

SEQ ID NO: 143220 - DNA, 133 bp, Homo Sapiens
cgctgtgaaagccgtaacatttattgaagagcggacatatgtttgcaaatcacagtgtgcatgggcatgcattacatggttcataatgctattccaattaggcttttcatagtgccttctcataacgtccttt

SEQ ID NO: 143221 - DNA, 600 bp, Homo Sapiens
  misc_feature (451)..(485): n is a, c, g, or t
  misc_feature (489)..(529): n is a, c, g, or t
ttgatgcagacttccgtgttaggttttcttcctcttctttttcaaatcctgaacagacgacagatcttcccttgggatactgagcacaacacttacgcagttcttggatgacagcctgacactttgattccatgtagctgttggcttgtaaacatttctgtatctcacaggcttgcttctggcacggatccttctgcggcatatccagaaaatgttttggggcgggctttcaaaagagcgtcccgctggctcaagaggccggcgttcgcggagatgtcgtcttaaagaaatgtcccccaagcgagtaggccgcgcacgggtctccttagcgggcgggcaaaatgggcgccggtactcgggaggcgcctgcccaggcgcccgggcgccgctcacagagtgccccgaccgtaatggccgaattcccgggcatatgtccggtaccgtcgactgnnnnnnnnnnnnnnnnnnnnnnnnnnnnnnnnnnncggnnnnnnnnnnnnnnnnnnnnnnnnnnnnnnnnnnnnnnnnnggacggcgagctagcgccctataggaatggtgatatgacgccatggtaaccggggaaaaaaagaggggaat

SEQ ID NO: 143222 - DNA, 470 bp, Homo Sapiens
  misc_feature (416)..(416): n is a, c, g, or t
ttttacttttattcatttattttatttatttgctgcttctgaacattgatgcttcgtgtctcttgcgggggtggggcattaggaggcctcttggcgaccgcggggggagggagcacgaagtccaggggcggcgggagctctgggtcgtccaagggtggtggctgtggcggcaggaagtagtctggcagggaggggaagcccctgccgcctgtgttcttggccttggaggggcgtggcggggctgctgctggtatccctggacctctgcaccaaaggaggcggggcaggctggacttggggccgtgcggggcccaaagtgctcctgccggttcccgagggctggcttcttatccttcgatgtttcagcatgtgtttgggccttttccagaacagcactgacagaatgtgcagcctgnggcatctgtccattgggcttggtgatgccttttataggtcctttttatttgtcc

SEQ ID NO: 143223 - DNA, 416 bp, Homo Sapiens
  misc_feature (199)..(226): n is a, c, g, or t
tttttaatgttgccagttatttattggaaatagccacagatagcagccctgatagggtgccgtcgtcagagcgcacacaattgtgtaatgaattgtaattcagaagactgttaaatgtgaaccacagaacctttcagaggtaataaagtcattactttttacactacagccaaccccgaaaagctttatacacaccatnnnnnnnnnnnnnnnnnnnnnnnnnnnnttccacaacactcactcgctcatttatatatcttctctatagatggacttttatggacgggtgggaacaatattcaaatctgaaaagcttggttctgaaagaatctggctcactattgttacctgaaggggcttttcttttatttatttatttttcaaaggcctcccagttgcactttcttcttccctct

SEQ ID NO: 143224 - DNA, 427 bp, Homo Sapiens
ggatatcttctcaaatcagttcttaacttattacatgtggaaatgccaaacagaagatgctcaccaagtgaagaaaaatcaacctttggacatagcaataagatataaatatgtcctgatttttggttttagatggcgagtaacccatgggccaggtagcgttctatgccaaccttgaatgccatcaggaagtcactggacagcaaactcttccaagatcataacttggctgttggagcaacattgtgcatgttggcattcttcaagcattttttatggattaaatcatttaatcctcataacacacagcagttgaagaacatgtccaaggtcccatggttagtaagtggcaggacttttagccactaggctgcagtgcccagtagatcaattctagtatgccagatgttggcagcactcactgtat

SEQ ID NO: 143225 - DNA, 1489 bp, Homo Sapiens
  misc_feature (153)..(248): n is a, c, g, or t
  misc_feature (291)..(300): n is a, c, g, or t
  misc_feature (385)..(394): n is a, c, g, or t
gattggtgaggggtctcggaggcgatcaatcaaggggatggcgtaacgcgggggtaagaggaagggaagggggggtaataaatgggagacaggggcgggcggtagggcggcacggtgtaaagaaacaatagagagaggggagggacacgcaannnnnnnnnnnnnnnnnnnnnnnnnnnnnnnnnnnnnnnnnnnnnnnnnnnnnnnnnnnnnnnnnnnnnnnnnnnnnnnnnnnnnnnnnnnnnnnnaaaaggaaggggggaggtcaagggccggcggggaggcgcctcnnnnnnnnnnactgccccatctttcggaggaatccgttacgggcgtataaggggggcaagtcactcggaaatggggaggtaggccggttcttctnnnnnnnnnnaaggcagggggaatcaggaaaatgtcgcaagccgcccttgggttgcatgaaacctctccgtttgagagccttcaccatgttcacgctgtaagtcatcaaactcagccttctcctgaacgatggcggcgctcaaggtcgcatttggctggctctggtcttccagccacaagctcagcagctgctccatgctctccatcactgcacttcgatggcgagtcaaccgagaggctctcagaggagtagctatttgtgaactcgctttgattttttctttactatctcgaatggtcgccactgtagagatagcaagatctaaggcctttgcgatctgactgagcttctcacccgcttcaaatcgtcgtaacacttccaatttgaggtcaagggtaatcgctttccgttcccttttggcactagggatgacagttgcatctgtgggcctttccccaggcatttctgcctccaaaatgtcagaaaatcacagcggtctcaagcgcaagaacgctgtggttcctctacgtccccttgcagaactcggtcaacagaaaacgaggctgcgaagaggctcaggctgatgtcctggagacgtggacgggtccccatgggcaggcccagccccactgcctagcccagctgctgcttcactgtccactccgaggaggccgcgcgggtctcccggtaccgctcgaagtccgcgtgttggggccgtgcggccgcaggcacatacaagcggcctgggtcctggggctccagagaacaaccgaccaagcagacaaacggaactccgtgagggggacactgcggcagaaacgtccaggggcggttttccagtgcagcggagggcggaccgggcgggtgttgtttcgggagctgctttccatggaggaccccagaaataagtgttgatgcagatgcccgatttaagataagtctaaaggcgctggctatccccttagggcccagctgtctgggcagggcgaggctgcgctggcgatcaaaccctcgaacggtcaggcgacggcgtggacacccaagacggggccccagccggagccgcgcgcctgcccctcgtccgattcacaccgggccctacta

SEQ ID NO: 143226 - DNA, 528 bp, Homo Sapiens
  misc_feature (364)..(372): n is a, c, g, or t
ttttacctgctcatctttgattttattaatatttgattgacaaataataattgtattatattgatggagtacaatgtgatgttctgatacatgtatacaatgtggaaggattaaatcaagctaattaacatatccatcacctcgctcccttatcctccttctttgtggtgagacatctgaaatcagccttgttattgtgatttaaatttaatcatcctggtgactgtctagagtgacagcacattgtggttttactctacagttccttgaggagcaatgacattgaatacattttcacttacttattggccatttggtggtcttctgttgagacgtgctgaagttttctcccctttaaattgannnnnnnnncaacttgagggattctttatattttctatgagagttcctttgtcaggtgtaccttagagcaaacatcttcttccagtcctgtttcttgtcttttccctatcttaacagcatcatttgatgaacagaactttgtacttttgatgaagtgtaacaact

SEQ ID NO: 143227 - DNA, 429 bp, Homo Sapiens
tttttacgttctgataaaattttatttaccaaaacaggtagtggtccggatgtggccctctggccctagattaatcctggactagggtgaatccaacagatgctgcctgcaggagagacgaaaggactttctagagggaaagtcatttgatggaaaggagagtccaaaactaggcacacaactccaggatctgggttgttggagaggaggactagccctaggccaggtggctgaggcttaatccccttctgacagtcactccagaatgagggcagggcagcaggtgtgagaactgagtcagctgctcacctggggatccaatcccagaggttcaggcctcctggaatatagagaacctcagataagttgtcttcccttcttctccaaagcacatgttgagaaactaccattgattccacagtcttgaca

SEQ ID NO: 143228 - DNA, 498 bp, Homo Sapiens
acttctgctgttaggtttcatgaataatagtcccctttctgttgagtttctctggttacatcattttatttaccaatgtattgctttttaatatcagtaacattgaatattaaagtaggtgataaaatggatcaagcaggaaacttgaccattacaaatcgatgctaactaaataaccgagataaccacgatgcaggttgccgattatccaggacccttttttgatctcctttggaaagggagtcatcaattctgtcctttttccttaactttgaaagcccatccttctttggcaatagtcttcaagggttttatttagctcccttttactaaaaacaagcatcacaaaatctcatctgttttttacaaagaagcctggagtaataccctgataactataggggaataatgtcatcaacagaagaatagaatttgggaagctgaccttatcacagtctatgagattaaatgtcttgggcatagtagtgtagctagaaa

SEQ ID NO: 143229 - DNA, 391 bp, Homo Sapiens
tttttttgtacattatttactgccaactgtattgtttttaattgtgaaaaattgaaaggacctaagttggaaacaactagtcagtagggattggttgattaccttctagtatgtctatgcagtcatttcttaaaagacaatgtttttctatgtaatggttacttatgtagaaagatagtcataatgtattcagtgaaaaacgaccacaggaaaggactggaagggctaatgtgtcactgggtgtcatgcaaaggctataggtgaacaccagcaaacattgtggcaggggctggagctcactgggagaagggtgagaagaggcaccccatcatctccagcaccctatgggggaagcatgcttgggtcaggtgcagctggacgcatttgagga

SEQ ID NO: 143230 - DNA, 642 bp, Homo Sapiens
ggcttatgttcctacctggcttctcctggcctccagaggattgatttttgtagttacagctcatgctgctagttagtttactgttacatcagggcagaaactgatgcataccaacatgtacccaggataaagtcctccactgcgggtggtggaagaggcttcttctacctcctccccatagttcctgaaggcaccaagactgtcacagtaattgctatattataaaagagtaaattgaagaaatggaaactgcaaattacaccaagcccctgaaatgctcatagacttctttgtggagaggaagataatttcttttgatggatgcattgcacagctcttcttcttacactttgctggggcttcggagatgttcttgctcacagtgatggcctttgacctctacactgctatctgccgacccctccactatgctaccatcatgaatcaacgtctctgctgtatcctggtggctctctcctggagggggggcttcattcattctatcatacaggaacccaaaggcacagattgacgttataagtcctgatttttgacttgacttctcatcacctggaagtgaataaagcagtagacttctctaacattttgtaacacagcatgaaaaaatatagagtacaaaag

SEQ ID NO: 143231 - DNA, 483 bp, Homo Sapiens
  misc_feature (132)..(145): n is a, c, g, or t
cttttgtactctatattttttcatgctgtgttacaaaatgttagagaagtctactgctttattcacttccaggtgatgagaagtcaagtcaaaaatcaggacttataacgtcaatctgtgcctttgggttcnnnnnnnnnnnnnncaaaagccttatgtaaattttagattgatctcttaagccagcttactaactggcaggcttctggtcagggttccagtagaaaggtagccatttcatttgtaatctccaaaggcagatgtgacattaacattcagtttcttaaacaaaggtgccaatgttctgtctgtgactcatatgctaccgttagcatcttttccaaacttttgttgaaatctcttctctgcatctaactcctgtcctgtttctttgttcctgtgggtctcagccatttttttcttatgtgcaagcccctctagtccatacatgaagagtagaaaagaatatacatcatttgtatt

SEQ ID NO: 143232 - DNA, 462 bp, Homo Sapiens
  misc_feature (441)..(441): n is a, c, g, or t
ttttttgtggtgtgacacctactggcaggtcccagccacctgggatgtgcctttatttgtggggcaaggaaggacgctcctcattgcctggcccatgtgtgcccctggccttgggttcgcgagtgttcacctcttatctggctgcagtgttgcggaggccaggaggagatggtaccccttagggcagccttgcttcaggaccgactgcagcacccggttgggcaggagggactcctgctccaggtttctgtgcgggtccaagaaggctcggaggctgcttcgcggcctctgagcagcggccttcttccatgaacagaagggcaggctgctgttcatggaggtgtcctcagaaaggtagccctgtgtcttctgggtggacaggccagcgcagtcccaacacgaggagctggccagggtctcctccttggccccagggtacanggctttgggcaaactctccag

SEQ ID NO: 143233 - DNA, 918 bp, Homo Sapiens
gagcctgcgtctccggaggagagttcggggctgagcctgctgcaccaggagagcaagcgtcgggccatgctggccgcagtattggagcaggagctgccagcgctggcggagaatctgcaccaggagcagaagcaagagcagggggcccgtctgggcagaaaccatgtggaagagctgctgcgctgcctcggggcacacatccacactcccaaccgccggcagctcgcccaggagctgcgggcgctgcaaggacggctgagggcccagggccttgggcctgcgcttctgcacagaccgctgtttgccttcccggatgcggtgaagcagatcctccgcaagcgccagatccgtccacactggatgttcgttctggactcactgctcagccgtgctgtgcgggcagccctgggtgtgctaggaccggaggtggagaaggaggcggtctcaccgaggtcagaggagctgagtaatgaaggggactcccagcagagcccaggccagcagagcccgcttccggtggagcccgagcagggccccgctcctctgatggtgcagctgagcctcttgagggcagagactgatcggctgcgcgaaatcctggcggggaaggaacgggagtaccaggccctggtgcagcgggctctacagcggctgaatgaggaagcccggacctatgtcctggccccagagcctccaactgctctttcaacgggacaggggcctggtgcagtgggctacaggaactgaatgtgggattcaggccaccatccaaatggctgttgaaccatagcttcaccctccacactctgctcacctatgccactcgagatgacctcatctacacccgcatcaggggaggggatggtatgccgccatctggagggccatcctggcaccgcgaagcagggatccccccca

SEQ ID NO: 143234 - DNA, 646 bp, Homo Sapiens
  misc_feature (15)..(15): n is a, c, g, or t
  misc_feature (464)..(473): n is a, c, g, or t
ttttctaaaatctanaaataattttattcttttctcatttacagtagcccagtggtaagcatgttagaaaacctgaagaaatttaaaagtttttggtttacaaaaagcatgtataaaaatacctgttcagacaaacaaagatctgatcattacattgcccagctttaagaatgccaaaaataactaaaatactgtcaatcaaatgagagggctacatgggtttattaaagtttattttaacaattttagctaagcagaatgtgctaatgtaattcaagttacagttactgccagataacataagagaaaacattgtgtgtggccacttaagattatgcctcaaacagatactgtttcgtgcgcagaacagagttggggaacacagctgggttaagtttcaatggtaagcagcaataaagatcaagaaaatccccaacttttctaataaccgctatacaatatgnnnnnnnnnntagtatctatcaccacctcttaacaatggacatcaaaattaggattgtaggttttctaagtgcttggataaaaaatgcgaacacagttaagatccttggttaattatctttgatttttcaaacccccaaaacataaaatattttgcttgctggtgcattaacccattagcacc

SEQ ID NO: 143235 - DNA, 537 bp, Homo Sapiens
tttactgttgtattaataataatttattttcaatatgacttatttaatggaatggatgaagcaaaggacgagattcagcgggaagggctgggcttcgagacctgatcctttctcattttaatgctgctccctcactgtggtcagcctgagtgggatcggctggcccggccttcattttacctttgttgccatctctctttgcgggggttctttctcttcctcctcctccgcctcataagcaaagggtaaggcacagttctgaatctttggttctgtaaagaggcgtgcccatctctgtgcttgattccactgttctggaacttcatcaggcgtcggagtggggctagtgctgggaccccttgaggaggtgggctaaataggaccagtcttgattagggaaattaaagagccagcatttgctatgtaataagatgtcaaggctggggcagagtagatgctactttgttttaaaacttgatttgctttcaagacttgtacgtaaattacttttcaagctcatatcacacgatatagtcc

SEQ ID NO: 143236 - DNA, 570 bp, Homo Sapiens
  misc_feature (549)..(549): n is a, c, g, or t
tttcattctattccattctattttggctgttgcagaaaaacattcttctgttccactgccttctgttcacagtctgtcagctcgaaacgtctcttcaacagaggggtccagcaggcccatgctggagtcacttaacatgttgagtccgtccaggctcaggggttcaatctgcagctcctcttccagtggaaatggagtgtccacgttcaggctgacctcaggcaggcctgccagcgcactgttgaggtctttgaacaggctggtgctggagtctggcaggatggtgttcgggagactcccgcagttggaatacgggcttggtctcaaatgaaaagagtcctgcagttctcgggaaccttgttgcaccagaggcacctgttgaggaaaggcagggcctggcctcatggactgctggtcaaaacccacatctgggaagaagttggtcaaagatgagccctgggccgggagaagctgaaagtctgactgtggcagtgaggaggctgcctggggctgctgggcaggggcctcaggggcgctgggctgctgcangaagggctgggtgagctcctg

SEQ ID NO: 143237 - DNA, 518 bp, Homo Sapiens
aggtggagtcatactctttattgtaaagctgattttaaatcagggtagcatttcaggaggaagattcgggctgactggcaatcaccccctctctggtctctttctggaagcttccctcatcagttcacatttcctcattgttatttaccaagaccccagatttttttgagtttatcatggtggacaaaccccccaggtatttatcccacgtatactccctcgactttttaatcccacatgtactcaagggagagtgggtttgtggttaagcaggtacttgtttaagaggctttcgtcatgccacagggcctcgatgtggttggcttggtcaatcatcatcacctggtgacaggccatgatcagcctgtaaacctccagcactgacccaccaaataaggcccctatataataaaagtccccttcaccctcaggaaaatgggcttgggactgaggctggcattcataggcaaaggtgtcccgatggaacccatagaagccaggatggatggtggcaaaca

SEQ ID NO: 143238 - DNA, 948 bp, Homo Sapiens
ttttaggggttgaatctcaatgcaaagcttttattttctcaaaaacccattgtcatagtattggcctccagcacatagggcagtgagcccctttaggttgataccactgttccctcctatgggcgatgtcatttatcttcattgggctctactatcttcagaggttcttcttttgtggaattgctttctgatttttcaaagttccatggcatcagtttcttctagtggttaagagtggccagcaagtcaccttctcatgaaggctgtttgtacaccctcctgggggccagagcaaactctgccaagacaccagccatgtttttgaggcttctctcccaagcagactctgcaacctctctgcaagaatgtgcagactatagcatgtttgtggcagcctcacatactgatcctagagcacttatatcttcctcagtgtcaacttcaaaacaacctttctgtgaagctttgttagatctaataggatgcatgtctcatcgacaaagtgattcagaaaatgcaagcagtcatcttcatcacagtcctatggacttccaggctgaggtgacacgcagggcaggactgacaggtaggccaaagttctgggtagagaaggtggcaccaggcaaaaggtttggaaattgagtggagggcctaggaccattgcagccaggaactgagaaagctggggttgggactcggggagagggaagatgtaggccatagactgtagtctgaccgtgagactcaggggaggatgcggttgagagcatggagagggtgtccttgggagaggacctaggaaataagcctccatgaaagggccctggagcaggagctgaagcctaattgacatatcatcaccccatcccttcatgcccagcctctctctgctgggatcactccctggcaaccagctttttatcaatcccctctaccggctggcaaatc

SEQ ID NO: 143239 - DNA, 290 bp, Homo Sapiens
ttttgacagaggcagaagcagctttattgaaaaacagagcatgagtagaacgacttcaaatcccatatggcaccacagtgagaagtaacttcctctgagcttcttagagaatccaacaatgtcctgcttccttggggagctgcagccatgggcacatgggaatagggcttccaccaagagtcccgtcagtcacagcaacaggaggtcttcctcagacaactttgatgatagtggttgttagccagagcaagcttctgccatgagtggaagcagcctgagcctctcaccag

SEQ ID NO: 143240 - DNA, 720 bp, Homo Sapiens
  misc_feature (521)..(557): n is a, c, g, or t
tttattattttgaggagaaggaaccatttatttagtcaaattattttacaacatggtcttctttgacagttgtcagcttaacacttaatatagttaaaaaagtcaacaattacctgcaaaattatatatattttaatgtctaaaaatatgttgcttatatagagcaggaaaatccctcctctccacaagggaaagtttcgttgtttttcccagagctgtgattattgcagtactgttacacgcatttccaaagcattaaagatctaaatggattatcttttccctgcttgtgtatgcctgttaaataactgtaccagtgctttgctttctcataagtcagtgacttaaacagccctgtttccttttcagctataggcatattatgctttttaaaaaccagctataaaaacatacagacagcccaaatgtacagattgaaaaaagatgtacaaattacattaaaaaaaataacagcgattgattcgatagtaaaactgcttttgtgaccgaggtcaactcgnnnnnnnnnnnnnnnnnnnnnnnnnnnnnnnnnnnnnactgtgagatataggaaaataactctgcataatttatacagtaagttgccttctgattggttggccctggtctgatggtctgacaagcgcacagcacttgcgaatctgcttgagtttagaaatccctacaacttttccaagttctgggaccactgtcatcatt

SEQ ID NO: 143241 - DNA, 489 bp, Homo Sapiens
  misc_feature (310)..(420): n is a, c, g, or t
tttttaatggtcaattagttttttattgcagatttaatttgtattttaataaatgcagtatgtaatgtaaatatttcgaaacctggtagccatgatggttacacctcttctggcccttccttccccatagttgatagaagctggggcgaacacttgacaagttatgtcaatcagactctttttcctgatggatcagggaataggattacagttagcatctgaatgtgggttgattttaggcacagttaaatagtcttgctgtgtgagtcagccattttaagcatgtccacagagatcagagaaagttgtnnnnnnnnnnnnnnnnnnnnnnnnnnnnnnnnnnnnnnnnnnnnnnnnnnnnnnnnnnnnnnnnnnnnnnnnnnnnnnnnnnnnnnnnnnnnnnnnnnnnnnnnnnnnnnnctctgagatgatgaaaacaaaacatcttgttaatcaatcatcctgctagacacttagccagattctctc

SEQ ID NO: 143242 - DNA, 523 bp, Homo Sapiens
tttttaaaagggaaatgacctttgttattgaaatgtaatgacaccaaagctctcaaaaatgatggggtttctccttgttgccttccgaggtgcaatggaagaagctgtgggtacctgtggtgggcacttgtcgctgtgcaacacccttttctttcctgttaccccaactccaattctgtccaagggacggggagccctgctcaggggtgtgaatcctgatggacatgtgattcagtccttgccagtgagaccagtggaggccttgggaccttttctttctggtaagcaataggtccaaggagaggtcttttttgtccctttggcttgggctgctgtcttctgaggatgtgatggaaggagccatggcagccaggcagccgtgaagtgacaaactctctaatgggctcttgtgggaccccttcacaacgtagggatgactccagatggtctctgtttcccttggatatttataatcctctccagcatgtggcttaaatacctggaacatttgcttggatcatga

SEQ ID NO: 143243 - DNA, 492 bp, Homo Sapiens
ggggatttaaatcccctgttaggaaatctgctaggttaatgtaatttgctgtggttaatggttaaatcagcctttttctagcagaatagccccatactttaagatttttgagttagtaagctccctttttgctttttgacttaggatacttctgaactggtgaggtatgctcacactgaggtttcctctaaaagttatttttttactttcttctgttagcaaagccattgccgctacagactgaatgcatctgggccattcgtgggttactgggttaaagatttttgataggaaggctacgggttatcagtggcctctgtgctttcgggatatgcccttgtttacactgacaacaaagtggtattggagtgttatagggttacagagaagaccttcaattatcaattataggttttaaatttaccctggcttttaaaggaatagggtacacttttttttaactacttgtatatttctctgtctttgacattg

SEQ ID NO: 143244 - DNA, 326 bp, Homo Sapiens
ggatacttttgaactggtgaggtgtgctcacaatgaggtttcctcacaatgaggtttcctctaaaagttatttttttactttcttctgttagcaaagcagttgccgctacagattgaatgcatctgggccatctgcgggttactgggttaaggatttttgataggaaggctacgggttatcagtggcctcagtgctttcagaatacgcccttgtttacactgacaacaaagtggtattggagtcttatagggttatggagaataccttcaattatcaattataggttttaaatttaccctggcttttaaaggaataggatacactg

SEQ ID NO: 143245 - DNA, 339 bp, Homo Sapiens
tggggacaggttggagctgctctggggctcggcgctgggggacaccagccccgggggcgtggacgactcatagccggagctggcggccggggaggattcagagccctgcggggaggactcatggaccttcatgtgcttccgcagcgagctggggtgcgtgtaggacttgtcgcacatcttgcagagatagggcttatcggaggtgtggacgtgcatgtgcttcttcctgtcgctgctgttggcgaagcgccggtcgcagccctcaaactcacactggaacggcttctccctttcttccaggctgacgtccatctcctcaaatttctcaggaatgtgggg

SEQ ID NO: 143246 - DNA, 528 bp, Homo Sapiens
ccaaattatagcatttttattttccaatactatacaaaaaatagactgtgcatatcttaacagatccagatccaaattaaatactttttttctatttcaaactattctaagttgctaaggtgataatccagttttgagctctactctcttccactgactacttggctctcataagcataagaattcttgccctatttcccacaaactccataaattgacatttctttttgtaagaaggggatattttcttctacacttgagtccttacatctgtgagatttcataagtatctgagatttcacactcttgctattttcttagtgtcaaacacaagaggaaccaggaactgtttctggcatttctactaattactatgtttctcattctttaaatatctgtgaattcataatattgaatctgccacaaaaaccattttgaatatttctaaattcatgtttttttctaaatccatcctcactctttttaatacttctttcaaggggcagagtactttacagtagattactt

SEQ ID NO: 143247 - DNA, 673 bp, Homo Sapiens
tttaaattcgtgaagtcattcatccagcagtagtttatagttttcattcctaaacatcatggaccagattctttgttactttagggccccaattcactaaaattatttattaatttcaccgtaccttcaaaaattactctgcctatgtgagacaattgatgtgggagactgagtcctaaatttttaatccagataacatgaagtatgccaaccttagggaatttggtgaatacatttaatgagttcttgagggagaagaaattgcttttgaacataagtatatccaagacaaaggaataatgctcctaactgatagactatagctcctcagctgatacagttcaccatcccccaaaatgctggcactcaggacaataccctctgctggcgaaaatctatacaggatacacaggtcaggctcttattagacagaactttccaatatagtatgaaattggccactgaaatttaagctcaaaaagagtatgaatatttagatatgttttcagtgcgatttcttcagaatgtagacaaggaagagtgacgcagtggaaatgatgtgcaaacaggatttatctcattgttcttggtttattaatgcttccgtgttaacactttaagggatgatgctcattcattttcaggtcttgaggcaacatcttgtacactcttt

SEQ ID NO: 143248 - DNA, 473 bp, Homo Sapiens
agtaggtttatatggtcatttcagaagaagaatgatagtgtattataaaaatttatgttaacaaactgttgtattttacctagtcgttttacatgcctaaatattgacagtatactagatatgtttgtggatagttgtacaaaaactggactaaataaagctaaactaacatctattagcatagtagaattctgtgtagattaagatttcccctaaattatttaggggaagtgttgatagtagggccattgacaacctatagcgaacattgcccaagagataaggtcagtgttgttattcacagctgcttcttatttaatttagctattgctgagtctgtctgatttgttttcttaggtgctgagggtgtaaatggaggagaggagtctgtaaacctgaatgatgcagatgaaggattttcatcaggggcttccctcagcagtcagccaattgggaccaaaccatcctcctct

SEQ ID NO: 143249 - DNA, 488 bp, Homo Sapiens
tttattgatattaaaaaaatagtttattttttccacatagaagaaactatgtgctgcttcttgtctgaatcaggttttgccaataaaggataatagccatgaataattgatgcatatgtcagtgtgtggaggagagtggtaggagaactgattaagaatcattgaatgtgattgggagcacgtatgctgtgtcaccaaatgtggtaagaaaatagtagtcaataaaagaggtgcagcccagtacgggatttcacagtttcaatttccatatagttcaatatattgtgtgtatagtttatattacatgtaatatatattttaaataaaaataatataaatgtgattgcctttgagagcataatcctgagtttttataagtcagtaatgctttaactataattagcttagacgaattatccttacggatttctgtctgttcttcttgctgtggtcatctgcctgcctctgaatctctgaaaacagcttct

SEQ ID NO: 143250 - DNA, 728 bp, Homo Sapiens
ttttacgacgttaagacatttattacatacagagcagatatgtgggtttgcttgcagggccaaagcctgaggagaatcgtcacccctcccccagccgccccactgctcagcccggagtcacttcgagatcctgggggaacagacgagggagcggacatacatcacagtggaggtggcagggtggtggggagaagccggcagcgcagcggctgcagccctcggtggccagcggggcttgtggggcagctccccaagatctgtgcttctctggttgggggtgggtgcgggggctgggctgccctcataagggcctcccagacaggagtgcagtgggcctggaaggtaggaataggccagagaggcccagctgggcagggagagcagtccagggtggcgtctgccctctgcgggcttggagtcggctgggggcggctccatcctcagccccacgggcctctgcttggtggcctctctgttgctccctgggagcaggccacagcgggcaaccctaggcacttagtagcgtgtctgggagctgggctccgtggagccccgtgcaggaggcaggccccgggagcacatcatcccccatcaacctgaggctgagcctgtgtcctaggactgatcccggagaggccaggggcctccccttcttcctgaggcctgggcctgacctggcagcctgagcctcgtgccgaattcaaccaaggctcgtactacctaagttt

SEQ ID NO: 143251 - DNA, 858 bp, Homo Sapiens
gcactttttgaaacactgcctttgctgattttacaaacccaagttaccaacctttctgtgtctatcatttttatttgaatatcggtgcaacaggtagaaagatttcagaatcaaaccccattcaggtacttagaaaccttcatagagacattttgctagaaaatggcttacagcccaatctttggggcaagagatatgaaaagtatgttttcccaagaaaataatacgctttatttccagatgtgactggaaagaccagaacttatgatataaaagcttacatttatgctgctgcatcatatacaaaggaacatggtggttgcgggttatgtaaatcccaaacttatgaacaggaaatgtgtacagtgcatgataggttaaatttttctttattgttgtccaacgcaggtcctttggagagaaaaaaagatcacagtgctgaccaggtaactctataggtttagttatggtaaccattgaaagataataggattagggaggtgtttattttatggcatcttctctcatggagttcttagcacttcggacaatttgtcttttccccactttgtacagctgttatgtgtcattcaccagccggctgtatttaacttgcctactgaggtggactactggccaggggaaaggccaatggtaagatcgaggtacaattccttggacattcttttcaaagtactgaaatggcctgtaccaccacaccctggccaggaggttcatctgggaagcttcctttagcacttgctgattggccatagtgtgataccaccagaagagtctcgtggtgatgtaatatgccaccaccacgtccacagtgtagtggtcatgcgctaagagaat

SEQ ID NO: 143252 - DNA, 592 bp, Homo Sapiens
  misc_feature (395)..(444): n is a, c, g, or t
  misc_feature (502)..(504): n is a, c, g, or t
acattaaagttgataactgttattggtacttttgaaatatttgtatgcatttgttacctttaaacatttggaagaagcacaaaaaaatagatttagttaacccagggaaacatcaatttttttagtagttccaattttatatcacagttttattttcttatgaaatcaaaaagtgcattgatactcattaatgcaaattcattatttaacatcaatatcagagtaatcttcaaggtctgaaatgagaaacatactgactttttaaaattttaacagtgtacttcttaggctttcattaccagctctgaagaactttttggaataattccatattccatagtgtgtggtttatgagttgtgggtttcatcactaacccagtaaccataagaaaagnnnnnnnnnnnnnnnnnnnnnnnnnnnnnnnnnnnnnnnnnnnnnnnnnntcgtaggccagtagcaatgttgtgttcccagtctaatttccaaaagaccaaaaataannnggagtgcttgtttaaattgaaatggaacttagagaacttgagcttacttacgtacttcaatgccaccggtaacttaggttttaccacc

SEQ ID NO: 143253 - DNA, 468 bp, Homo Sapiens
tttatagcatattcatttatatatatttttaatctttagccattgaagaacaataactataggatcagtaaatcccgatatgactcaatagacagctatttatctaagtgtggtgagaaatataatgacatcgacttgacgatagataaagagatctacgaacagctgttgcaggaaggtgggtttctactccatctttctgggtttgaatgtacgcctttagttcttcaaagctcttttacacttttttgctgactcctggtctggtttctatttttagtgcaaagtctttaacttctctcatgaggctacttgttcctaaagtttcaggttccaaatacttgtgagattttcttgatttttagcaaaaggagcttactttggaggtctgtgtctaggtccacaccagtgccccagcaggcattgtgtaagtagtgaataaaacgctgacactcccgcagtgtccgc

SEQ ID NO: 143254 - DNA, 519 bp, Homo Sapiens
aaacagatggagttactgtgaagaagttttcacaactatttatgctggtaaaacaaatgctgttaaatcaccttatgcgtcgttttctacttcattggggctaattacccggaatacggtctcaccgatgcagttttcatggacatagaaaattcaaatagaatatataatattgaatttaagatttggggggttaaaaaagaaaacttaactttataaaattatttattctattttaagccttctatcatattttcccatccaattgtttggtttcagtggtccagctttatttacaggcatataaaatgaaattgtgagatgttttgcaagcttctttttactttgagtagcttttaatttgtatgtttttatgtggatgaagagcattttttatgcttttgtgcaataggttccaatatgcatttattagacatctgtttaaatggtaatgtagcatttattttgctaaattgaaagggaacatagatggaattccaaaatatgtacattcagctg

SEQ ID NO: 143255 - DNA, 152 bp, Homo Sapiens
gaggaaaagtcaaattcattgtttatttttatattatttttaagttatctgaacaaatacttttgaaaaaaaagtttgttgtatagtcaaaacaaatcggtgccacccggccgtgacaaatcctagtagattctgtgcatgtggagcggccc

SEQ ID NO: 143256 - DNA, 491 bp, Homo Sapiens
tttctggttgatgtattatttattatgtaacagttctgagaaaaaatccaattcaaaacatattactgaggattctgtattagtatattttagaaatcgtataatccaaagctgattttctaatatattttcttatataacacttaaggaatttttcactcccattatttggctctagaaaatcttatgggaaacatttgttacactagaaaacaaaatttaagtacagttgttaggcacggttaaaagggatgatacacacaaactataataattacaaatcagtacttcttttgaatacacatttgaatgtaaacttttaaaatcagtgttttagataaatataaaacatacttcaagaacttattttaacatctcctttactttctaatgctcttcagaaaaaattcctttctgattcattcagtagcaagagcccaaaaatggtgttccaagccaagattcaccttgtcctcttcagaaatgacctg

SEQ ID NO: 143257 - DNA, 595 bp, Homo Sapiens
ttttttttaattatctcttggatgacatttacaccgataacacacaggctgctgtaactgtcaggacagtgcgacggtatttttcctagcaagatgcaaactaatgagatgtattaaaataaacatggtatacctacctatgcatcatttcctaaatgtttctggctttgtgtttctcccttaccctgctttatttgttaatttaagccattttgaaagaactatgcgtcaaccaatcgtacgccgtccctgcggcacctgccccagagcccgtttgtggctgagtgacaacttgttccccgcagtgcacacctagaatgctgtgttcccacgcggcacgtgagatgcattgccgcttctgtctgtgttgttggtgtgccctggtgccgtggtggcggtcactccctctgctgccagtgtttggacagaacccaaattctttatttttggtaagatattgtgctttacctgtattaacagaaatgtgtgtgtgtggtttgtttttttgtaaaggtgaagtttgtatgtttacttaatattacctgttttgtatacctgagagcctgctatgttctttttttgttgatccaaaatt

SEQ ID NO: 143258 - DNA, 487 bp, Homo Sapiens
gtgttaaagttggatggatttatttttttaaaggcccagtacaaaaaaatggttgaggaaagtgactcttcaacaaaatatacacctgtagaaaaaaatccctaatatactgatatttaattgaacggaaagtactaaagagaacatactttaatatctaggcacaattggtcaggtactaattataatttctgttctcatttaaaagtttaaaccaattcttcaactggactgatgtgtgtgagtctaatacagagaaggcacctctctcatctctcactctccttaaggaccttttgagagaaactctttgtaacactttaagggacacagacaatgcactatatctaagtatagatatagttatttaacatacccattgtaggagaaactaaaatataaaactatgatttctctttttacatcttatgatggacacaacaccagaagataatcctccacataaactctcacatagaacacaaga

SEQ ID NO: 143259 - DNA, 2101 bp, Homo Sapiens
ttagactttttccccacaaaaagtcttgaggaaggtctgcgaggtcgtcccgaagggtgtcccgttgacagctcgctgcagcggtaaaacctgttgtctagccgtgtggatcacattaacacgccgccatttaggattgccaagatggctacagcggtaaattcggcgagatattgtctcttatggtttctgaagttaatctgcttgttcgttaggacctaatatcggtggcaacggccacccgggaactcgttccgttcgtgggtctgcgtcccaaaagcagggaaagagcgaagcataattgggtcccgtaaaacaatttccgttaatacccgtacagttctgatagagttggtaaaaatgggagacatatgaaggttattcaggcttcccaatgatatggtgtgagattcactctgtactaaatatcccaaactctagccacaaacacagcaaaactcaaagtcaacaagttttcactgaaaatagatttcatttcattcaaattagaaatgtgttctcccaaaccgcctcccaacaaaggtctctgcttgataaatgaaaagatagtaaaagaaaacttcacatttctttttatgtggatctatcaaaaggtacataatcaaaacaactttaacacccgacctatccatgaggagtctggatgattcactctgaaggaaaaggggagagaagagagaatcactgctctgatttgaagtgtgcaaagttcttatctatgtcacttaacactggtataattaatacagaaaggaaaatgaccctcaagaggaaggtttcattgagcagagcgtaagaggaacaataagagggtaggagacacctcctgagaaggtttgcttgtgttcagctgaagattaataggaaacagtgaaaaagcaacgtcctgtgatcagtaactttaaagacaagcttggttctctctttctggcactactgacattcccaccattctagcttccaaattctggaaaaagagaagatgattaacaaaaatagagaatgtagaaacttctggttttgtgcctacaggattggcaccagaccctcagtgctcacttgctccatctacaaggcagcacccctcccagaggcagccggggaggcctctccaccagggcctgcgctggctggtggtgcggcttcctccctgggcgcagcaccaagtgcacgtctcctacttggccatcttgcggatcatgtagttgaggatgcccccgttgaggaaataagtgagctccacatcagtgtcaaacctcatgacagcctggaaggtcttgccagtatccagcttgacctggactttcatttgtggtttgaggttttctggaataatgatagtgtatcgttcttgccctgtgagccccagggcatctgcattctcaccagggagatattcaagtgggatcacacccatcccaaccaggttactgcggtgaatgcgctcgtagctctcggccaggacggctttgattcccagcaggaaagggcccttagctgcccagtctcgggagctgcctgcaccgtactctttgccagccagaacgatcaggggaaggcctgcctgctggtaccgctcagcagcatcaaacacatcaaggatttccccagaaggcagatggatagtctgtggtgcctgcttgttcaaaaatctgtttaacaagcgaatgttggcaaatgttccccgtgccatgacggcgtcattacctcggcgggagccataggagttgaattctcgtggagttaggcctctgttagttaagtagcgagcagcaggactgtttcttgcaatatttccagctggggagatgtggtcagttgttaccgaatctcccaaatttagcagcacataggcatccactatagatttagggggctgaagatccaaagtcaggttttcaaagaatggtggtgatttgatatacgtagatttggaattccagaaaaacagcttatctgatggggttgctaaggcattccagctttcattcacagtctctattttctgatagacttccttaaacatccccgggatgacatactgaccggacgcgtgggtcgacgatatcccgggaattcc

SEQ ID NO: 143260 - DNA, 468 bp, Homo Sapiens
gttatcttttcacattttattctgtttccattttcataatcaaataaatgtagactgtaaaatacttatttacaaatctgtctgatttatataataaactctgaggaaactggaatgaagtagtgctacaagcaagggacagaataaagttttgtgtattaattacctgatttatactttagtccctttaagtaaaagaacgtaacaaatagaaggatagttattaatatatttggaggagaaagaaagataaaatgaaagatacaatgttcttaaaaactgagagttttatcttttttcagaagtctaaaaaatatttaaacatcttcctttatgttagcgcatatttatgttatacatttcatttacaagtaattgtatggtaaatagttacaaaaacaacaaggaaaagctttgagttaaggagctcatgattttcagtgtaaaatacatgttatttgagtaatt

SEQ ID NO: 143261 - DNA, 515 bp, Homo Sapiens
  misc_feature (212)..(225): n is a, c, g, or t
tttctgaatattttcaaaatatgagtttaatgacagaattagttagctagtattccacaaaaagtattgctctattttcaaaaaatttgcacagtgtcttacacatgtgctaaaagattgagaaaataaattagaaaattatactgcacacttaacactaaatctaccaagcacaatgtaacttttagacagctcagaaggcactttgggannnnnnnnnnnnnncagtgcctcagggcatcagtatgaactccaattattgttgccctggccaattgtgggagtactgataactggagagttaattgactgctggataaagcaatctttaatctaaatgggaaggctcactagcagctacagagaaggggtattcagatcccagcttaggctaggaagccagctgacccaatcagagacatgaacccatcagaaaaatgtaaaagttttcatctttctagttttcccccaccctccactcctgctgatgaatatgtgagacttgccaactagag

SEQ ID NO: 143262 - DNA, 473 bp, Homo Sapiens
ttttttcatttgtcacttgctttatgcaaacattcgagtgtacctctttcaccacagggctagagatggtctactctgtacatacatttcacaacaaagaaaaattctgtcattccccaactctatgaccaaggaaaacttttaggatttctttaatttgtagcagagacacagtggcctagccaatcggcagtgctatacacacagtatgccagtttcccacccctaccctctttctccttttttaaagcttcaaaggttagatcaataaaatttaaaatttcctcatttaaggagaaatataatgacccacatgttaatttatattaaaaactaaaaataaataatggggttcttaaacaaggacatctttaactaggttatgattagaccagcctgtgggtgaaatgagagattatctcttctccctggaaatgtcttcaaggctcagacaattcagtagtttttaaaag

SEQ ID NO: 143263 - DNA, 338 bp, Homo Sapiens
gctcagggggtaggggtgctttattctgtttgaaatgggagaacttagttcagagaactttttccatagatgcatgatcctttttggtacatactcgaattaggctgttgggcagctaattcagctttgctgtatttcttttgaagtaagcatcctgatttaatggcttttccaaggactgcctttagtggggccttgcttaccctgataaatgtcactttactcaacataggttgtagctcagcctgggctttaaaagtttgggattgaaaatgaaactgtaaaatcccagttggcccaaggaaggcgagtccgtttactcatgattcatcttgagg

SEQ ID NO: 143264 - DNA, 2303 bp, Homo Sapiens
ttttttttaaagagtaagagcattggaattttatttaactctaggtaccatggatttgacatcagtaggaaagactaatgaataagcagccatacaacttttttggtcactgtgcttcccaagcaccaaaaaatggagctatttttccaattcagtttcatctttaataagctagacagatcctgctgcattctttgtttctagtttaccagtacatcattatgtagtttactgcatgtgtggagcaagtcattatgtagtaccaagtttacatcatcataggactacaacatgcacattctacttaatgtagctcaagcaacaggaatacaagagaacggttatgggtggagacttgcctttgacaaagtcatgatcacactaactataggtttagaaatcttattagggaggtacctacagtggttcttcaattggtattagaacatcacatgcatgcacaagtggtatggtagagaatgaagcggaagaagccgctggatggaggacagaggggaaattagagatgggatgatgccgtgtatcgggcagttctcagctttccacagtaagtctctgctctgtgagagaggcctgctgggcaacacttttgttctcatgactgcgaagtttggatacgacatctagaaaagccaaatcctgtacttccttgtgtagacattcagatcccataagagcacatatcaggaccatggaattatatttgatttcaggagcacttctttcatctgctagcagtctatgtaaaatctgtacaagtttagcactttctagatctttctcagcagtgcccaattctaaagctgctattaatgccaaagcaacaagagcttcattctgcattattacatgttcactagttgccatggtaactagatgcttgatgccaccactctgcacaatggttttaattacatcttttgatttactgtgtcgtataagggcagacagcagtctgtttgactcccccatcacaccagcatgatctttggcttcacaccattccaccaaacgctccactaacttaacattctttcccaattgttcagcagcttctgcttgtgcatctattaacattcttaatgttcccagaagtttgaactgaacaggaggcatttcagatttaagaaatttcaaaactgcctctgtgaccccagctgataacatctttgctttatttataactggaatggccaggtttctgagggcacttagtgctgcatgctgtactgttacatttccatcttctacatgtctgtccagtaaatccataagtttttctacaatcccattgtctaccatatgaatacaatttgcatcatttctggcaaaatttgcaattgccaatgctccagcaagctgtagctggtggttatttgatgggatccaagagagtaccctttgaaatacactaccttttcctccttcaaataacttctgcatggattcatctccaagaagtaataaaaccatgagatctgaaccagttttgagctcagtaatatcatcttctttgtcactatccactttttgctgaacaatctctagtagacactctactaggcctgcttcaaccagctgtagtttaatagcatcattttctgccaatggagcaagaacttcaaagatcatttctctcttatcatgttctatttgtttcttgaagagttttactagctcttcagcaatgtttgtactggcaaactgttctttacttgactcaagttctgctaaattaccaaatgcaacaagacacatttctgtaagagctgcattttggcagtggatgcccagtaatttcactaaggtaggaataacacccatattgataagctgagcttgaagcgaatggctatcgtaacatatgtttcctagagccctgcccgtttgaagcagcacttcctggtctttgctatttagcagctgcaccagtggtgaaatcaatccagcatccacacatggaattcgcataaactcatttttggctacttctgctatgatgttagctactttggctttgcaggaagactgtggagtcaacagacttgcaaacagctgaagtattccacttgcttggattttttcacttgtttccgtattattgttgagccagggcttgaagcagacaatccaagcatccttctaaactatcctcagtcttgtcaacagctgttatcttcagcttcttcaaggtatcactgagattatccatgttgctccccgagggtgaggaaccggcggggcgaggcgaaggtctgtggtgcgggcggcgcggctctgtg

SEQ ID NO: 143265 - DNA, 796 bp, Homo Sapiens
atctacagaaaaatttattgtaagcacattaataagttaattacatttgtggttcatgactaagacttaccaagttctgctaaattaccaaatgcaacaagacacatttctgtaagagctgcattttggcagtggatgcccagtaatttcactaaggtaggaataacacccatattgataagctgagcttgaagcgcatcattctcattgctatagttcatcagcatgccacaaaagacagtcaagagcttctcattggcgggatctgttatactgcacagtgaccttaaatggtcaattacaatctgtgcaccacctgcttggtcaactgcacttctgccctcatggctatcgtaacatatgtttcctagagccctgcccgtttgaagcagcacttcctggtctttgctatttagcagctgcaccagtggtgaaatcaatccagcatccacacatggaattcgcataaactcatttttggctacttctgctatgatgttagctactttggctttgcaggaagactgtggagtcaacagacttgcacacagctgaagtattccacttgcttggattttttcacttgtttccgtattattttgagccagggcttgaagcagacaatccaagcatccttctaaactatcctcagtcttgtcaacagctgttatcttcagcttcttcaaggtatcactgagattatccatgttgctccccgagggtgaggaaccggcggggcgaggcgaaggtctgtggtgcgggcggcgcggctctgtgtcctccctctacctccgtc

SEQ ID NO: 143266 - DNA, 433 bp, Homo Sapiens
atcagtcaactgctgttttattcacaccagatgctgcatggaaaaatcacgtccaaatttattttaaacaagagcaagtggtctcttttccaagactctctgagagagaacctcatcacagggacagcgcttcctcgtcagcgagcccgatggggcaggcgcggaagggaaaggccttctctgcatttggacttggcccactaaggcagaccacagagagacgccggagctggcaggaggccatttatgttctggttttctccgtgagttgtttcaaaaagggattgatcttaaaatctagtgtgattaaaaaggtgggtggggttaagagcaaaatatgctgctatatgtgtcccgcaggccccagtgtggactgtttctctgtccaggaacacacgacccactgtggacatgggagggtggggggtggggg

SEQ ID NO: 143267 - DNA, 588 bp, Homo Sapiens
ctctccagctagacagagatgacagcattctgaaaccattataaaatcaacctacccaaaagaataaccgctctcctctttcctgttagcaaagtgagatcgcatatccatgggttgttccactggaggaatgaatatggctcttcctttttcaatgatacatgacaaacaaccaagaattgtatattctcttaattgaaacatgtgaccagaaagaggtctatgattggtggttctaggaacccaagtaattcctttattaccaatttccagttttcagctctcatgtttcaaatttcctttcctatattttaataactgttttattaaccagactgagactttataggggtttataagtcacttaagaggaaattttcatttggagtcactaaaaagctgctgacagaagaccaatcctacttaaaattctgtcgaaggaaatgcagagaaatttcctaataccaaaataacttgtcatctcttatgtaattaaacaccacttactgttaaatactttattctttcttctttatcttctcctgctaagagacccactgcataattggcagtggaagtaataacact

SEQ ID NO: 143268 - DNA, 516 bp, Homo Sapiens
gcaagagaaaatctccagagacctccttctattcatttctgtaatagttttcttgccacaggagacttaagaagatttgtacagcctgctctctttttattagcagaaagtgcaatgctgctgggtaagttaatgtgtaagactgtagaaaagaagagtgctgtatatatgaatttttattccatttaaaaaactatccttttacttaagtacaatacagctgaaaatataaataaatggtaaatatatttaatattttcttaatcatagacttagcatctggcttcattctgttttgttgaatgcaattccatggttcactaggttttggtatgaacatgttaaaattatcgttactgaactgacaaggaaacttgattgaatttttaacacagtcataattcttgtcgtcaaatgtaacagtatttaatgatttctttgtatttccatatgcaacaaaatgcatcagtgttttcaggcttagtttggccattccattaaactgccaggactaaa

SEQ ID NO: 143269 - DNA, 532 bp, Homo Sapiens
  misc_feature (491)..(491): n is a, c, g, or t
aacaaattgaaggcatatgttttaatgaacattataaccaaaaaaattgagtccttgtgctagaaacatgtagaagaaaaattataaatttgtttcaaagaaagctttcagaatcagttttacctaaaatctatagctaagattatcactcccacataccctcacccatgatttcttcctgccaaccttctctcaatagctatatcagtatttggcttgattcatgttcaatattgacaacagcatgtctagttaaatactgctcgcagctggccatgggacatattatgaatacctttgcttcccagatacatttataattgtttagtttttcatttgcttacttctctgggccataattcaaccccaaattatttgccatttgtccagatctctccacatcctgatggatcaggttgtctacaaatgtcatcttgttcaaaggcctctgctccattctaacctggcaggagtagaggggtgccatgcanaaggggagcagagaatgccaggaaggcaggagaacaggggc

SEQ ID NO: 143270 - DNA, 830 bp, Homo Sapiens
  misc_feature (623)..(623): n is a, c, g, or t
tttttctaacaaaatgattattttattgctataatacacagcagatacaaaagtacctttagcaaatacataaatcagcagttattatggcaaaactactagtttaacttaggtttttcccaaaagaagctacttactttgaaaataaaactagaaatcagattattgggctgctacttaatgcataataatttacaaaatgaagaagtcaggttaaaaggctttgcacagctattgttcacatttacagccttggctcaaaccctggtctctgaccaaagaaagatctgcttataaccatatattccaaggctcagccccttttctctatctttctttgatggtagatttcagagtaagcagtggcagaacagcaattacttaaagctacagctttgcagtacactttaaggtcacatgattgggcatttgttccaccagacttgggtaaaacaagtgtgttcatttcaacatcaaagtcaaggtctgcatcgggtgagtgcaggacggaccgtacagttcaagctgccccttgcaccctgacgcccagagcctggagagcctgcacagaatattctgttgagagtgagttactgagtcctcaaggtgcagcctgggcccancagaaaaataatcacctaagcttcctacactataacctactaccaaagcactattttgtatatctaccagctcacccccaacagaagaagtacaatcttagcctgacctcagatgacctgttagaaaaatgtgattccaaatcttacctctgatgattacaccgtcgccccgattgtagccctgaaagcccaaattgctattatgaa

SEQ ID NO: 143271 - DNA, 514 bp, Homo Sapiens
gaaagaatttttgtatttattcctgttacagttttgactttcaacttctctccccgtgcatggaagtcctggtaaaggatctaacatctttattcccttctttcctcttccagctgagcagagttggataattgaattagtcattctgacattctttggaccatatcatcttagtggtttggggtcagtgctcatctgatatatctttcttaccacctcttctacttactttctcttacttaaattatctggcataagcagttatctccagcttttgttagaatcttgcatgttgattactaaaactatactttgtttcccatttatttattacccttttgcatgtatttgtgtgacagggaactctgcagcagggggtgactgacacaccaaacaagatgtttcactgggtactctgccatagaaatggcagattaagaagattgactataccaaacattatattaaaaacacaacataaaaactataaaaatgtactttaggacattaaaga

SEQ ID NO: 143272 - DNA, 347 bp, Homo Sapiens
ttttgtgttaatattttttatttacagtacagattaaaggatagggtgcaccatttttgtaacttttaaggcgttgcaaaagggcattttctgtcaaatatttgtccaaagcaaggaggtttggaagagaggagagtggagttacataagggctgacttagtgagttttctttctccaagtgcaagtctgaagggcctagagcaaataggcttagttttctgcccattggaggctgaagtagagacagatctttggcctcttctggaagtgctgttgaatacacagccccctttgatacacagatcacctccaggtcagcaaagaggcttcgaggctggcagtggtg

SEQ ID NO: 143273 - DNA, 567 bp, Homo Sapiens
acacggcggcaacgcgggtggcgcggaattttgttgctttaacattttattttgtgtaaaaaagggcaaatttagtgaattattttcatcttgtacacaaagttataattttaatgcttttcacatccatgctgaaaatttgcaatttggtaaaaatgaaaggaacataaatttttccaaaggaatttttcacgccattatatatacacttcatgagaaagtttcaaacactttctcaatgatcacgagttaccaagaaaataaaagattaaatttgtacagatattgatctatatatcaaatacatacagaaatgatgtaaaaaccttatgcagtttactttgacctctgtcctcaaaagatttgcccagggacagatgcttttcttttgtataaatgactgtggctttatttaaaatatgaaaatcaaaggaagaaacccagtttaatcacagtatttttaaaatcccttcccaatattaaaggatcattaccaatatatagcaccataatacaaatattgatgggagagggtattcacatcacgcaaaatttattattataatt

SEQ ID NO: 143274 - DNA, 478 bp, Homo Sapiens
ttttagatcaacattagtatgtatttatgcacaataaaaacatttacaagttgaactggaaatttaaacagaagtttaacagctcttattatattaaataaccaaaacaccttttattcccaaaattggtaaagaataaataatataatttacaatatggtacaaaaaataaccaggaaaggcaggcattctgctttatacatacactgtatatgcatatttataatctataaaacaaattcatatctgaaacgagcggaggcctcgctatggcttaaccgagtaagagagagaaggggagcggggcgcgggaggcagggccaggggctgggctccccacacctcacccaccccaaggacacgcagccactgtgacatcaggagagcgctgacagccgcgaagggtgtgctgtgggtttttttccttcgttgtaaattactctttccttgctttctttttttaactgggtctcaagtt

SEQ ID NO: 143275 - DNA, 550 bp, Homo Sapiens
atttggtcagagaatatcatctgtttaataaactttgaaatttggtgagtgaattatcttttttactgataaagagtgatgtcatcttttttaatgtttcacataggtttggaaagaatgcattttagattgtgtgtagtattttctattagattatgtttgcaatttttgtttcaatttatatcttatatacttaattttttgttgtctgtcacctgagaggtgtgttcaaatctccaactatgatagtggatttgtgcatttgtctttatagttccattttcttacatactttgcagttactttattaaggtatatgtaaatttacatttatatttttcttctgaactgaactctttgtgtggtagcctgcttcatctataggctaatgtgtttaaccttgaaaactactagttttaatattaatataactgtcaattcttttggttaccctttgcttgacatcctttctcttgaatttccattcttttttagtttcaacctttctttatatttaccacttgtatacagcatttaaagggttatttat

SEQ ID NO: 143276 - DNA, 312 bp, Homo Sapiens
atagttagggaaatggtgggatatggactggataggggtgttgtcactccgtcactccaggccatacttacattacactcaggcaagcgttccaatggccagtgtaatcccctggcaacacaggaatctgccaatgacagaggtgcaggagttccactggcacattcccagagtggatgaggccgactgtcagctgactgcctgttcctgatgcaatgtcatgtgactttttgctgaagcaatatctaatattctaaaatttttagactttttctgcctaccttcatttcacgcttatatattcttggaaag

SEQ ID NO: 143277 - DNA, 468 bp, Homo Sapiens
tttttcacatattcactcaacaaacatttattgagtacctgattggcgccaagcaatctggaattacaggacttatcctataaatctcggaaaaaatggtttttctgcatcatgaactttgggcaacctgcttctaactccaaaggactggagttaggaactggggacttggtggtgaataagcccaagtctctgtcctcatgaagttcatgttctagcaggagagaaagacaagaaatagtcaatatgtattgttctgtataaaaatgtgtgtaattttcatgacacattagatgtgattaaacatccctccctaggagcaagtcaacttcccctcctccaccacacacacttagagactgcagagcatttttccattcatgagtaagaattgcttttccttagaaagtagaagagacggtgaactgatctccagatttagttttgaataatttatggctgtacccc

SEQ ID NO: 143278 - DNA, 1375 bp, Homo Sapiens
  misc_feature (55)..(67): n is a, c, g, or t
tttccaggtaaggtaagggttattctttggttttcccttcaaagttttccaaggnnnnnnnnnnnnntggaaaagggtcaactttttttcttcttttaaacactggatgtgtaggctagtaacttggataaaaaggtgccaccctacaaaatgtgctcagcattttctgaggccaggatgggcttggccacccgggctggggcgaaaggagacctccatctgtcacagtggaaactgaagccgagtgccagtgccgcgtccggcttcaagatcaagagtcagagcctttgaaatggaaagggggcatttgaaagggcacccccactgggggctttcagagctaaggctccagaaggaagggggtcgccctgctagtgacggagctgggagtcaccctgagctacagcacgcccagatttcccctgtgggaagccccatttgaccttttacagcccacgggtttgcaactgccacctgtactcaggtacatggcgtcgctgctgctggcttttaaaatcagctattagtttgagatgtgacagtcgccgacagggttctgtcctagaaagccatcccagtgccgtgttggctcaggggtcaccagctttgtgctgcctccgtaacagcaggagggttctcaaagcaatgttccactgatccctggatgccactgcagcattaaagacagggtcagtccccttgaggggaaaggtggcttcaaggctgttctctgggcctgtttgcaggagatccgcaggtaccaggagcccgtacttattgcttatttcagtggtggccacgccaacctgacccaaacatgatgcacacgggctcccagacttggctgccactcaaaatggacccacagcccttgggctactctgcggttctttggactgcaagacccagaggggcctctgctcagctgcccactcgggcaagaatcactgggtaccatgagcagcaggtgttcacccaacttcacgtgtacacccctagtgaccgggagcgcaccacctgaccgggcgacactccttcccaaagagcctcctggcaacacccacggcaggagcgccacaccatcccatcaccagcacccacttacccccctggggctaagatggggggcgtgagcctttcccctgagagcaaacgggcagcaagaactgctcagaatagagccgccagctagggagagggacagggcggccatctccctcctcttgcctgcatccccagccctgggcctgcatgagacctgctgggtaggaagacagcctctctgggctcttcaggtggggctgagcagcccctggaagagcacaggagtctgacgaggagccctcgtgccgaattcgccacccaggcctcgcta

SEQ ID NO: 143279 - DNA, 530 bp, Homo Sapiens
ttgccaatgcaagtttctttactgaaaggtgggtccgtttcaaaaggacagtttggacacagaatagacaaacattagagtttgagagttttcccttgagttttgcaagacaaaacatctagtaacttcagtattcaccaggaaaaattccccagtgcctctccctccagccctttctcctgcctgccttcaggatcaccccttgtctcataggttttcatttttcagttctccttcttggatagagtctatcctgcccacaggtgagccctctcttcccatgccaaatttccatctaacccttggtctgaagcaggtgcaggcttcagccaggtggaagctgctgggtgggtgctgcctagcctttgacggttgggtaaggagaagcggggtgaagttaggatgatgggctccagtctgttggccaaggttgagcctggcttctctcattcaagtttcctcattggcaagaactgtaagcctgccagttcttttattaatagatctataaagttggcacctctcccaag

SEQ ID NO: 143280 - DNA, 486 bp, Homo Sapiens
cgatgataggaataattttctctttcctgaaatctctcttcttgtgattggatctgtttgaggtcctggacggaaaggcttggacgaagtccttgcagactcagcatggttgtaagcagtataatttcagagggctgtcccatgggctcactctgcaaccaggtggaagtcaacgttgccacgacaggattaaagcaagaagaaacattatgggcctcctatctcgtccttaatgttcaaaacgcagggtatagcaaagcatataggaagaggtcgtcctcactcgtgaactcagcatcgggttctacgtttattctgctttggttcttcttaatctgacctctatagacttcgccacgatccaaggtgtaattccaacaggcaaaagaagtctaaggattgtcgaaaaggtggctcccttcagacagaccaagcccaattcatggcagcgttcccagccccagtttgaagctcagtaaggtggtc

SEQ ID NO: 143281 - DNA, 463 bp, Homo Sapiens
tttttttactaaaatatgctatttattgactattttaatataaataccactttattggtattaatattatcaaagtaattaaagaggtccatcttcatttcagaaaaatggctgtggctgtttatcatgcttattacagaatagaatacaaactagaatgcattcaagttagagggggcaagatggctgactagatgcagccaggaaatgccgctcacacagacagagaccaaaatactaagaaaaccaacacactttgagcatatctttgcagatgaaacaccaagagtctatagagaagtgacatagacatgaaggctgaagagagagaaaggtgggagccctgtgagtggtactcaaatgctagggatagtttccagtcctgaacagctcctgggtaacgggtgagggaagggacagagggacaacccgctcttgctgcagacctctggggtcctagcta

SEQ ID NO: 143282 - DNA, 528 bp, Homo Sapiens
acatgtattttttaacatagaacagaagtgacttcattctttttagacatcagaaatgttaaagttgattcccaatatttgttgtacttttttgtagcaaatgttaaaaatcacgagttaccatgtatagaatgtggactgtcatgttgatatcattgtacagtgataagccatttttatctgtatacatttcaccaatttattaacaggttgaatatttgtttctttttagaacattttatttatactgtgaagactttgttataccttatttgctacaacatagatcatatcattgctactttgacttagcatttgcatcataaacataattatgatgtttttttcatgctcccttccaggggctcagtcacttgaagaaactgttgctaaccaagctcttgactctgtttcccttaatgatacaagtctctgtaccagcgctttatgttaattaccaaaactctcctgcatcagagcatgatatctataataggagatactgcaataaaatgattaggctgtaaa

SEQ ID NO: 143283 - DNA, 568 bp, Homo Sapiens
ttttttttgaatggaacgcatatctgcatagttttatttctttctcaattccaccagaaaaagggattttcagaaaaaggcacagttgtgcttcctctaaagatgtagtctgcggtttgggaagtgctggttccctgaggttatctggagcgctggttgtaaagaagaaagttcttgtcttggcagagcaggcagagtttcaggcttcggcagctgcctcccgcagctaagaatgcccaggtgcccatgagcaccaggattataaatgctgacgccaggtttattccataataagaacttatgaaggtctgggctgacaccagcaggtgggtcaggagaacgataaggaggatgccccactttttcttctcacagccatcaaaaaatacaatgccccagaatacatgcagcaagataatgaccagcgtcatgaaagcataggccagcagtcgcatagagggtgctgtctcacctgggtttatactcttcaaaccttcactggctttttttaagagtttataatatgcaaatcggaacatttcttggatatagacagagacaaacgctc

SEQ ID NO: 143284 - DNA, 952 bp, Homo Sapiens
  misc_feature (876)..(910): n is a, c, g, or t
tttgggaatgctggttccctgaggtatctggagcctggttgtcaaagaagaagttctgtccttggcagacaggcagaatttcaagccttcggcagctgcgtcccgcagctaagaaattccccaggtgcccatgagcaccagggattataaatgctgacgccaggttaattccataataagaacttatgaaaggtctggggtgacaaccagcaggtgggtcaggagaacgataaggaggatgccccacgtttttcttctcacagccatcaaaaaatacaatgccgcagaatacatgcagcaggataatgaccagcgtcatgaaagctgaataaaggaagaattgaggagaatctccatgaatgcccactgtgcctggccccaaggagtcagatagggtattcacaaaggaaaatactccactcatgattccaaagcccaagccagaaacataggccagcagtcgcatagagggtgctgtctcacctgggtttatactcttcaaaccttcactggctttttttaagagtttataatatgcaaatcggaacatttcttggatatagacagagacaaacgctccaaagatcagcagatatttctgtgttggtccatctttgttgtcaataatgactcttgccatgaaccaaacaagggacgaaatcagtagagacaccaaccagaagaaagctccggcgatgaggaagatgatacgcaacggctcggtggcgatggtgaagacataaagggcgagcgcaggcccgaaggcaatgaaggcgcagccgaagaacacggccgcagtcatggccaccgcggaaaccgaccccccccggccgtaatggccgaattcccgggcatatgtccggtaccgtcgactgnnnnnnnnnnnnnnnnnnnnnnnnnnnnnnnnnnncgccgcttcctcgctcacctgactcgctgcgctcgattcagc

SEQ ID NO: 143285 - DNA, 470 bp, Homo Sapiens
  misc_feature (414)..(425): n is a, c, g, or t
aaaattaagaaaccaaataaattggttttgcttccttgccatggattctggaaggacatagttcttctaaaatttcctgttaattggcatgtacatctcatttaaagcaaattaagtaggacaagcaagtcagtaaaatagaagtattaaaaagaatcatcctttaaatcacagatcttattttgagattaaaaaaaatacttctagctttagccaggtgtgcatgttgctgccattttgcatttttgaatcatcttgtgtaattgtcgccatgaaagtgttactcagaattgtcatagattttcttttctttgtgcaaaaacatggaaaattgtcactgactttgttttgaggtttcccccattttgcagccttttggaacggatggttaaatactggttttggctgcattcnnnnnnnnnnnncctgtggggttcaaaagaataaacattttttaacaaataaaaaaa

SEQ ID NO: 143286 - DNA, 522 bp, Homo Sapiens
  misc_feature (452)..(477): n is a, c, g, or t
gcaaatagtagtgcatttattttataaaataaagcgattccttttctttaattttctttaatgttacctacataaaaagaagttgtttcaaagttatcctgattgtttattgtcatttcttttatgttttattaatatcaattgctattgactgaagccctttcccatgacaaatatacagtatatctgttataaacttcatttttgctgcccccttgacctgacctaactttacctcctctcttgtgctatttggcaagactatcctgaatcttgtcaaacttcccactcattgaatttgatttctgacaccaaattcctggaaagatatctatctgatcagttggaaaagaaaagagataaaaacacctatttcacaagtttcacgggacctgacctttgcgcaagagcaaaaaatttccccagttgaggtaaataaggttcccacaagnnnnnnnnnnnnnnnnnnnnnnnnnnaaggtccaggattcaactctcttgtctttgggtcaagtgatagct

SEQ ID NO: 143287 - DNA, 368 bp, Homo Sapiens
ttttaactgtggaagggtcatgggtggggactgggatgtgacactaactcagctctataaagaaattaaaggcctttcattaggaaacatctccatcttgtgggcttttaagatactgccactaaggcccattcttggaataaaaggccaattaactgtcccttgaattagggtctttcttcacttcctccaagatacctgattaactgaggtgttactgatcttactatcctaccacagtcttgttttacttctagtgacaaagcaaactttcagtgcagagtaagtcttaggtatatactgcgcttcccacttcaggttagcttttcaacttacatgtattctagagctgggccatttatatgctt

SEQ ID NO: 143288 - DNA, 540 bp, Homo Sapiens
  misc_feature (382)..(382): n is a, c, g, or t
tttggaacttaaaacactttattttggttatattataaaaataaaaatattgtttctagcacgaattgatattttctatgattattattctggaaggcaaaatgcctgatcttgagtgtacaagatgtagaagaaataaacttcaatggatgaagaggcagacatgggaaacaaagcaataataaactacactcaggaatgtggtgtgtagagcacagatgggaataacaaggccaatctaaagcagtccggggcagctgggctgccttagggaaaaatgcctcctggaataaaatttgggaacgaggaaacagaaaggtgacttagttccaaaggcaaatttgtttccatgacatttttctcttcccacgtgaccatgccntgccgggtttaggattcacagaattctgcgaaaatacagtcatgcatcacttaatgacaggatatgctctgatagtaaatacaaaagccagtaagacagttagttattatcaagtattcagtagtgtacataattatatgtgctatacttttagatga

SEQ ID NO: 143289 - DNA, 452 bp, Homo Sapiens
  misc_feature (380)..(380): n is a, c, g, or t
  misc_feature (385)..(385): n is a, c, g, or t
  misc_feature (389)..(389): n is a, c, g, or t
tttggcaataaaataaggtagattcagcacaatacctaataactaaaaaatctgtttttaattgggtggggcagacagcaagtgtgtcatcctggaagatactatttgggattttatgtaggtacataagagaaaaaagtgaacaaaagcaaggggctaccaggacgccgcagtatgcttaacatgtattttctaagtttgtattatgcctttatcttggtacttttatcttctgttctcacttgatctttttgaaatgtattttaaatcctaataaaaatatataaagtctggaattaataaaggattaaatgaaacttttgtatatctcactgcaattctcagaaaaaaggggggtgtggggagggggaattgcctgnggtantgantgaaaattgtgaccaggttcttactaaggaatatggcaactgcataatcaaatgtcagtggtt

SEQ ID NO: 143290 - DNA, 607 bp, Homo Sapiens
  misc_feature (256)..(264): n is a, c, g, or t
tttaggcttttctttcaaaattcattttattcaggccatatctcttgtcaaggagcagaaacctattcaatctaagctttaaaaaagtgtgatttattgtacagacctttatacaaagcacactcaaggaaaaatggtacagaggcaggtcttatgaaggtggtgaacccaaccagctctgaagagctcacaggcacatagttcaccaccattaacctgacccagacaccaacttactcactggtctcagttcaannnnnnnnngagagacagagagaaaatatgattgggttctccttgagtgaagtacatctgtttggcctaattagttgaggccaaggtgatgaggacatttgagcaaacatggccacttaggtgcaggtcttaggtatggctgatggaaggaagcaggttctctcagaagatgtatgggcagatgcaatgactgacaactctattttaatgtaatataaaaaatagcatttgacaccaaaatagttctaagaaaatgcaattattatgaaacaaacatgagtggatacaagtaatgcaaaatgacggaactctgacctctgtgctgtcacagtgatttaattgccttgcatgg

SEQ ID NO: 143291 - DNA, 780 bp, Homo Sapiens
tgcatctcgcttattttaattaaggatcaacctgaaataaaatggctccaacagggcagaggatgcctctgagaggttctgaggacaggagcaagagactttggtgttatttggtgttgttggtcctgacagtcagggtcaagtagaagaatatgaatcaatgaagcttgaggaaaaattagaaaattagtctagcaaggggagccccatttctgtgcagaaacatatggccacctataaccagcagctaaagatattggacttcttttaacatacagaggtgcccagaacaagtgtaagggcctcagtgagctgcaagttaacgttttgttgctttccaagtctgcttttctggaatcctgacatcccctacaaataaaatcaacattgtggactgtctcattttagccatgaaaggaatggacctaaagtctggttagtgtctgaggtggtggttgtcgaaggttccagagaggtgccaaggaaatatggctcagccgcatctccatgaggaggagtaagtccatgcttctgcccacaggggccttctaggctaccggtgagctgtcacttcctcttccaggagagtttgatgggtgctggtgcagcagccgacttaggaaccagaggaggtgaagacacccaggagatcagagcagggcagcccagcactgtccgaaactcgcctggacaagtccaacttcattcttttcagtacgactagctcctgtgcgctgcagaagactcgggctgatctgaaagcgcctctcctattcgaga

SEQ ID NO: 143292 - DNA, 571 bp, Homo Sapiens
tttgcaaacttttcctgcctttattcataagccacgagtgggctctttttatagaaagagaaggctgttgtagtaaaagcctgatcctatttcagaatcagaattgctgacaccagcagatacaagtttcccaaaattgaaacaggatggggagagggattagaatgtgacaagctcatcaaacaagcacaagtgatgtgttctttccagaactgtgtgtgttattgattgtctgttcagctgttgcacccattaattccacatcacttgttccacagttccactcatccacaggacagatgagaaaatagctttggtgcctgtccaccattttacccactgccacgctcctagattgattgttcgatgcccatttttgagatagtaagaacaggaccttccgacttgaaaaaagttctataggccttaagtgactgctaaaaatgacaatcagtgctttcgccattttgtttgtaaaaaatctgcttttaaatgtaattcaagctacatattgctcgctctgtattccctggttcaactagattcaaacagcattttctaacttgtaaaa

SEQ ID NO: 143293 - DNA, 888 bp, Homo Sapiens
  misc_feature (444)..(458): n is a, c, g, or t
gaaaagtgtggaggctagggcaggcaggttgttaggactgaaggtttgcccattctgctgcctccatctcagctccagctccatccccctctccacagaaagcagttggtgacacgaggttctatacttttcttctgttgctctcttgacttaacgtgaaaacagggtatatttgaacaaactgtctgtcccaggcaggggctgggcagggcctgtgtgccttgctcagcctcctgacaggacacttttgttgcacttagaatttacattttaatggatgtaaaaacaactgtgagagatgtctgggcctgcagaagtccagcattgctcaaaaaagcgtgtgttctagtgaacattttcatatatatttattggttatagcctgttaaaatattttcttttttgtattatttatccccctacattatgtatttatatgagggnnnnnnnnnnnnnnnttgtacttttttagtatttacctgttacaaaggacattgtgtttcctgtcatgtaaaaccagctattttagttactattgtactctagaaaagagctgtagatttatgttaaactcgtacttacgaacaattgtaattagttctaaaaggcatgaactcagctcctaatcgtcactgtatagtcctgaatttgtagaactagagttaattccctcttggaactttctttgttcttcagtagttacttttttccttacctaaaagggttgtctgtcaaacaattcttgaataaactttctgttatcaattttatcttgtcctggtggtccaatttagatagcagagcaaggctgctgactgccaaatttcccccaagggaagaaggacaaggacaaggacactgaagacccttccctggccttttgtccac

SEQ ID NO: 143294 - DNA, 499 bp, Homo Sapiens
ttcttcaatcgctctttttgtttatttgtttgtttgctttcattaaccaaactcaggggaatgtcatgatgtcaccaaggccaatgggtagagaaataaaaaccagccatccataattgaatctgtaaagtcagtgaacttagccttttcaggttcaaaattacacaaacacaaggattttcttatctttcacctttcaaaggttttctttttattttgccacctgttttccaaataagaagtgggaagcctcttagataaattgtgataaaaatgtctctttgtttggcgtgagctatcaaattagctttgtgtgtccactgagccatcaaattaggctttggctgctggaggcctaggttctagctttggtcacctatcagaatcttactgttacgctgggcatggtggcatgtgcctacagtcccagctatttgggaggctgaagtgggtagattgcttgagcccaggagcctgtgcaatatggtgagacccatct

SEQ ID NO: 143295 - DNA, 459 bp, Homo Sapiens
ctgtccaacctgtctcatttgctggtttcaaataagctacctcacctttgatttcccactgcaacttggtttcaacttacacttcagtactctagttgttagtaccatacaattgccaagaggctttttgttaaaggctacttctgatatcaggttccagctaagctactcagtaaaatggctcaaaccccagcctctctattttagtcttcaggagtactcttacttcactgttttttgtaacatcttacaatttaggattgtccatctaccttcctctctctgcaagttcttgagatgtaatctgctgccaactcttcacaaaataaaataatatttaatcgttcttccttaatagtcttgcattcagtgtgtcaaattgatgtactaatgaaaaatacctaaactgtggggaataagaattaaatctatttcaagcacatgcaacttggaactcgc

SEQ ID NO: 143296 - DNA, 499 bp, Homo Sapiens
tttttcattgctcgcccagcagggctggcctctatgaggtttggtgtttaatattcatttcatgtcaacaatgtgcaaagagcgagtagactctcctaagctgagagaagtttgcaagggcaatgatgttgatctgtgcttccatgggactaataaggagccagtgctgttcttggagctgctgctactgctgctcctggccaaatagcaagaaaagggaaaaacaaaactacaaaactggcaggctcttctgggttgttggttcagggagcaacaaaggggtcctactttgggtgacagatcacccttctcagccttggtacggagcgagcattccatcaatggggcttttgtaatagttattgattctgtgactatttattgagccccttctatatgcccgaacctgaagaaaaactattgaacaagccatgatccccagcctttaaggagactaattctggggttactatgggagctagggcaccctcctcaccgg

SEQ ID NO: 143297 - DNA, 1031 bp, Homo Sapiens
ttttttgtgatttaattatgggttatttcacaggtatcaaaactaaataaacaacagggtaaaaaatatgcacagattaaatctttaatcagcacaatataagttgcttaagagtactctgttcaaaataaaggtgttattaaccacaggaaaagctgtttttaagtaatctgaataaagttttactcagtttcatgactatcaaaaagtcttgatataacactacagaccagaattaaggggtttaaattttaggattaagaatttagctatctgaataatttaaatttcaaacttttttctttccctacatttcactggcaaaattaacttcaactattattcaattctcctggattatgcaaaagctgctgaagatttgatgtatgacacatttggctgacactctattgcaacctatgaatgggtttaactattacacagtattcattttcctttcaaagattttacacaatagtgacagtaagataaaatatgtagtaacaaaaaattcaggaaaatggtgcttatatgataaatattctctacttacagcagtcaagaagtcatataaatttagttaatattttaccacagtggattacttaactttctgtgctgaatgcaaaaagtcaagcattgcccatgtaagtctctaagtctaaatggaacagagatagtgtcgacagacagaaattagtttctccaaatgtcataattaactacaataccatcccttgcacaagaatagttggttctctttaatcaattctgacatatacagctaacaagtactttcaacccctttatgacagtatcacccacgagtaacagtaattcccaagtcggcttctcggtcaggtagctacctgtgactactgaagcgggcaaagccaatttaaaaaactataaaattaataagtgctctttgcagaaaaagaaaagtaatatacccatgtgttaaataaaaagcaaaagcacatccaaaccctctccattaaacgaatcgaggagcaccactccatcgcaaa

SEQ ID NO: 143298 - DNA, 607 bp, Homo Sapiens
ttaaacccaaaataagtaaaatttaatttaataaaattaaatctatatgaggtaatgactatacaagtacagaatggagaggttcctctttacatgtgaaagacctttgagtttacactttcaaactccttgagtcaagaatatacgctgacatagaaacaaattttattgtacatttcttaatactgtaaacttacacgtacttcccacataacctcaattcctcatctattctcttgtagagatatggtagtcagtgggacagacgcttaaaaagctgacaagacctatatttttaacttttatacattggcctttgactacctggaatagtattaaatagctgtttacggttatgtcctcaaaatcataccaaatgtttaaaatgcagtctaatgctactttttacaacccaagaagatagctgttattatccttatcttgaataagatcctgtgtttgaaatcaattctgtggggttagagactcatcccagcaggtaagtgctaggtcttttaataattccaccactttccttcgctgtttagtgactattcctttttgctccattacacagctgctgaaccacaacgagtagggcccaaga

SEQ ID NO: 143299 - DNA, 930 bp, Homo Sapiens
  misc_feature (46)..(76): n is a, c, g, or t
  misc_feature (94)..(127): n is a, c, g, or t
  misc_feature (142)..(308): n is a, c, g, or t
  misc_feature (312)..(322): n is a, c, g, or t
  misc_feature (347)..(362): n is a, c, g, or t
  misc_feature (368)..(529): n is a, c, g, or t
ccccggcggcccaagggggttatcccccggggggaataggtttctnnnnnnnnnnnnnnnnnnnnnnnnnnnnnnngaaatttttataaatttnnnnnnnnnnnnnnnnnnnnnnnnnnnnnnnnnnaaatttaataaagannnnnnnnnnnnnnnnnnnnnnnnnnnnnnnnnnnnnnnnnnnnnnnnnnnnnnnnnnnnnnnnnnnnnnnnnnnnnnnnnnnnnnnnnnnnnnnnnnnnnnnnnnnnnnnnnnnnnnnnnnnnnnnnnnnnnnnnnnnnnnnnnnnnnnnnnnnnnnnnnnnnnnngggnnnnnnnnnnnaaaaaaggttttaaaaaattttttnnnnnnnnnnnnnnnncccaannnnnnnnnnnnnnnnnnnnnnnnnnnnnnnnnnnnnnnnnnnnnnnnnnnnnnnnnnnnnnnnnnnnnnnnnnnnnnnnnnnnnnnnnnnnnnnnnnnnnnnnnnnnnnnnnnnnnnnnnnnnnnnnnnnnnnnnnnnnnnnnnnnnnnnnnnnnnnnnnncagattcaatattttaataaaaaatgtttttattaatggccattgacttctactgatgcttcctgaatctccagctcgtgtggttctcttcctttttgaactttagatatccatccagcaccttctgcgacattttgtagtatttcccttaagatcttctactgatgcttctttaatctccagctggtgtggttctcttcctttttgaactttagatatccatccagcattttctgcgacattttgtagtatttcccttaggatacaaattcagaacagcattcattctccaatgaattcaataacctctttcctgaatgacttctctgtcgctcataccagcctctttcctgattttccacactgggattctcactccaattctcaggtttcctgataga

SEQ ID NO: 143300 - DNA, 448 bp, Homo Sapiens
tttctaaaaatgcaagtttatcacgaaggagacacaggaggttcagagacgatgaagcggcaagccgggaggaaagatctgagagaagccaccaggctggggcagcatttcattatatccagaattccacttgggctctgcagtttctttcttcctgagaattatttaaaagtccctgagtgccatggccttggcatgaatatacacttcctgagcagaacttaagaatgagaatatctggagtaattcaggttctgctaattctgcatggttgtcactgcgatgatgttcattgttctaggtaagaaggataaatgagtaataaaagtttcatgggacacatataagtgaactcatgttttatatccacttcagtcattcattgcaagcgagtcttgttcaatgagatcaaagcagattggttaggattttgacttgaaaccttctg

SEQ ID NO: 143301 - DNA, 480 bp, Homo Sapiens
aagtttatttttctttagtgttacaattgaaaacattcaaattgatttccttaccttttctacaagaaggaactgtaatttttaagaaactctctggatgattgtctaagacttcagatcctaccagacaataagcttcaggagaccaatttaagtaaatgccttgtcgccaatacattctgtttgggcgaagtgctcgttctaaaaaatggagccattaattattaactgcttcctaagttaaagggaaaaaatctactgcacacaacacaagtgattgtaatacagatctattcattttgaaataaagtattgggttgttactgatatgagtcctcatccatatctattaaatattttatccacaactttacaataaaaagagttaaatcccctgcacatttagatccatttcaggttgatgctgttaagcagtttaatatgctcgacagatgaagaaagaaaatcataaataaatcc

SEQ ID NO: 143302 - DNA, 302 bp, Homo Sapiens
ccgcaccaccaccacccaaactagtttattcaaaagacactaagtgtctactctgtggtaagcacagtcttaggttccagatcacgctagaaagtaggagaaacactccctgtctttatggaatcaataggattagatacgcaggaagacaagtatttagagaggaaaactacagtacattgtgatcagtagttctttaatagggacaaatacaggatgcatgaaagcccggagatggaacccctaatgaaggaatagaaagtaagagaaaggagagagacacccaagctgaggcctgaaag

SEQ ID NO: 143303 - DNA, 529 bp, Homo Sapiens
ttttttaaccacaatttaaaaggcaaagggaaggggaagcatattaaagggaagtgccaaaatcgtttcagacaaacgcattctcaggcataacttatttcggtttagtttaaggtttgaaataagagtttttcaaaaaccaccaagtttatgacatagcatctaattcagggaaggaaaaggggacaaatggaaagtgaaaagtctgaagtatccttagctagtcagaaacacttatgtgcagccacataaaacatttccaaggtctctcaccactgagttctccagtggcaagtcctctaagataaaactacagtgccaatatcaagagcacatgggattgcttgattggtgcaatacacataagctacaaaaatgtatgatttcttaggcctttgtttctgttcaggtaatcgatattcttctagagtttagtttgaaagacactttgtagagaacactggcatggacctatttctacagaagtggaaataaaattttgagtaaaatacagaaaaataagataaat

SEQ ID NO: 143304 - DNA, 519 bp, Homo Sapiens
agtcttaaagatattttactaacatggtaatattaaatcaaataattacatgaactgttggaatttcatttgggcaattttttaaaagataatttttaattgctatgagactggagtttaagagtggatgatttaactgaaatgttttagtaagactgggtagataaaccaaacaccctgaattcccttaatagcagttatcattctgacatcttcttattttaaagaaattgctgaaaatttgacaaaactaatgtggatggctataattaaacttgacaatatctatatgggggaagaagtgaaatcactatatttagaaacgaatgctaccatcccaccccaactacatgttcaggttaaatgcgtgcacatcctggtagctggaacatctgtttctagcttgttgttcctcttggctgcttttcaattggatttcctcgagcaggtcccaggcttgtcactgcagccagggtctgttaaccatcaccactggttctacattaagtaggaggttca

SEQ ID NO: 143305 - DNA, 620 bp, Homo Sapiens
agcatgcattttaaaagtggcttagatttagttttaaatattttggggtgaaaggcaggaacaattctgtttttgacatacaggttttctttgggattgttttcattttcaagtatagattcatgtcagaatggccaacttaacgtgggtttctgtattccctggtgttgctcttaacctgaactcataatcagttgccatactgaggcaagagcactcagggtgaacatagtcaagttactttaaaagtgataaaagtgtttttccatggtgaaaccttcagtatttggctgaatgtaaagtatgttgaagtggtatattgatggtaagttgttaatcactaaccttgtttgcacttttgtacaccactgcttgcactaggatcttggtgtgaattttcaattgttttacagtgtatacagattattaaggataatttatataaagatgtttctgtttaactttgtgtgttttacaacaaagagctataatagatggttaaacgtttttgaattgtgtttatatgttagtttgattatgttctattatcttttcacctgccatgaatttgagtgttaggaagggaaaaataaaatactaatctggtcttgaagaaaaaa

SEQ ID NO: 143306 - DNA, 410 bp, Homo Sapiens
tgttatcgtatcaaacaacttcaaaggtaatggcctcaaaaagaattccatgataagaagccaaacttatgttcttgcagcaagctgtagctgggcatttttatagtggttaaatcatgaacaaaaagcaaagagtgccacttcaggaaaattaaagaatcgcagagtctgagaatgttctactctgcaagtagaaaaacacattaataaagaggactttataaagcattaacccgacagtcaaagcagcagcctctgaagaccttcttacactctcttcttttatagcctagtttcttgcaagggcaggctacaatttttactgtaatttctaccttgaattcatactccaaatcattataccctagctgctgcctaccccgccacctcagtccactgaaattcctctc

SEQ ID NO: 143307 - DNA, 570 bp, Homo Sapiens
  misc_feature (517)..(517): n is a, c, g, or t
tttgggggtgagattcttatattatctatttgctctctgctctccaccaagccctttgcttatgtgaaggtaataaagcattgtacacagaagacaagtaatgaagagaaaggagatcttctaaattctgtccccagagtcccccacacttgctgattgactgatgctgcagttgtcctcctttggctctcactaggcttcttgttggctgattgagaaagagagtcctagtttcaggattacccagaagaccatggcaagactggcacaaaaatgggctgggagtgggtgagtggaggccacatccttacgcgaccttacaggatagtttgtcagtttacctgaataaaaaggaaggtaatctttggcatctctgactttctgttaaaaatctttttccagtttttgccaccccatcctcaaatattccagccctctagcacatcccattgttagcaccatcttgctttctgaggcagatagaagaaatgcctgatctctctaatttctcttattnttcttcctggtcaacatatctgcttttcctgtctcattcatatacactgataa

SEQ ID NO: 143308 - DNA, 580 bp, Homo Sapiens
  misc_feature (483)..(483): n is a, c, g, or t
  misc_feature (521)..(521): n is a, c, g, or t
  misc_feature (553)..(553): n is a, c, g, or t
tttacaggaaaaataaggcatttattacagattgaaactgatcagaagaaaaatcacagaattcacaaaatcattctttgttggaacttttcttccttccattgcattttgctgttaagagaaaaggagtgtgagggtcagaccaccgtggcatgcgttcacattccagctttggaggccagggacccaggactcctgggaattattcaaaaccagatccgatgataccagacactagagcagctatgcaaagcagcagctccttgaacaaaccaaaagggcgagggacacctcaaggccgttactcaaagtcagtatttattcttgctctgtgccggtggtttgggtaccttctgtttccaggaggcaatacccttctcatgatcccaagtgaccgatcataaaattgttcacttatggactcgtctgatatgagaccaaatagataattgtttctccatttatgagatcccaacatgtccncaaaaatcatctcttcgcttgctgtagactcagacgtngaggaggaccagctgcagcgagcatgcacgcnctgcaccctgctggcagataccttcac

SEQ ID NO: 143309 - DNA, 581 bp, Homo Sapiens
tttttataaggcaagtagtattttattttcaggatcctccgaaaagctgggaaaatctcatctccattatttttaggcactgtcactgtctctcaagacataggttttaatatggtatcgtaccaaaaatgatggcagtgtagcaattttgggccaatgtatgggcatcctttatcattgcctagtgcagcaagtcatttgaagtgagggcattcaatacctacaggcattcctagttgaaattccaattagaaaggaaaataaaggacaattgtacagcctgttaaaagttggacgattccaaataatacggagagaaagaatgtctgatggctttttggatctcttgagtattccagatgatactctacttgcaatacgttttaaacccctaggaaagaccatttctatgaccattgaagatgcaggtaaaaaatcatccaaagaaaaagacattatacaaaattggtcttaacaaatacttattggccaccctcaccatgccaaaaatgaaatcccggtatcaatcagtatgatcagaaaggacctctggaatatgcggctctttgacttggttttta

SEQ ID NO: 143310 - DNA, 524 bp, Homo Sapiens
ctcacatgtgatttcctcttgcattttttctgctagaagggtccacagtacttactttatgcctcatctcaattgaagctggatgatgaggatagtgggcagtgattgcaattggggaatgcatgtactggatcacataaggtcatgaaagtccttgaaacagagccttgccaagcagaacccttgccactcatggtattcgatacagtctacccatctgacatgaaatgatattcttaatgagccattcctatggaagatagctattgccaggcacattcagtctcctggtctccctctcatagctatgtagggcctatgacctagaataaatggaaaaatgttatcaggaggaagagactgctggactcccctgagaggtagggtttgtgctaggagagctgggtgccatttatttcattttgatatatcaggtgctcctagtaacaattcctagtttctcttacctctgtaatcatcctgaatagtcactgcttcttgagctttggtgagtgttctctaaa

SEQ ID NO: 143311 - DNA, 491 bp, Homo Sapiens
aaggggtctataataattattttagaaaatggaaaaatgaatataatctgagaagaaaaaacacagctgtttatcttagcacttttgaaaagcaagtagagaaagatagcactctacaaacctagatttaaatccaaaggtggctgttatcttattgttgttctcataggattttattatctgtattgagatgttcctcgctgccattgctcatcattacacattctcatataaaccatatgtccaagaagcagaagagggctcatgctttgattcctttcttgccatgtgggatgtctcagatattagagatgatatttctgaacaagtaaggcatgttggtaagtaccagctatttaattcaaccaaataggttgggtaggatattgaatttctcctactagggcaatttattatctatttagagatgaaaaaagactttaaagcagtaccacagtgcaggctcatcaactttggggagtgggagaggg

SEQ ID NO: 143312 - DNA, 953 bp, Homo Sapiens
  misc_feature (766)..(777): n is a, c, g, or t
  misc_feature (825)..(859): n is a, c, g, or t
  misc_feature (862)..(900): n is a, c, g, or t
cggtctgaatttggggctcccttggctaagaccccgctgggtcttacaaaatcccctgtgtctgggttccacagcccctgagtgggagacccgcggattgtctcaccaaaaagggggggtttccaagcctctttttctgttagcgtggcgctctgtttgccccaaggggagttatataaactcggattgaagttccttttcttcgggaatcgccaaagtgtcccaagcagatcatggtctttgggggccttcccttccccaagcttttccaggaactttaagatccttgtgttcctgatcttggtagaatactcagttcctggaaatgtgaggaaaggcaatcaacacctctctgtggcagactcctgccacgtggtgaaggatgctggaaccctctctggagccccgtgacttccgagatgcacgcccctggggacacccctgatgtccacttgcctgcctctggtactggaggcaagtagtactggaaaccttggccggagtcctgggagggaaggtggcagtgacggtgtctgctttccaatcaccggtgcttctgggagctgccccttgagaaattctatttgcttaagcaggaaactactgggggaagatcctggcccaggctgctggtatctgagctgtctgtgctcatagccttgaaatggatgggtgtagtatccgctgagggaataccccgggttttgcactttcctcgggaacaccggccggacacccgggggtgcccattcggccgggagccctnnnnnnnnnnnnggccgtaatggccgaattcccgggcatatgtccggtaccgtcgactgnnnnnnnnnnnnnnnnnnnnnnnnnnnnnnnnnnncgnnnnnnnnnnnnnnnnnnnnnnnnnnnnnnnnnnnnnnnctactacgagctagcgctataggtaagcgttcaatgcattaggtttttctttt

SEQ ID NO: 143313 - DNA, 512 bp, Homo Sapiens
catgttataactttattcaacaataattcaataacatttattttatttattctagttttgtaccagccactacactggatgcaagagatataaaataaactagagtgttcctgcctttaaggaatttacatctaactggggaagtggagaggggtagaagaaaacatagacaattagaatattattaatgtgtgttgtagcagaaacaaatactgtgctttaaggcacacaggagggacacttattctgcagagtcaaggaaggtgtcgcagaatgtgtgatggaaactgggctttgctgagcaataaagagggaatggggacagatgggcattctaagcagaagaattagtatgtgtgaatgtcccgagtcaggaagaccatggctggacttggaaccataaaagtaggagctgatgtagagtgccccacgtctggtggtagagaggtggcaggtgaggtggcaaaccaggcagcattgacatcatagtggaactcctatgtccttctaag

SEQ ID NO: 143314 - DNA, 463 bp, Homo Sapiens
  misc_feature (405)..(420): n is a, c, g, or t
tttggaggttaaatgccatgtatttaaaataattcttgccagttcaattgcgaaagttctctgctcagttttgtggttaaatgattaggtctttccagtggggaagggcagaaggactgaaaagaaagggaaatgtaaaattgaggtgactttaggggaaatgttgggaatagaaaatttccatggagttcatttagtgcttcaaacacctgtgctctgctaaggcaggtagagaactctgtattgtgtgcaaatcactgacctcgctaaaattccagtttcttctctgcaaaatgaggagtaaataatagtattcattccagcaggtttactgtggagacttttctctggcagcatatcctcctctgtcctttctccaacatctggaactgttgtttcatacannnnnnnnnnnnnnnnctagttgtttatagcatgaggacaattcttgtcccaatttatt

SEQ ID NO: 143315 - DNA, 379 bp, Homo Sapiens
  misc_feature (16)..(16): n is a, c, g, or t
  misc_feature (30)..(30): n is a, c, g, or t
  misc_feature (34)..(34): n is a, c, g, or t
accactgcactccagntcaagtgacagaangagnccatgtctccaaacccaacccctccccaccaataaaacagatcaatggaaacaagattattctcacatacctgaggcagcccacctactgctcttactgcaggaagtttatctggggagtatttgggaaacagggttatcaatgccaagtgtgcacatgtgttacccataaacactgccatcatctaaccattaccgcctgttttttgccaaaacaatattacccaagaagtttcaaagtttgccaaacaggggttcagaatcaacttctcacacaacttcagcatccacaactacaaatcactaccgctttgcaatcactgtggccccttgctttgggggataa

SEQ ID NO: 143316 - DNA, 850 bp, Homo Sapiens
tcataacaaaagtgtgatttatttctgagatcttcttactctagatttatttataagttagttacgttaaaatcagtttttcccaaccagcatacataaggtgttgtacaagctccctcagctggttaagatatagaactaccaaaacacatgttccattaggttgactgcgtcatcctcttcagaaatttctgtaactgcagcctgagatcgaagaatagacgtgatgtcattagataatttgtcaaagccattctgtgaacatatatttgccacttcttgccacttttctatggagcaaaaggaatcatttatcataagactttctactgcatctatcccacctttattgatttcttgaagtagcttaatgccaacttttttcatgtctgcagagaacagatgaagtatagcaagaccaaaagataaagatggttgtttctcattcaactctttagtgagacactgaattaattcaacttggggacatgacattaatagctgcaacaggtcatcggtagtaaagtccttcaactgctgtatgtactccatgaccctatgagtctgaccctgtttacacaagcaaagaatagctttcttgtgcaggccacattcactgtagataatctgagctaaagccaggcacttggccttgttataagtatcctgctccccataatcacaaatcacatccccagcctcctcagaaaatgtcagtccttaaatgtattcattgtaccaatgtttcgaagaattcgtctaggactgtttgctgcataacaagctgccttttcatattcaccaagtgagattaactcattaaacctgagtccctttctccaaacacccc

SEQ ID NO: 143317 - DNA, 934 bp, Homo Sapiens
  misc_feature (230)..(244): n is a, c, g, or t
  misc_feature (781)..(781): n is a, c, g, or t
  misc_feature (911)..(911): n is a, c, g, or t
tctgcttcactctttaattttcatggttggccaaacagacaatccaagttaaggccatttgaagacaaataaattgatccattgaatttatgtatcctggaggtgctgccagagaatgtccaggccagagagaaagcaattgttaagtgctcagtggagaaaaacaaagaatcttctgtactatgtaataatcatttcccagtgatgaagacaacggtacaatggatccnnnnnnnnnnnnnnnaaagcagccagcagtcaatgaaataaggtgtgaaaaggagaaacttcctatattctttcatagagcttttttctctcctaacaccaggagcacacacacaaaaggatcagcttcatgaaatatataagctctttaagttcacttggagctggattttgatggccaaaattctcttttccttctgacattgacattcatcgttcatccacagcattgatctggtcaaaacgccactgctggcgggcttttccatcacacggacgcaggtacaaatctttattgttttcttgcaccacagcttccatgcatttcccagaaagaatgtggacaatcatcccattctcctggaagtcccagtgctgctggtggatggccaggccttcctccgtgcagttctgaagaatcacctgctcctgcctgacagcaaagcacaggtgctgtgggctgccaaagtgaatctccttcctgcctggtgtgctgcaggtactgttgctgccggctgtcactgcaaggagccaacaccatgggacagcccangatgtccccttctgccttgcagtctgcacagagcccaagtccagtgttgtggagctttccagagaaactgggcctgggttcagatggggtacagctagggtagacattagcccagaaccagtggaatgtncgaccacccagtctcccttgcag

SEQ ID NO: 143318 - DNA, 639 bp, Homo Sapiens
  misc_feature (147)..(170): n is a, c, g, or t
  misc_feature (499)..(499): n is a, c, g, or t
  misc_feature (521)..(521): n is a, c, g, or t
tttacttttttgtaaatatcaccacttcattcttcctttacacagctttaaaaacatcataaattaaaacatggagtcttatttatagtgtcccttgtatagagctttacggtttataaaagacaaatgattgcagaattaagcttnnnnnnnnnnnnnnnnnnnnnnnngtggatttgcttttgtcaatacagaataaatatatcccccaaatacttgggaggtacaactttaaccaacaccctgcacttgcagatccctcttccaatttcagtatttgcaaggtcggtgattttgtttgtttaaaaatctgcaggtattgtgattcctcttaaaaaggcctgagttaaaagttccactctgggacttgtatcagattactctctgtagcagaatccaacctcttcattaatacaattcttcaaggcaattctttcacataggaggaacaatcatgccagatatcgcttgcaggctgttcccgttggtgctggtgcangtgggaggtgcggaggtctggngtctgacgactggtgcgaaagcactcttctgtatcacggctgagacccatgttgctggtgagaaagagaagatgcccgacgagctgctgcagttggaggggaggcttgtgatggagcc

SEQ ID NO: 143319 - DNA, 573 bp, Homo Sapiens
catatacctgttggccatttgtatgtttcattttgggaaatgtcaactcagattcttttctcactttgtaatgggatttatttttttgatcttcaagttccttgtatattctaggtattagtcccctgtcaaatgaatagtttgcaaatattttctcccattctgcagattgcctctttactctgttgtttcttctgctgtgcaggagccgtttagtttaatatagtactatttgtctatttttgtttttgttgcctatgcttttgaagtcttagccctaaaatatttgtgtagaccaatgtcctcaagtgcttcttttatgttttcttctaccagttttatagtttcaggccttacacttaaatctttaattcatttttatttgatttttacatatggtgagagataggggtctactttcattcttctgcatcgagatattcagttttcctaatgctatttactcaagagagtgttgtttctccaatgtatgtttttggtgcctttgtcaaaaatcatctggctttgaatatatgtatataggattttccaaagttatttgaaaacaatagt

SEQ ID NO: 143320 - DNA, 561 bp, Homo Sapiens
ttttaaataagaatttattgtttattaacctatgcatgttcaaatgagtctctgtcctcaagggggagaaaactggttcttttatgtacaaagcacagatgtaggtacagtatataaacagatacgtagtacatctgtagtattaaaatggcatgggaggaggcagttagaaaaaacatctaaaacagctccttagaaggccaataataaagttggaaaaaagggagtttccacgcagccagtggtgagctgcatgggataccagcaccattggcaggggaggccctcggggagtgatggcttggtgctggcgcaccactgggtaacctccaggcaggagccacaggctggaacaggcgaacactttcttcccatcacctaggtggaaattaattctgccaatacttttttttaaaggccagtcaatggttatgagtggataggttcaaagctgaatggagttcattagaccttttttattattctaccttttctgcatatgtttgcagttttccatcgacttcttcataaacaaacattttctagaaaccaaaatatgta

SEQ ID NO: 143321 - DNA, 480 bp, Homo Sapiens
ttttaaccaacaagttatattattttttattcatgttagaatttctatcagtgtttgaacattaattatttagagagtttgtacattttcaccttccaaggtttgaaatgagaagcatgctaggtcgccaatggtaactaataaacacttcataatcgcatgaatatccactctgctctgactctcttaacactgttaaacattttctttccttgctgtaatttacaatgaaaactgtgcccactcatgtctcagcaaagttccagacattatggattcatcacatataaattctttaaaaatatacttctgtcaaaagacttgatgactactatgtacactacaaaaataaatcttcatataaataaattatatggcatacttttatctttgtaattgaaatgacacaaactcatttccaccaaaattggcaatgagacccagtttgaatatttatttcctttaaactccttaccctaa

SEQ ID NO: 143322 - DNA, 458 bp, Homo Sapiens
ctaataggccagaaaagcaccatttattctttttaaactcttaagttcgcatttcacttgatttttcgtgctagtctataatgagtaatacttgtactacagaacagaaggattctggagaaagatcctccaactattctccatcccccacagatgctgtggacatttgagtagacttttgtacaccccagcggagtttttgactcactccccactcacagcaccatctgccatgcgcactttcgataaaacagcttggataccgcttcttggaatgatgatactgatgtaagtttcttgacttaaaagctcccagtcttctagtggatttggttgctattggtgctcattgatgggtaatcttgtggatgagctctcatctcaatttctccatcttagggaaatattttacttcccagaaaaagactgtttatttactctgaattctttcccttgca

SEQ ID NO: 143323 - DNA, 387 bp, Homo Sapiens
catccagcttccctgccaaactcacaaggagacatcaccctctagacagggaacagcttcaggatacttccaggagacagagccaccagcagcaaaacaaatattcccatgcctggagcatggcatagaggaagctgagaaatgtggggtctgaggaagccatttgagtctggccactagacatctcatcagccacttgtgtgaagagatgccccatgaccccagatgcctctcccacccttacctccatctcacacacttgagctttccactctgtataattctaacatcctggagaaaaatggcagtttgaccgaacctgttcacaagggtagaggctgatttctaacgaaacttgtagaatgaagcctggaaagagtgatgaat

SEQ ID NO: 143324 - DNA, 488 bp, Homo Sapiens
tttgttttaaaacagacatttattttcagaaggacttaggccaacatgtaacttaatggagaagggtatgaaacataaataaccacccacatgttctctgtcttgcgatcttattagcctgggtttttattgcttacgtgtgggtgaagaggaggttgaggcaggagggggcctggtttaaaggcacatcaggtgggagttcccatagttttggtgagttgccctggctcttctgtgtcagccctgcatcctgggttgaatgctgttcttggagctgggtttccacttagtcctgcttgtctcatttcccttcaggcagtagagaagccaggctgtatagatcctgacaccttgaaccaggcactggaagcccatgaggattcttgactcctctctgctcttagcacttttgcttggccaactgactttttccatttctcagtacagttgaaacacagccatctacagagagacagccttctctctct

SEQ ID NO: 143325 - DNA, 435 bp, Homo Sapiens
tttttgccagcactggaggctttattggttctgtctagtcatttctctgggattgtgggggctgacagcttaaaatggattttcaccaataatggattctctttctcttttcctggcggcactgagtcttccttgcttccctgcagcaaaggggacgtggctggtggctggagaagctggatttgccctttgatggtggccctcttgatccccggcttgctgaagtcaaagtaagattgagcgaagttcttgtcttcctgactccaagatttcagtggtgctctggcttcgcgtggtttctctggcagggtctctgcgtgattttctggctctcgctcctccacagtggtcaggaggggctctgtggaaggctccagagcctcctggggtggagctttcatcatgtgttccaaactgggcaggtccatcctgctg

SEQ ID NO: 143326 - DNA, 487 bp, Homo Sapiens
tttgccagcactggaggctttattggttctgtctagtcatttctctgggattgtgggggctgacagcttaaaatggattttcaccaataatggattctctttctcttttcctggcggcactgagctgcaacacaaaagagagagtgtcacttgggccccagagggtggttgaaggagaggggtgagcccagaggcccctctgaagaggtcgctgggggtaaggggtcttctgctgctgcccgcgtctgggcagctgaggttacattctgtgtccattcactaccagaaagcaaggtgtactggagagccctgcaccctcattctcccctcaagaaaagtgtcctggaccccagggttggggccaacaggctttcaacagggcagaccccagcctgagcattcccaaccttggtgaggcccgacccccagggtggaaagccgcctaatgccagtgtggtccttcccattttgaacccaggcccctgtg

SEQ ID NO: 143327 - DNA, 499 bp, Homo Sapiens
taagagaggcattctctctcaagccaagggatcttgtccatcctgtttttccttaatgagagacattgactacctcagaggaccctgagacccagccacgggccctgtgcagacctgcccagccctggtgaacagggcttctgccacggccttcacagtcaaggtggccccactgcccccttcagacgccacagggagccctggagaaggtacccttggtacctgtttttgcaagtaaatctaagagcatgtcagtccccaggagtgcccgggtgcagcctgccactttccgtaaggggttctcttgccgcggactagtttctcgtttgcttggtagctggtgggcctcagggatctcccgagaggcctcacctatcccagggccagcctgctccctgaggtgagtgccctttgagcagaggctgctggcgcatgcgtgtgcgtgtctgtgcatctgtccaggtgagggagcacacgtcgcatttggaggcagagctgg

SEQ ID NO: 143328 - DNA, 387 bp, Homo Sapiens
  misc_feature (31)..(31): n is a, c, g, or t
gtggccagtttttggtattgctcaagtcccntgggccttcagactggcgggtgacttcaagggagcaaccatcctgggcctctcctgggacaaacacttgccttcacccactatcgatgtcttgctcagccctcagaggagcgtggttggcgtggattacttcatgccttgattctgccttcccggaaaccacggtggcagcaggcttggatgtcaccaagtcaccgtgtttcatgctatttctggaggttctcgcctttgtggcctcggaaaggaaggcgatctggtgctttggggaaagccctcgggatgctcctccagatggtcttcttcaggccttttgctcagcattggtctgatcagttctgccagctctgggccatgatc

SEQ ID NO: 143329 - DNA, 414 bp, Homo Sapiens
tttggtatcccaaaggctggtgaaggattttattatttgctgagctagtaaaactagagtatcctggtgaaggtgtatttctcatctcctcttctctaggttcctctgccatcctgaatggtagtactgttattggagataacacaggagtctttctgggagggctcccgcgaagttataccatcctcaggaaggatcctgaggtccttcctgaagatgatgcttttatggaaaaattcataatttttatctggcatgatttaatttgttttactcgacacaattgatctcaagattttaaatatcatatggttactgatatggtttctaacatgtctaaggataggtaacctttacagatggtgtagatagcaagaagctgaagtcagggattaggattatccttggctggga

SEQ ID NO: 143330 - DNA, 651 bp, Homo Sapiens
cctcgaaccactgcaagcgtccccaggaccaccgtgtggcccgtgctgacggtgcccccacggcaccctcccctgcacccagcctggtggcgtccgcctttggtgaatctggcagcactgatggaagcagcgatgaggaactgagcggggaccaggaggccagtgggggtggctctggggggctcgagcccttggagggcagcagcgtggccacccttgggccacctgtcgagagggcttcctgctacaactccgcgttgggctgctgctctgatgggaagacgccctcgctggacgcagagggctccaactgccccgccaccaaggtgttccagggcgtcctggagctggagggcgtcgagggccaggagctgttctacacgcccgagatggctgaccccaagtcagaactgttcggggagacagccaggagcattgagagcaccctggacgacctcttccggaattcagacgtcaagaaggattttcggagtgtccgcttgcgggacctggggcccggcaaatccgtccgcgccattgtggatgtgcactttgaccccaccacagccttcagggcacccgacgtggcccgggccctgctccggcagatccaggtgtccaggcgccggtccttgggggtgaggcggccgc

SEQ ID NO: 143331 - DNA, 910 bp, Homo Sapiens
gcctggacacctggatctgccggagcagggcccgggccacgtcgggtgccctgaaggctgtggtggggtcaaagtgcacatccacaatggcgcggacggatttgccgggccccaggtcccgcaagcggacactccggaaatccttcttgacgtctgaattccggaagaggtcgtccagggtgctttcaatgctcctggcttgtctccccgaacagttctgactttggggtcagccatgctcgggcggtgtagtacagctccgtggccctcgacgccgctccagctccaggacgccctggtacaccttggtggctgtgggggaggtacagtgagtccctgcctggcatctgcctggcatccaggctggcccaggcacaggccccagcagcaagccacaagggtgcaagggaaggtggatgttagtcagatggtcatgaggttagtggggaccccagggtggggctggtgtcggttaccaggaggactcctcagagcagtgtgccacgccggcttgcaacgagagagacgggttaggcgtggggtccccggcacgcacgtgtttgagggggccgagccccaagaccataacccccggcactgacctgctgcccaggcgagggggcagcacctcggccgagcccaggctatcctcacacgtcccctcgcccagccgtccactcaccggggcagttggagccctctgcgtccagcgagggcgtcttcccatcagagcagcagcccaacgcggagttgtagcaggaagccctctcgacaggtggcccaggggtggccacgctgctgccactcacaagggcatcgagccactggggagacgcgctctgagcccaggctctggtggagcctctcggcgcctgcccacccaccccaagtccttgatccctgctcaccc

SEQ ID NO: 143332 - DNA, 890 bp, Homo Sapiens
  misc_feature (65)..(65): n is a, c, g, or t
  misc_feature (142)..(202): n is a, c, g, or t
caagaaatggacgttaggaaaatgttaaagagaccaaaggcaaaaataagaaaaaatacggcaancaaaccacatacatttcctttataaaattaagtgttttggaccaagcttacccaaagcattacatttggatttagannnnnnnnnnnnnnnnnnnnnnnnnnnnnnnnnnnnnnnnnnnnnnnnnnnnnnnnnnnnnactttactttttctcatagagaagtcttcgtcattatcctcactctcacaaaaatcagaatcatcctcagaatcttcaccaggtgcaaagtctggttcagtgtcattagcactatcaccatcactgccttccagaagaatcttcctctgctgtgctgcagctttagatgctgcttttcttttcccttgaacaccaccaacatcatcttccacagtaatcttatccaaatctaaataatcactggctacactgcaattagagatatgaggagacttattcattgtttctattttactactgccatgtttttcaatgcttttatcttgagagttctgcacattagtggtgactgttggaagttccttcactgataaagctagtgcaacttctaagtctctctggtagagcttgtcatctaaagccatcctttttttaggggttttctcttgtactgggatttcttctttccggagattgttcaagttaggttttggtttatcttgttttaactcctttggtgctgttctggatttcttgtttaaaggtacagttgcagaaacaaaatcatcatcactgtcagagtggtcaaactgtgagtaattgactggtttcttatgtctcacaggccgcaccatggtccctttcaaggcttggtatttacagttctcaaattcttgttggcttcccc

SEQ ID NO: 143333 - DNA, 504 bp, Homo Sapiens
ttttgatttgcaaaaacacagacattttaactttaataagttataaaagtaaggagtcaaattttacattacagaacaaagatgtattggttgttgtatcggtaagccagaattttgtgatttgagttcagcaccttgattcagtatagtggctacctgtcatacaggagggagtggaatcataaactgcttcatctgctaagatgttgctattgagcaccatgtatatactcaaaacaaacagaaaaaccttaaaatacaaatgaaagccttatacatgaaattccatgggttttccaaaaggagtaaatcagagagctgggttccacaaatctaacacgagtctgcccactaaggagaagtgactcagggacactgttgcagattttctagtgcagcggaaggtctgagtctcatcatgcggttagaaactcagctagaagacatctgtctgcctcctctgggcgccaggagcccctcagatgcagaagaagctggcttgcg

SEQ ID NO: 143334 - DNA, 689 bp, Homo Sapiens
tagaacagataaatccaataaacaaccatgatatgagctgctatgtcatctcgaatgaatactaatagagatctctaagtacacctttggaatggaaaagaaaaattctgactttattttctattttaacctttaataatttagacaatgcccaaacagtattacaattttcgaagtacttaccacacccaaatacctcagtttcagtgacagaaagtaattcaatgttcacacagggataagtagttcaacccacaatttattgaactacaaatcagattcattaaatgctatgatagttaaatcgagaataaatctctgaaaaacatcttggtgagttcttggatgtcaaagtgtataccacattattggactgtttaaattattagaagaatatgaagtacctgtcaaggtttcaacgataaaaatattttttaaaagaccctatttggtaataaattagatttatacaattgataatttcaaaataaataaaatctgagttgtaaatgcctcctaccctcaccccacccccagttatacataccttatatccattttcatttaaaccagtgtctcaaatttttatgagcatacatatcccttggggatcttgttaaaatgcaggaagtaagttgtggggcctgagagtttacatttctaacaagctacagatgtaagatgctgca

SEQ ID NO: 143335 - DNA, 509 bp, Homo Sapiens
acattttcaactcaactattatctgaaaacatacgtgtgaggctatggaaacaaagcactccatatagagaaagtactgttagccaaagtatcattctaaatcttgctagactatgcttttactaagagattttgttttaagtaagtttttgttcctgttaaatctgcaaattcttgcaaaactctgtcaaggaagcaacacatcaaataccctaactatatacaaatgcaagactaccagccttttggtggggaagggcatggaggaacaagatgtattctaaaacccaactgtgcatccctcactttctcaagaaaccttgccacccacagcctatctcatgtactattgaaatgcagaaaaaccactacttgggagactaccatggtgcacagcaagtgcacagtaactgttccgtcaatttttaactcataaaaagctatagttcaaaatattgatctcatgtacacaaactcaactactattaaacagagacatagcacataaa

SEQ ID NO: 143336 - DNA, 377 bp, Homo Sapiens
ggggttcaagcaattcttctgcttcagcctcctgaacagctgggattacaggcgtgcgccatcatgcccagctaattttgtatttttagtagagatgggtttatacatttttaaagaatggacaatgatgcagatgatttgtgagcattttgatgagaaagtggtgattagaaggatacagcataaatttaattgttaacatgcttatctagctaacctaatctgtttctgtagaattactggcatgggagattggatagatgcctaacctatctcaattttaagtaatgtgagcaagtctttaaggtatacataatgataaaatggagaaacatgaccaaatgatgatggtcatgtaggtaattagatggatttgt

SEQ ID NO: 143337 - DNA, 452 bp, Homo Sapiens
  misc_feature (437)..(437): n is a, c, g, or t
tttgaaatatataatcaggcaatctcccaagccagaatggttcagagagactcccaagtcctacattttcaagttaaaattcaggcagtgaaactccagagcacacaactgggccatggctgtaaaccagctatgttctgaatctcagatccatgaaaacacagaggcagcctcaccactccgcaggctgtgaacaggacggacggctggctactggccatctccctgcctgcctgttgatccactttcaacaggcctgagtctttctctgactcacccatcaggtggaccccctgcagcaggagtgttcccggccacagaaagccgattccctcatctcatcactcaatacctatctactgagtcctcctcctcagagtccagccctgcgctgggggcacagagaggagtcagctccccgctgagacagaaaccangtactggctgggcgg

SEQ ID NO: 143338 - DNA, 486 bp, Homo Sapiens
tgttccccacattgtcagtttattctaaaattatcaccattttagacttaaagaattttaaagccaaaagataagcaaacagacttgcttaggtcctgtagcaaattaattcagaccttgaacaacatttcattgtgctgtttaggaagtgttaagtatattgagattttccatattactgtgttactatcatacttaaattttagaagatgatcaaattattttaatgactaggactatgcttatgaagttagcatttcctgcccttatttatagaaagcacttgatatatttcacaaaggtgaggagattaactttttagggaacaagtcatttaaattcttgaaccagtttccatcttttaggctatatgagtattgaatataggagaaaagagaaaagtatgcatgtttctcaaaggctctttctttaaatgtcaccagcagatctaaacagtatccataggcacctatggcaaatttactg

SEQ ID NO: 143339 - DNA, 512 bp, Homo Sapiens
agccccatgctgagggccgacacaattcacggaacagattcatcatatttggtctttatgtaaataataaatgttttaaaattgcctaaatataccattctgagccatttcatccctatttcatcccaccaggaaaatacaggttttttcctctctaaaaaataattaaataccaaaataactacatttaaataaataatgttatgatgatgacatttaaaagctcagccatcaggctgacgccctctccccatgtgcacggccctcggccctcggccggcacactcgggaagggccagcggttttcttcctgaggagccgggcgaggaggtgcagggacctcccactctcattccctcacccccgtcctgtcctcattttccgtagaggagtcagcctcaggattgggttcggttctgaaaggtcagggacatttcctaccacaaaacaggaaatgccccagacgtgccctgcaggacgtggctcggaccctgctccaccatggcggccgc

SEQ ID NO: 143340 - DNA, 413 bp, Homo Sapiens
ggagtccaacatctggttttggtaaagtctggcctttgtgcccaattttacagctaagctgactgaagtaccacgaactcatgagttgtgtagggtcagcgtgtcaggcaatagctcagctgccatatgatcccccaaccctcgtaactttcagccccatattttaactattaagccacatggcctgctatagaatatgccacaaaacaccccagatgtgtgttgagagagatccttccatgacccaggtaacatcacgtccctgtaggactttctgatgattggatgttcctggtgacctctcctgcagtgtaagcgcattaacccaaatgttatgaggatttccccacaggacagtcttataagattttcttatgaggtcacttcctaggaaggcagggatttaaaagctg

SEQ ID NO: 143341 - DNA, 398 bp, Homo Sapiens
ccaaagttttttcctattcacatatttcatggtaccttggcgtttttatactgcatgcactatttatagaatgacttgtctttttctgaacaatctcttaaattttctattacaactatcttattctatgtgccttttacttactatcttattgaaatatacaactatataattttgaagactttggtttctttgactgcaagccagttccatatatatctgagaaccacatttgttcttttatttacacctattgaggatgatactaggctcttaagatacaacaataaataaaacaaaagtgctccctaattagaatttatattatttgcaggatgtataggaatgtaaacagttaatgtcaattaaaatagcctacactatagaggcttattaga

SEQ ID NO: 143342 - DNA, 480 bp, Homo Sapiens
  misc_feature (173)..(194): n is a, c, g, or t
acaattctttctcaaaatttattgtgcagaattttaagactatacccagggttgctcatttattaaagcaaagacttagtaaggtaagtgtgtgggaagaataaatggattaatcatagtctgtttcctatgaaaatgcctcgttgagtaattgcagatagactagtgcctcnnnnnnnnnnnnnnnnnnnnnnaaacattttacagccattatccaacagacagtaaagcagtggaccagttgctgtgtgggtataaagcaaacggtctctgggctcctccaagctgtggatatctctggccattatcaatagctgattctcacttgtcctaatgaagtactcagtgcaggttagcctccttctcccccgccagcttctcttccacttccccacaccgtacatgcctctccctttctctctataactcagctcatctcatagcctttttctttggaaatgcaactctgctgatcacttg

SEQ ID NO: 143343 - DNA, 404 bp, Homo Sapiens
tttttcaatcctgataaaaatactttattctggtcttcaatagcaaatatgaccggagagccagagggtcagtggtcctgctctgagctgtgcaggtggggctgtctctgggtagtgggagggtcgggtgggtgtttctgacctgggcgtctttgcccagaggagcagaagtgaacacacgccctcccactgggctcttctgctgacgtgggttggtaggacggttatggctccgcttagggtccgcagctgggcaatgaggggactggaggggcatttctcaggtagtggcgtctggtaatcagcagatggcgcccgaggtcgctgggcccgcccgcgtgcgttcttttctggttgactcccaggctcttgcgtgggaactcaccactgagcactgaacgcag

SEQ ID NO: 143344 - DNA, 397 bp, Homo Sapiens
tttttttcacagggtcagactttattagatacacggagggctgaatggggccttggtgcccttggtcctcttcagcctggagacagcagactccacaaggggctcccagggttcagagcaggagaacacacctgacctccggccagccagcccttcagggtgtctcggggactcctcgagatctggggcctggttgggagggttgggtttggagggggtgttccagggggcctccgtggctctggaactagactgatgacttttggagaatgagctccagagaaactggcctctttgggccagggcaaggcctgggcttcagggaggtagtgacctgttttggtgcccgaggtggaggcccggagaaacatcgtggggagtttggtgattgaaggcc

SEQ ID NO: 143345 - DNA, 456 bp, Homo Sapiens
caattctgtctttccatagaaatgaactttttctatcgaaattgtttaacttaaatattttaacataaattatttacatggatctttatgtataattcatccttatatataccccttaatcacgtagtcatgagaagataactttgctttctttacagaaagggcagagaggaataagataagaaactgaaacaagcaagaatgaagagagatgtgggggagagactgctggtctccagaccacagcaatgtgttttaagataagatgaaatattttaactgcagaagggatataaaatctatgtaattacatgctgatgggatccattgcacccaggtttttgaccttggcctgtaaatgctagactatgatatcttgttattctttttctcctttgggcttttaaaaaataatttcattctcagatcattttctgtactgtttactgaagaaaa

SEQ ID NO: 143346 - DNA, 492 bp, Homo Sapiens
cacttccagggctgccagctttgcgtttggacgtggactctgagcccaggcccctcaggcccacctgctcgttccataaagcgccccatgtgcctcttgaagtagaatcaagcgcacccccccaccgttccatgggcccagaatacaaaggggtcaccggtccaccgtcctgagagcagctcagggtcccctagctctgcaggtgccgcagcaggatctgcatgaggtcgaaggtggtgaagctgatgcccacggcgatgggacccttgacccagttcatgctcaagcctttgtagaggccgcgcacggcgccctcctcccgcacgatggtgcgcagcgtgcgggcgatggaggcgcgcgggtagcccgtgacgccggccgtctgcatgcgccgccgcaccacatccagcgggtacgaggccgactgcccgatgaggccagcgcaggcgccgaagatcatgcgctcgaaggggtagggctgccggcggccgc

SEQ ID NO: 143347 - DNA, 735 bp, Homo Sapiens
  misc_feature (191)..(252): n is a, c, g, or t
cggtcatcaggggccgcggacagtgaggggtcagcatcaggcccctcagccttggcaggtgttgggggcgctggcagctgcaaacgcgcgggctggcgctgcttacggctgtgtgcagcaccggggtgccccgggggacgtgcagccagcaggtggcgcaggcggtgacgcagctgcgcaggtgcgagtgnnnnnnnnnnnnnnnnnnnnnnnnnnnnnnnnnnnnnnnnnnnnnnnnnnnnnnnnnnnnnnataatctgcgtgcattcgtcgataactgtctgtatgcgaagcactgacgcggccgtgagcacctgcagggcttcaccctgcgccacaacgagcgaaccgctgtacaggaactctaccagctgtcgcactgtctgcgcgggcaccaccggaggcacacggatctcagagtggccgagcagcagcttgtcttggaagaagggtgagccggccgccagcacgcagcggtgggcacgcagcgaagcttcacgaatgcgcacagtcacgtcacagaagtgtccccccaagcttctgcccattgagggtctcaagcagagtgcgtgagaagttctgcaggtgtatgtggtgcacagcctctgcagccgccgtctccgactcctcttcaggcaccaggcctggccgtggccgccttctcaccgactccaaggcagcacttccgggcgcttctctttatttttatacagttttattgagatataatttaaa

SEQ ID NO: 143348 - DNA, 484 bp, Homo Sapiens
ttttttaaaattcagtaatgattttattacctcatttgagatcatttcattgtccaagttattctcttttttcagtagcaacagcaaatttggtaagaaagcaaaatccagcagttctcatacaaatattgcaagaattttgttaaaatattttagggtacatagtgatttcagaatatgtattattatagtacctttagctgctgtacaaatacgtccaatgtttgtatcttggctgaagtacaataaaagcttatctgtcacttacaaaagagctcaaggcaaatgttcccggttggcaagagcagctgtccaccctgagcacccaggctaacaaagtttctgccaccttcaccatgaggccccaaggttgtcactgtcctctcatggcactcagcaatttcacaggactgtaatcatggcattatgtcacagtttaattggcagcattttttcttccttagttgtacatataataatagtg

SEQ ID NO: 143349 - DNA, 757 bp, Homo Sapiens
gcaagttacttagcagaacatgtaattcacagtaaagatgattctgtgttgtaccacattttaatattcctgttttgaaagaatagtagagagaaaatgggtggcctgctcagtgattgcttttcgtagtcttggtgaatgttacaggagattgaatttatagataaaagcacagtcatcatagtttccacagtacattgcagcacatttagcttgctagcctaaaaatctgatcatgctgagtttcttttaaaggaagttaattttagaacttcaaactagaaccagtttgaacctcaagttgaccgttgtctgagttttaaaaatctcttcccattttcaaagatttttcaaatggatgtaggagaggaccaaggaggtaggctatagctgtagaacaacacagtcctattttcagaaacgaacagacacacgttttaggtcaggcacagcccatgtatccaggtgcatcaaactggggatgctaagttcaaaagtgcgtctgttttgaagatttcatctgaaaataatgtgtacactttcattactaccagtttgcattcaaaatagtttttgagactctttaaactcttctggatactttaattttccctttggaatagtgtgtaaacacagtccggatgaactttactactgatacctcacttgaggttgacaggagtggccagcagttagtgcctatggtcatgtaatacactaagtcaatacctgtggagtgaaatccggtctctataaa

SEQ ID NO: 143350 - DNA, 476 bp, Homo Sapiens
cattccatagtgcaaatgtattgaaaatggatgattttggtgccgtgccctttacagaacttgtggtgcaaagcatcactccacatcagtcccaacagtcccaaccagtcgaattaaacccatttggtgctgctccatttccttctaaacagtaaatacttctgatggattctcggcattaactccctgtttattgtttaagagtgatagactgttgtcctcttgctggtggaaaatctaaggtggagcccactcttctatgctgaagttcaccaggcagagcagttttcttacaagtcagctactctgcttggtttattttaggttttggtacttcacgtaagcactgccaaatggagagttgtacagttttacggaagtcaatcacaatcttcaaatcggatattctgtccaggtgggatgccataagatgtgacagacattccctgaatcttcgttcctgattctaattcaca

SEQ ID NO: 143351 - DNA, 836 bp, Homo Sapiens
  misc_feature (664)..(691): n is a, c, g, or t
gccatctcatagtgttcccaccataatttgagcactgaattacttaccaagtatctttcgtaaccagtagaaataccatgaaggatgtaaatttgctgttatttaaaaggtaaaagttactttgcttaagtggtacataaaaggcttcaagaaaatttcaagtttgaacagaatgggaagtgtaatcaaagtaagtgcacttaaagctgtttgccagcaagtcaaaagtagcttctatacagcttctattagatgacttttcaatcacctttaagagcataggtcatggatgaccagttctgttccaaagtagcagtataaagttgtgaaaataaaaccgaataaccccaaatcatgaccctttgcattatcatctaccttattctcttagtagcttttgtaaaccctcactaggagtgaatgttctcttagatatgattgtggttgcaattccattttttaaaaattcacattaactccacagtagagagatgtgacatgcatgtgtgtacatatttttatcttaatatataaaacaccactgagtataaaagttctcaaataaactattcatcatttatggtattctcacagtagatatgtcatctcattctcacagtagactgtcaactcaataattggacctaaaattacaagtttgctnnnnnnnnnnnnnnnnnnnnnnnnnnnngtttactgcacattctaaatatattcgaaacacaatgtacccaagcgcctcaaaactagtgatattaatacacttgtaccttctaacagtgcttacccggccgtaatggccgaattcccgggcatatgtccggtaccgtcgactg

SEQ ID NO: 143352 - DNA, 901 bp, Homo Sapiens
  misc_feature (548)..(572): n is a, c, g, or t
tttgaataatcctttaaaaagtggaccatttgcttattttaatatcacgtcagtaaaatgttagtattaaaaagatcagctttttatggcattgaagaatgtatctgctaagacacaaaaattgcatggtaagtataataggtggaggaggaaaggttgtaggccggatgaaaatttaactgactagaacatttattcaggagtgtaattattttcccttaccccaatccctgtgtacgtgttgggtatagttacgacattatccggatttgcaaatagacacaactttcagtcttaccctgtttattgtttaagagtgatagactgttgtcctcttgctggtggaaaatctaaggtggagcccactcttctatgctgaagttcaccaggcagagcagttttcttacaagtcagctactctgcttggtttattttaggttttggtacttcacgtaagcactgttagaaggtacaagtgtattaatatcactagttttgaggcgcttgggtacatttgtttttaatatatttagaatgtgcagtaaacnnnnnnnnnnnnnnnnnnnnnnnnnagcaaacttgttattttaggtccaattattgagttgacagtctactgtgagaatgagatgacatatctactgtgagaataccataaatgatgaatagtttatttgagaacttttatactcagtggtgttttatatattaagataaaaatatgtacacacatgcatgtcacatctctctactgtggagttaatgtgaatttttaaaaaatggaattgcaaccacaatcatatctaagagaacattcactcctagtgagggttttaccaaagctactaaagagaataaggtaaaatgataaatgcaaaagggtccatggattttggggggt

SEQ ID NO: 143353 - DNA, 454 bp, Homo Sapiens
ttttctctagttatagctaattcctaggacagtgggtccacagggcccttcacattgccattctgtaagtgaaaatctaaaagatatttcaatgttagaagatttaactgtgtactttactacaccaagaaaagctatacaattatatccatatataccagaaaagactttgaggacaatcattctaccatttgtgataatcaattatgataccacaatgataaaaacagtgggttactaagcaaagttagataaatggaccaatttaacagaatgcagagccaagaaacatttccgtacattatatgtaaattggtaaaggtggccttatacatcaggaggaaaataataaactattttttaaaggtgctagggaaactagctatccatatgggattaataattcataagaatgtattcatgaccctagctagggaatggttcttaaataaac

SEQ ID NO: 143354 - DNA, 1314 bp, Homo Sapiens
gatatcgtcgacccacgcgtccgcaccagtatcttagtgaccctcggagcaaatgatccacaaaggatttgcattacgtcactcgaaacgttttcatccatgcttagcatctactctgtataacgcatgagaggggaggcaaagaagaaaaagacacacagaagggcctttaaaaaagtagatatttaatatctaagcaggggaggggacaggacagaaagcctgcactgaggggtgcggtgccaacagggaaactcttcacctccctgcaaacctaccagtgaggctcccagagacgcagctgtctcagtgccagggcagattgggtgtgacctctccactcctccatctcctgctgttgtcctagtggctatcacaggcctgggtgggtgggttgggggaggtgtcagtcaccttgttggtaacactaaagttgttttgttggttttttaaaaacccaatactgaggttcttcctgttccctcaagttttcttatgggcttccaggctttaagctaattccagaagtaaaactgatcttgggtttcctattctgcctcccctagaagggcaggggtgataacccagctacagggaaatcccggcccaactttccacaggcatcacaggcatcttccgcggattctagggtgggctgcccagccttctggtctgaggcgcagctccctctgcccaggtgctgtgcctattcaagtggccttcaggcagagcagcaagtggcccttagcgccccttcccataagcagctgtggtggcagtgagggaggttgggtagccctggactggtcccctcctcagatcacccttgcaaatctggcctcatcttgtattccaacccgacatccctaaaagtacctccacccgttccgggtctggaaggcgttggcaccacaagcactgtccctgtgggaggagcacaaccttctcgggacaggatctgatggggtcttgggctaaaggaggtccctgctgtcctggagaaagtcctagaggttatctcaggaatgactggtggccctgccccaacgtggaaaggtgggaaggaagccttctcccattagccccaatgagagaactcaacgtgccggagctgagtgggccttgcacgagacactggccccactttcaggcctggaggaagcatgcacacatggagacggcgcctgcctgtagatgtttggatcttcgagatctccccaggcatcttgtctcccacaggatcgtgtgtgtaggtggtgttgtgtggttttcctttgtgaaggagagagggaaactatttgtagcttgttttat

SEQ ID NO: 143355 - DNA, 433 bp, Homo Sapiens
cggtgactttgaacaatgtcactctcccgggtcaccatggccggggtggcggtctctccctgcgcaacgctcctcggaagtgaagccatctccccgtccctctgcccttactcacaggccctgctaccgggcctgtccttcccctgcttggaaccctttaggtgtcccctcagccatttggggctgagcccacttggctctcctgccgtctccccaggaggcagcttgttttgaagcgcctgcgtctagtaacctgtcgctgccttgcttctagcgcctcttaggcctttctgatgtcttctctgctgtatctcccctgccttttagcctttatgttgaaactctcccaggttcaaagggtttttgcaccgggaagccatactcaccactatttgtgttgttttggggtcaatttattcaactcatacatttg

SEQ ID NO: 143356 - DNA, 584 bp, Homo Sapiens
ataatccaagaaccaattatttttattaacaggactcacggaggaagacagaagagggaagagaagtattaaccagttaattctactttaaagcaaagtggcaaaaatatactcagcttcacaatgagcctgaaagatgaaatttgtaaaccaacttcctacaatgatcacttttcttcctcttcttttagagaggtagaggttattttataaactaaaccccaagtatacttgccacagataagtggaaaaaattcacacactcaaaaatagtgatgcagttacgacaagaatggtcccttcatttatccttttattcatatattgagactagattatttggatggccaaccagtggaaatgaacacaactgcgctgcaaaaagaaagagaagtagctatcccattggcttatgtcagctctgactttgtgtggaaagttttcaaacagtctaagaaattgggaagcagttattccaaatgataatttaaactgcgggtgcagcacaaagctaatttattttcttgttcgcagtagttgtagaattaaaacaaaccaaagcaaaaccaagctctaccgagtct

SEQ ID NO: 143357 - DNA, 504 bp, Homo Sapiens
tttttgaaataagatttccactttgttattctggcataaattaaaagaatgaatatttctaagtataagtgaatatacatgccaagaaatcttttgctggaagaacttagagatttggagcaatcttgagttttgagtgtacgtgggaggaaatttagagctcattttcacaggccaattcattaaagccccaaaccacagatttttaaataaaattcccatgtatgaaattgagattgtggaattgactggggctctgtattgtaaaataaaaaggactttaaacaaacccctaacattaggactgggccttccagtgatctttggtaaaagtcaagcatctgaaaattatcatttttgtttgaaaataatgttaggtgtgtagaatgtgtaacagcctcacaagtttctccatgaggaaccactgcttctaagaagggtcctacagatctacttgagctattctcaaggtgcttactgagctactgaccagggctgacagat

SEQ ID NO: 143358 - DNA, 423 bp, Homo Sapiens
atcttcttggtaatttttaatagattttgctaactccttggtaacttttattacaaggtaaaacaaaactgatgaaagtggctgacataccggggacgtgagcagaacggcttggccacttccttaacatggccccgggttcacccgctagtccggaactacagtttctctgccacagtgtctgcgcctgtccacttgcaggcattaattttggtgaatatgaagagagttaatataaccagtgtgtcctcttctccatggcagcgcccagggacagacctgcagtgaccaccacctgcccctctctgccaggcccaaccacgggctttcttctcagagctgagctgatgtggccgtctggctgactatgaggggcccggggtcatcctggagggggggtatttgtaaagcttaatttctctc

SEQ ID NO: 143359 - DNA, 415 bp, Homo Sapiens
tcttcccctctcttagttcattttccttagaaaatatatcagttctttctttacaacccaataatgttttccttaagggccacttgtttgaaatgtaaacataaaagagagagcactgccgtggagatccctgtctcatgggagtttagcttagctgcgtggctccaagttgtatgccctagacgtatcacatgcttgatttttcctttggttaaagacagttggctcacacagatggccatcccaattcccacggaatttagaactgctgtggtaagcggtgttgccaggtcctcctacttgcagacaagttatcatttatcttgagaacatgtgtgcattggcttgtatctgactgactatatcaaagggggagtttttttctgttataataaaatagcttttgatttggaaa

SEQ ID NO: 143360 - DNA, 508 bp, Homo Sapiens
ttttatttgacatatatttattgtgtggtctctattgaatgctgggtatcttccaggagcctaaaattcagcagtgaatgtaacaggctcaaatccttgtactcaagtagctaatattctaatcgagggagaagacaataaacaaagttaataagcaaaatattcaacatactagttgataggaagctctgtggtgaaaaataaagtaagaggaaaagaatgagaggaagctctaaaagcaactgaagatttacatgaagaagctgcccaggcgttggcccagagtgagaggaagcgccatgagttcaacaggcaggtcccagttcagtggaaagaaaaggatttccagggcatgttggagtgccgcaaagagggcgaggccctcctcatcctcaacctggtgacagacttgaagccccagatgctgttggacacagtgccctgtctctccgcctacatcctctacatgtgcattcggctcgcggaccaaaccaacgatgatctcaag

SEQ ID NO: 143361 - DNA, 951 bp, Homo Sapiens
tcggcacgagggaggtgctcatctcaggaccagatcgtgagcgccgaccagcggcgactcgccggcaggaacgcggagccgaacattaagtgccagatcaagtggcctaacagtgaaaagcatgttgaccaggaggatgccattgaggcctatcacggggtctgccagacaaacaggctgctggaggctcagctgcaggcccagagcctggagcatgaggaggaggtggagcatctcaaggctcagctcgaggccctgaaggaggagatggacaaacagcagcagaccttctgccagacgctactgctctccccagaggcccaggtggaattcggcgttcagcaggaaatatcccggctgaccaacgagaatctggaccttaaagaactggtagaaaagctggaaaagaatgagaggaagctcaaaaagcaactgaagatttacatgaagaaagcccaggacctagaagctgcccaggcattggcccagagtgagaggaagcgccatgagctcaacaggcaggtcacggtccagcggaaagagaaggatttccagggcatgctggagtaccacaaagaggacgaggccctcctcatccggaacctggtgacagacttgaagccccagatgctgtcgggcacagtgccctgtctccccggctacatcctctacatgtgcatccggcacgcgggactacaccaacgacgatctcaaggtgcactccctggtgacctccaccatcaacggcattaagaaagtcctgaaaaagcgcaatgatgactttgagatgacgtcattctggttatccaacatctggcgccttcttcactggctgaagcagtacagcgggggatgaaggcttcctgactccgaacactgcaaagcagaatgaaccctgtcctaagaaattttgacctccccgaatacccgtccggggctgaatgacctttt

SEQ ID NO: 143362 - DNA, 540 bp, Homo Sapiens
tatctgtgcctctagttcgctctatgtgaacggaatgttctctttccgtcattgaatcagattcggctctggtctgatgacaattttcctcattgttcgtgcccctgtggagagatgcacttccagacggcccctgttgaggagtattacataataggcctgtccagtctgccttcgttttctcctaggtggtgctggtgtccctccacttcccaaaagaatgatgccggactcattcttggtgctgaatgacaggttgatttctgttcctacatcaattggcacaggggagagctccacaaaaccaggcttaggaaagctaactgtgtaaacattctccagggaacatcctttggtaacaccaacataatcgggactactgagtatattgtacggagttcttgaaatttcaatatctttgaggcagccggaatatttcttcagatttacttctggccttgctttcatactcaagtttctcagcgttggcaggccaccaaaatatattttggtggcatcgataacaccggaccgactgga

SEQ ID NO: 143363 - DNA, 406 bp, Homo Sapiens
ttttgaataaaacttgcctttatatttttaacaatctttttctaggcaacatatttttggaatttatcagtccccgtacgcctagaatacctgacccctttcttcggatgtggttgcggcgggacagaaccaaggtggtctttgctgtggactgagctcaaagcacacgtcgctgtcatggcggggaacgggctggaagacgctccggaaatgaccggggcgaatgggattcagcatccgggctgccgctgcctctcaggggctccctgcaaacgtggccggcggagggaaggagtgtcctggtggagctctggtcgcagggagcattcctcaaatgaacgcggttccaatcaaccgggtccggccaaaaggcagattccagctcagtagctcagaggcctgattc

SEQ ID NO: 143364 - DNA, 478 bp, Homo Sapiens
ggccgcgctggctgaggaggctttgcgcgatctgctcgccgggtggcgcgcgcctgtttccgaggctgccgtggaagtgctagcagccgtcgggccatgtttgcggccccgcgaggacgggccgctactggagcgcgtggcggggaccgccgtcgccctggcgctgggcgggggcggggacggggatgaggccgtgcctgtcgaggacgcggcggtgctggtggccgtgcgactgctgccagtgctggtccaatgtggcggggcggcgctgcgggccgtgtggggcgggctggccgcgcctggggcgtccctggggtccggccgcgtagaggagaagctgctggtcctgagcgccctggccgagaagctgttgcccgagcccggcggcgaccgcgcccgcggcgcgcgcgaggcggggcccgacgcccggcgctgctggcgctttttgaggacggtgcaggcggggctgggccaggcg

SEQ ID NO: 143365 - DNA, 476 bp, Homo Sapiens
tttcctggtcagggctctgcctgatgaaatattttaaatggtatacttgaaaagagtagctatatttttgaagaattttcatcacaaagttatttgttagtcttgatccaataaactcttaacaataagccaagccaagccaagccaagagctggtcccaactgctatacagtgctctttgcaatcaaatctaaaattaattacccaagtaatatatttaaggaaataaataaaactgtatttaaatgcttatgaagtataatcacagtctgtagagatatgtttgttttaccggcaaaatttaagtttcctttcacaggtcattctgtgtgcatgcatcaacacacacatatttattatttctccttctataagaactatcttgtttgaaaaatttggcttagaaatttattatagtgactacagggtcctcaaaataaaaggaggcacagctggttagtttatgaatcatgctg

SEQ ID NO: 143366 - DNA, 803 bp, Homo Sapiens
ttttttgaagaaacagttctcaattatttaatgcttgatagagaaatggaaagaaatcctgaaaccaaatagtatgtactgacttgaggaaaacacagaataacaaaccaatagttttgctgtttgttttagtaatgaacatgaaaatgtgtccacctctccactttgttggccctggcctatgttgtacaattccttagacacaggccagaagagagaggtagtatgaaaaatgatgagccctagagactatccaaatttgctgactatatcagcatttgtttgcttattcccagcttcctatgctttggcataattccaacccatatatgcttctttaaaaggcaagcaatttccaggctgaagtcatcaataccaaccaactagggtcaatccattctgtcacatctgcaattctcaatccaagatggcacagatcctccaggcgagaggtactgcttcctaaagggcttgtgtatcccctttggtagcactaaatgaatgactttcatactggtaaagacgatcagactgagacataatgttacgggaatatgatgtcttaaatgtcactgaaaggtggagcagatcccactgaagcatgcacagtgaatccaatcagagttcaagagaaagtgttacagatgaagcacattatagtaggaaggaaacaatgatcaggggatcaagcccaatggggaaaatcaaggatttaatcaagggcaatttcagcatggccaaagggctaaagtgctcgctttctaaagccttggagtgcttaatggtaaataaacttcagctta

SEQ ID NO: 143367 - DNA, 179 bp, Homo Sapiens
tagtatcattaaatcactgtttcggccttaatattttgaagactaatatattaggatatactgtatctattaatagcatgaaagcacctcacactgaaaatttcacttttaaggcttaaaagtgatttttaaaaacatcacaataaatgatcataatttaaattctgaatatgggaacg

SEQ ID NO: 143368 - DNA, 476 bp, Homo Sapiens
tttttggggtttcccaaatcttttattaacagtctcccctccagaagcagtgagtgccacagagaaataaaactgagactgaatctccagcagccagatgggcccaggtgtctcatcttctccaggcctgggtgtcagcccagcttgataaacagcagcaaagtggcaagaattcctggcaactgtatcactgcagctcccagagagctcccactcagggtgaagctctgagtcttggtgatttttaggagtttatggaaacagcccttctggtggatgacgtttggagacacatcgcgtccgtcacaggacacacttccgatggatttacagcaactcctggggtaggtgtggcccgttgtcatttcgaaggaagagccagaaaaatctgtgtagttattcaccccacagcactttagcttctccatgaccaagttccactgtgtagaatagtcgtctggctcgttgtaacctct

SEQ ID NO: 143369 - DNA, 448 bp, Homo Sapiens
ttttccttttatcacaagagagtattattgcagttatcactatccagaaatgtgcaattactttttatcagtaatgttgcttcagatatcccactaacatacaaaagtgcatactcaacatttgattctctagtaatcttaaaactgagaatcaaattaactatagaagcccctgttactgtagagtggatgcacgaccactggtccaaggcccaaatgttgtcatatctgggagagctatttctaaggtttatggagcctcacctctaccaccatgctaggattcgggcttggagattactttgaggaatgaagcagaccagaggctgttggaacctcaacccacagctgcctttaggactaagtcaactgagactatctgcatggactctgaagctggacatcaaggggcttgaagactgactccaccactgactctgagaaagtt

SEQ ID NO: 143370 - DNA, 486 bp, Homo Sapiens
  misc_feature (257)..(318): n is a, c, g, or t
ctatttctaaagctgtgatacatagaaaacaagttatctgtttctgagatgcaatggtgggacaggtgaagaagcattcccattccaaaagagataaattggaaggagaaaaggggtttaaagcaggtttgtaagtctgcaggacaaattccattcagttctgagacttgaaaatagttctctgtggcttgatattccgttctctaggtgcattgacacggccttaccccttggtcctggattggcagcctgcccannnnnnnnnnnnnnnnnnnnnnnnnnnnnnnnnnnnnnnnnnnnnnnnnnnnnnnnnnnnnnaatcttaagtacagatgcttcttgagttatgatgagcttacattctgataaggcaggagtattatttgagtccaggagtttgaggctttagagtgtgattattgcacctgtgaacagccacttcactgcagcctaggcaacatagtgagaccccatctctttaaaaaa

SEQ ID NO: 143371 - DNA, 526 bp, Homo Sapiens
gtggttgagatgcaatggaatatattgtgagataggattatttggagtatgtcgagccatggggatctcttaggggtctcttatttaaggatgggggacctctatggagggcatggttggcttatccgccttcagggtggggaatgtagtttgaaaggtagcctcacttgtagcctgcctggtgggtgcttgggtgagttcagagaccacggtgggcatcggtggttgaatctcatgcttgccaggcttcagaggtgtgacagcattcttgataggtagtagtttcttggatggtgctgcaaaattgaaatggccttggtgttcctttccactcttgggtagagccgggtagagggctgctagagtccaaggaccttccacaactcggacaggaggtttcatggctatgtgcaaatctatctatctatctatcttcctcattcttacttccactctgagtatctcagttggaaatgcagaaatcacccgtctctgcgtcaatcacgctgggagctgcagaccggag

SEQ ID NO: 143372 - DNA, 386 bp, Homo Sapiens
cttggtatcctaatctttctttcttgccatattttggcttggttgatttctctttcttatttgtttttcatacataattatatattctattgctattctttttaaggatactatacagtttaatgtgattatctgatttaacaggagtcaaccagactaccatggctgctcacatctcagatacattttcctacatattttgtggttgtgtgattttgagtatataacttaaactcgcagggctcagtagtcctagtggtaaagtggggacaatcaatgtagcaatgtcataggctgttgtgtaaagtaaattagctaatacatgtaaagtgttacaataatttcatggcacatcctggtatcaaataaattcctagaacatgaaa

SEQ ID NO: 143373 - DNA, 435 bp, Homo Sapiens
catgcttgccatttttaatggttatagtgttctaaggggctaataattatgaaagatagagccatggggagaacagaaacagaggagtaaaaatacattttcgggcacatgcaagtgaactgacaccagaagacaaagaatgaaacataacagccttaaagttttagagaccaaataaaggtttagtaagaaaaactagtacttagatttgcatgaaacagatccttaggattaatatttagatcttaccaaaaatctgccttaagagatgtgatgggaaaggagggctattagcttataaacaccgtaagttatagacatataatagttaaaacacaacgtattaggtatacatctagttgctttcttaattgccctctacttaacccacttggcagattaactgacaagttctattcccttgtaaatttcctg

SEQ ID NO: 143374 - DNA, 547 bp, Homo Sapiens
ccactgtggatcctttatcccaagagggagcttccaccttccactctggaaccttattccagcagttgttccagggagcttctacctgtggaggcctctccagaaacagcagaggatccgagctgcgtgtaggcagggcgcgcatgtcaccctggcccgggcgcctggtccgctgctggagataaatggtcgaccccggagggagaggctagtaggggtgttgatgtgaactgattcgcccaagccttgggccgcaaaactgcgaaagaaagcggcaggcagcctctgcatttcccagaagtgcagctggggaactttcccagaccggcccaggggttgctagagggtcagacgtaaaggatccgcctttcctaggcggggtgggccccaggccaccacgtgaagcgtcctcgcccctcagaggccggagcaggccgggctcaagaaagaggaaagttgaggacgccccacctcggagatgcggcgcccctgagtaggccaggtagcctctcttgcaacttctgtctctacggccttccgcggtcgc

SEQ ID NO: 143375 - DNA, 549 bp, Homo Sapiens
tgccagtaaaatcgatactaacagtggacgtacttctctttgaataagtttattctatttccttctcccattttctttatttgttgaaaagaatgatgctgattgagaagccaaatattgttaaccattttccccgtctggcacggttcttttgcacagcactggattaggccaggggactggcctaaccctgcaaatatcaggaaaggactcttctagggaaagtcgtactaatttgaattgatcactagaaatacatggtctccacctaaaagatgctttgtcacttaaaaggctgagtagtcatcataatgtaaagaaacctctattgtcatgcaaccatttgcacccagacattgtgcctggttggcacttaacattttatcacttgattctcacaccacccttgcaatgtgatgaaaccaaggctcctaggtgctaagtgacattcccctagtcacgcagcctagtgctagtcacgcagcctagtggtagagcgaggattcaaacccagtttttgttttcctttgagctggagctgcaagaaaa

SEQ ID NO: 143376 - DNA, 794 bp, Homo Sapiens
atgctttggatgatctgtcaagttgttatgcagcccccctttgccgttgtgtcttttgatctggaatcacctcaaaatcactagggtagtcactggatggattgtttcgaggtataattctccaattgtctacttcactgctcttcagggcacttgaaataaatgaatttctagctttggctgtaaagtatccattgaaagccacaatatattcatattccacaactgttgatgagaattccaccttcaaagtcaggtgggaacagccagggcatggggccttttcaaaagatttcttttccagtctgtcgcccagatgtttcttcccacagagcaaaaccacgagcagaagcagccagatgttgacaagcttcatggtcacaagcgaatatgatcataaaattgcatatatgtcaaagtcacacttgtgttcttcgttgattaaaagtgaagcttgttggtttcagctaagaagctgcaacattactgatcagccatcttacagtcttgcccaacataaataaaagttaaatcccatggccttttgtggttcagcctgaagagaggctttcatttctttctccgcttcttcgtccatcttggaaataaggcttctctcactcaggccgtgacgactgagtcctgtactccatttgtaccacagaaccaacgtccaatggggttgatcaatcaaccactgtgagccaatctgcgccgccgggagctcagggccggcgggcccgggatgacggcgcctccgcggcgaacacgcctgggcactccattcggggctg

SEQ ID NO: 143377 - DNA, 455 bp, Homo Sapiens
cataggctccgctgctgacctctgcaagctggccatgatccatgtcttcactgcagtggctgcttcccacaccttgacggccagcccttgtggaattgataaaggaagttggcatgtgaggagctgaggtctctctctgttgctgactgagtccttctgaaagctggacacagacacttttactcaggaacgcagttactcgctggtcatccttctgtcatcagccattggctgtcacgaggaaatgcttctcatagcaaaatgcaaagcagactcgtgtggaatattgggcacatggtctgtgttttgtgaacgtgatttgttcttccaggagtaatgtgaaaggctgtggatggcgtctggaagggacgggtgcaggctcagtgtggccaggcatctctcgctgaagcagcaggcatgaaactcgatcactgggaggcacacggtgcccctag

SEQ ID NO: 143378 - DNA, 500 bp, Homo Sapiens
ctgtgtttgtatctcatttccatggctacttcacatgtcttccttttgcctgtcatcttcttttattcttgtctttatttatcttttttcctattcctgctattttgatttccattccattgaattctgctccagtcttccttttttctgtcttactaatatgtttatacaataatttctcagaatgacgggtttagagataccccttcttcactctgccaatgttaaatgcaagagatttttattatagagtttatttaaaagaatttttctctgaaaacttttcttaaaaactggaatgctctttgagatagtctgatacagattggggtgtagcaaaatgagggctgtgcttctgaggcaggagaatagggcatggaggcaggtaacctaagaacttcttagaacgaaatcaaacggaaacacatcagctatgacgggaaatagcctcttcatttacatagggcgtacactaataaatgactttgcaacttcaaaaa

SEQ ID NO: 143379 - DNA, 592 bp, Homo Sapiens
ttttttagcagttcgaatcacatttttatgagtaaggaagtgataaatcagcgctgtgtgttcaacccccaagtcccgtcagccagtgcccttctaaaggtttctcccctggccagtctgcattctgtcagagttgccacccaccatcagggccctggctgcctgaaaccaggaagcaagagcctgatgctgccttgccctcccaggtactggggtctgtggtgaattggcagtcactgcaagctacagaacatctgggccatcatttttctttccattccttcttggacatgtccttctgggtgggtggctgcatatgtcagtttccggactctgtggagaaggagcattccagccggaagcagaagtgatcttgtggcccaccaggccattgagatcctcacagtctctacctgggtcttccctgtagatgtggtgcctaaggagtgtgatttggagagccacaggggagcagattcctttctctaaaagtgtgtcctttgctggtgcctctaatgctaccgtgaatcatttgtttcttgtgtgttcagtgccacccttgtataactatcttctttctgcaatatcagta

SEQ ID NO: 143380 - DNA, 569 bp, Homo Sapiens
tttaagagtttactggtttttatttttgcaactttttgtaaattttaaattattctaaaaagtttaagaaatgaattgtgctgaggagtataatcagcacgcagtgcgagttcttatagtggccacgtccacaaaccctgtgttgtggaagaacagaaggcgttctgctttctgtgtttcaccgtctctccctcgctttaacttccaggtcccggagtagtggtgacagcaaggtctgttggtttctttggtttaggtttgatgaaaggccactccagtggggtaggaggtgggcagggagaacaggggctagggtgggaggggcaggagttgggtcctgggggtggaggagatgacggggagagtggcttggagaaatctctgatccagatattcccagaacaacaagaaatcaagcttctgaatgtggtctgttgcaagcttggaaggtgcacacctgttgctgcgagggtaggctgcccagccgggtggtaacgttgaggaaaggacagcagcttcgcaaaggagctgggtaaaaccacgcccagaccccgctggccaccagccca

SEQ ID NO: 143381 - DNA, 527 bp, Homo Sapiens
  misc_feature (18)..(18): n is a, c, g, or t
  misc_feature (51)..(51): n is a, c, g, or t
  misc_feature (56)..(56): n is a, c, g, or t
aagaacaaatcttcaccnccacatctcactgggaagacctattctaatgcntactntacagatctcaataattatgatgagtactaacagctttcatgtttttggcttcttgtaaatccccagttcctcaaggcctgtgccccatgactgcccatgtttctgaggcttcagagtcgaagtttggatacatttcaagtgcatttcaagccaccagagtgtcccattgctgccaaaaatacacgtctttaaaagcaacaaaaattgaaataagacatcgtgaaaatcttgaccattgttgaatgagccagggtgtgaagtttttaattgtgttcatcctatttttctgacaagtccattggtttgttttttgagcattattttataaatgtgccacccacattggaaggagtctttctttagaactttggagtgtaaatcttcatgatgttgtaattcaagaaaataggcactttctctgaaagacctgctccttccacaagaagtgcataggtccataatattaaata

SEQ ID NO: 143382 - DNA, 170 bp, Homo Sapiens
tttcatagcagtgattttttaatcaacagaagttaaatgttactcttaacataaaccatgggcggaagctccgagggcggcatcagaacacttggttgccctacagatggcaagggggtgggtttgtggcggggcggcggggtgcgtatggagggggagagtggagggaa

SEQ ID NO: 143383 - DNA, 551 bp, Homo Sapiens
cttttggcctagatcctctatcctgaaaagacctatcttattgcctcgctgtggcataaagaggggcagaaggagcacatttatttctgggagtatctctaactccttgaatggtggcagtgggaattgtgtaatgaaccacagagactaagaactctctggccctcattcttatcccaaattccctctaggtctgttctttgttgtaataaatgttaaacatgtattctgctggattgagatagatcagatctgttcctctagacgtggagtagagaagggtggtgcaccagtgtgttcttgtggaggggcggggaaagcaaagggtactacagttattctttataggaaccgagagtctggggatgatgggccctcagggtctattttgctagtccaacctcttgtttctcctgagaaaatacaatcaataaataaaaatttaaaagcactgtttttccagctaggagcagtggctcacacctgaaatcccagtacttaaggagtccaaggcaggaatattgcttgaaacccatctctactaaagatac

SEQ ID NO: 143384 - DNA, 830 bp, Homo Sapiens
gggccaggaaggtttacgtaaaccacaaaatgtcctccccatgtcccttgactggaactgttcccatcagcaggaaaaattccagtaagaagaaagggaattccttttctttgggactcttctaaagtagcagaagagcgttttaagtttctccggttttccttgatgaacgtccctcaaacaatcgattgaagttaatgtctgggtaactagaatactccgatttcatcttagcatttcgtcgtggaaatgtgcagaagaaagcattagctaaaagactggcaatctgttcctgcgacattgtgatggaatgattcatcttctgtttcaggagtggtattggctgggtgcaaatatttggcagacagagtgcaattttcaccatatcaggcaagatggactgatataaatgttgagcttctgcttcttcaagtaccttatcccagaaatcgatcaaagctgtaaagtcccatttcttagaatatgccacattgtatttcagaatagcatccttcaagttttggggtcgtgtaaatttgttgagaagtgcagtctgaatgagctcccaccggctccccgcagttcgctcaccattctcatcttccactgggtacaaattttgttctgaacaaggcattttaacatgcttgttattccacaaatctttattatgtgttggaaaaggtttaggaacttctcctgctcgcaaaagatctacccgaatagttactgtgtgattggcagatggtctcaagagaggcagccggatcccacaccgaggcattcttctcatctcctcaatgggagttccaagccacttcttatctgcc

SEQ ID NO: 143385 - DNA, 305 bp, Homo Sapiens
tttttagaaaacagaagtttatttctcacttagtctgggaggaagttgttccagatagcaggcagctctgttcctcctagtcagtcagggacgtgtgttcctttcatacctttgctttgtcttctcttagggatgtcttttcagttgcctggtcaaacctgtctcaggcacatctgcccagctcgctttggagccgcagcggccaacaggagtgggcaaaggaccctgccagtgcctgagtgataggggaaataaggaataggggattcgggtgcccctagacgaatgaggaggatggaaagact

SEQ ID NO: 143386 - DNA, 103 bp, Homo Sapiens
tttttcacagttgatgcaacattgcttttattgggggttaggaacatatgacaaagtcacataaaatgtcaacaaagtcacactttgtgcttggctgctcttt

SEQ ID NO: 143387 - DNA, 437 bp, Homo Sapiens
tttgcttttcaaaattttttttaatagttaactaagttaggaaaaagttaccatcttcatcaaatacttaaaattgtaaagcaaaatatatggaatagaaaatggcattcgttcacgtcagacacttgtgatgataaagtatggtactctgtgagtggactgatgaccaaggcagatgtgtacagatgctaaactgttgggaaaatgctgcttatgagacatctctgcttcttgagacctgaatctgcaaatgttgagcactgtaccttacaaaagccaacagtttcttggcacagagtgtaaaagtttcatgggttagaatgttggtgaaattgtacactcagtacctgaatttaaactttaggagctcagtatgtatattaaccactttccttctcaagggatgccattcctttcttcattcatgaggaattttc

SEQ ID NO: 143388 - DNA, 417 bp, Homo Sapiens
ttttgaaaaatcttcccacgtttcagtttattcatttaaaacaaacttttattttttaacttgaacactgtcacatacatccatgaaagttagatgtcactggatatcacttttgatgtaacgaactttggaatgatatgtgttacaattcccacaggcatctggattttcttggcttcacctctgctgcgtctaggtccctttggagttcttcaccttgttttccgcatccttctctttttcttgttctttctcttcctcgcctgcagcatcttgggcctcttcatcccacttttcgggctgagatttagtgacttcctctggggccgtggcctcctgtgcggtcggttcttctgtggccggttcctctgcgtctggttcctctgtggcctcctctgagagcttctcctctgcggc

SEQ ID NO: 143389 - DNA, 321 bp, Homo Sapiens
tttaatgattttattgtttatcttcaatttattttgattaacatctccgttcttttcattgcaagtgcaattaggtgcaatctaacagcgactactttaattttgttgaaattaagatgaataagtgacggcttatggtgctttgtttaaccaataaatcatagttaagaggagtgtattagtaataaatgaaaaaagacaacttaattaaaatgcatggagccagcctcttgatgtacatccaaaatccaaatctgaattccaaaaatcagagggagctgagggttaggaagacccttgctgcctctcaaaatggtgacc

SEQ ID NO: 143390 - DNA, 712 bp, Homo Sapiens
  misc_feature (556)..(583): n is a, c, g, or t
ttttttcagggagtcatccacgactttattatccaccagtttgatttgtacaatctttgcgcttaaatccacgacaaaaaggccacagtgtgatgcacccaattgacagagacctgtcttctccccagccaggcccagcccaccccacaagcccttgtccccaggacacatggagccttccaggtgccctacatgagtcccccatcactctgtagctgtccaccctgggggcacacctacaggaatcacatcagcccccaggggcacaagagacctagctgactgattcaggctgagcgccattgcccatcctccttgggctgattcattggcccagagcctccagaactgtgtccccaaagggcaggtcatgggctacaaccccagtccaggagtgcctgctctccagggactccttccgctaagcaggcgctgagcagagcaccaaagggggcttgggagtgactgcatgtgtgtgcctgtctaggcaacctagagtctgtctgtgcctgacaccctctgacagttccggagtgcaaacgtgtaggtgtgaggnnnnnnnnnnnnnnnnnnnnnnnnnnnnatagccacagctgctagcagaagttctaattagagaaacaagaacattcagtgtaaagtttaattttagagattaattaattttctggttttcattttccctggcaatcagtaaagctaccaagaaaaa

SEQ ID NO: 143391 - DNA, 768 bp, Homo Sapiens
tttttttgaggaatgagcaatttatttcaataaagagaaagcattaattttgctacagtgggaaaaaatgaactcaagagttgctacatttaactgtatccccatttatctctgcacgatgtctttatctcagtgtctcaattcacactaaaatattgaatgagaaatacaccacgttggctgattgcttgacatgtctgatttagggagacttctacaaccactcctctcttttttctcccagtaaatacttttgactttgacacctaccatattggaaatgacaggtgcccgagggcaagtgcatcaaagcagttaggattcgaatgcttgctaaggattatttttttaatggagcagttctattgaatcctgaaaatgcagaacccagtgaatctcctttattgtgaaacagaacaattcaaatgattgcaagccccagaacctaacagagaagcacttaaacatttagaacaaacatacctatttttcaaactttggcatttttgtgaagtacacttatcatctaaatacctctctcccgtcttctcttttacaacataccatttcaacctgtttgtttaaagaatgaaggccttaaggaaaagccttattcacatccccgtaaaagaaagaaataaatatttgtttctagaatcaatctaactgaacttgactaaatcttgatagaggctccaatcttactcacacataaggcgatggatgatcttttgttgtcaacaaattctcattaagatagctaaacag

SEQ ID NO: 143392 - DNA, 490 bp, Homo Sapiens
ttttttggaggttgagaaggtatttattgttaattaaggcataatttacattaataaaaatgcataaccgtattcgtcaaggttctctagagtgacagaagtagtaggatagatgtatatacaaaggggagtttgttaaggagcactgactcacgtgatcacaaggtgaggtcccacaataggccatctgcaagctgaggatccaggaagtcagtccaagtcccaaagcctcaaaagtaaggaagccgacagtgcagccttcagtctgtgttcaaaggtccgagtcccagagttgaagaacttggagtctgattttcgagggcaggaagcatccagcttccagcagaaataaaataggccacttctcagggtatcctttccagtcctcagaatggctgtagtcagaggatggcaaactccatttgccagccttcagccaatgggaagtccttaaaatccttcaccaagcttttcacccctggacccccaa

SEQ ID NO: 143393 - DNA, 527 bp, Homo Sapiens
agcacaggcctcaggcggccagacccgggcgcgggctccggggcacgcgctagacgacctgtcgcgccccctcctccctgcgggcgggcgccgaggcagcggatctagggcgcaacagaagcttctctccgctcccctatgcagaccattgtcagtgctccggtcgccggcgctttccgcacggtgtggcgactggcagcagctctcccgttgcgagtagtcacagcgctgtcccgcagccaggggcaaaagctgcttttgcatcagagccgagggctgcaccaggtgtaacttccaccccttgacctattttagagtgtgaggatgaaaggaagaggaaaaaatagacggagggcgcgcgggggtgcgggcggcagggtgcgcgcgtggccgtgggggagcgcgcgcgcgggccggggctcgtgtcggggcttccaaagagaagttgcagcgaggcgccccccggcgtccggcgcctgggcccggtcgggggtgcttcgctagcccttcttcccgccgcggccgca

SEQ ID NO: 143394 - DNA, 510 bp, Homo Sapiens
  misc_feature (413)..(460): n is a, c, g, or t
gcattaggtaaaagatttttattcttatttaaccatgctgcatgtatacatacaataccaatatatacaacttgaacaaatacaatttatacataaaatacaatgaaagcatggcttttgaaactgatgcaacaaactgtaatttgtaattttggccagcatacagtattatagtaatgctactgaagttattcattaaattagtcagactacagtataagttcaaaggcactagaaacatctatgttttcttctagtatttttaagaacaaaaaataatttaaaataaaacaaatgtatacattaggaaattgggcagacattggtgtacttaaatgtaaacgctacccattccttaattcacagccctgtaggaaagaagactttccttaagagttaaggggaaggatatnnnnnnnnnnnnnnnnnnnnnnnnnnnnnnnnnnnnnnnnnnnnnnnncataatcatagttttaaaaacatgttacagaggaagtagcaccaccccct

SEQ ID NO: 143395 - DNA, 528 bp, Homo Sapiens
  misc_feature (480)..(480): n is a, c, g, or t
taaaaataaaaatatttatttggaaaatattagtagcatgataactcaacctcaccagatattaacagttcatcaggtcaggcaatagaacaagtccacatgagcttcttaaaaagaaatggatgaccacttcaatagctgactccatcttccattttattactggatgattcataatccaaaatatgaagttttgggactttttctcaaaaggagaaactttgggaaagtgtctgaagcaatggtattgatcttttttttccccctttatgaaactttaactgcatacttcagtctggtggaatcttttgtgttattctgactgtcaataagaaccaaaggactatgttgatgattcctgatgatttcagcaacacttccaaagtactcttcaccatttttctttctgcccaaggcatattggtttgttgcttcaataaatcgcacaggaatattatatactcgcttattaagaatacnactaggggattttgtgttggatcatggccaagctttcccaataagaaa

SEQ ID NO: 143396 - DNA, 632 bp, Homo Sapiens
  misc_feature (58)..(58): n is a, c, g, or t
  misc_feature (203)..(211): n is a, c, g, or t
actggcaaggatttgttcaccctccattcaaagcagcatgaacacaccaccaggcccntaagtgtccttttcttttcaattgtgggtgattccttcctttggaggtgaagaagagtgatactggaagaaatgggatatgtcctgtttaatcaggagtgtcctaatagttttaaatcagtttgatatgtctattttaagatggnnnnnnnnntcgctgcctttcagcgaacatttccaaatcatcaaagactgcctgcttcactttatacttattaggaagggatattttaacaaatgactcttcataagtaaaagttgcaacatcaatcacatgtgaggcaggtgttaggggcagcactgtccccgttgctgccaaaaagtgtaaataaaaaagagaaatcaacctttcctatccattcatccaaatgctgcccctgcaaagcatcggaggggtctgggtccctggtagagggtcctcaaaggtacgggctttcagaatgtgcacgaaaaggaaggtcaacgtgcccttccgcaacactctgaaaaatccccaagaattctgactttgccccagtgtacagcagttgccgagcctctttcccgccatcccccgggaagagaaggcggccgca

SEQ ID NO: 143397 - DNA, 258 bp, Homo Sapiens
caaaattcaaacaaattatttattacaaaacaaattttaaaaaatcacaacgtgattcgcatactggcgatcggctgttacttgccatttgccagggtatgatttgtattttgttttaatttatgctggtttcaggaactatggccatttgcctttttcctgcactacccgtgcgcctcctgtgggcactcagcatgggggggcatgtagtttttctcacttcccgcagcacgtttttatcttatattgcctacaatt

SEQ ID NO: 143398 - DNA, 545 bp, Homo Sapiens
cgccgcctccgcagccccagcggcagcagcacccgccaccgccgccacggcgcacacggccggaggacggcgggcccggcgccgcctccacctcggccgccgcaatggcgacggtcggggagcgcaggcctctgcccagtcctgaagtgatgctgggacagtcgtggaatctgtgggttgaggcttccaaacttcctgggaaggacgggacagaattggacgaaagtttcaaggagtttgggaaaaaccgcgaagtcatggggctctgtcgggaagacatgccaatatttggtttctgtccagcccatgatgatttctacttggtggtgtgtaacgactgtaatcaggttgtcaaaccgcaggcatttcaatcacattatgaaagaagacatagctcatccagcaagccgcctttggccgttcctcccacttcagtattttccttcttcccttctctgtccaaaagcaaaggaggcagtgcaagtggaagccaccgtttctcccagtgaagtgttcttagcgccttctcatcaagtttccaattg

SEQ ID NO: 143399 - DNA, 675 bp, Homo Sapiens
  misc_feature (374)..(443): n is a, c, g, or t
  misc_feature (447)..(561): n is a, c, g, or t
ggtttgtttttgtggcaaggacagctaaaaatctattcatttagcaggaattccaaatatagtacaattttattagctacagtcctcttattagctacatgttacacattagatctctaggctctttcatcctacatacttgctattttcttacccctcacctacattttactaaaacatagccacatccattccttacatatcatctatggttttcttactacaatagcagagttgagtaattgtgtcagaccatatggcatgcaaagcctaaaatatttactatctggccctttacaggaaacacctgcccactcttgctctagaaaagtgattctcaactctaggtggacatcagcactacctggtgagcnnnnnnnnnnnnnnnnnnnnnnnnnnnnnnnnnnnnnnnnnnnnnnnnnnnnnnnnnnnnnnnnnnnnnngcannnnnnnnnnnnnnnnnnnnnnnnnnnnnnnnnnnnnnnnnnnnnnnnnnnnnnnnnnnnnnnnnnnnnnnnnnnnnnnnnnnnnnnnnnnnnnnnnnnnnnnnnnnnnnnnnnngtggcaaggacagctaaaaatctattcatttagcaggaattccaaatatagtacaattttattagctacagtcctcttattagctacatgttacacattagatctctaggctct

SEQ ID NO: 143400 - DNA, 589 bp, Homo Sapiens
tttttttacgccagcaggccacatggctggccaagcaattattattatggatcccttgggctgtgggccttcccatccaccccaccacaactgcccaggtagctggagctgatcataaacaagaaggctctgggcagagtccatggcaccagcaccagccaaggcccactcctgaagacccgaagcccagcccctggatgaaggtcctaaggtcctgaggactccccagcctgtgcaggcctgcaaacccaggctgcccacaacagaaggggctctcggcttgtctggcctctctggcctcccaagcaggtgtgggagggcggggcaagtgtgggctgatcagctactccatatggccagggtcctgtgctggtgcctggctggggggctgcatagcctgcactgtctcctccaggctgcccctggggaataccacgtagtgtgtggagttcagccctggcagctcccgctggttctccttgctatgccggatgccatagccgaaatacactgcaagttccatcagcagccagatggagaagcgcacccaggtcagatagcttagtttcagcatgaggcagatgttgag

SEQ ID NO: 143401 - DNA, 511 bp, Homo Sapiens
tttttcattaagaaatatttataaacattaggtattgaatttacagatgttgccaaagttgtgcattcacggggccagtcatcataaattctgattgatgtttaaaatgagagcaagaaatacccaattgagtagtaaattgaaaactgtctaatcttcttccgatgcctctgtgacgttttctttgtacttgtaaactttcattgcacgttgaataggagtcttaacagagtcataagtccatcccctcctggcaaacagcctttgaatgatgccaggcatttcatagcccttgcttagaatgaaatccttaaaggcaattggtccataaagaccgtcaagaatgtcgggttcatcaggcttttcaagtacgagcttggggtcaatcaaaggttcatcacttcttagctttttccccaacttaggcttgaggtaccatgctccataccccatcttcacatgctgtgcactatgagaatttggtgcattctggattttcccgtccaagtct

SEQ ID NO: 143402 - DNA, 487 bp, Homo Sapiens
  misc_feature (253)..(376): n is a, c, g, or t
ttttacgttttgaagatctgggtgtttattcttccaaccccctccgctcccgaaggaacatgaagtggcgtgggagtggggagtgtgtcatccactgtcggtaagagcaggaagcttacccaagtgaacaaccacaacagaaaccctgcatggctccaagtcgctgctgagacgccgtcgcatctgggggcggaggagacgggatgttgaggaccaaatggtggcttcccagtgacgtgtcgggaatctgtannnnnnnnnnnnnnnnnnnnnnnnnnnnnnnnnnnnnnnnnnnnnnnnnnnnnnnnnnnnnnnnnnnnnnnnnnnnnnnnnnnnnnnnnnnnnnnnnnnnnnnnnnnnnnnnnnnnnnnnnnnngggatctgaggacccagggaaggcggccacaagaccacagaggcagcggttagaaccaagggacgcctggagccccctgaagccggaggagtcaacgaagatccttccctg

SEQ ID NO: 143403 - DNA, 300 bp, Homo Sapiens
agttgttactttatttggtgtttttagcattgtaatagagtaagtaaatatttggtctttgtcccagttcttggcacagagctctccaaaaacactcggagtttgcagagtgctaggagtgtctttgtcgttcctagtgatccactttggaccacacgtgagtttgttctactgtgaggtgattttggtggggcccctagatagcctcatagttggtttagtcagaaaggccaatcacttgatttgagggttaaaacttgtcagcccacttgccaaccttggggttgcagggccagagat

SEQ ID NO: 143404 - DNA, 289 bp, Homo Sapiens
ctagtatttttaaacatttgtaaagatctgcttttttaggccttgtgactacaattgggacatctcagctaccacacccaatatcaccaggctgccagttataaaaaactggcaaccaagcttccttaccctcttagctcctttcttccaatctaaggggactgtgtaccataggaacttataatctgtcagtctgacttttccttctcttgtcttacctcttttaattttgtcttacctcttcttttaatctacctattaaatcttgtgaattaaaaaactattttat

SEQ ID NO: 143405 - DNA, 1350 bp, Homo Sapiens
tttaacttaaaaaaatatttcagctttatttggggatggagacagtgacaggagtcagggtgaagggcaaaggagaggtgcttaaccaagctcattctattttcagtcgctcccacataggatcaaagtgatacctgcaggcatcttctgcttgttcctctctttttccaatgccttggaattgagagggaaaaagaaatgtctttataataaacactggctcacacttcagccccaagttctagtaccccagtttcaattacagtcacatatttatcatcaatctggaccagaagcactgccttgtcgatgtgggatctggtacctggatctctgctgcaaggcacccatcggtgaatcacatggccttccatgccctcctgcggactccagtctttccagctatttctcccagcttttaaccggattccttcatcaggccactgtagctctttccttttagacaggttgattccttccagaatttgactgggatccacaatttggactctgttaatcacttctgcctttctggagtgtgaattgttggcaggacttaaggtgttgcctggctgtgcatcagtggcactgctctgacctcccctctgtcgcaagaaagcccacgagagtgtgatgtttgcaggctgggatgctttggctggagctgctggaggaaggcaggccgtgctgcacacaggccaggccgctctgacctgagggttccatttggttcaccatcgacagtcgggattggatggatgatggcaagtttcgaagcgatatctgactagtagaagagcgccgacaaggcacaaacccagtggtggacatccggagggatgaatgccggctgctatagcagtaggaagactggctggctactgaggcccgggcaggagactgtctgaccaggcccgactgcacagagtgagagctgtggctagtgcctagtgttggaggataagatgtgacaggtgggtggagtccagttcctgatccctgcccaggatttccaatgcttccctgggtcacgttgctgtggggattgttggcagttgttgcattgttaccagtgcaggaagtcccacctccagtatcagaatcttcaatattgccaccactgttacatccagctccgcaacctttcctaagcctgtgccaggttgacactatgaagttcctgatatttcccaagctgataggacccccaagaatgtctttaagctgttcgtggctgtcagagtaagaagttgtcaggggtgagacaagattgggtagccataggttgatccgacgcgtggcgacgcgtgggtcgacgatatcccgggaatccggaccggtaccagcctg

SEQ ID NO: 143406 - DNA, 437 bp, Homo Sapiens
aagagaggaaaggagcatgtttatactttggactttgtatcaggcacttaaattgttggagagacatgccgttttgaaccaaagatataaaaactgggttggagtaatctttacaagtggtctaatgaatgggccttcagaagcaaagtggaggtgtgggttgaacctctgcccatcctttagtgctgactttcaagttttctaaatgcccataaccacagcaatggcagcagtggcggcaacggcaggaacagttctgtcatgtctgttttctgtatgtgttctgtggctgaccagaaggttttggtgtcacactaagaaggctctggggtgtggcacacctactgcccgaggttgcccagatccacgctggagccaaacatcttcaccagctgttcctcatagtgtgagatgttcctcttcatgatgtccatgca

SEQ ID NO: 143407 - DNA, 525 bp, Homo Sapiens
agttaaggaatgagaaattacttaatgggtataatgtatactattcaggtgatggatacactaaaagcccaaatttcaccactatgcaatatatctatctaacaaaactgcacttgtaccccttaaatttatttttttaaaaagcgtgtatcctaatttgaatgagctgtttcttgccagaaccctaactgatatgtcctttgtctagcaattctacttctggaaattttcccacacttaaactggcacatgtgcaaaatgaaagagatttccttgcagaagagactggaaataattcaaatgtctatagtaggggtactaattatataaataatggtgtgtctatagagtagaactgtatccagctatttaaaaaacaaggatagaaagatcttccaaacatatttttaagtggaaaaagcagggtggaacagggactatacatgctatctcttgtctaagatggggaaattaggaatatgtatttgtttttgcttatgcatgaagatactctgaaggattaac

SEQ ID NO: 143408 - DNA, 622 bp, Homo Sapiens
  misc_feature (606)..(606): n is a, c, g, or t
tttttcaagttcaaaaagaatgtttattttaagctctatgtacagaagaacagagtataaacgtaaaaaggaacaaaggaaacaaaaatgacaggcatacatatttacatagcaagtgtaggcaaaatgtgtcaagaagagtctttaaatacatctacttttagcctttaacagtccaaatcagtttctaagaataatttatcatccaggaagaagttttggaagtttaaagctcaaccttaagttgagtttaaatccttgagtttagaaggcttgtgttgctgataccttggtcaacagcttttgtgttgaccatttcttctttagttcgctgtccttctgactgtgaaatgtgatgtccaaaccttgaagtttctggactagaaaatggggaagattcccaagatctattctctttctcaaaagaatcatcttcttgaaatgcaaatttctgtttaagtgcatgagatattaaagaaactggatcccaatgtgaattctgtcttttcctcttatgaatgggtctaccgccaggtgaccgctcaattgcacgaagcttaaccttattcatatcctttagaacgtccaacatgtttggaatatctntatttctctggctttt

SEQ ID NO: 143409 - DNA, 465 bp, Homo Sapiens
ttttcttgccttttggtaactggtctaacaaattttacattttatcaaaataactcctatgccattgttattaagttttaatttgcttagaaaaaaactgaggttaaatttttcttttaaatcaaggttactatatccacgtaactttcttgcttttaaagtccttgtgcctttaagttacagggcgttgactcctggatataaaaagaacaccaagtcttgctaaatcttaaacaatgacagcagttaaagccttatcttcagacccagtagaagataccaatcaaaatacactgtgttcataaggcacaaggccagaaattaaaactattaaattcctcaaggcccagggactatcatggaagaggtgggtgtgtgagattctaacggccaattttgagagataaaattagttcagtttctctataaattaactattaatattgaaggcacactgatgcaaga

SEQ ID NO: 143410 - DNA, 497 bp, Homo Sapiens
aatccttccagcgattgtgactataatttgggctcatagggtttatagaggaccccctgcacaaagctggatgttgcacattttgtaccgcatgctttgggatcgacttttatcccacttgtatctagtgacaaagtgcacgttactgtgatcaatttcagctgtctactagtgactgtattgtgatatgcatcttgtttcatttttcacttactaatcaaaaagcctgctttgcctctcttgactagtttgtgttttagatgtcatcataatttgctgaaatatttatgatctagcatgattccttatctgagacttcttgctgccttttcacagcactattaagaattgcttcagtaactgctgtcctaagtgattgttgagaatgttctgaatttcgatgcttattttattaccccaacttcaaatagaacttagccatttgaacttcctaacttcctagccatttaaagacctagataagttactttatgcac

SEQ ID NO: 143411 - DNA, 401 bp, Homo Sapiens
ttttatactacatatatcttttattcaatatattgagtacagaaacttaaagctcagaactttgacattctcatgcattaatttctttttgtttaaacaacataaagagatagtcttcattagagaggatcataatggacatatgtggataggttttcctgttggttgctcaaaaagtaaatagcaaaaatatgtgtctctatgtaaacatattttctgaaattgggtcaaaaggatcaatgactagtttgtggtgtgtgagtcctatggacgatgtgtgtactgaccattcatgcttccagagcttcctttctgttgatcagggattacgggaatgatgttttagaaatttggtcacctggtttgtaaagtaaggtcttcctgggcagagttttgctttt

SEQ ID NO: 143412 - DNA, 475 bp, Homo Sapiens
aggtggttaatacaagaccagtttatttcttgctattccaaacctattaaagatgttcccgccctgcaggtggcctgctacatggtccttcagaaaccaaactccttccatattacagccctgtcctcctctagatcctcagtcctttccagcgtggtccagttgttgaggaaagggttggagggttgccatggggggtttgccggtgccaggtctggaagtggtgcatgtctgttctactcatacttcactagctggagctcaaacaaatgaccacaggaaggctggtaaatatggttgagctggtttgtaaagtaaggtcttcctgggcagagttttgcttttccctttgtcttctgaggtagatttataggcagctcttgttatttacactcctggaattcactctgccgtgtggctgattatgtccggaacccattgataattcctcatgtcaacgttgggaatgcaagca

SEQ ID NO: 143413 - DNA, 417 bp, Homo Sapiens
ttttttttaatacaagaccagtttatttcttgctattccaaacctattaaagatgttcccgccctgcaggtggcctgctacatggtccttcagaaaccaaactccttccatattacagccctgtcctcctctagatcctcagtcctttccagcgtggtccagttgttgaggaaagggttggagggttgccatggggggtttgccggtgccaggtctggaagtggtgcatgtccgttctactcatacttcactagctggagctcagacaaatgaccacaggaaggctggtaaatatggttgagcattcatgcttccagagcttcctttctgttgatcagggattacgggaatgatgttttagaaatttggtcacctggtttgtaaagtaaggtcttcctgggcagagttttgcttttc

SEQ ID NO: 143414 - DNA, 732 bp, Homo Sapiens
ttttttgatcttttaaaattttattttataggtagcttcgataaaagcttcagatagacccacatactatacagagtttgtgaaatctacactttcaaatcataatattctctattttaggctattatatttagaagcatgacatctcaaatccttttattacaagtagttcttgcacataaatgttatatcacaatagcaaaaaaatgtaaacttcttttgcaaactacataaatactataatatctaccttgaagttattctcattttaaatcagaatacactctaaatgttttacatagaaaactctcgttggtagcctgtgtgtatgaaacatcattttttctttcttaactacttgtctttcatgttgcctacttaggtctctgaaggagaaaaattcaaaatagaacccagatcaaaattcagttcacatgtaagccaggtaccagaaggatgccattaaccttgggaaaaataagagatgggaaattattctacatgctaaatccaacatgccaccagttggtatggaggtaactgaagataaggactggggtcaagctcatatttcattctatatggaagggattcagcctgctcttcaatacagcttttactctgatgtataaaaacatctgttctcaaatgaacacctctttctcttttcttgtacagcacaacagatcattgctacagctctagtcctagactggaaagtctaggtggccc

SEQ ID NO: 143415 - DNA, 1267 bp, Homo Sapiens
  misc_feature (1055)..(1055): n is a, c, g, or t
  misc_feature (1084)..(1146): n is a, c, g, or t
  misc_feature (1179)..(1190): n is a, c, g, or t
  misc_feature (1231)..(1231): n is a, c, g, or t
tttccagtttgttttagcttattataggttttggaggaactttgccattttgtaatctttcaaatcattcttcacccttcctcacatcagcttcctgcttttcccagtgttttactgtaaattgtgtagcatatgacaaatcttgagctgactttcctcttcacctgttatggctggagtattttccagacctgaagggactcacacttgttttgatacttggatcacatctccgtgaggttaggaaggtaaatctaccaacaggaagccctgtactctgtattccaaggccattggtaaatgtgttggtgccactgatcggactgtatgaccttaaacaagtcaccttagttttcagtgaaatgggaatatcattgtctcctctttcatgaatgctgtgagaatcagatgtgcaacaggtacagacttgccctttgaaatctatacctctggatacattagaggcattttattaacaaaggcccttctaaatgtgctatttatttgacaataactatcagatttgccttaattttgtgtttatagcatttatcaaaacgtatcctcatagactttatgcagattaatatggtcaattgatttggataaaagaaagtaatttcagggtttgtttttaagccaggacaagaagtgcaaatgcctctttgaagcaatttaggctaaactgattttgaaatttcaaaatgttttattttactttgttttattaagccaggacaagaagtgcaaatgcctctttgaagcaattcaggctaggtaaaccgattttgccatttcaaaacgttttattttactttgttttatatcagagtcttataaaacctgctgcaaatatttctgaatgtctttgtaaaagtgtttgttagtgtacctgtgattatagtacttcacttttttcctttggattaattggttaaatgaatgagaaatgtgttatgttttttactaaaaagtataaattaaaattttggaaagaaaaggcaatatttatctggctccccaatttaaagtttgattttattggcccccaaccntacaccattaaaataactacatacaaacnnnnnnnnnnnnnnnnnnnnnnnnnnnnnnnnnnnnnnnnnnnnnnnnnnnnnnnnnnnnnnncactaaaccataaccaccccttaaacatctttnnnnnnnnnnnntaccatgcccacccactgcccgcagtcttcccacataacgnacgaatgctcttcacgagaggttgccacaccccccc

SEQ ID NO: 143416 - DNA, 892 bp, Homo Sapiens
  misc_feature (238)..(238): n is a, c, g, or t
gttgttaatatagagagagatcacgtaggcttccttattagattgagacacaaacgaagatgtcttgctgtcccgggaccactttttgatctgtgagagcttgttgataaggaagatgccctttccctgggccttgccacaaggcttcatgatccaggtgctggacgggctcttccggaactcctctacaaacaggttgtagtcagcgggcagcatataggtgactggaacaaagtanacccagatagaggtattttccattttcatctttttctgccagaggactcccttctttctccagctccttcctgtatcttttgatgttcttcaccatcaggtccttccgggtcagttcatagtggtttggaaaatggttgactatttggtcatctgagagccgatatccagcttcaacgctgaacacatttcggatggtttgcacactcatccagtaaaaattccagtcttcgttttctgtcacttggacccatcctctcttttcacagttattgatcagcactgacttctcgatatcagtgacccattttactttccctgccataatccataggcactgacagagcaccactggcaacgcccacgctcaccttggtctcgctgacgtcactgacgccggcccctccttcttcccctctctgtccggggctccaggtccccgacgggcgatcgtgccaggcgcggcccctgcgggcctcagtctccgcgcctgtgcaatggggtggtccctctgcgtctcgccgcgacggctggacgccccatcgccgccgcacagtcctccagtgcggcttccgggcacccggctccgaactctggggtcgtgcggacccggcatgaccgtagcgcggcaacgccagcccacggccgcggccgc

SEQ ID NO: 143417 - DNA, 206 bp, Homo Sapiens
ttttttaataattgcaaacatttaatgtgtattatgtgccaggcactgtactaagacctttttatgtgtaatcacgtttaaaactcacaatgacccaatgagtcaaacactactaaacagtattcctagcttataaatgagtaaagtgaggcaaggagaggttaagtaatttgttcatgtgcaccagatggaaagggagaattgac

SEQ ID NO: 143418 - DNA, 516 bp, Homo Sapiens
ttttagtgactcagttttttattgaataaaatggcctacagcctgatgacagtaatatggcccttgggttttgaggaaaatatcatgttgtaggttggccaaaaaggagatagcagtccagctgaaatttgttttcttatactggctttaaggcagtgattagaaaaggcctaagaggtgggttctgtaagggattgctggaaggaaagtaggaatatggaaagtcatgagacatatactgtcatctcttcttgcttcctctcaagtcacatgcaaattcagggagagttagtatgaaacacacaatggaaatttgggctctaacatatgcaatctgattcttcatggacttcatttggccatatcagttccaacaatttcagccaatgtttaaaaatcttataagcagataacattttaatgtttcaacaagccatttcctatctttcattctgaaaatccattttaagtcatttttttaacagcataggggtacaaattcagcttctgtccaat

SEQ ID NO: 143419 - DNA, 586 bp, Homo Sapiens
tttggcttggcacacttatcagcattttattaaaaattaccatacatatttaaaacaaaactacatgtgtcaaaacaattgagaaaagcattaggtaatgctcagacgtggctgctctgtagcacagaatgattactaatttgcctcttcccttttgcagacttcagttctggggcttttgctgggagaagcttggtgtttctgtgggcacaagcacagtctggcccctaccacctcatgcacacttttgccctttttcttcttcccttggttgtgttggctgaagtgcaccctgggaaacaaaggccttgaaagacaaaaatctgtttggtgtaggtgatctctggccacctcaaacatgcgcaggtgcatgttggtgatggggttaaaggagccacaggccaggagcaccacaggtattcggctcttcatcttgtcaggcacatccacacctgttgcagtggccaccctgcttattaattgggagacaaggcaagagtgaaaagcagatcagagtgggagccagggagcagcagtccgcttcatggcaggatctaggctgaagcaggtagctgctatttgcagg

SEQ ID NO: 143420 - DNA, 597 bp, Homo Sapiens
tttataacctaaatccatcaagaaaagaagttcattgaggaaaagtaattggtttgggaaagagaagtcatagccttctactaaggagggaggttactgagggtttgggaaaaagcaggagagctgagaagaggccccacagaggactggagttggagcgagaccggaagccatctgtgggatggttgtgcaagaatgcttcagtccagagctctatttcgaaatctagcttcgggttctaattctccctggttactgccaaacctgcatggaatccagggtgtcacatacccattttgtgtgtattttatcaacccttgtgcttggatgattttgaagaaagtcttgaacagctgttgcactgaaaggttcaggatgtgtctggtcctacatgaatttggacacatctgctttgcatgcggcattgcaatttgtttctcagatcaacttattttgggttgtagtttggaaaggtgtgggggcctttgttgtttacttttttggcatgtttccttgatgtctagtggaggtccaagacaaaggaaccttcttatctttcctctgaatcactataatccattgcctgttggttaggct

SEQ ID NO: 143421 - DNA, 462 bp, Homo Sapiens
cacatattaaatgatattctacaaaatacttattctgtaatctagaaagtattaaggttaagaaaataaagtaaaaatggagaagaaacttgtctaaagtgaagtaagaagacttgacaaccaaatgcagtgcttagttaagaactagatccttttggcataacattattaggttaatcgacaaaacttgaatgtggtttgaggagtatgtagtagtaatgtattagtgtgttgatttccagtaataatgtatcaatgttaattcccagatgattgtatttctgtaggagaatgtctttgtaggaagtataaaagtattcaggggtgatgatgggtcatcagctcagcagcttactctcaaagattaagggaagaagttacttatactgtgcttaaattttcctgtaaatttgtatttaaataggtatatagtatccatgatgttatggccatgataataga

SEQ ID NO: 143422 - DNA, 715 bp, Homo Sapiens
ttttggtaccagagtgtgtgattctcgccccgcgtgctggggacgctgcgggtttcttcccggcttcccactgctgccgctgcaggcctctcagctcttctcggagctcccggttctgcttcctcaaggcatccatatgactctggagttttctgtgaatatcagcccacagcgactgctgtctcccgagctcttggtggagctgcagacccaggcaggaggaacgttgctgtagttcgagggtcagaaagctggcgatgcaggagaggtcttgttgtggtctgagggtcgtggagctgccgacccagggaggagcaattttgttgtagttcgagggtcaggaagctggcgacccagggaggagaggtcttgttctagtttgaggttcgtggagctgcagacccagggaggagcaatgttgttgtaatttgagggtccggtagctggcaacctggggaggagaagtcttgttcgagtttgagggtcgtggagctgccgacccagggaggagcaattttgttgtcgttcgagtgtcaggaagctggcgactcaggtaggagaaattttgttctagtttcagggttgtggagctgcagacccagggaggagcaagtttgttgtaattcgagggtcaggaagctggcgacccagggaggagaggtcttgttctggtttgagggtcgtggagctacagacccagggtggagcactgtta

SEQ ID NO: 143423 - DNA, 373 bp, Homo Sapiens
ggaaaaccagttatggcataacaccgtgagatgttgcaatcaataccaagaaagcccccacgatgccgaggacatcttactcctgctgctgggcctcatcgttcttgtcaacattggcatcaacgtggcaactatgatgtggcatggactccagaacgccttagacaagatgattgattgggctactcagaaaaatgaaattcaggccagtgaaagtcccccaagtggtcccccagacaaggctcaggatgtccacatccactgcatcctggaccctgtgcaggtgaagatgtcccgacccacgcagtactcctctttcgccgccgccaccgccgttgtcgccgtcgctgctgcaaccaccagcagcggccgc

SEQ ID NO: 143424 - DNA, 639 bp, Homo Sapiens
ttttttctgaaaaagaaacagtgttgagacttcttccagttttccaaggagcccctccagtcctaagatgcccaggggtgggtgtgaggtggagccccacgcagagtacggtcatgtgcttcttccaagccccagggctgcgtggggaaccaaagtctctgcacagagaatcccaaccttcctgttccctcacttttcctcttcttttcatggtagcttaatttggttcttcaaagctggagcttggcaaccaaatgcccttggtggtgaccagcagggagcccctcgctacgtggagggttccacctcttgcttctgtttggaaatgagctgcgcttcctttagagacaggtatacctcttcctgaggatcatagtagtagaactttcggatataagagatcagaggtttaggcagtgggagatctgggatgtgatctatcctgacgagctgtcgtatccggaatctgcaaaggtgctggagggatttgacattgctgaatcgggacactggatagagcagctggacaggagttggtggcagtcctggaaccctggatcttaagaaatagagaaactttgcattcttggagtgcattatggatctttttaatgaacttacaaaagatggacagggttc

SEQ ID NO: 143425 - DNA, 450 bp, Homo Sapiens
ttttttttccattgctcattttatttcaatagccaactgtcctcacagaagaaactgttcatgtcacaggtgatcagaagcaccattctattccctagggactgcatcagtgcttatgaacagcctactttttaaagttggcaatcactataaaaacatcaaatagtcaaactaataaattttttaaaaccagtgcccataatggctgaaactttatggagggggaatgaagtagccccagcagccaggatgcttgctagtaaaaccccttagaggaggggcaaggggctgtggccaggaagatgtgggggacagagcagcaaggcaggatgctgcagaacctgctgtcaacgaccctggtcctggctgctggctccagccacctggatgaactggaatcttgatgtctgtggtgcccccagcaacctggaggaccaggcaaaggcagca

SEQ ID NO: 143426 - DNA, 460 bp, Homo Sapiens
tatttcttggctcctctcagctctcagattcagactcccttttttagaaggatgttaggtgtgggactttctctagaaagcagctatcacttattttggaggtgtaatgactgggaacagaaagggggagaaacagatccgaggcacaagagagctcctgaaaaagctgctgaaacgtgcctgggccatctcctgagagaagcctagatgggcggcctccaaggagtccttgtgctgtttgggaccttgagtagctgcctctccatggggccctgtttcccagttcataaaacgggtgatgcagctgagttgtgatagtcaggatgccttcaattgtagacaacaaaaaccaaactagggctgggcacggtgacacatgcctacagtgccaactatttggaaggctgaaataggaggattgcttgagctcagaagttctagaccaagcctaacaatatcc

SEQ ID NO: 143427 - DNA, 524 bp, Homo Sapiens
ctccggctgctttgcagagttagggaggcttggtgtggggagctcctcagggagaacctgcctaggacagcctcgaaggtcatcggcagagacagagggagcagtgtgcgctgcgggaacggcactgcagatagattgcttaagcctggctgtggcataatgatatttactctggtcccacagaatctggaggaatgcgaactctgtttaccgagagcctctctccaaacagaaacccagtgcccctgcacattcctttggctcctccagtctaattgtcccacaggacaccgtaataactagttggaaggcaaacagtgttaactgatgtgatgtgctgctgtccagggcactgtggccaggccgccgctccacctatccccagccactcaaactgcaggtctgcctggtgcggaagctgcaactgtccttgtctaagaccaggtgagcccatgcaacctttcagaccccatgaagggtgactgacagtgactcctgccagccctcgggagggaaaggcgaga

SEQ ID NO: 143428 - DNA, 688 bp, Homo Sapiens
  misc_feature (63)..(63): n is a, c, g, or t
tggaaatgtcccatcaattgggcggcccaggccatagtccccccacgatgcctgaccagttanagagtctaatcccggcactgccgttaaggacggcaggaccttcacagctttctgggagtcgtttcccagttgcaaaatcacatacaccgggagagcaaccccttcctgcgactcctgcttccctttcgggagggcagcccctaagagtttcaggctgtccgcatccctgcgttccaactgactcaaagggatgtggagagagtgcggcaggcgacagatgtccacctctacttgaggccggacgtccagcaacacatggggcgccccggaatccagaagccgcttgtagtcggtcacagaaatccgctcctcggggcacagcagcttcagggcgcggcacttgtcggtggccgaggagccgcagaaggcctcgtagtcctgcaggcgggtcacggtgggctgctgcccgcacacgacgcagtcaggccggcggcgccgcagccggatccggcggaagtggcccccgaggccgtcgaagagcagcatgctgccgctgtaggaggagccgaggccggcggcgatcttgagcacctcgagggcctgcgcgcagcctagcacgccgggcaccgctccgagcacgccgccgtctgcacagttggtcactgtctccggcgggggcggccgc

SEQ ID NO: 143429 - DNA, 606 bp, Homo Sapiens
ttctgttacccgtagccatgactgcaggctaccataatggattgatccatcaaggtttttctctctcagaaggaagcggtagtcctctccacttaagcgattttccagagccattcggggccacagcatcattcgctgaactggacaatctgttggattgagaatccattcttctccaccaaattcctttacctctgctagaacataacattttgttttgtcaagatgaagtttgtttataagagactcaatcacctcagcagctgtggagttttttctggcaggaatcggacagtagattgtcccttctgaaatagccccaggatatatccgtaatgtatgttcattatcttcaaagcgtcgtcttcctccatcatttatattcatattggatcctgtcccatcagcatggatagtatatgttcaaagtcgtgcaaaccattttcttggtaaaataactcgggctccgccgcggtggccaccgcagccccctcctcttcgacggaagctgccttccaccctccgccccagggtaggaccggagatggcagaagaggccgaggccaccgagggtcggacggttccgggagggtgggcccagcagcc

SEQ ID NO: 143430 - DNA, 346 bp, Homo Sapiens
aggctttttgcaggcgcagttagcaggcgaactggtcagcagggtttctggggaacgtagatttgcgtgacaggggccctgtgttgctaaggaattaatgcaggcactgagaaaagtctcagcgtcagacactcctccacctcccgggtcctgcttccctccctctcccctttccaggcaactcacagtttaggggtgtggttgtgtgtgttcaagctcttgggttttacatataaatgcctgagacttttctgcagggtttaaaaactaacatcttgtcttacagctcttttaggatttgtcttttagaatctccagtcctcacaggaaaaccccccaattaaaa

SEQ ID NO: 143431 - DNA, 890 bp, Homo Sapiens
tggatctctcaagaaacttcccattgcgggggtgtggttccgaaaacgctgggtttagcccccccgggggtgttgttatttggggaagaattgccaaggcctttgtccgagggccagggatttccttagggaaacagggtaatgggccaggtttcacttacctgggtggggcccgcgccgcccaaagggaagggtttaaaaaaacttttcgggggcccgagggcgcccggacaggattttgttttatttggggggtgtacagtgtcttcggagggaaattgctctcataggttatttttcagagcccagaagcctgagccagggtagggcacacactaggactctgtcctgggtacaagattccgcaaaaaatccttgattctcttggacaattcttttaaactctttgccaatcttctctttagatttccggaagaaatcacccagcagggcaaatctcttgttatccttatcacaactgatgtcaaaggagcccctggcctggttgagggtcactgtccccatacaccgcttcaccagcccgtccttcttgaagtcacaatcctctggtgactgctgtgtcgtcctggggcacactgtctccttcactgtgaagctcacaggctttggcgtgtctgggtccccatccatcgtgggcctggggtccaggtccaggaggcggtagaggttagcatccgaggaccgctggttgatgccatgtatagcacgaagcacagcttccttgtagctgaggacctgggcaatgatggccagaggcatcaccaggcccagcagcaggagcaccagtgaccaccgccccagggagtggccatccctttgggtcttcatggtccccatgtctgcctccctctagcccacaggagcctccc

SEQ ID NO: 143432 - DNA, 488 bp, Homo Sapiens
tttcagattttcatcagaaatcactttattaggagaaactcaaagacctgtagtcccacagtcaagaagtactaacagaacgctttccagacagtccattctggatacttggaagacagccgagacaagagaaaagaatatgaattttggagttagtcagcggtgggttcaaacatagcttcaccagccacatctaggtggcctggggcaagttttttacctcttggagccttgatattttcatctctttaaaaccaagggcattgcaccccctcgtggggacagctgagaacccagggcacagtaagccctcagcaaatgttggcctctcttcctccctgagtgagagaccactgatttagcgcatgagcatgctccccccataaaacagttctgtgctatggctgaaaaacacagcaggcatagaaggaactcctcttgaccaagtgaatctgcagacatcagggcaggcagcaggagcctaggtg

SEQ ID NO: 143433 - DNA, 417 bp, Homo Sapiens
gcacagccacctttttattagagacactgcccaagggtatctgcagtaccaagtgttccgccccggtgtcaattaggaagcgtataggctggccccccagtgtggcagtcaccatgggctcccaggggccaagggagagggagccccggccccatcaatcatcagattcctccgcagcagggagggtgaggacctttttctcttctggtttttcttctggttttaatgggcattccattttccagtgtccaatctgcttgcaataagtgcattggtttctttgtaggggagcctgctcagcttttggcctttctggcagggacccgggatcccttggccagtgctctgtgatgggggcccttctgtcttggcttcttggatggcagccacgaagatttttgcctgtctttttgatgc

SEQ ID NO: 143434 - DNA, 526 bp, Homo Sapiens
  misc_feature (485)..(485): n is a, c, g, or t
cttttttaagatgtagacttttcttgagactttcgtacaaggcaatggacagataaccttaacctcccagagaaaacacacattggccacagaaaaaggcgcttctccgtatacctgccatagttatcagcaactttgaaatggcttctcagactctcaggggttggcttgttgtgtttgcttttgcaaataactcaggcttaagtcctgctactttcagagcctaggggacgcttaaggactaccatcagtttaacacagtggcacttggagcacatgctacttatggtggtgaggaggggtgctggtgtgagggtctgaacgcttgcttctcctctggcagggtgtgagcagccagaggccactacctgggcaaggatgcttgctcagtgtccatggagggacattttgatccagcaggttggcaggaaccaggcccctgtggccgcccaactcttcataatagaatccttggtcatccctgnggcccgtaaaccatgaccacgtctcctgcccttagcgccag

SEQ ID NO: 143435 - DNA, 415 bp, Homo Sapiens
aagcaccaaccacagtattttactcattgacgcatacagaatgtaaatacgcgtagttgtatatattaaccaatgactacgttatctgtgattcacatgtattacacacattttccttttctttccccactcctatttaaggagtgttgattctaggatagtctttaggccacaggatgtccaggagaggtggtgtctgaactagagaaggaatcaacatgcttggatgcctccagtggtggcttatggggttccaccctcacacggcgggagaggcagcaccttgttggcttgacagtagctatgtgaccttaagttggggtgcaatgttggtgaaacagagatcaaagtaggagaggggtgcagatgctggaggcctcccgggttccctcaccaggccgtctgtcagcacagc

SEQ ID NO: 143436 - DNA, 460 bp, Homo Sapiens
ttatgcagactgggagggggtcgggcagtcccctcagccacgaggaccctggatgggttctagttcacttgggaccgtggggcctggctgcgtactgagtgggtgccccacagtcaaggccaacgggggctccccctgctctgagatgttgggagaaaggcggcttctggaaccttccgtgggacccgtaagtggctgtccagaaaggcgggagggtgggcacggggcacggggggcagctggggtcgttgttaagggtcacgcatctgtacagttgaatttcctttctcttatcatgttttacccaccttgtcccttttttccccaattgtgcttttgcatttttttccttggcaaatgtaaactcagcctttcattcatgacgtgtgaaatttcagtttctctggagtttgtcagacggcgtgggaaccacgcctgaaactcaggtaataggaggaaa

SEQ ID NO: 143437 - DNA, 563 bp, Homo Sapiens
tgcatgtctgtgaaatagcagaaggcattgtttcagactcgcggcgggaatcaaggcacctccacctctttatgccagccgtgatgggattcgttgccactacaacatcgatagtgtattatcataatatcgaaacatcaaattttcctaaattacttttagccctgttcctgtattgggtaatggcctttattacaaaaacaataaaattggttaagtactgtcagtctggcttggacatatcaaacctgcgtttctgcatcacaggcatgatggtcatcttgaatggggtcttgatggctgtggagatcaatgtcattcgagtcaggagatatgtatttttcatgaatcctcagaaagtaaagcctcctgaagacctccaggatctgggagtgagatttcttcaaccatttgtgaatttgctgtcaaaagcaacatactggtggatgaacacacttattatatctgctcacaaaaagcctattgatctgaaggcaattggaaaattgccaatagcaatgagagcagtaacaaattatgtttgcctgaaagatgcatataaa

SEQ ID NO: 143438 - DNA, 554 bp, Homo Sapiens
  misc_feature (86)..(145): n is a, c, g, or t
taaaaatacaaaaaaattagcctgatgtggcgagcgcctgtaattccagctgctctggaatctgaggcgggtgaatcgcttgagcnnnnnnnnnnnnnnnnnnnnnnnnnnnnnnnnnnnnnnnnnnnnnnnnnnnnnnnnnnnnagagcgggactctgtctcaaaaaaaccttttgttgttgtttgtatggtggaaaatgtcttaacacacacacacagaatagaaaaatgaatttatttaccttggattagtaagaccattttgttggaaacccatagtgcaaaattggctttcctttgcctcagttgtactgttgccatatttgacctggcccaggtgaaagtacctactttcatttacccttctatgtcagtgattctccaatgagcaattcatggccaatcttgtttcatctatacccgtgccctcttccccactccatatttgtgtatatttctgacatatcatttcatcctgtaaatgtttcagtacgttatctctaaatgataaggattcttctttaaaaccaaatcacagtattgtcacaccaaa

SEQ ID NO: 143439 - DNA, 482 bp, Homo Sapiens
tttttcttggtaaagaaaagtgctgttttttatttgttcttgaatgtataggttcttttaaaatcagctatacttccctttaaaatatcctccctcatgccccaaccgcttagaatccaatagccactcctaacaagggcctaggaggaactcatcctacatagccaagaaaggggtacagcttgaggaatgggcatatggctcaggaagcagcaccagctgataagaactttccccaaagcagctctgtttggcttgtgagtctcctttccctgccctggtctggactcccccagctgtgtcccacccctggaattcccctgttccttatgtggcctgatcttgagagttaaaatcataattaacatctttacagctggagagctgagagatcactgttctcagccattctcccaccacaactttatagatgaggaaactgtatccaaggttacacagctcataatggaaagagccaaaaa

SEQ ID NO: 143440 - DNA, 409 bp, Homo Sapiens
atgaggaaagcctcttctgaaagacatcgactcagaagcagggtctccagatggaagtatcacatggccagggtgatcctcactttgcctctgaagtctgttcttgtggttggcaggtggaagatgccctctccccctttacctacatctttcataactttccaagattcgtttccatcttgaatgggggtgggaggagaaggaggataaagaatcagatgagctgaaggacagacacagaaaaagaaaatcaggtaatcactgaaaggcagaaacccagaaaaagactacatcagcccaggtgacaagtccatcaagtcactcctcctataccagctgcccctcaaaaagattctgctgatttcaaagttacatttgccatgtcttcagagcctttcaaaggtgtaaa

SEQ ID NO: 143441 - DNA, 477 bp, Homo Sapiens
tcagataatcaaaataatttttatttggttgtagaatgttgtagtacataaagcaaaatgtgtctgcaggatactccaaatttaccaacttcaaacaaaataatgcacagtgaagaattagaaaattatcaaccttactcaatacatggaagtattccttaatcttcatcattttcattaaacaaaataatattttggatgagttcaacatttctatcctatgctttatgtttagtgccttccctgaattggaaaaaatgaggtgttttatttaaatttaacactggtctaagggagatatagaattaaactaaacaagaatcggttatcacaacctcacaacatatatcaaagtattgagattgttggtttactgactgtcacttttcactggatattaaatatcctgagggctacaactgtattttttaacctgtcccagtacctcaacaaaattttcactgaatgtatgaataa

SEQ ID NO: 143442 - DNA, 460 bp, Homo Sapiens
ggtgaaggataagggttatacaaaaggatatgtctggaaaagttatgaatacatcttgtttagggtgacatttcaatataataattacaaatcgatgtgcataataaaccgggacctttcaatgtttgttagcccagcttgcaactaataataccgcatgtctttttacatttcagattttttagggacacaggcttgtttttctcacaattcgttagagattttcttttatgtcacaagataaaaattaagaaatagaggttaacgctgtaaaaggtcaactaattccaagttttaaaaattgggcgtaatcagaaattcagattcataagaactgaatcctctgcattttcttgtcggaacaactcttcctaatttccatgggttctgagtgccggaaggcctgctaagaaagaaaggtttctgtctggtctctcctctatcaagttctccaccaaga

SEQ ID NO: 143443 - DNA, 422 bp, Homo Sapiens
ttttgtacgaaatgtgttagaactcctcttgcctatgttgaaatgtgaatgggtcagtctccctccactgtaggttgagcactctcccatggggcccaggactgctggggttggcgtgctgctccctgcaggtgcagccgtgagtctacggccctgcccctcagctccccggctgcacagtgctccgtccccaggccgctgaccacactcacaaccccttgttgtacaccactgtccggctgctcgtggcctgggctatctccggctctaattgggatgtttcaatccactctggagacagcccctcctctttgaatcgcccaagtcctcatcttccatgaagttactccatctgggttctccctgtgcccttggctgcttcttccccttcttgatggtttttcttcctcctctgacatttg

SEQ ID NO: 143444 - DNA, 525 bp, Homo Sapiens
gcaggaagagtaagaagcagaaacaagaagctccatctgaacagactcctctctccaaccttcatgagacccacagtgtgtgatgggccaccacagcactggcttttagacttttacagggaagccagtgaacaaattacctcgtcacccagaaaacaaagagctcaggaactattttggaagttccttccagtctaagactatggaactcagaatctagcaggtgtgttcctttggatagcaaaactaaagatataaatatgaataagaaattctttgccacttctcctgggcaaggttatactttatgccatctactgagataaaccagatgagtcagtttgcttctgtcagttgctgtgtcacagatgacatcttctcaaaataatattatctcacagccaagaaatagcgcttcgtttactgtgtttttctatcctgaaactaaatgggcttacgcttcatagtggctaagatactccacacacaactagtacccatagatcttttctcactgataggaaa

SEQ ID NO: 143445 - DNA, 520 bp, Homo Sapiens
tttaagctctaaaagaagtatttatttatgccctttcttgctccaaaaaaggatgtcaggtagaatgtgatgcatgtgtactaaacacattcacatttgccaatgttgcctctatcaatacttaggtaaacatgttttttttaagttgcaaaatacacataacatgaaattcagcattttaagaattttaaagtgtacgattcagtggcatttagcacatttacaatgctgtgcagccatcatccctctctagtttcaacactttgtaatcaccccagaagaacatcctttaagtaatcacttcccatctcctggcagccacaaatgacatatcacattttgtttatccgttcatgtgttgatggacatttgggttgttttcacctttttggactattgtgaatagtgctgctatgaacattcgtgtttgttttgatttgcacaccagttttcaattcttttaagtatataccctaggagtgaaaattggtggatcatatgggaatgctatgtttagttt

SEQ ID NO: 143446 - DNA, 396 bp, Homo Sapiens
aattgacacaatgactgtacgtttatgaagtacaatgtgatgtttcaatacatgtatacattgtataatgatcatataaaattaattagcaaatccattatctcaaatgtgtatcatttcaaatgtgtatcatttctatgtgataagagcattcaaaacttctctcttctattttgaaagatacattattattagctataatcaccttaccatgcaagagaacacctgagcttattcttcatatctaacaataacatcttacctgtccaacaccccctttgttttaagacagggtgacattctgttgcctgaattcctgggttcaagcagtccttccaggtcactctgtcaagtagctagaagtacagatgcacagtaccgtgcctaagttttaat

SEQ ID NO: 143447 - DNA, 453 bp, Homo Sapiens
tttttttaataacgatagcaaacagtagtcactttaatttgctttcccaagtaagcacattctttacaaattaaaattatgatagaaagccagacaaaatgcataatacatacatagttaaatttcatataccttcagaggtagaatttgggatttatgtaaataaatgttactcaagtatatctatgttttcaaagcatattgtcacatttttgtctgcagaataaacaataaaaaaggattttgcaggattctctgagcctatgggtcaaaaatagcccatcataaatccttagaaaatttacagtaggcaaataattctctactgaatggcagttctcaaactgatttggtgggtctggtgtgggttctgagagtgtccatttttaacaagttccagtgatgctgatgttgccggtctgagaagcatcatgagaaccactttctggctgg

SEQ ID NO: 143448 - DNA, 992 bp, Homo Sapiens
cccttttattaaaccaatttttccaagtggccctgcgatgatcttccggatggttctacgattctggtggtgtgatcctccaagccatttagcaaggtggagtgtaaacaatggtcccagaccccaacctgcaatgtttcctgaagtccaatcctgcttgggagtccttgggaacgtgtacaatggttaacaggcttgagaggagtcagctgggagagtgagagcgagactctgccctgcagaggggccgctgaggatggacccctgtaggccgtccacacccaccacgcgtgtcatcctcaggaaatgcaaccggatgctcggaatttcgcccctaaagcgactcagggcagtctcagctcaggaagacttctttttttgaccttctggcttaaagccacaaccccaggctgaggatgccacatcaacggcgtttcctcgccacgctgcaggcgtgactcacgtttctaagcctgcagggtccccgggccaagcgcggctactgagagcacagcgtcctccctcagcccctgctcatctgcacggagcaaagccgcagctttctctgctgtcagcgctttatacgactcggatgtaggctctgagcgggcacgggcccgccctcagacggcgacccgaggggcaaacaggatggaggcgcgctcccttgcaggctgtggtctcgattttatctgctcctgggtggtgcgggtggtttgctctctaggcgtgagcaaaggccacaaggggcccgaaaaaatcacccaaggatgcaagcccgccattgcgctgagcaggggcctccccgccgccagagcccgcgcccctccagggaggcccgcgcgatcgagacccgccgcctcccggccaggcgcggggcaccaggcgaggggagccaggagccgggaggggcggcgccgggcccgcaaccccaccctgtcctcctccgcctctcccggcaggaccgtcccctcccagccccatccgcggcc

SEQ ID NO: 143449 - DNA, 410 bp, Homo Sapiens
aagacctaaattgcttttcctaaggttctggactatgctgacattcataagtgtatttacagccttccccacgttttacacctttgagcccttgctcatttagttccttaaaagtagaatgtccttggaacccatctaacacatatcaaaaccctactccaccttcaaggcacaatttaaatatcatttcctccctgaagatttctatagtaataataaaaattaactgctcctctatcctatgtgtattctaacgggaaataaacctaatacttaatgaacctctatgatatgccaagtcaagtgctttataaaagaattttaatttaaaccttctcagaagtcctataacgtactattatctccattctgcagttggaaaactaaagatgtgagaggttgcataatac

SEQ ID NO: 143450 - DNA, 509 bp, Homo Sapiens
tttttaactcataacacttgctagtgtttatttccaccgaacagcgggaacaaccttcacacaaagagccttggcagaaaacagtgtctagttataatttaatcttgttttgttttcatgatatttatcttcacagttgtctcctccttatgaggctgaccacttactcaagtggtataaagcaactttttcaagtttattgacttaaggagaaagctgtacgtccatttgaagaatgggaggtgtgggggttctggcggtgcatagatgcagcaagaacacctgttggggttcagtccgtcatccggtgacagtctgcttatgagacctatgatccctgatggcagcccatccaggagagtcagcatggtggccaaggttacatgcgtggtccagaatgttgtccctttcagcaagttgacttcacgaggagtacaggcttctgccaatcccaggaaaagcagaatcagcagcgacattttcagaaatggctctgatctgtgcatgat

SEQ ID NO: 143451 - DNA, 489 bp, Homo Sapiens
  misc_feature (478)..(478): n is a, c, g, or t
tttacccttgcaaatgtatttatttggtttagaaacccactgggaaatagaacagtgagatttgaaaaggtggaacaaggacttgagtagaaggtgtcttcttatgctggaacatccttaagggttccaaggggtgtatggttccgagtgtggagggacccttctgagttgtaagactatgaacccaaagtttaaggttttaaagttttgctgtcatgtgaatggcaagggcagtcctctgatgttctcagaagatccagtcatcagattctagattgtgaaggggttggctgtcctctgtgttcccgagtgtttttcatggtccttttcattctttcatgaatcttctattctagaattttgcatgcttgtgaagtttttagaaactgcatcaccattaagcaattaactgtggaaatgactttaaataattatagttaaagacaatttataaggaaatttggttatttctgtggtntacaataactt

SEQ ID NO: 143452 - DNA, 576 bp, Homo Sapiens
tttttgacacagcacgaggcagccgaggctgtcgtttattgcagatggacacggattcagggaggtgaagaggcagatgggctgtgggctctgtgctcagcatcccacagcaggaggggcaggagacagagctcaggatgggatcttcctgatggtggaggacccggcctgaccacagagtagctgcaagaggcaaggccccgagctgacaccccctgggcccccattccgcgggatgacggctccagagacgctgagcgatgtcattaggaagaaggccggaccaatccagagacggtgcatcctcggcgtggagcacagagctctcgagggctggcgatccgggttggggtggaagggagagttacccgggtcttcgcccctccgcggcctctggcgtctctctgggtgtctggcggctcggacggcggtcagggtcgctgtaccggcggcggcggctcaacggcagctggaagctggggtcgggcccgccggggactccccagaagcagagaaggaggcgccgcgggcgccgggacagcggcccccccggaaggcaacacacggagggacggc

SEQ ID NO: 143453 - DNA, 503 bp, Homo Sapiens
gaaagagacattgcttttaaatatcctaggctaacaaactttttcacaaaatatatggctggcaccttaacaaataaagcatgtgtagttaccattttactcctatgaatttaatactaaagtgacccagtgaggtttttgaatagacgggtgctaaaatttacagggctgaaatagcttattattctgctggttaatgtatcttacgccacggatcatttatttttatgaagctttcaagtctttgtgtgcaagtaaaatgatgttgtggcgttgttcttggatggtaagtggactgcctagaggacatttgttaaaggtcaaagccaaattgtacacatatggagaaaattagcaatgctgtagttttaaggaaaaaatgatttatcattcatatcaaaaagagtttagcaaatggaaaaccagttaatgctttaattttaaaatgttttggtgttttacttttccctaaaaatgacatgtagtaaaaaatggatactttt

SEQ ID NO: 143454 - DNA, 403 bp, Homo Sapiens
  misc_feature (317)..(317): n is a, c, g, or t
ccagtcacctcccagttagggaacggtacacccaattcttgcttgtctcctcggcagtgctggatccagaggctagggggtagcagccggacagggcctccacctcccgggtcagttcccgaagccgccgtctcatgtcccgggcatcatacactattcggcctgaggagcggtgccgggaaaattcagggatgactgctgggcccagggtgggagctgggacaggctggtactgagccgcctctgcctctggcaccgccccctccccaccgttcttgtggctaggagcctcagggctgggaggggtgggttcacangatacacataggcccttaggcccagctcggaccatatgcctgttttgaggggcctttcctctacggtaggctggaagcggatggtc

SEQ ID NO: 143455 - DNA, 500 bp, Homo Sapiens
cctgggtggtgatggctcaaacgctaatgagtcagtgaatccttaccgaccccctggcctttataatctgaggcaactttggctgcagcccgggaatgtgcagggcattagggaatacaaggccttcttccctggttgtcttgtaataaaacagccatggggttgtccctccagtccgagagactgagatgaggcctacatagcagcgatgtggtcaggtaaaaatcaggaacccactgaaatcttgggcaagccaccctgcctgcttgtgcctcggttctctcatatgtcatatataggaggtgaggactccagctccacctgccccaggtgggtgtggtgatgatgaggaaagacaagaggcttgcaaggaccctgaagaggtcggagcatcatacagattcctttattagcccacattctgatgttccctggtgagacttgccccaagcaattgctagtaaatgggggttaatttcttctccacctccctactgaac

SEQ ID NO: 143456 - DNA, 477 bp, Homo Sapiens
tttcacttttctgtagaacgcgttttatttagagcgccatccttgggctagattggcggaagttggaggcgtcatgcagcgcctcctgcctgggagccaggcgatccgccaggttctgggaggacctaaggtcaacagccacgcctgctctctgggctcacagtcagcagccgctaccaggagagcaagtcctcagaaggcccgagaccagggcccgggagcgcccacaaggacgggaggtcacccagtgacaaacagggaagggcagcaggtgcgcccaggaacccagaggctcccagagcagaagtgggatgcaggggtgggggcgggtcatgctgaggttcaacagggacctgcttcctggttcaacagggagctggccagagagaggatctgctgaggcttctgtttaaaaaccctggccttggtgtgggtgcaagtggatttcaggtcagtgaggcacggccggagcagctg

SEQ ID NO: 143457 - DNA, 600 bp, Homo Sapiens
ttttgaatgtttgataggtttatattgtctttttccatcctcttcagacatccttcaaagttgagccctttttttccgctgtgagtctctacacatgtctgacactctcatgtcccacggattacagaaagacattccttgcaggagaacatggcttcccagtgatgtgggaaagatggactctgatctccagggtagaagtggcaaccagagtaagccagttcgttgaagcaaatgatggctgcagtgaagagtaccgaggcacacccatcctcaaacaaggatcccacacagggccagaaatcagccctccagggtaacagccctgactccgaggcctcccgtcagcgcttcaggcagttttgctaccaggaggtaactggcccacatgaagcttttagcaaactctgggaactctgttgtcagtggctgaggccgaagacccactcaaaagaggaaatcctggagctgctggttttggagcagtttctgactatcttgccagaggagatccagacctgggtgagggagcagcatccagaaaacggcgaggaagctgtggctctggttgaggatgtacagagagctccagaaaaggcc

SEQ ID NO: 143458 - DNA, 575 bp, Homo Sapiens
  misc_feature (511)..(511): n is a, c, g, or t
tttttgttggcttaagcacatgttgataatcagcagacgtgtaaggtagggctcaagcttactccccaaacccgcttaactcctaacactgctcttcctctacagatgacctaactgcttctttcagctcctggctggcccctctttgaaatcccttgttccgcagctcggagtagaagtcgactccctcagagacagagtggatgggctgattatgatactggtggtagctggtcaaaggacccacggtgggggctgcacttgacagccgccgagggaaacactgatggtgatgtggtaggcagttcgggttttccttgaagctcttactatgcttgcacttgaactccagcaccatcctggtgtacgtgttgaaggtggtgacagccgacgccatgcagcaggtgaaggagagccaggccatgtagaaggcccagccataattccaaacatgtggtcttcagtcttctggacccaagttgacagtcgctttgaaagacttgtgaatacnacatgtgggccaccatccccaggagacctgacaggacagaagaaacagcaacaaaagcgctcaa

SEQ ID NO: 143459 - DNA, 141 bp, Homo Sapiens
tttttttagatgttcaatacatatttattgaatgggtgaatgcaggatctacttttccattaggcctagtagacacagtgccagaggcccagatactgttagggatacatgatagtgttgttattttcctttacaaacagg

SEQ ID NO: 143460 - DNA, 574 bp, Homo Sapiens
  misc_feature (383)..(383): n is a, c, g, or t
ttttttttcctgtagacctttttatttctaacagagtttcctcttaagagaaaagcaaagcccagaccctgagtactccttctctatcctgatgactgtgaaggcatttgcaataaatctcctcttggacattaggtgcacatctggggaaaggcagtggaagacaggaacgtattcccatgactattgtcataacttggctaggaaaggttctttacactggcagatgcaggcttgtctctgacagagccctggtattttcttccatcctggggcccttggggaagccttggctgtgtcatggcaccatctggccacctgtggatcttttgagtgtgctttggagattgctgccagtggtctttctgttctggctggcattncctggaagtatttcaagtgctggttttaggagcccacattctgaaatgcccatctcagggttttgttttctttcattttgttctaaatattggaaggaaaatatatcaaaggttgcttgattttgcagttctcaccggggagttgagtctggtaattcagtgctttgttcagaagcccaggaatgtgaatt

SEQ ID NO: 143461 - DNA, 503 bp, Homo Sapiens
tttgtccaacattatttatttttatttctattcattttgatgcatcttgattcccttcattcattccaactgcagtggagttttccattattggaatatgtcacaaataatttatgactgtcctgtgatttgcaaagtacacttgtttgaaatttcctatgactacaaacaatgctgccacacattctgtggctgttttcttgtgtacacatgcgagtgattttaggacagatacatagaagtggatgcttcccctttaccaggtattgtcagttgtttttaaaagatgtctgcgtgtgcactgtcacaccagcagcataagaggctcctatttctctgcattcttgctgccaccaggccatgttgatcttgaactttgttgttaattggatggaagtgaaatggtatctcattggtgtttcacttgtttcccgactattcatgaagttgacaatcttttcatggatattgaccctccgggtttctgcttctgtgaaatgcct

SEQ ID NO: 143462 - DNA, 510 bp, Homo Sapiens
ttttttctgtgcaactctttgttttcttgtagtgttctgtttatttaactttctctgtatttatcagttattcatccttgaatgtttcaccagccatctaaatttcctcttaggacattcaggtgtattggtattctaccagtgtcatttttctgacggtctctcctgaaaccttcagtcctattcccactagactggttgcccttcaaagttgtcattcctgggatctccagttctgtcatccctgtattcctgttgcttctctcccatgttagatctcttatttcctgtatcccatgtctgtctttcgcttgatttatccttttgttctggtggaacacaacctgagaaagggtacataagagataaattttgtgagaaattgcatgtgtaaaatgtctttatttcacccataaactcaagtaataatttggctacatatagattgtgatgatgttgttgagatatctgaagccattctcattcctgatgcttattatgtgaaatatt

SEQ ID NO: 143463 - DNA, 918 bp, Homo Sapiens
  misc_feature (402)..(509): n is a, c, g, or t
cgtaataattgtttctctaacatattagtgagatgaggttatttttttgtacgcaactaattattacgttctttgtttgtactctatctaatattaacatgaatatatattttatatgtcactccagcgtaagttgtatatttatttcgtgaggatgtggggttttctgtcttatttttgatctaccacacgaatatagatgggttgtttcctctccataatgtacgcctcgtactgtggttgcttccccttccggtggtttgttaacgcgcgcctgcgctctttttatatcagtcctctacttttgtggcgcccctgtgtcttactaaactaatttcgggtcccttgattgtggcgccccgctgagtgatgtatcgtgcggtgccccgccctcttgtttcnnnnnnnnnnnnnnnnnnnnnnnnnnnnnnnnnnnnnnnnnnnnnnnnnnnnnnnnnnnnnnnnnnnnnnnnnnnnnnnnnnnnnnnnnnnnnnnnnnnnnnnnnnnncagactttggacaagtttattgacttctttggaacctcagttttctcatttgacaaaactagatggtcaagaagcatctaggattattgggacacgtaaattacataattctgacacagcccccccaactctgggttcctggtatggggtaagtttttagtaaatgtgagatgctgtgattagtactgtgaatatgatggctatttcaacagaagaattataaagaaagggcttcaggaagggattgggagtgactcaagcaggcaaccatcaaagcactttgtgcaaagatcaggtccttttctgagcactgaaaatttgcctatttagagatgcggcaagctgaagtgacatttacttccccgcggaaggacacaggaggcagacaagtggtgaagctcattatctg

SEQ ID NO: 143464 - DNA, 121 bp, Homo Sapiens
ttaagcaggaaaaaagtaaatttatttaatcagggtcatgggtgctagtagggtttcactaaaacattaggaatcaagtatttaaaagtaagtagtaagtatttacactgaagttgttata

SEQ ID NO: 143465 - DNA, 1065 bp, Homo Sapiens
gccagtggagacatcatgaacaagtggggacaaacaaagcaggctggtaccggtccggaatacccgggatatcgtcgacccacgcgtcggcagttagctacacaggtctgcaagttctgtttgtctccgaagtacattatgaccccctcatccttctcttgaactggagaggggaagaaatgaaaggcatgcccacgtccgtcacctccccgatccccgtagtccccaccttgaagcatcatgagctgttgttattagtcttggaagcagagtctgggttggtgtggatagcaaaggaggaagtctgagcccctcattggtcttcctcccacctgtcccttttccgggaagttgtggaattgttggaagaagagtttgcagaaggttaggaatgggtagatagctaagtcctaatctatgggtacattgttgtgtcccaaaccaaaattttccttatccacaatgtcccttctgtctcttccactttacagtggactcggccactgtgcataggcttctctgctctccatcaaatcacttccactttcctgtgcccccagccccgcctccagttttccgctagtatccggcaaggtttcttgcaacaaatgattagttcttttcttctgactcgtggggctccctgctgcagagagcacagcccctgtgctggagcccaggaaccccatccttgcttcatctcagttcttcatgggcttcactcttcccactcacggaagggaggtagctcacaggacctcaatgtgggacctttgagaagcatcaatctgattcagaaacacacattctacctctacacgggaacctaacagaatcagcaaccagacaggggccaaacactacggagagtgcctcaagcggactatcacagagaagctcaacagaaaactaacagcgattggcccaacaatcaaaaaggatcccaaccaccatggacacgcacaccggaagaacaacgaaccagacgcgcccacccacatataggagaccaagcatcactgtggggaaacacaagatagacgctagacagacacaagagagcga

SEQ ID NO: 143466 - DNA, 954 bp, Homo Sapiens
tttttgtttttgcccatttttaaactgggttacttgtgtttttattattgagttataaaagtttttacttattttggaaagcagatatgtatcagatatatgatttgtaagtgtgttcttctatgtgttctcttctcattgtcttgataatgtcctttgaggcacaaaagttttcaattttgatgaaatccaacttattgatttggttgcttgtgcttaagagtcattctaggaaaccattgtgtaatccaaaatcacaaagacttacacctatattttcttccataagttttatagttctaattcttatatataggtctatgactcatttagcattaatttttgcatatggtatgaggtaaggttccaacttcatccttttgcatgtgtgtatccagttgtcccagtaccatttgttgaaataacttcttttcctattgaattttcttgtcattattgtcaaaaatcagttgaccatatatataaggtttatttctcaagggcttctcagttttattttatcaatctatatgcatatccttatgccagtctcacacagtgttaattactgtagctttgtagtcagttttgaaatcaagaagtatgagtccttcgttcttatttttcaaaattatcttggctgttctgtgtcccgtgtgtttctagataaattttaggatcatcttgtcaatttcattctgcgcagtgtggtgaaatcttgcactgtcctgctccttctcacctgggatgtgaatctgctctttttccagtgtatccacactgcatgctctatctacacagtagtcacttagctatctcagtgatcaggtcaactgtcatggtatctcagtgcttctcttcaagtaacccttattttacttagtaatagccccaaagcatcaaagtagtgatgctagaatattgttataattcttctattttgttattagttat

SEQ ID NO: 143467 - DNA, 761 bp, Homo Sapiens
gctccgccgcgccggggcccccgccgccgccggtgcgagcaggtgatttggcttctgcacagttaggaggagcaccaaaccgatgggaggttttgtcagccacacctacaactataaaagatgaagctggtaatctagtccagattccaagtgctgctacttcaagtgggcagtatgttcttccccttcagaatttgcagaatcaacaaatattttccgttgcaccaggatcagattcatcaaatggtacagtgtccagtgttcaatatcaagtgataccacagatccagtcagcagatggtcagcaggttcaaattggtttcacaggctcttcagataatgggggtataaatcaagaaagcagtcaaattcagatcattcctggctctaatcaaaccttacttgcctctggaacaccttctgctaacatccagaatctcataccacagactggtcaagtccaggttcagggagttgcaattggtggttcatcttttcctggtcaaacccaagtagttgctaatgtgcctcttggtctgccaggaaatattacgtttgtaccaatcaatagtgtcgatctagattctttgggactctcgggcagttctcagacaatgactgcaggcattaatgccgacggacatttgataaacacatgacaagctatggatagttcagaccattcagaaaggactggtgagcgggtttcttctgatatttaatgaacctatactgatacagatttatttgggccaacatcc

SEQ ID NO: 143468 - DNA, 494 bp, Homo Sapiens
tttgtgaatatggtggtgagtttcctttaatcaaagacaaccatgacaaatttattaactatcaaaagctacattttactaaaaacaatctgcctttaaaaatgttgaatcatacaatatgtacaatacatgccgctttccgttttggacttcactatccatttgagtccttcagctagcatcaagcacttggcttctgctgcctctgacttggagtaatcacaggctctgaaatctcaaaggtcttcacaatctcctggcagacaataatgaacatttaggcactgggcttactgcaagtgaaggcagagtcagaactatgcaggggcaacaggcagagctttacctcccagtcacggtaactcaaagctataattccttgatttctaacttgtgtgttatgttcaaatccctcattttcttcattaatactaacaggctctgtttgaaagacaaatttttcaaatttatcaaaggttattaaatcggaacag

SEQ ID NO: 143469 - DNA, 1261 bp, Homo Sapiens
  misc_feature (301)..(491): n is a, c, g, or t
  misc_feature (512)..(572): n is a, c, g, or t
  misc_feature (678)..(717): n is a, c, g, or t
gagagccgacggacgcgaccggcgggagaatctactagcccgcccgcacctcgcgccatcgcccacggtgcgcgcgtcgcacgccatacgagatattcgtcgtgccgcgcacgcctctcctctcggcagcctgtaccccgtcaacaccctaggcttcccgtccgcgcgcaccagaggggtgggcgcggcctccgagcgacacacaccatcccgccctccgcctcccgcgcgccccccgcccgactctacccctcaccctcgtggcggccggagatgccctcccggcccacctgcccaccannnnnnnnnnnnnnnnnnnnnnnnnnnnnnnnnnnnnnnnnnnnnnnnnnnnnnnnnnnnnnnnnnnnnnnnnnnnnnnnnnnnnnnnnnnnnnnnnnnnnnnnnnnnnnnnnnnnnnnnnnnnnnnnnnnnnnnnnnnnnnnnnnnnnnnnnnnnnnnnnnnnnnnnnnnnnnnnnnnnnnnnnnnnnnntaccgtcggcggcggaatccnnnnnnnnnnnnnnnnnnnnnnnnnnnnnnnnnnnnnnnnnnnnnnnnnnnnnnnnnnnnntgtttcccctctcccctcaccggggcccggccgcccccccacaccgggaggctcttgcaaaaaccttcctgaggccccaacgccgggccgccacaagatacatttnnnnnnnnnnnnnnnnnnnnnnnnnnnnnnnnnnnnnnnntccgccgacccactcagcgggtccgccgcccgtcccccggtcctcttccccgcgaatatggcggtgagtttcctttaatcaaagacaaccatgacaaatttattaactatcaaaagctacattttactaaaaacaatctgcctttaaaaatgttgaatcatacaatatgtacaatacatgccgctttccgttttggacttcactatccatttgagtccttcagctagcatcaagcacttggcttctgctgcctctgacttggagtaatcacaggctctgaaatctcaaaggtcttcacaatctcctcccagtcacggtaactcaaagctataattccttgatttctaacttgtgtgttatgttcaaatccctcattttcttcattaatactaacaggctctattactggcagtcggtcttggtcaagtcttattcttgcaaaaccatcccgtataatgaaggaaacatgaaagatgttttccactgtacgggggaaagaatgaggatcaaccacaaagtcaaagaaggacattggggtatcagg

SEQ ID NO: 143470 - DNA, 483 bp, Homo Sapiens
tttttgcagtgacggatggctgtttatatttggtggattcagcctccctcatgtgttagaggaagcaacagtcttcagagctctggctgccaggtggggaggaatagactgctgtctccccggagtgttggctcccactccgtgagtcaggattgcataagagaactcagcaatgcttgccaaggcaataccagtgatgctctgcaaatgccccacaacctggctccaacactcatggttttggatgaaagcacttgctgcaatgattcctactgccaacagcatgaagtcttccttcactgaagtaaacttttccccttgcagctgactgtgagtggagttctcaattgaagccctcaacaggctctcatatatgggttcatgcagaagatagaccaggtcgagcagtgtcaggcaggttgcatgcagcctcatggctggaaccaaacagccattgtatcctaaaacctctaggagcgtctc

SEQ ID NO: 143471 - DNA, 419 bp, Homo Sapiens
tttaaaatgtaagtcttgggggaatttattcattcagtaacattgtaaaaaatagccctaaatcccgatgctggaccctcagtggacatctgttttctgtgatgggcccagcttggacctgtttgagggtcttacttctatgcgcttctcaggcagggaaggtcccagtggctctgccttgctggctttcggccccagaatcgaatagaggtgggagtgggggagaattgctggagagctggaatcatgggatagggaccacttgagccaggagcttcatctctctggtcctaatttaccttagcttgaggcacttatttgtcttgctggccacctgggcaacacttaacagccctggtttaccgtcaggcccagagaccagtcgtggctccctcagtgatgcatccctcgggccctga

SEQ ID NO: 143472 - DNA, 353 bp, Homo Sapiens
tttaaaacatgagaatcatttattgagtgcactcaggcccagctgactcaacgtccaaaagactgggcccggaagaaagacagcacttgacttctatacacacttcacaaaagggggtgggctagcttgaagcaagcttacagtggcatgaaagcagggatatagaggcaggacaaactcaggattgcacgtgaccgtgtgccaagcaacccagatgtccgttatctaggtttgcccaggcacagacttatcccataaccttcactatggcgcccaggtggccgtaactcaggccagctcagaggctcatgaccttcactccactgcttagataaaacaatacttgaagtcac

SEQ ID NO: 143473 - DNA, 725 bp, Homo Sapiens
tggtaccgccgaggcatatcttgtccacggcatacagtcatagagcagcaaatccttctcagtcacagccatgaggacaggtctccattgctgtcttccaccatctagttttgcctgttctgccagccaggcaatatgcttcacctctttactgcctcctgctgtactggttgccccaagcatggcgttgagttcagccaacacctgtgggaggagagccattatgttggtgtggatagctacgaaccaggagtgtgctgtggctgtatctttgcagcgtaggatcaacgtgttcctgctatcaggagaatgtagctctatcaatctgttttccagatccggcatgcttaggtttctagcagcaaagcacattttgagagggatgatcttcctgtccttggtgctgttctggtgttttggcgaaccagagtcctcactgccactaaagcttggtgactggggggctgcaccttcccacggcagatctgatactaatgatggcttcttgatatatggtgttacttctcggatgaacttgacctccagcagcacctccttgcccgcgcgcttcagcgcctgcacggcctggtcgtgggtggcctggcgcaggtcggtgccgttcaccgacaggatggcgtcgcccagccgcagcgcccggctctggtcggcagccagcccggggaagatcttggagatgaggatcggcatccggttctcgcggccgc

SEQ ID NO: 143474 - DNA, 712 bp, Homo Sapiens
tctccgccttcaccactttctttgtccattccttccctcccacctccagaaggggcctggtgggaaaagcatcagcagaagccgggagcccattctaagttctcccaacagcccaactgcgccctgtaggtgagtaattccttatctgggccccaattccctctcaaaaggaccctagcggtagagcctagatcacgcggcagctcccgttgctctttcaaacttcgactatccaccagctgggggccaagagagcctgaggagaatcaggggcctatacccggaaggcacggcccaggggatgaccccgagctcttggagctgccctcctcgctgctcccacgcaaatgctaggagagccgaaaggggcagcggcaccctcctcttccttacccgagtgggggatgcccacgctagggcagccgggctgcaagacggccgagcgggacagcgagttctcgtactcatccaggatggacgccatggtgcccggcctctgggctctttgtccggggcctggggattacaaaatggctaccccgccggggtccccgtcgccccagaatggaagctgtaactccccagcctctgacagatcctgggaccctgcagccgtcgcctcctctttacaatcctgaggatcctcttcctcttgccttatgcagacgagataatcgggcagccctcgtccttgaatctggcgcagtcttgc

SEQ ID NO: 143475 - DNA, 811 bp, Homo Sapiens
  misc_feature (191)..(191): n is a, c, g, or t
gcgctgcaaataccaagaatggcaaagtacagttcaacatcctcgcatctcacaccggacatactggattggaggcatatttctctttttgcgtaaacgtgcacttttgtcatcttatcgtcttcttcatctcttctttgcaggttcctcatcgtctctgatttcattctcctcttctttcacctccaccntctacttccactttaatttctttcttctccttctcttcttttacattccctgatcttctccgtggctttggggtttccctttctaagtggggtttgtaggtctcatctcttggatcatctttgaatggtatctcctcttcactgattaacatctcttcttcctcctcctcttcctcttcactactaatgccacctggagactgatgctcttctccaacatcataatcaagttggtctgtatttggttctgacttgcaaatgagctgcaatgaaccggtcttggaccgagagcttcgggtgttctctgtatcacgatggcgagaaacagatgtcctactactacgccagccccggctaggtctagatgcagcaatggaaacttcctgagggagggcagaatcgtcttcttcctctttttcttccttgggatctttatcagttgttactttttctatgcataggagtcgcggactcttcttgccctgaactggagacggggacttcgcggcctggggctgctgcccggggacgtcgggaggcctggcgctggggctgctcctccgccggcggggatactcggccttcctccggcgggacacagctgcggcggcggcggccgc

SEQ ID NO: 143476 - DNA, 444 bp, Homo Sapiens
taggggttttctggtaaaaactggaaagtctgctagacaaattctaaaagagctgtgatactcctttattttctgaataaacttccttccactttactctgttggcttgctcttgtagatcttcctgtacaaagccaagaatccacgtggcctcccacgctgaaccccaattttggggctcaccctgtgacacagccagaggcaaatggttccatgtccctcctattcctctttgcgcctggatgggatccggagggctctaggcttggctgctgtggccaccagatgaggctctatgaggtctgcaggggtcttgccagctccagatggacattccctgagatgctgttaggccacctggactggggccccctgtggcatccctggcatggacacataatgcccagcaaaggcatcatcaaagttccattactttagtgctgg

SEQ ID NO: 143477 - DNA, 799 bp, Homo Sapiens
  misc_feature (38)..(38): n is a, c, g, or t
  misc_feature (109)..(132): n is a, c, g, or t
tacccagcttattgacccattgttccaccttaccctancggggcccccgcgcgcccaaacgaattggtctaggaaagcttcttcgagggcccgaggcggcccgacaagnnnnnnnnnnnnnnnnnnnnnnnntttttccaccgctagatagctttattttcccttccatccagttaattccagatgaaacccggctctgcgccactcaatgcccccaggtgaagatggtttgcggctgttcagcagccacgtctcctgcccaggggctgccctgggctcccgctagaccgtgtccacctcgcggagtgtgtagtccaggatggtgtcctgaccctggaacttgaagtacccgtggaatttcttcttctgaagcaggagtggaaaccagtagctgtcgtcgggccacatgtccttgaaggggatctgatccagctggaaccagcatgggcgcatttcgtcgctctccacgggggtcccctggatgctgtctgtgcagaagacatgcacgtccatgagctcaggctcgcccacgaactcaaacacgatctggcccaccttgtgcagggcgtccactgtcagaccgctctcctcctgcagctccctcctagccccatcctcgatggtctctccttcttgcactttgcccccaaagccattccaccggccggccccgaagcctcgctttttcatgcccaggagaactcgctgaggctgcaggaccagcaccagggtatagagcctggaggcgcccatggtccctgggttctgcaccgccgcttccgggggcgtggcctctccc

SEQ ID NO: 143478 - DNA, 521 bp, Homo Sapiens
tgagtttatttttccagagattccagggccagcaaagccggcgttcagaaggagggagaaaaccgtgagaggatgtgtgtggccagcagctcttcagctttgagatggtggggttcactgctcccttgggaattacacggagctggggaagtggctgtgtcactgctatggacacggagtggggcgggcatctggagagagagagggagcggaggctaaggactggaggccgccaggcaggcgtggccgagggaagaaaaagcttctggatgtccagccagctgcccccttccagcccctccaggacccctggacccactgccgctgctctctgcaaaaagaatgggcatcccggaggccacgcctatcttctctctctgctcctccttccctccatgcaccatcactgtggctggcaggcatcggacagcctcatccagaccccctgccctgtcttggcaacctctactgcccatctcccctgctcaacttctccaccaagcatttggtttatttagaaa

SEQ ID NO: 143479 - DNA, 1095 bp, Homo Sapiens
  misc_feature (78)..(88): n is a, c, g, or t
  misc_feature (202)..(212): n is a, c, g, or t
  misc_feature (216)..(235): n is a, c, g, or t
  misc_feature (239)..(239): n is a, c, g, or t
  misc_feature (243)..(243): n is a, c, g, or t
  misc_feature (245)..(326): n is a, c, g, or t
ttataagaaatgcgcgcccaaggaaggggggttttggtcccccccgccccaaacggtgttatggtgaagagcgcccgnnnnnnnnnnnggttatattgtaaggggccccccgttagggggggcgccctttttttataaaagaaaagtgggtggggggaataaaatgtgcccccccctggggtgttgttttctataagggcgnnnnnnnnnnnaaannnnnnnnnnnnnnnnnnnngganagtngnnnnnnnnnnnnnnnnnnnnnnnnnnnnnnnnnnnnnnnnnnnnnnnnnnnnnnnnnnnnnnnnnnnnnnnnnnnnnnnnnntttatcatgttctacgcacatgtgtagggtattattatagttcaagagaaagaggggaacccgctggtgtctgagaagaaacccgctggtgtctgagaagaaacggtgaagggtgcactacgaagggaatataaactaatcaaacattcttgaatggcaatgacagtcactaaagttgacacttcctgcagtcttttagtttagaaaccacacttcccgagacgtcccccatcccaacagggataaaatcctctagctcaactcaggtatatccccactattgggccagggagacctgcggatggcgagagcaggttctcttaggagggtgtggattgtgagcttgtgcgctggcgaggagcagaaggtcagggaggcaccgtagttaatgaatcaataaaccaaacagccgatcaatcacttcctgcagtccgagtccggcgagggctaatcgattggtccgggtattttgaaaggaaaaacggcggtggatatgttgtcaaacggaggggtgcaggagaggcggggccaggcctccaggtgacccctctggcttcctgggcctgcagaggcgccgaaacgtgcaggcgccggcgtccatgaggcgtggggcgcgccgggcgagtccctgcttgcaggaggcgcccgagaggccgtcgcgtaccctggcaagaggagctggttagcacctcccgaccccgagaaggcccagggggcgcccggcgggcggggcggggaccgggcgaggcatcccgggaattccggaccg

SEQ ID NO: 143480 - DNA, 537 bp, Homo Sapiens
tttttatcttctatacttctatttattttcataaagcgggaaggggaggtggtcttgattcatttaatattagcgttttgcaataaagtagagcagcataaaatataactgaagaagaattcattttccccaggataatgcacccttcctcctgtttctacagtaaagcacatcattttgctattaaaaatgtccatttttcacaactgacttttccttaactctagtcaacactgctcttcaaaagaacctagccaattactgtaccttgtaggcagagttgcaaaatttttgcttccctaagaaacttttccattttttaaatgctttccaaattaagcaggactcacattaactgtgatcttaagtagcagtttagtgaggtttgaaaacaaacttttcattaacgcattcatccaattaaagtgacatagtaggtgggactactgacacagatttaaggattacagctttatattaaaagtcagtccaaagatggtaactcagagttcatttgagaccctttgacttttggct

SEQ ID NO: 143481 - DNA, 698 bp, Homo Sapiens
  misc_feature (515)..(515): n is a, c, g, or t
tttacttgtggtactggtttaataggtttttccatcaagcctccaatataaacagtgttgggaagcaggggccgggcaaaatcaaaggcaaaatcagagttaacaaaccacaactctgctttcagtagaagatgagacaaaactggcctagagccttctgggaaatgctccttgatggtgttgtcaaatgtagactgcatgtcccattggctcctggagaaactaaagaacatcagaaaattcttcactcggccccagaagtccatgtgatcagtcagcaaggaagggaatactggaacataagacaaggggcttggtagcccaaaatccaaagagccgaatgtggtgggaagaatggccacaaatggtttcacaagcttctcagcaatcaggaaagaacagaaatcaaatgcttcaacaaataccagatcatagttctcattctttaaggaatccattatatcctttctgcttagcaaataactacattgagtcccaaatatttccattagctntacaagggcttcagattcttttctgccatccaatgctgtttctatgtagctatcaaaatgcttcttaattctttttgatgatcttaggtgaaaaccacccggatacctgtatgaattttgcttctctttatatctggaatcaaaaactttcactctgatgaagcatatcacattatgaccatg

SEQ ID NO: 143482 - DNA, 477 bp, Homo Sapiens
tttttttcaataatccaaagtgcttttatttatgtggaatttacaccccgtgccactgaatttaagcccattcaagtccatgtggttaaaatgtttttttgtgaacagaatatttagataaacattcaagattcctggctgtttttctgtttcctacatgaaagaaaaagaaaagccaactttctcataggatattctcagaaggctgtggggccccaagagccctgggctggaaggcaggaggcctaggctcagattctgactctgtccttgtctcactgtgtggccttaagcaaggtgcttgcctctctgagtcttgggtgtgccatgttctgaggcacatccagctgtgaaaaggcaggtgtctggttctttgtcatctattaaaagagtctgtcattcacactgatgcatggatctgaaggaaggagacccccacacacacatgacttgccaacccaaaatcacccccaaagg

SEQ ID NO: 143483 - DNA, 536 bp, Homo Sapiens
  misc_feature (292)..(357): n is a, c, g, or t
  misc_feature (387)..(449): n is a, c, g, or t
tgggtttacatagatctgtttattaatggaactcactttttaatcagtttttaataaattgctaatccagtttagcctcaaatcagttccatcccttttctcaatcccttttctgatgtctaacagttaaagtcctgtgccatgaacagggattcctgtggcactttgggaattatctgctctgggtttaaaaaagtgcagcttataaagttctctctcttttcttcagcctctacgaagattgataaaggcatttccagaggcaagtgaaattcttcccctctctgctcgnnnnnnnnnnnnnnnnnnnnnnnnnnnnnnnnnnnnnnnnnnnnnnnnnnnnnnnnnnnnnnnnnnacatattcagcctcttcgacctcttcttcnnnnnnnnnnnnnnnnnnnnnnnnnnnnnnnnnnnnnnnnnnnnnnnnnnnnnnnnnnnnnnntgcatcacacacctcctggtcatactcctcctcatcatcatttttcttctcctcctcttcttccaccagcagcggggcaagagactg

SEQ ID NO: 143484 - DNA, 876 bp, Homo Sapiens
gaccgttcccgtggcccctcagcaggagcgtcggctgctttgactgtggctgtcgttccgactccgacggtccccgtgacccctcagcaggagcgtcggctggtttgactgtggctgtcgttccgactccgacggtcccgtggcccctcagcaggagcgtcggctggtttgactgtggctgtcgttccgactccgacggtcccgtgggccctcaggaatggacgaataagtctggactgaagagattcagaaggcgctcgagatggtcaatgaaagtgactcggaaaataaacagctggacaagtcgcaggttggatgcaaaaataaatattattgtcctcctcatccttcttttggccttctagcccgccctcccttctccaggccaaaaagctcagaataatcacatacacagggttagggtgcctgagggtgtttactgggagcggaggtcttagaggccaggcctgggttgatcacacttttctggtgatgcttttgggggtggcaagctcatagaggcgaggggacgcctgtcgtatccctcgttgaggcccttgcgcactttgggcttggccagggagatgatccgggggctggccaccaccttcttggtgacatccagcacctcccagcgaggatctcggtcaggaacgcacttgtccgactgagctttgggcctggccaagtgaaggaggcggttatggtctgacacatgtggcttgggttttggcacggggtcccactcttccaagagggtggctggggccttcggctttgacaactggaggatccgcgagctggggactgccatttgggctgccctggatacctgggacacctcagacatgggcacggacgcgtgggtcgacgata

SEQ ID NO: 143485 - DNA, 192 bp, Homo Sapiens
tatcactgtaattttctccggcctcagaaacacacagctaagcctctctcctcatggtcctaaatgtaaatgaacactgtccctagctgggaaggccagaatcataaattggctgtgtttctgcaaagcaaaactttttaaccagaaagatgtacactctttatcttctcggctggaggcatagagagattt

SEQ ID NO: 143486 - DNA, 529 bp, Homo Sapiens
ttttaggtttgaatcttaggtctgttgcctacacactgggagatctttcttcttggagcatcagttcttaattgtaaatggagatgataatgtgtaactttagaattatctttgggattatgagaaagaaataagacaacagatgtgaattgtgaaatctgtagtcctccaattggcatataatagatctcagcaaatgcgtcttctcttcctcctaccccttttggcccaaaacaggtttgcaaatacatttaaatattacaccttccaactcaggttacattctccccttgttctgtcttcactccttcctgctttttcctgtcaatgcatacaattcaaatgccttaggaacggtggccaattgtgacagcttgactccatgactttgttatttatggtgaactttaccctccttatttcttgcaaaggaaaagtccagcctttggggactgggtcaggaggttcttttccatgcattagggacttggctgaggaggatcactcagtgttaacacatggcttccaa

SEQ ID NO: 143487 - DNA, 406 bp, Homo Sapiens
tttttttcacatttaaagattatgcctttattgaaaatgagaaaattacggaaaatgaacgttgttctggaaaccctggcctgggcgattatttcgggttgccacgtgaggagccctggtggaccccctccccgtgcgtcatccctagccagaatctagttgtccagaaacttgtttcttcgatctcattggtggaaaaggagaattcaggcatcagttctcagttagtggggggagtgtcttccgacctgatggtctccattctccttcccatcggaccctaagtgcggttccctgaagtgcgcttcccggttgtggctctgcctccactccagcccctctggggaggcctccgcgaggtgtggcgcgggcgccctctgctggccgcgcgcgctcctgcagccgc

SEQ ID NO: 143488 - DNA, 506 bp, Homo Sapiens
ttttttttatcactgaatagctttattgagcattttgggctgggcactaagctcagcactttaatccccacaactggccagtgacatagctgttaccccactttacaaatgagggaggacaggtcacggaggctcgctgcctcaaatggcaggcccggctgcctggtcccaatgcagaaagtacccaatgccatgcctggcacataatgaccctcagcggaggttacccctccagtctgcaatcaacaccattggccccaggtggaagggatcccaagctctctccagctttccagtggcccttaaccatgggtcacccttgcttgggaatctgcccccagacaggacgcttccacttcccccaggcctggcactgccagccactgcccctctgcagtggctttccaggagcggggcagcagcccctgtcctccccaccactctgactctggcctttgcctgttgccgaggctgctccctgccccgtagtgaggacagctgtgtgg

SEQ ID NO: 143489 - DNA, 1308 bp, Homo Sapiens
  misc_feature (112)..(126): n is a, c, g, or t
  misc_feature (136)..(201): n is a, c, g, or t
gggggggattccaagccttagtcaggcccgggttttcttaggaacccggttaggcccttgtccccttccctttggggccccgcccccaaaggaaggttttgaaaagtttttnnnnnnnnnnnnnnncggccagggnnnnnnnnnnnnnnnnnnnnnnnnnnnnnnnnnnnnnnnnnnnnnnnnnnnnnnnnnnnnnnnnnntatttttccaaatgcatgttttcagcattacctccaggtagaatataccagaacaaccaattcatttctaaaaggaaaattgcataccaattttcctatcccaattttcctattcctataagaaatgaaagagacacaacgagttttgtcaataaaactttaggaatatctgcacatgtacatttacattcaagttgataacactggtggtttcatttcaatacaaattatgctagagaactgacatttcagacatggtcatatatatgctatttgaattcctttatcttgatacagatcttgattgtgaatctcttgatgatagatgtgcagctaatttgtcccgaaactcatgaagataattgtattgcttgatggtctgtattgccccggatcctcttaggtctcgcaggctgtctatggcttgctctggtgatattgtgtcagacaggtatagtaggagacaagcagctacaagacaagatctcccaagtcctccatagcagtgtattaaggtttttcggtaatttttaaggcaggttgtaagctcttccattatttcacagcagctggctatgtcaggagtccctccatctgcgattggatgatgatgggtgataattccacattgctggtagagatccagaaggtttgggactctatattttgacagttcccctctggtgcagaaaacaaatatgtcttgtataccacagctctttagttcttctgtatctttttggacatttcttctaacatctttaaatttacaacctggaagagcacataaaccgagaaactgagaacaattcactcgtgacaaagatagccggcttcatcgctggccgccccacgtcgagaccagtgccgcctccctctgcagcgccggcgactcaccggtgccccggccgagcccgcgccccgcagcttagctcactggttcgtccttctgtgaggtgggcgcggcgtcttccagcaaccaatcagatccgcttctggtttcttactccgcctttgggtggccgaagactcggcctctaatctcatgactggttcctagcctcgtgccgaattcgccacccaggcctcgtacctagccgtatggtg

SEQ ID NO: 143490 - DNA, 824 bp, Homo Sapiens
tatttaccattccaaagttgattaccacgggtggtttcatttcaaatacaaattatggttggagaactggccattttcagacatggtccatatatatgctatttgaaattcctttatcttgatacagatcttgattggtgattctcttgatgatagatgtgcagctaatttgtccccgaacttcatgaagataattgtattgcttgatggtctgtattgccccggatcttcttaggtctcgcaggctgtctatggcttgctctggtgatattgtgtcagacaggtatagtaggagacaagcagctacaagacaagatctcccaagtcctccatagcagtgtattaaggtttttcggtaatttttaaggcaggttgtaagctcttccattatttcacagcagctggctatgtcaggagtccctccatctgcgattggatgatgatgggtgataattccacattgctggtagagatccagaaggtttgggactctatattttgacagttcccctctggtgcagaaaacaaatatgtcttgtataccacagctctttagttcttctgtatctttttggacatttcttctaacatctttaaatttacaacctggaagagcacataaaccgagaaactgagaacaattcactcgtgacaaagatagccatgatatatgaattggagtctgttcatcttcaataggctcttcatctgatgagtcaaactcacttgtttgtattgaactgggcggcttcatcgctggccgccccacgtcgagaccagtgccgcctccctctgcagcgccggcgactcaccggtgccccccc

SEQ ID NO: 143491 - DNA, 279 bp, Homo Sapiens
taaatgaaaaggaaacgtttattttggtggggagtgagggtgggtgggaagggggcatgacactttctttggggagaggggggtgacatgcggcagcttctgcattgggcggttcatgcacccagggtgggcgtgggggaggcttggggaaggggccacgccgacccctccctccctgccctgcgggtgggctgagaagacccgccattaacaccagagttggacgatttgcagacctcccctccccacactgtctccgaaccccgcccccatccctga

SEQ ID NO: 143492 - DNA, 517 bp, Homo Sapiens
taaggtttgcgtcacttgtttaatatacaaagtctttcacagataattattttctttttcttaatttgctttagtacacatgattcacaaaacagtaaattgttaatgcaagagaattatgtaaaaccaaaatagtacaaatgcctaatttcaaaaactgcacacagttaaaataatttttccttctttgttttaatgcagtatccagtttcaaaatgggctttctttagatgtggaggaaacactgcagcccaaaataacagtacttcctttcaactgtgttgatatgtaaaatagcaccattgggctgacttaggaaagaaaaaaggttttcatctttcttaattaaagtattatataacaactataataataatgatactaataacttttaagagctgtactctgttctaaaatattcattttcaaggcaaggaagggtaaactatatggggcagatagaaaaatcttcccacctcagccccaggacccttataatgtcccttaatggtgtcat

SEQ ID NO: 143493 - DNA, 334 bp, Homo Sapiens
atttgagaatctcgggtctcttggctgactgatcctgggagactgtggatgaataatgctgggcacggccccaccctgatgctgcgatgcttggtggtcctggccgggttggctctgctcgctgccctctggctcctgtggctgctggggtcagcccctcggggtacttcggtacttcagcccacgattcaccattcttgtctggcactggcctttcactgaccagccctcagagttgcccagcgacacctgcacccgctacggcatcgcccgctgccacctgagtgccaaccgaagcctgctggccagcgcggacgccgtggtcttccaccac

SEQ ID NO: 143494 - DNA, 516 bp, Homo Sapiens
ttatccattataaatattaattttattttaaaagaattggaagatgttacatatattacatactacatataatggcacatgtcagccttttaagcttaaaaataatcttttcccaaactgggattgatttatacccaagtataaaatgacccttggcctatagcaccaacccaggcccagaggaaaagccagttttgaacctgtctgtcctctggcactgggcttcctgatatgacactgagggtcctctccctctggttttattccctggcagtattgaggcctggcacagggacccatcttactgtatgctgcaggcctggggaaatcagggaatctagagggggtagggtcctctaaccattttataatgaaaaaaagttaaatatgttccttattctgtgtttttgatttatacaactataacaagactctacaagacagaaggagcttaaaattactgaaatacaatttctctgctagttcttctctttggaaattgaagtctcataatag

SEQ ID NO: 143495 - DNA, 383 bp, Homo Sapiens
actattcctgatgataaactgaaacttctggattgtgggaacgaactgcttcagcagcggacataaagaaggaaacttctaacggaagtagattttaataaaagtgatgccagtcttcttggctcattgtggagatacaggcctgattcacttgatggccctatggagggtgattcctgccgtacagggaattctatgaaggagttaaatttttcacaccttccctcaaattctgtttctcctggggactgtttactgactaccaccctaggaaagacaggattctctgccaccaggaagaatctttttgaaaggcctttattcaatacccatttacagaagtcctttgtaagtagcaactgggctgaaacaccaagactagg

SEQ ID NO: 143496 - DNA, 517 bp, Homo Sapiens
tgcggccgcgccccaccggctgctcgtggccgagcctcccctggcccctgacccttgacctgactgttagcccgggccccgcgccccaagcggcgaccccgcccgcgcagtccccggaagcgcgcccggtagtctcctgtgccccttcccccgcccggccgggcctggtggagcccaggctgcccgcctgcccgccctcggtccccggagcttcctctcccagcagcgccgggcagggcgggggctttgggccgggccccgcgaccgcgcagtgtagccggccgctgaaagcgcgcgtggctgtcggagttgaaatgggaaagaaactctttacaactccattttgctttttacgtttaacgagaaacgacaatcactgttttatattgattaaagtccagttacactttgggtaggttttcttttaatgcagacttgttggagactgtgtaagtaagtaaaagattgtattgaacgcttaggggtatgatctacggccataccacctcgaacgcgc

SEQ ID NO: 143497 - DNA, 596 bp, Homo Sapiens
ctatggggttgctgtctttttcctgatttgtaggaattccttgtgtattctagatattagtcagttttagacactgcaagcatcttttcccattctgtcatttggtcctactttttgatcacttttgtatccacctttctctcccaccttcagctccagggggatctcctgctcagtctcatctactcatgagactcctatacccccttgccagtgatggatttaggaatacagttgtgacccattcttctaccacattagtgaattcagccagagggcttccaagaaaaatttcttcactcctcagagacacaagaagatctagtctctgtctctcctcccgctgagtgttctctggatatgacatggagcttctgtaaccatcttactaccagtttgaggataaaacccaccatgaaggcatggtactgttggtggcagagttaagccactgtattaaccaccttggggcctgcatcacctctagtcttccctttaagtgagataataaatgtcctcctcatctaagttagattgagccaggatttctgacacttgcagtgagaaggatatggacagatgcagcctctaagcca

SEQ ID NO: 143498 - DNA, 1033 bp, Homo Sapiens
  misc_feature (89)..(128): n is a, c, g, or t
agagaaatggggcatgtactatagaacagtgggtacaaaaagcaggctggtacggtcggaattcccgggatatcgtcgacccacgcgtnnnnnnnnnnnnnnnnnnnnnnnnnnnnnnnnnnnnnnnnggagcagcgaagggggcggcaggatcctccaggctgccggctgggaaggcgtgggcgacccggtgtgtggcgcgcccagagccccggtttcagccctagggaaggaagccagttgagggaagttctccaaatgtacgtcacaatgatgatgaccgaccaaatccctctggaactgccaccattgctgaacggagaggtagccatgatgccccacttggtgaatggagatgcagctcagcaggttattctcgttcaagttaatccaggtgagactttcacaataagagcagaggatggaacacttcagtgcattcaagatgaagtggtgaagagagcctgcgattgaagattttttcatctcagctttttcccccttaccttgttctctctcatgtttcatgatctgtgtcatagatatttcttcattacgagcacttcgcggtgtggttttcaatgtctgaagtggattaagtggcccacagtcagttctgtgacttgagtttcaaaagtaaaattaccatcaacaatgtgattcaattttattttctatactagctaaaagcaaggaactatattattaacaatcttggctttactgtagtttaaggcaggtgatgatgatgcttattagtccacctgaaagagtccttccaggtttttggaagctttattcctgcttattaccttgcccttgagaagtccttcatggaaagtggaaacactgggttgacttcttttccccatatcctagttgaaagggacagcttatatgtatgttagactgtccaaaagtgtttgtagaacctcattttaaaaaatcaactgtattgtactttttaaaaaatgggatcttaaactctttattaaaaataataaatggaaatgtgttaagcaaaaacattaaa

SEQ ID NO: 143499 - DNA, 321 bp, Homo Sapiens
tttggttggtgggggcgggtttatattgatttcccttaatagggagttgtgagcacattccctcggccttcatattgaataggttttgagttggatggagtagacaacctgctagaagtgtttgaatgcctcctctgagttttggtctcccctgcagcaccgcccatctcttggatatttcattcctaataagaggccccctcactggaggtagggagctgagagtaaaacttgaccagtgtctttggcattttccatgtcaaaaaaggtaaggaaggatataaatcaataaagatttacatttcatattcttgcagttcc

SEQ ID NO: 143500 - DNA, 567 bp, Homo Sapiens
ttttaaaacataaataggtttgcttctttaattccatatgtgcatttacactcttctttattagtggataaatattagaaaatcatctctcagacagagtggctgagggcgggcccctccaggggctccggcttggtgtgcagggtgaggctgtccctccagggctcgtacaccagcgtggaggtctcggccctcttgatggtgaacttataggatcggttgggcagcaggtttcggacgtcgaaggtgcaggcagccaccggggataacgccacactgggcgcactcctgctgtgtccgcgggtccagcagcctgaagcgcaactcatactgctccgatgtggctggctggatggtgacgaaccagcgcagccgggcccagtcctggtgagccgccgacgcctttcggtcaaacacgacaggcatcttggtgctcagcatgagccagatgtgcgggatcttggtggcactgacatcagacaccaggcggtgcttgacgtgtagccgccccggcaccatcatggtcaagaagctgtccatgacggccgacacgttcgccagccgccg

SEQ ID NO: 143501 - DNA, 727 bp, Homo Sapiens
tttcacatggtttacagcactttattagcacagccttagcaaacaaatacagttgatttctgctacttaccactgaggatcatggctggtattattttgtactgagtaaataattatgagacaacccagaacttggcaaatctgacagctcaggcagagatgggtgtctttaaatgacaggtcggcatggtcttcaaattctcacaaaagtagtcctgccttgcaggccttgtccgagcagtctttggtagcattcaagtcctcctcccaaggcaagttggagtggttcgatgctcagtaggttccttaggtgggtgggagaatccctgcccttgagcctgcagcctcttcctggccactcccttttcctggtggctgaggtgtttggaactctctgtccaccacaactagctcaagatgtcttggctgttggtcttcaaagtggttaaaaagacactgcgcctcctccctgatgaggatctgcctcacagtcatatggctctttaattttttctcctgtggctagatctagaaggcaactgccacctaatctctggcagtccccaaaacaggtcactgtaacacttgctttattaaaaaaatgccatgatagtctttgtttctttattctaagccaacactgtcacttacgtaggttatgtcagatgtttggggtcaatctgttcccaaagcagaaactgaccagggaccaaatattcctccttct

SEQ ID NO: 143502 - DNA, 468 bp, Homo Sapiens
agtaatgaatatgcaatttaatttatggaccatctgaataaaaatttcggcatttttttctgaattcagacattaaatgatactgaatatattcaaatgagttcaaatatcactgcaataacactcaagtggttataaatctcattcttttcatttaaaaacagcgctcagtgttaggtagtaagtcaatccaatttcagtataaattaatgacttcataatctctaaggtatttgatttttctaccagagagaaatgtgacaatattgaatacaaattgttttttgtattggttttcttatgtacacaattcaaagtgaccctgacagaatgctgttacacttgaatgcagggttgggcccgtgccacaactctactgcctattttacagcaaactcctttgggggccctgtccctgattctgtgtgagtcttaataataccagagagttcttttccaatcaaatat

SEQ ID NO: 143503 - DNA, 325 bp, Homo Sapiens
tttttttgggtttatcatgccaggactgggtaactttattcaagactttgacaaaatgatccccaaagtaatataaatgtagacactttaaaaagtccagatgtgaaatttcaagaaaactttgaattcagtccaaagtcagtattaagtcaaaagttgaaccaattctacaaatcataaatactattttccttcttaagttcatatattttctgagatagatttcccaaccttagttttctttgatattggtatttggaataattttaacatgatttaacatctttaagttctaaatctatacttatcctgaatatcttattat

SEQ ID NO: 143504 - DNA, 501 bp, Homo Sapiens
gagatgaaacagccaaagtaatggtggtttcagcccaaaacgctgggctgccaggctgggcgacggtggcctgtggggaggcccactagcactgtgccccggagaagagccttcccaagcgcggggttgcttgcagggctgcagccactcccatgactttggtgttcggctgccgatgctcccaacttgaccatctctaccgcgacgaggtgcagaacgcccagcagcgcggggtgtttggccgagtcctcaccgccttctcccgggaacctgacaaccccaaggtgtgagacgctgagggcgcaatggtaacctacgtgcaggacatcctgaggacggagctggctgcggaggtgcaccgcgtgctgtgcctcgagcggggccacatgtttgtctgcggcgatgttaccatggcaaccaacgtcctgcagaccgtgcagcgcatcctggcgacggagggcgacatggagctggacgaggccggcgacgtcatcggcgtgc

SEQ ID NO: 143505 - DNA, 392 bp, Homo Sapiens
gcccagaacactggcaattggcccccttccgggtattctggcaggagcgcctgcatgacattgagaccaaagggcttcagcccactcccatgactttggtgttcagcctcccgatgctcccaacttgaccatctctaccgcgacgaggtgcagaacgcccagcagcacgggttgtttggccgagtcctcaccgccttctcccgggaacctgacaaccccaaggtgtgagacactgagggcgcaatggtaacctgaagatagggagagaggggaggactcgcgctctccagcggggcacaccaaccacggccctcccgtgcctcccacgaccactcagccaccactgcacacactgcctcccacagtgtcctgcctccaagggatctctagag

SEQ ID NO: 143506 - DNA, 1407 bp, Homo Sapiens
  misc_feature (27)..(27): n is a, c, g, or t
  misc_feature (64)..(64): n is a, c, g, or t
  misc_feature (134)..(134): n is a, c, g, or t
  misc_feature (164)..(164): n is a, c, g, or t
ttggtgttattataaaagtaggatggncggagtggggcgtattgattaccggcgcccctacggnggccccgcgtagcagccaagacctgtatgacggtccgcgacgcggtcagattttagtgaggaaattaacntaggtaggaaatgattccatcctttgtgcngaagtggtattttataaaggcacggggtgctgaggaaatctagtggtcgtgctacaactggggagagaatttttttatataccttgggaaaaaaattctcgagacaagtaaagaaatgttaagagaagtcgctgatataggatgcgacgagtgggttattcagaatagttgttgtataataagaagtctgaaacgttcgaggtgtgtaggggaaaaaatattcgttaggaaggggagcacagaggctattatgtccagagctgaatgttataagacctacagtgtagtagcatgtttaaaagaatttttgactagattagcgccgtttggaaacccttgagaaatatttccgttaagggaaaagttgttggacaaatttagggccaacaacggagagaaaggtatgggtttggtttccgcaaaaaggttgccccaaagttgaggcaggtttttccacggttcaggggggttggtagaagacgtggggcccagggtgcctaaggcttattgattgtgacctcggcttataggggacctactgttgtacaagaaaagtgtggggtaccgcgtaaagcttggggccccctagagggaatgctttaggacgggccgcgggggtgacatcgggcaccatcttgcagatcttgaaacgacctcctgagcgccacccggcactaccagggcatgcccccttcgctggcccagctccgctgccacgcccagtgctccccggcctcaccggcccccgacctggcccccagaactacctcctgcgagaagctcacggctgccccctcagcctccctgctgcagggccagagccagatccgcatgtgcaagcccccgggggaccggcttcggcagacagaaaaccgcgccacgcgctgcaaggtggaacggctgcagctgcttctgcagcagaaacggctccgtagaaaggcccggcgggacgcgcggggtccgtaccactggtcacccagccgcaaggccggccgcagcgacagcagtagcagcgggggcggcggcagccccagcgaggcctccggcttgggcctcgacttcgaggactccgtgtggaagccagaagtcaaccctgacatcaagtcagagttcgtggtggattaggatcttcggatcggccaccctcgcccctcgcacctcagcccagggctctcggagtcatcccgggaattccggaccggtaccagcctcttttttgcgactgaaggggttagtagtcaga

SEQ ID NO: 143507 - DNA, 555 bp, Homo Sapiens
tttcaactcttttcatacttttatgctgaataactcagttcaactcttcctagatccttctctgagcccaggtttgcccatctaaaacccatcaatgtactagccaaactacagagcagtctcccttagaaaacctaaagttcagagatagaacagtgttttcttataatagcgcccccttttctttacaactaagatgttcaccagtttatctgattctgttactttaacctttctgtcccccaaaatagttagaataaatacccagtgtccttcctatcctccaacatttttagctagaataaaagtgatttaaaagatgacagatggagaccttgaggtagataaataaaccactaaaagtatggagcctaaggctaagtgtagaagtggcgagagacagggaaactttctttaaccttgccttgatgattgcctaagacgtaggtggggtgtctgtatttattagcctaagatctgtattcataggtgggaggagttgaaaagagtcatcatttagattcttgaatttcctttgctccccataagcctcct

SEQ ID NO: 143508 - DNA, 574 bp, Homo Sapiens
ctccaacatggggctttcaatccgctgtgagtccccagcttctgtgcatgcccaatgtccacggcacacagctgtgccagaccctgctgtcgggataactggcaccagccacgggcaatagatgacctcaatctaccagcctgagagctccaccttgatcgccactggtcctcctctttgatctctttctctctttctgctcattgtttctctttttccctccaaatggactttgtccactctggttcccatccttgtgccagcccctccctttcctgtcatcttgactctgtgcagttggctccacactacgctcgttcaggtggcctttgcctgcctcataatttttttgctgaaacagagtaataataaaaaacccaagaaaagaaaatatttaccagttctgaaatggcttgaattaatgaaataatgttttggggcatttagattgaacccgtgtaattgtaggttgcaaagtataatagtagctcatgcagggatatcattttgtgctattttactttcaggtttttgttaatccagtgggtttggtggaattagagggctgctgtga

SEQ ID NO: 143509 - DNA, 606 bp, Homo Sapiens
  misc_feature (531)..(531): n is a, c, g, or t
tttttacttgactgatatgcttcatttacttcagcaaactttaaaaagacactgtaacttttataaatgagcacattttccaaataaccatttaagaatataataaacagaatatccagattcttaagttacaagcaatagagactgattctgatttccgacaacaaaagggaagatgctgggtcattcaaaggaaatgccaaacagctgagcattcagtaggtcagaaatgagggtggcactagaggtttaagcagcaagagctcacagccatctctccaggaggctgccagaggacaacttgattcctatcactttctcttcccaaatcacacagggaaggggcagtttcccaaaataagctgtgtgtgtagggggagggggttggggaatgacggacttttattatgtgctcatatcaggctgtgcaaacaacccagcagactcctatacatgacaagtgggagtttttgaatgtacatgtaccttgttttttctataaaaactcacacgtccccgtgatacagtctncggtagttgtgctgagaggagagaaagtattgcagaatgtcgaagtatgacttagttataaggaagacggtctgg

SEQ ID NO: 143510 - DNA, 728 bp, Homo Sapiens
  misc_feature (346)..(361): n is a, c, g, or t
tatagttcttatgaaaatactggcttgaaagcttcaacagggataacattttcaggtgaaggccaccattgaaagcctgaagatatttagcttctgggagcaatgcataccatctctttgctgaggacccttgaagaggttaagtgaccaacccaagatcacaagactgatgaaaccagtgcttgaactcaagcttctgattccgagtccaatcttctctttccactgcataaagatactcgagtctcttatcaccaccaacaccaagtgatggcttataaagatcatccttagggtctttccccctcaaacgtgctatcattcagtaactctaggatccttgttnnnnnnnnnnnnnnnncgggggttgcggagaagggattgaaatatctcctctccctgtcttcacctcctctgatgaaatctgattttattctgtgatatgtaagacctgaatgaaggtgactgaagtaattgggtacatggttagtggtggaatccggatgtgaacctgagtcatggtcttgccattgttccttgaagacaggaaatatttgtaaatatatttggaagcaactttaaaattgttgcatgtggttgggtctaacagaatcacttgaatgaagagaaaaacataactttttcctgtgaattttcagggaaatgcaattatttcctttcacttggtataaaagctcttcagaggaataaagcatgcatgagccaaa

SEQ ID NO: 143511 - DNA, 615 bp, Homo Sapiens
tttttaggtcatactcttgggtgagttcttgatgtcggcagtgacaatcagtgccccagttggggcctgccagccccccaagctctgcagcctcaaagaccagctcagtcccccatcggtcactattcctgagagccagagttcgacctggtaacacctgcaccgtgcattccttggccgaccatctcctggccccactcccggtggctggactcctgcagtcctcggcctttggtctcaatgggcaaaaagcaggaggccagggcagccaggaggcagcagccactgtaaactgccagagtcaggtacacagaggattccagcatcacctgggcgatgaacggagtgatgagagcacccactcttgccatgccgctgcaggtgcccaggccgagggcccgcgttgccgtggggtagacctcaggtgtgtaaacatatgccggttgaaagcctccataaataaacgctcttgcaatgaagagtaacagagtgagcacatctcttccaacacagataaacagcaggaggctgcagaaggagaagatgagcaagcacagggcccatggtctttttgcgccccatgcggtcaataatccacagagtcacaatgacacc

SEQ ID NO: 143512 - DNA, 540 bp, Homo Sapiens
tttttccatgaacatcagctgtcatttattatgatatatatatattttttaccatatttcatggactctaaagtgctaccaatggagagaagcatcctgattgagatgtgagaagctctgcgtcttagaaccagtggaacagagtaatacaatcaaacccacgggccgtgctcccctgccgctcagtcaggcctggggatgcttcccctagcaccgggctcctggtggacagccttagaagggatgaagccagggccgcaagaggttgtccagggcctctctggccatttagtgggggaaggacatggggacatggggagtggcggatctgggagaacagtcccaggccctgtcctccctgttggtcacagcaaacgtggaggaagcagcatacccagccccagtgccaggctggtggtggcccccactgtctggctgctcggggctctgttacacaggcggccggtgcagcagttggtggtgaggctgtaggtgacgcccctgtagctgaagtgttctccaaggcgcaattggtggctc

SEQ ID NO: 143513 - DNA, 479 bp, Homo Sapiens
tttgttttgttttgtttaatttagaaaaggagccaagtagagaaaaagcagcatagattaatcgaagaaacaatgaactaatgttcagcccagctccagccagctgtggggtcctaaaccaagttatctcagtttcctcttcctctgtgctctcctttgcaaagtgggagaccataaccaacgagtttatcttatcggttgctgtggacctgcagtgagttaaatctgcctttgaacactgtatgagaggctataccactctccggatagaccagtttacacgggaggcagttattagtcctatgctgatttagtactccattataccacactccaggaatcttagggtggctcttccattaaaaagcattaattcagtgcctaactacctatcatggagatggtcaactgtccacattttaaagggaaattggtttcaacctgtagcttttattctgttaagaattatctatgagaaa

SEQ ID NO: 143514 - DNA, 548 bp, Homo Sapiens
tttgtaagttgcagcatgtgctttccagctctctcagctataattcacttattatactggagtcctgttgatgtggtgttaaaaagttggggagggaaaacattctataatcttacaattacagctggtcttaagtgggcctgtatccctgggctgtgtctttcttagtgtattaaattggcacatattataaaattaaccatcacagttttatttcttctatgtaatgtggacagaaaggttagagaggcctggaattcagtaagaattctttctccttggtgagataaatatttgactggtaaagtgttttctccttggaagaggcttatgtatagagaattctctaggcatatttcagatggttacttttccccatccctgacaaagacaaaaggtgctttttcttagttccttaccgtaagaacctgatgggatccctagaggtgagagtcatcaaagtgtgcgggattccctaagaatgtgatccccaggagtttcttactctcaagctagtccacactcagcattcagtcagatcttcatcg

SEQ ID NO: 143515 - DNA, 872 bp, Homo Sapiens
tttaaggcttatttttcatttaatagtgttaattttgaagacgatagtgttaatttcaaacttccataaagggtaaccctacagttgaggtgtttgatgcagaaaccagtacaaatttcgattgttaggaaaccaaatgttctgaacattattttcattagaaaagggaagggtaattttatagttgtttgaggtgttgtaatacatctactgataggcccagctgtttaactaaactggctgtctgttccaaaatccatgtggggcttgggttttctgaatgtgcatgctcctgtgttctacaacattctacatatgaacaatctatcccactatggctcttgctacagtttttgttaaactcagcattattttcacagagtctttcatctttagcttcatcaatctttttctcagctggaactacatgacaaaggtccatatcctcaatggagtccaataaatctacaacatgggacggtggagtgattgatttcagactgtttgagcacatactcttcacactggccaactgcatccagaagattgtttattttattgatcaaagttgaattattattatgaaggtgacaccaggagagcaaagcactcaatgttcctcggagtcgtccatagtttaaaatgacttctgcacctttcttataaccttgattgaagccctgttgaagagtaactgctttgccagcatctattccatctctataaccttctttgactcgtctttgcatgttactctgccattcccgctgcgccaggagcgactcgtctgcttcttcgtcaaacacgtcccctttgtctccagggccctggatcaaggaggctgcttgaacccacgacatcaccgaggcccc

SEQ ID NO: 143516 - DNA, 367 bp, Homo Sapiens
tcaacagctcggccaagcagaactgctgtacctctgaccacttgtgttaggaaaactatcggctccctgtataataaatcaagccaggtcctccaagtggtaattcatgaaaaatatccccactaccaccaccaaggggaagaaaggactcagaagagaggacttgaggccatgaggtctggcctcttccctccccatctggagactctttctcccttgctggctttgggcccaagtttgatgtttatgaggatgattgctggtttcccttacacatagcagagctcactcagttctcacagtagccaaatgaagcagttatgtgttgtccagttttccagaccaggactgaaatccagagagggtc

SEQ ID NO: 143517 - DNA, 549 bp, Homo Sapiens
gagaggtccaccattcattaattttaatgaggttactcaagatttcccctttcttcaagcattccaggaatcagatggaggaagatagggtaacatcatctttatcaaatatttgcaaacattatatagatagctggaaaagcctgtgcatggtgaatggaagagacgtcacataaaaccgaataactgagtctcataatatttaggtcttgaatgaagttaggccttgatctgcttccagccagttgatctcttaattatgtaggctgtgcaacaagtttttggttctgttttatagttttcttctctgcattcctctagatttaatatattcttgatttgttttacagatcactgcttttcctccagaataagccaatgtggataagggagaccaaaggaaattaattatataccaataagaaaagtcttacgtaaaccctgtgtgtaataaatgttcaaataagttggttgtaaggttttggtgtacaatttcaagatattttcacagaacatattgctccccagtcagggttaaagtgaaacgtt

SEQ ID NO: 143518 - DNA, 1310 bp, Homo Sapiens
aagtttctattttggcaccacagttggtggcttaaggcttttaaaggtttcacctccctttccttatattaaatccagttttcccagttggcacaataaaattaaaatccctgtagtccaccaggtgttcccatgttccagttgccttgacctttacctttttcctcgaccaccaggtcccaggtccaccaggattaccagcctgaacacttcgaagaaggttctgtaataatttctgcagcatgttgacatcggtctggaggtcctgttatttgtgctatcctttcgggtgttgtcccatcatctggcttaaactgaatgcgaacaccagcatcaattttgtatttttttgatcatctctccatttcttcctattacaatgccaacagcaaatcttggaatggggacatctatcccttcatttcctcctattcttgacccatactcattccgaacttctctgaaaccgccttgatcacgaattaactctaacaccatttccttggcttgttgaactttatatgggtctcctgtaatcctaagaggtttgtcagcaccagtgttctgcggcccgtcttgaatcataaccattttaactccagcccgttcctgaagctgtttaatagtttctcccccttttccaatgactaatcctgccttgctagctggaatcatgatttcttgaactgcatttcccggtccatcgccatgatggaagccaggagctggtcttcctttttcaacaatctggtccagtaaccgttttgctgactggacagattcaggtgttccagttaacatacaggacctttctggaaggccaccactgtcaggagctatctgtattttgcatccagattcctgttgtatgcgtgagatctgttcacctcctctgccaattatgaatccaaccattccatctggaactttgtattcttctgtcattacagatctttgctgctgatgcatcggtggtaactgtgttccaaaagagtcattttgaggagcaactttcttagcatctggttgatctccatcttctaaaggtcttttttgtcccccataaccatagtcatttgaattcagtgatgtccctgcatcacctccaatttttgctgcaatctgccgggctctctgcagtgcatctttgaaagcgtcgttaactcctccaccaccaccgccgccaccaccgccaccagctgagccagaagaggggggaggcactgttgaatagtctgccatggttgcactataagagccgctgccgcctgttcagagacttcctctcagctaacagctaagaaagaaag

SEQ ID NO: 143519 - DNA, 605 bp, Homo Sapiens
tttcattttccaacatctttaatcaaatttcactcacactatatgagttctattaggttctcaggcctctccaaatgctcatgtctcaggagggtatcactatttgaaatcctaaaccattcatttgctacttcttaacaaaaatttttgaaaagcatgtaaaccacacccttatcttttggattacaatggttaggtacaaaaacaattcatttagcatcttataaatcattaaagttatacataaaagcacctacaaatttttttaaaaataaaagattcacagtgcactgcaccttggaacatataaggttggaacgtaacatttaaaaagtgaattccaagacctgtatctctctcaaagacataaaacataatgaagcaaaaccaactactcttctcatctagcatcttaaaatgcagcactcagtagaagtaaatgattgcatattcagcatactcctttatcacttgatttcctcaaaccatactaaaatttctcaaaggagaaatccagttcgctaagcatggcctttctcaaggtaacctgaacactgagaaactattacccaggtttgagagaataagtatagtagatgtaccta

SEQ ID NO: 143520 - DNA, 530 bp, Homo Sapiens
  misc_feature (408)..(408): n is a, c, g, or t
tttaaaagtaccaattcaattcctccattgcacgaactctgccattctggaatgctcttcctctcatggctcatttcttcttgtcatcacacttcagcttaaatgtcagttctgaacggcctttcttgacgaccggaactaacacagatatttgctcagttttaattctcgacaatgcacttaccactatctgacattgttttgtattattttatgtatttcactggtaattgtgtctcctctccctcctacccccaatagagtatgacaactgggacttgtcttatcatttatccacagtacgtgggaaaatggccggcacatgggacttcaataaatatgtgctcaatggtgaaccacctaggtaggcagatatgtacgctaggatcgtgctcgtggggagcttangttctaaagggaaaggtcaataaataggagaaaaacaaacacctagattctgttaactgttgcatagaagagattgaagttatacagaagacactgaggagtctataatcagaagtttctca

SEQ ID NO: 143521 - DNA, 346 bp, Homo Sapiens
ttttaaaatatttcaaaggaaagtttttataaggggtttcatagacttgaaagataagtggatatgaagacagacctcagtgtgaaaaagtgaaggacttgaacgactttaagacgtgccttgttttccataaagatgacaaaaaactgctgcagacatttgtaaaatataaagcactaggtggttcaccattgagcacatacttattgaagtcccatgtgccggccattttcccacgtactgtggataaatgataagacaagtcccagttgtcatactcctagttctaggggctaaaaatcaaggtgtccacaggtttggttctttctgggggctctgaaggaga

SEQ ID NO: 143522 - DNA, 938 bp, Homo Sapiens
tttttagttttggttgcatcaatattagttttaactgaattaaaaatagcaaaaataaaactaaatattagctgtgactatttcacatcaaggagaaaagggaccaaataactattaactaataataaagagtgaatgtgagtgtgtgtatgctttggatagtcaaactaagaaaagaagaaaaaaggagggcaggaaacaaagggtagaaatcaaatacttaattttttaacatttaatcatgttcataattctcataaagatctaaacttaagagtcagacacaataataaacagtaagctgacaaaacttacctcccatgaaaaattaatattagttagttttgtattaattcaacatgaaatcacagcaagttaacacatgatgtaacaggaattatagaatagtttataacatatgtagaggggaaacccttatttaaggaaagaagataccagatatggtagcatttaaaattttatatcccaccttgttccaaataggatttgagacgactagactggcaattgattccttaatttggtagtggcctaaatcatgggtaatcctaatcattagaagcaaaactttaatagaggaaatcttgactcaagaaccagaaaaaagtagggaaacttaatggaagacaggatgctaaaatcaaagtctatgaagacagagaagcatttagcatgacttcccttaccttttatcagaactagactgcagcagctgtctcaaagatcaacctattttaaatttcttaagaaactccaggagtattgttattttggtaatcttaaatgttatttagcaaaaacttagttatcagagacatttgtcaaaggatggtattataaattaaggtccttttgtcaagtccatctcccggccgtaatggccgaattcccgggcatatgtccggtaccgtcgactg

SEQ ID NO: 143523 - DNA, 578 bp, Homo Sapiens
tatgctgtgttcccaagtctttctgtctgcattgaaggtacagtaggggcaattaagcagaatcctattttcacagtcttcactatggacattgcggacatgacttttgtaggcagagaagaattttgaggacaatggacaagcgctgcagcagaaaggttttgtccgatagtcctggtttttcgtaagtgatgggtcccacagtcctacatcctcccatgtagtgtttttcaaataaaagtcattaggttcaaattgtttaaaatcttctatatgttctttacagtattccaacccaatgtcactaagtatttttttcacagttttccgggcttttcttaaactgccaagattgttgacaggaagttggaacatagtttcggtgtgaattgacaatgtggtccaaagagcaaggcaggaaacggagtccagatcctcaaaatggtagtacagggcataaccactaggccacctatcagttcagtacaaaaagtacaaccctgcgcatcatggtgtaaaagctggggcctaggtttcgcattgtgcatctcacaccttgactcggcctcgaggcgcgc

SEQ ID NO: 143524 - DNA, 414 bp, Homo Sapiens
gtgataaggagattttattatccatgctaataagggaaggagtgggtgagattctttccaaaaatttccacccttcaatttgtggggggaatgcaggggtttttaaagagagaggggtttggaatggagaggaagggggctaggaggggtcagtggtgcaatccactccaacagcttatcttgaattattgttccctttggtgaaggggccagtgccatcctgggcctgaccaggttacaaatgaacttcagccaatcttgcagttaatttctagtgcgtgagcatgagtaaacgtgagtgagtgtagccaggagtaaatttcagccttgaccggggagagaattctggaggcatacggtccatgtcaagatccagcccctggatgggcggaagggaagaaacagagaaagaaa

SEQ ID NO: 143525 - DNA, 248 bp, Homo Sapiens
tttcttataaatcaaatagctttaattactatttttcattaaatttttattagttggtacaatatttgattttgaaaactgcttcatgtcaaccacataaatgaagttctgtgaaacccccaaatacacatggagaaattttagatacaggcatatagaaagcaggtccaaaacctttatcaaaacctacatgaaagtggtaagaacaagtggttagaatacaagtcatctcccactggctgggagtc

SEQ ID NO: 143526 - DNA, 243 bp, Homo Sapiens
attcacccttctttcttataactgcagttttgaccttatgacttttaaaaacattgttaggaaatgttttcccagtaagatagtccagaatcattcacactttagcataagaaaaaatagggcttagattcagtttatttggcagttcagagaatgttggagaactgttcaaatgaaaacctgacagatcattatatcaatgccagggtttattaagtttcctacattaggtcgcctgccctg

SEQ ID NO: 143527 - DNA, 1041 bp, Homo Sapiens
  misc_feature (146)..(146): n is a, c, g, or t
  misc_feature (158)..(159): n is a, c, g, or t
  misc_feature (251)..(251): n is a, c, g, or t
  misc_feature (256)..(257): n is a, c, g, or t
tttagtccacggcgcccaggttctcccttaggaaaaccaggctatgggccaggtttcccttacccctactggggcccgcggcgcccaaacggaatggtttaaggaaagcttctccgagggcccgaaggcggccggacatggtcttntttctctcctcnncctcccctttgagttttttaataaaataatctcatgcggcaggagaggagaggatcagggattggggccgccgcctctttggtctgtggctnggggnnaggggttgggcttccgcttcagggctggagggctctgtgggctgtgggggcagaggctcggttccaaggccagatcctaggcttggggatggaggtgcctcgagttttggcctgcgtttgaggacgggggagcgctgcagcctcaggggccgttcttcatttctggggcccaagcaagggtcctctgggaggcccaggctgtctggggaggggctggttctgcagggacttgggctttgaccaggggagggagggcctggaccatcctgttggccccaaccacggctcctgagctccgcattcaactgctgccccagtgtcttccaggtggcagactcaggcccctggctccctgggccaggtctgcaggaagggtcagcagacacagagtgggtgcgggacttgatcgagatgggaggggcctccgtggaactgtccataatgtcaccatctgagccagctttcttgatctcgccatctttgctttgcttcctcttgccttcggcacccccgctgcctcggctgacgcctatcctctgcagcattacttgtacccgctgttcaaaggatggagccagttctgtttctccccgctccaggggccgccgcttgtcgggtctggcacccagcgttgcctcctcctcggcaggcagcagtatcatcgagtaggccttgctatctcttgtgtagcgaggtcggctcctgccggcagggtcagggctgctggtgtccccctcagccccaccaagctcctcaccacggctgggacgggttggcggccgca

SEQ ID NO: 143528 - DNA, 1207 bp, Homo Sapiens
ggtgcttttggcaatcttttatttattgtaatttttctccagatatagattgctggatatcacaggcaaacaatgtgcaaaggcaatggctgtaagtaacatttgcagaacttcatctaaacacttccagaatgaaaaactgatgccagcttctaaccctcgagctccattacacggacccaagcctaaggaccttttgtgtaccatttctatgggaaggcgtcacagggtggagatgttagactacttccagaggtgaaggccgccggcgcctccagctgtcagaaagagctccctgttctgcggcaggtgtcggacctgccacacagtagatttatgagccttttctgaaacagaggcaaaacctttggttggatgctgtgttctcatgtcaaaaacatggaactttccttccagagatgtggctactaacttattcatacttatgtcttttctgtcaaactccaagctacacaccccatttttgatgtttgtctcccaccgtaatgccatatttctgagatcaaatagtttgatatccccattgtcatagccagcacaaacaacacgttcttcttgattataagcattgccaaatgccacagtccaacagtctctcttggttttctccttgtacaggttccatattagcaacaggatcatctttttgccttgggtcccacaccttcacagttccatctcggctgccagtcacaatttcaggtgctccttctccaattcctagtccacctatgccatctatggcatttataatttctttatggccctttacagaatatactggcatctctggagcttctaaattccatatatgaaggtttccaccaaaatctccagtagctaaatatctctgctgtaaagatgttgcaccaaatgttccacatttaataggtttggccttttcaatctcccgaagcagcttcaggtccccgtgctggatctcgtacagctgaatgacgccggtgccccgtgcgaagttgcccatggtcacaaatttggcgctgcagggcacccacttacagtcaaacaccgtgtagttgaagcccttctggatatgggcgatgatctgaggcttctcgaaggccgacatggtgcagccaatttcagctacggcaaccgccacacccagagccccccccggccgtaatggccgaattcccgggcatatgtccggtaccgtcgactg

SEQ ID NO: 143529 - DNA, 575 bp, Homo Sapiens
gaactttaacttatttaatttatagtgtttatagcccaagaagaaagaaccagaagatatatacatattttttctacaaataaagctgatcagtggcctcctttttcagggtagctgacacagttctcagcaccaccctacagctgcattttgggttcaacagacttttgtggctggcctgggaagcagatcaccatttataacattgtttctaagggagacacattccaagatccaaacaatgaatttagtaaagaatgcttggcttccaggctggatgagctggtctggctgtaccttgggggttggcctgaggctcccttcccctttggtccgcagacactgcagggttggggataggcacgtgagggggagaactctgagtagatagggaacctgcagccgggctgctcaagggcctctgtgtactgtgggcgccaggaggtccccaggtggaaaagggggaggtagaaatggcaaagaacttggcctcctggcatgcttgcacgttggccggccgcaagccaagggcccggttgccccttccgttaaaccctttggaataggtggggttg

SEQ ID NO: 143530 - DNA, 916 bp, Homo Sapiens
  misc_feature (108)..(122): n is a, c, g, or t
  misc_feature (435)..(465): n is a, c, g, or t
agcacaccccgttttcgaacaccctcttcaccagaggagaccccacccctcttggccgggcgccctttagaggaaaaaagaaatttccccctgggaaatccacacctnnnnnnnnnnnnnnncttccccccccttatatatttcccgccccccttggggggaggtttaaggcgcgggcccaaatccatggaggtccaggagtgtttcacggacccagccctggacccagccaggggggaaacccctatttttcttctataaaaatcccaaaaaatccagggggggcctggggtggcaatgcaccctgtaattcccaagtttcttcaggaaggttgagggcaggaggaatcgcctgaagcccgaaggttgcaagtgaaccggagaaggcgcccattgcattcctggctggggcaccagagcaaggactccgtctcnnnnnnnnnnnnnnnnnnnnnnnnnnnnnnnttcacctgggatcaaagcagcagggacagcctgcgctggagccgccagaacaggcaggcgggcagctccgcaagaccgagcaactccaggacgggagacgagaactggcagctgacatgaccctgtgaccaggacattccaaaagactgggggcccttcccaggcctcttctttccgcctattattttaacaaagtccatgctgccagaaggcaagcctacctcgaaacacctggcacattcacaagctaccaaagggaggagggtgaacaggctctgatacttggagtagaggcccaagcttcctctcccacggttttccaccgggaacgaagacaaagccaagccctgtgcagccacaggaagtcccaggaagcacctgtgagacccgcacacccacctcggagggtcccagggctgggaaagccctcctctcaggggctctcagctcc

SEQ ID NO: 143531 - DNA, 369 bp, Homo Sapiens
  misc_feature (264)..(313): n is a, c, g, or t
tttcaacttactgaaaactttatttttaaattccaagcctgctctctagttggtgacacacatttgaatcttggaggaaagttttggccccactaaaaatgtgacagtcatcagcctagggacagtacccagtgtatctgctgctccaaagctgctcccagctgaaaatctctcatctttagctaattgaatcccactgaggagataacttcaacaattttgaagaataaattccagtttgcctaggatagtaattccaatttnnnnnnnnnnnnnnnnnnnnnnnnnnnnnnnnnnnnnnnnnnnnnnnnnnaaatcttgtatcatttgccaagtctgggacctagagcaaattttcaccaagccccc

SEQ ID NO: 143532 - DNA, 510 bp, Homo Sapiens
acaacactcaggactatcatgggaagacctacagtgatacagagagttgataacagggcctagctaacagctgagattgtgactctcatatgcagacccagcctacaggctcttcattcttacacataaacagagcctatgaatgtggcacttaatctcacacataaacacagttgcaagttggatttgttactctcatatgtggatctggtttccaggtggattggtgactctcaaaccatgattcagcagacctgtgaggctgtgagttccctatcagaacacaatctgcaggttgtattgtgccatatacctgggaccaaattacaagcacaatgatgaatcttttacctggagtcaagacatgggcaggatgatggaacttatcactggacctttccacagtgttattgtgacatatgcctttgcccaacatgtggtgatttgactccccagactgggtccagttcacaaataaaattgtgccgtatacttggccaagaacctaaa

SEQ ID NO: 143533 - DNA, 577 bp, Homo Sapiens
  misc_feature (47)..(47): n is a, c, g, or t
  misc_feature (53)..(53): n is a, c, g, or t
tgggctaggttcattgagagactgagactcttccatcactgaatganaatcanaaggtctgtttttagtacatggtaatgaactccaggaagattccttcaggccttcttttaagttttcaggtaataataaatcacataaaatcttttgtacttgcagctttgcaggtgcaaaatcttcatcaagggctaagcactgaagaaagagttgtaaggcatcacctaaaaaaccagcatcgcagagtacttttcctttcctgaagtagacctcaggccaatctggaagttgaaaaagaactgcatttaaatcttctatggctgctttaaactcttggagaccagcatatgattccgctctgtaaatttttacaatcaagtcactgggttctgctcgcagcgcctcgcaggcggcggccagggcctcccggtagcgcccctggtgcagtagctccccgagcctgccggccgcccgggcccgctcgcgctggcccggaaaccacttctcggccaggtggttgaggacgacgctggttctgaagtctgaagcggcgatggcggcggccagaggcggcggccgc

SEQ ID NO: 143534 - DNA, 485 bp, Homo Sapiens
  misc_feature (451)..(451): n is a, c, g, or t
tttgttcaaaagcaatatttatttttcatgaagataagaggcatattacattcgctatagaaaatgctatgagaggaaaaagctgcatgttaccgatatgacaaaaaacataaaaaactctacttatgaaagtgttttgccctataagaacatattcaataaaaggcattattccaggtgaatgagccatgcggaaatgtggatttattagggtttgttttgaaatgtaatttgtacggccagctttttattcctttgatggctatcaaatagatttattggctacatgttagaagtgcaaaagataacaggtaaccaagggagaagttttaataaaactctcaggaaaggcaaagaaaagtgagtgaatatgcctgcttacatttcagctaataaataaaaagtgcagatagggctttaactgaaaaccttgctggttattgcagcctgnaaggtttattgaaaactgggtagaacactctcat

SEQ ID NO: 143535 - DNA, 1093 bp, Homo Sapiens
ttgtgaatataaaccgtggtaataaaagcaggctggtacggtccggatttcccgggatatcgtcgacccacgcgtccggtgcacagcattctgcgggtggtgctgggtgcaaatggcacctacagctgcctggtgcgcaaccccgtgctgcagcaggatgcgcacagctctgtcaccatcacaccccagagaagccccacaggagccgtggaggtccaggtccctgaggacccggtggtggccctagtgggcaccgatgccaccctgcgctgctccttctcccccgagcctggcttcagcctggcacagctcaacctcatctggcagctgacagacaccaaacagctggtgcacagtttcaccgaaggccgggaccagggcagcgcctatgccaaccgcacggccctcttcccggacctgctggcacaaggcaatgcatccctgaggctgcagcgcgtgcgtgtggcggacgagggcagcttcacctgcttcgtgagcatccgggatttcggcagcgctgccgtcagcctgcaggtggccgctccctactcgaagcccagcatgaccctggagcccaacaaggacctgcggccaggggacacggtgaccatcacgtgctccagctaccggggctaccctgaggctgaggtgttctggcaggatgggcagggtgtgcccctgactggcaacgtgaccacgtcgcagatggccaacgagcagggcttgtttgatgtgcacagcgtcctgcgggtggtgctgggtgcgaatggcacctacagctgcctggtgcgcaaccccgtgcttgcagcaggatgcgcacgtctctgtcaccatcacagaggccctgtgggtgaccgtggggctgtctgtctgtctcattgcactgctggtggccctggctttcgtgtgctggagaaagatcaaacagagctgtgaggaggagaatgcaggagctgaggaccaggatggggagggagaaggctccaagacagccctgcagcctctgaaacactctgacagcaaagaagatgatggacaagaaatagcctgaccatgaggaccagggagctgctacccctctctacagctccta

SEQ ID NO: 143536 - DNA, 1476 bp, Homo Sapiens
  misc_feature (327)..(327): n is a, c, g, or t
tacgccagggctgggaatgggagaggtccgtggagggggagggagcgtggagtgcgtgtgcgcagcgcaggggccgcgccaggcacgcgggagcagcaggtggcgtgacagtcgtgggtaggttggctccagagtaaacatgcaagctgaatgggagagcatgagagaagaaaggagacccaagtaggtggagaagggcagagggagcagaagggtgagcgcgcgccgggggccgcagtgcagcgagacgccctggagaaggcagtgtgagcagcacagggttccgtggggaggatgggcaggggagaggggcactgcagaggaggnctgggccaggggggaaccacacgtgttccagcacgtgcacctgcaggtctccatgcacagctgtgcatgtggtgggcgcagagtgccctgtcttcacttggggcagggagggaaaaggccagtattaaggctagagcaagaggaggaaggaggggaaaggaaacagcttctagactccaggagatgttgaggccgcactgtccctgtctgagaagaaaagattctatgcaggtggaagcagggctgaacatgatcactagtgtatcacggccattggagaaacaaggccggggtgactatgcatcgtgtctttggtgaaataaggcagggggtcagtcagtctgaatattgcatcttttggagaaaaaaggcagccagatggtccacgcagcactggaagaagagggtggtgatgtggtcagtatactgtgtccctaagaaatgtatgtactgtgaaataaggcagcaggcaggatgacttagagaactaaggttgtgggtggtctgttcattgtgtctataagaaaaaaggcagcaggatgacttgggaatcatgtccattggagaaataaggctgcacagtggtctgtgtatcgcatcctttggagaaggagcccacctgtcagagcaggatgcatctgttgggggcagggctcacagtgcagccccattgcagccagagggtaggagctgtagggaggggtagcagctccctggtcctcatggtcaggctatttcttgtccatcatcttctttgctgtcagagtgtttcagaggctgcagggctgtcttggagccttctccctccccatcctggtcctcagctcctgcattctcctcctcacagctctgtttgatctttctccagcacacgaaagccagggccaccagcagtgcaatgagacagacagacagccccacggtcacccacagggcctctggggggaatgtcataggctgccctgtgatggtgacagagccgtgcgcatcctgctgcagcacggggttgcgcaccaggcagctgtaggtgccattcgcacccagcaccacccgcaggacgctgtgcacatcaaacaagccctgctcgttggccatctgcgacgtggtcacgttgccagtcaggggcacaccctgcccatcctgccagcc

SEQ ID NO: 143537 - DNA, 1218 bp, Homo Sapiens
  misc_feature (321)..(337): n is a, c, g, or t
ttttttttacatttgtcatttaagaaggctgccctgcggtattcataattcattgtttaccacaaaggtggttcataaatttaagctttaaaaacgatctgtaagttgatactttggctctttggagcttatttcattaagaaattttccttgattgacctcagggcagctggggcactccaaggggctatggcgataaaaagctcaattggtaaagacactcgagaggtgcagaggaggctctggccactgctcaccctttggtatgaacaagggtgcccatgtggttgccccttctgtcatccagagaaagtgctactnnnnnnnnnnnnnnnnntatcaaccctttgatgcttttcttaaaaatttggaggtattaaaacattcctcataccttttgcatatttcaaatagacccatattagagaagagtaaaaatgaatgcggactgtgcatacaatgagaagacctgggggcctggcttggacccccttttaatacagatttacattcctacaagagaatacattcctaccatacattctgcacatgttacgatccagatgttagcgctccacagtaaaataaatatatttacacagaaaaaaggaataaataacttatggggggacccaaactcacttcaaattcaaagctcttacgattctgctctcatcttgtcacttcattgcacatcagtgtcaataactgtcctctcccagccccagctcggttttctcgtaaaggcacctcaagctgcctgcctggccctggatgccatgtgatgtctttcataaagggaaggcactgctggaagcacatcccacactcaaactgggacttggagatcccactccagctcctactgttccctgttgggacatcactttgtaagaataggatgcaaaagcaattagaaccctagatcattttgatctttctgaaaatgggctgctaattttccatgtctttcttgttagactttgagtatcagggatttatggcaacggtgtcagagttaaaaagcatttgcctgctgtttttggggtttttgttttgattttgaagcccagccttacaaatacataagagtcagagaaccaagtttgggcaacacttctccgtgcttatttgaactgttgcccaacatatgggatttgtttaaacacatgatttgctaatccaacaaaagtacagttgttgtaagttactgtaaat

SEQ ID NO: 143538 - DNA, 458 bp, Homo Sapiens
  misc_feature (220)..(220): n is a, c, g, or t
ttttatgtcaaacaactcatttattttctcttgttttgctttctttccagtggctcacttgaggggttttctttttcagttttccatctgcttctttggggtcccatggagtcaggcttcaggagaagaccccagcccctgctgctctgttgggctcctcctggctcctgtgtgctcaaggtgctggggtctctccccagcctcccgtcacacctctgcntgggttcactctctctggaggtggcagagtgaacagggccgaccactgaggctggccgtttaaagtaggacacttctccttgcctcttgcctcttgggaagcctttgatgggctgcaccctgacgcgacccctttccaggagtccaggcgcacccctggtggtggctggggaagttggtgctcggcagtgggtcctgaccacttcctgcccatcacagccacggcttctcccctctga

SEQ ID NO: 143539 - DNA, 811 bp, Homo Sapiens
  misc_feature (393)..(402): n is a, c, g, or t
tttttactacataacaaggtttatttaatatgtcttttcttaattttcccatagcacattttaatatttttatcagggatatgtaataataccattccataattaaaatagaatatgagatataaaaggtaaaacaataatgatggtgtaagtattatagaaaacataatacatgtactatctttgaaaaattttagagctgtagtttgcacgatagaaaatatatatcaacatttcatcacatcagaaatatatgcaatgttagatctattacattgtgacattttaggaaaaaaagaactgggattttacttttgtattcctaagattgtggccagattttgaatgactaatatttatagaattgaattaaatgtatttctaaaagtttcnnnnnnnnnncaacccaccatggttgaacaatctccaagggaaattagggaaacagtctctatgtacagtagcatcataaagaaaatactcaggaataaacaaccaaagaggcaaaagtctggtatctggaacacctacaaacttctggctggcaaagaaattaagaaggcaaaaactggaagacatctggcggcacttggttggaaagacctaataggttcagatgaccgtactatcaaaagtgagtacagattcaatgtaccccccccaataaatccaatgaattcggtgtgtggcactagaaaatcctcctaagattactcgaatctcaaggaacccggagcaaaaattctgaaacaacaagcgcggtgcaaccccgatcaagtataacagacacggacaaaatgggcggcaaatc

SEQ ID NO: 143540 - DNA, 587 bp, Homo Sapiens
agccccctcatggcccgtgacgccgcggccgatgtggccgcgcgcgccctacgggcctgcaccgccaccgcacaaagacgcctcgggagccgccgcctgcacccgggccgcagcagccacgccaggcgggctgccccgacctggcgtgcggccggcggctgggcagcttctacggctcctttgcctccccagacctgttcggcgccgctcgcgggccctcagaccttcactgcacgtggctggtggacacacaggactcccggcgggtgctgctgcagctggaactgcggctgggctatgacgactacgtgcaggtatacgagggcctgggcgagcgcggggaccgcctgctgcagacgctgtcctaccgcagcaaccaccggcccgtgagcctggaggccgcccagggccgcctcaccgtggcctaccacgcgcgcgcccgcagcgccggccacggcttcaatgccacctaccaggtgaagggctattgcctcccctgggagcagccgtgcgggagcagtagtgacagtgactggggcagcactggcgaccagggctgcttctcagagccacagcgccttgatggg

SEQ ID NO: 143541 - DNA, 1117 bp, Homo Sapiens
  misc_feature (1094)..(1094): n is a, c, g, or t
caggggcttggcttccctgtagggcctgacggtggccgcttggcgccgcttgtagccccgtgggcggcctggcgcctcaggctcagggccgttgttttcccgttgtgcagcgtttgcacagcggtcccgcggctcaccccgcccctcgttatacctgcacgtagtcgtcatacccaccgcagttccaactgcacagcacccgccgggagtccctgtgtgtccacccagccaacgtgcagtgaaggtctgaggcccgcgacggcgccgaacagtctggggaggcaaaggaccgtagaactgccccaccgccgtccgcacgccaggtcgggcagcccgcctcatccgagccgtcgccgcaagtcctgcaagccgttcacagcgccgctccacaggcaggcagcgcgtggagcgcgccccgctgcatgggaaggtccccccggggcacaggctgcctggaggctcggaggcgggcgccgagcagttgccctcatcagagccgtctccacactcgtccaccgtgttgcactgccacgggccgggcaggcacttgccgttgtcacagcggaactcatctgcctggcaggatgcctggcccagcttccctcggatgtaagacagacggaagccctgggcctggccggagctggaggcgtctgagtggaagaaaatccagacatggtcgcgggcagagatgaaggcaggtgggatggcggagccacagaggcggaaggcctcctggcggggtggggctgctgggcccagcaggagccagtccagggagcactggtgggactcctccacgtcaaagttgcggaagctgatggtaatcatgtcaccacggtcgccctggatgtaccagctgcagttggtgcctggcgggtagttgaggggccaggccgggctgtagatgaccccacgccgctctgtgtgctgctccagcttcccactgcaggccgctaaggcaggaaccgcactgctgagtctcccggtgagaaagatgttcaccagacagacgacggccagctgcgcccgggcgcccggcgcgccctccagccccgcgaccgcgcgcttctccctcggtgccgaattcaacnccagcctcgtacctagaccgttt

SEQ ID NO: 143542 - DNA, 932 bp, Homo Sapiens
tatgtgtgtgcgggtccgtgattgctttgtctctataaggtcgctgttttgtaagatattgtgcggacaatagtattgggcgggggtcggaaaatgtatgaagtgagaaactccgtttccgcggggtggatggagggtctctggggagatggacctgccgctggagattgggggtctcctccctgcgggcacggaaattgagcttcccggggggtcattatggttctcgaaggccccggtattcctgccgtgcgacagtgagtagagcttgaaggcgcagcccagcggtgatgaccagcagcaggccacacaccaggctgccaatgagcgcccgccgtgatgactttgcggggcacggcggccaggcacccatgctcatcgctgccgtcctggcagtcttcttggccgtcacagcgccacgtctcgaagatgcacaggttggtaccgcagtggaaggtgccgggctggcaggagaagcagttcttctcgtcggcgccgtcgggacagcttttctggttgttgcagcggtcggcaggcgtgtagcacagaccactgccaccctcgcaggggtactggtcgggcgggcaggcagggcagccctgctcgtctcggccgctggcacaatgccaccagccatcacagcgctgtggctctgagaagcagccctggtcgcccaggctgcccccgtcactgtcactactgctcccgcacggctgctcccaggggaggcaatagcccttcacctggtaggtggcattgaagccgtggccggcgctgcgggcgcgcgcgtggtaggccacagtgaggcggccctgggcggcctccaggcggggtggggctgctgggcccagcaggagccagtccagggagcactggtgggactcctccacgtcaaagttgcggaagctgatggtaatcatgtcggcaaggtc

SEQ ID NO: 143543 - DNA, 453 bp, Homo Sapiens
ttttgaaatttgtattggtaggtaatattatccacaaattacctttcaggatagtaaggggagtgttaaagatactagttacaaaaagaggatgatggtctgattgggtggagaactgctgcctcctcactttggccccaggaacttaggtgcaggcatgtccgcgatgaatcaaattggatcttgagtgaatcttccaaattaagtcatttgttatcactcttctgaaagatggctgaatatgcccgttgtatctgtagcccatggtgtttgacagctgtcttctatttgttgaagagcttggtaacttgggattttgtagagatcagtaaggactggtgggaacacccaaaagacccatcaactcggtgatttaggactgctttgcttctccaggaactccactccacccccaccagcaaaaaccaaaccccagggtgtttgaatttaaca

SEQ ID NO: 143544 - DNA, 319 bp, Homo Sapiens
agggaaaacaatatgtttattaagagccatgaaaatgcataaactcatttgtaaataaatgtagtataatttacccagtgaaaaaatagctaaaatccatgagtaaactggattttatatttgaaatgattttacatatttgatctccagtgatttcccctccatcatgatctactccatcaatgactatagaaaaagttgttaccaacaatcatcataccggggaagtttttcaagatgctctttcaaacagaagcagtgcaaacaagttcagatggcaagggatacgataagacctggagcttatcttcggacacgt

SEQ ID NO: 143545 - DNA, 1656 bp, Homo Sapiens
  misc_feature (779)..(834): n is a, c, g, or t
  misc_feature (901)..(901): n is a, c, g, or t
  misc_feature (1229)..(1321): n is a, c, g, or t
  misc_feature (1499)..(1507): n is a, c, g, or t
gcggccgcaggtgtgggaggtgggcggcctccccgccaagcttcacggggcctggctgcttgggccgcagctccccctccaggtggctcttgtcgagctcttccaggtgcttggggagccccttgtcgtgggtcagactgggtgagctcacagggctgacgggctccaccccttcggggctgtagctgctgccgtggtaacccagagaacggagttccagttcctggatggaaaagggtttactttgagtcttttcccggtgcgggtccgaggccgaggcaggtggcgccggcgggtccgggctggcgtggtgaggtgcgaggttcttcgcaggggtgcgggcgatggtggcgtggccagagacaggaggcactaggggccggggctccgagcccttgctgggggaggaggcgggctccagcccggagcgggctgggggcttggcgaggaaggcatggccggtgtctgctcggggccgctctggccgggcgacccggggggcctccttgggcagcaagacgggctccatgagggtagggtagaccccatcgagggtgccgcccagtgggcagtgggtggcaggtgggaatgtggcagccgggcgaacgggtgaggaggtggaggtggacctcaggaccgtgggcgtgctgggctccacagcggtgatgatacccttcatgcctgtgttgtgaagcacactgggtctctgctggagggcatcctgggtccgaggggagatgggcgagtgctggtgggcatgggagtgggaggcggggcgnnnnnnnnnnnnnnnnnnnnnnnnnnnnnnnnnnnnnnnnnnnnnnnnnnnnnnnntaccaggtctccagatgggtgcgtgctccaccgtcgtggtggacgtgaggatggacttttcccgctncccgatcccggtcccgctttcgatcccggtctcgctcccgctcggacgaggacgtgttggttggttttgtcaagtgtgttggaccttcctggggagagtggggagctgctgtggcggctgctgaagggctggggcgcggtggggagttaggcaaggcggtccatggcggtggctggggtgcctggtgtcggggtcacgagcccaggcaggtgtggcacttgggacgggtcgatgatgcctcggggaaccccacgcctagtgacggcccccgagcactcgtcgcgcctagacggccctccccatatccccttcgctggtctgtcggcgnnnnnnnnnnnnnnnnnnnnnnnnnnnnnnnnnnnnnnnnnnnnnnnnnnnnnnnnnnnnnnnnnnnnnnnnnnnnnnnnnnnnnnnnnnnnntacgcgtccctgccctactcccatgtgtccgtccccccgtcccgccctcccttagggtcggcgccccctcccctttccttgccctccgctaccccccgggtgcgcgggtcccgctgttctcccgccccgccccccctttcccgctcgctcttccggcctcgatcccgtctccctttgnnnnnnnnngtaccctatgcggcgcatgtcgtcccgctcctttccgcggtctcaggtgcgcccgctgcctgtcgttcgctatttcgcgccgccctttctggccaacctgctgcgttcttgccgtgcggtttcgccgcccctcctcacgacgttgtggt

SEQ ID NO: 143546 - DNA, 556 bp, Homo Sapiens
acaagaaaggggaaagaaaggccctgagaaacatgttcaaactttgtgccaagcaaattcatttcactctggtaggctgtgtgtggagacttaatctctggacttccccactaggagtcagatttatgctgcgtttgtgtctaaacggcctccagggatgctgacatttgttgttggagagcagcgagtggtgttcctttcatctccgctgaggggtgtcagcttaaattatgagggatcgctccagcctgcatctgggagtgggagtctctggcaaaggagaggggccgcctctccctccacttcactgctctgctgtttaaaggtttttcttcatcttctgctctccagtactcctcttggttctgggggcagtctcctggctcttttagaaatgtcctttctcgtgaacaaatcgatcagtgtaaattttaggcactgcatattttcatggagaagctgatatccaagtcaggcaggtctgcccctgcacatcaccccctggaaaacagcaacctcaagacttgaaaatgccagagtagccaccccttgtcat

SEQ ID NO: 143547 - DNA, 448 bp, Homo Sapiens
ccagttctctgatgtatgttcttccctttcctctgctgtttccttcttgttttgttctgttgcccacaacctgttttcacccgtttctctttttccactctctcttttgtttctttcctctcaattcttttctaggtttcctgttggttttgttatctgcctatttcccgaccatcttctcctatttcctggggagccctgaggcttttcttctcctgcccccacgcacctccagcggtgatgagctccacacccccacacccattgcaggtgtggcgccacgtcctcccaaggggccttctgcccgcccccgccctagccctagctgtgccttagtcagtgtgtacttgtgtgtgtttgggggagtgggaattgggccccctttctcccagtggaggaaggtgtgctgtgcacctccccttttaattaaaaaaaatgtatgtaaaaa

SEQ ID NO: 143548 - DNA, 393 bp, Homo Sapiens
cagtcctccctattttaagtcagaggccccagagggccctggagaggaccccgtaagcgcgcaaggccagggcgccgcgccccgccccgcactcccgcctgcgggctccattgtgtggccatgtcgccgcgctatctcgcaaaagtcgcggcgaggctcggccgggcccctcctcccctgggggtggccgtctggctcccccaagagggtttagggggagggggaacaccaagagccacagaccgggcctcggcgccactttcagggttaatcagtttgccgcgatgtgtatttggctgcacccccgggaaccttccctggccacccagggccagaggacaatttaaaagcgcttcaaagcctaggcccttctcggagccagcccaagactgg

SEQ ID NO: 143549 - DNA, 615 bp, Homo Sapiens
ttttatcttttgaaatccatctttatacattaggagagaaatataaaaaaagagtagtacatgaggcaatcatacattattactagctagaatatcagcatctaaactttaagttaaactttcatcctcttgtgccttgtaggccctcacagacatcatttgcttctctaactctgactagacaataggtaggcctaggggtttactgaatgtcccagtacaaaaaatcttccatccctttgttccacctgacatccaaagggcaagggtaacctcatgtgaaagatatcctaggatccactggagcatattcatgtcattagatgaagaggaagaaaattcacgatattgtagggtgcaggaactgtgagccaccatagaagaccaggttctgaattgattgtggatcaccttctactctttcttctagtctttatactccttatagtctccgttatgttgagatcaaagatgatttatcatggatattgttgcacatggttttgcagttttttctctccgtgacatttaaaggtagcaaagttgagattctgcttttaattcatcctcacgagatatgaagatttctctaataagactttttttcttgaaaga

SEQ ID NO: 143550 - DNA, 959 bp, Homo Sapiens
  misc_feature (755)..(756): n is a, c, g, or t
  misc_feature (790)..(790): n is a, c, g, or t
  misc_feature (797)..(798): n is a, c, g, or t
  misc_feature (851)..(851): n is a, c, g, or t
  misc_feature (896)..(897): n is a, c, g, or t
  misc_feature (908)..(908): n is a, c, g, or t
cacctggggcctcagctgtaattgtggccactatcccttctatgcacagaccagccctctgccaagtccagttcacatgagtagatgcgggacaccatcgactcgagggggcagggccccccttgggggatggacatggtaaccccaaatgggtgttgcttccgatccagcccacccctcctactctttccaaagcccctttcacagtttgctcactgaaatagcattgatcattatttgaaggaaatgagagagacaagtgcagtttagagtccacagtggtctaggagacttgatgtggctgagtcgtcgggggccacgtgaacacagaactaggttacctgtctgtatgacagagagcatgcagagcgactgagtgacgaccacggcgctgccccaataacccagcgacccgcaaccaagggcctggagtttgttttaaaaagggtcttaccatgttttataaaatggtctcttgatgactatatggaaaatagatgcactgatgaaacaatctgtttaatatatgtgtcctgtgtgtgtctgtatataaaaaggggagccattgtacctaagtctgaagcaggatacagtatgcataggctggagagccttaagacacagttgatctttcaggaaggaatcccgtagcttgccaatttccgaaatctgcaggaggccccgggtgcattcctaactgtcccactgtattgcctcctctggcttcctgcaactttactctgactgggggtggnnctgcgtctcgttgacattcactggtcttactttnctgtgtnncatcgtcggagagctccagggaagctccttcaagggtgcagctggcgccggcncaaatcggtttggaagagaaagctgatgggggccaccccgcctannccgggtctttnaggggtgctgacctcgcggctcagcccctcgttgcccctcgtggcatcatc

SEQ ID NO: 143551 - DNA, 334 bp, Homo Sapiens
  misc_feature (278)..(278): n is a, c, g, or t
tttaattaactcattttgtttatatttatctttgtggtgtgaccttcctttcctggggatggtccagatctagcaggtccaggggaaaggctaacaaataaagaaacagatctctccctgtcaaaaagggcatcgagttcatgtaaattaaaacgtgggcctggcaggcctccacaaggcacgtcagaggtccagaggcgctcataatgcttatatgcttgttgttctgtgatgatttaaaatgccctcatagctgcaggcaccatgggtggtctggnagaggtgccaggtgaaccaggaagctgtgcagcctttgcatatagaagaagaggag

SEQ ID NO: 143552 - DNA, 686 bp, Homo Sapiens
tttccagaaggagtcactatatcctgcttacagaatgatcactttccccaatccactttaaaaaataatgtaggtatgcagggattcttcattatactaacaaagtaagtttataaatacattaaaatccactgtatatttggacgctgaaaacaatcagatcttgagctttgtagttgcctggctcttgtactaagtattgtggtcagtgtttcctactacatttttttccttccatatggtaaaaactatgcttttagttcagaaatttaaatgttattacttgttagcaagtttttgttcctgatggtggggctgtgctcttgtgggtgtctctctctgccttcaaattgtgggcatttacaaaggaaaaggagaaggaattgtaattaggtagcaacaggctctcatttttatgcatgggttagcctgtaaccttggttttcattttttgctgtgtacctggccaggtttctatattcttctagcactctttgtagttttcacaaagtcatgacctaaacacaatatgcagcatgcttctatattcttctagcactctttgtagttttcacaaagtcatgacctaaacacaatatgcagcatggttactgcccctcatcactaaaattatgggtggatgggcccgactggtcgacgcggccgcgaatttagtagtagtaggc

SEQ ID NO: 143553 - DNA, 447 bp, Homo Sapiens
tttgatcatatatttctttatttatcacacaagatccagtggcattagacttttgtctcacccaaaacagtgtggccttcatgaaccactaagcaatgggcagaaaaatggcatgcttccattcttattttctttgttcaaagttagcatctcaggagatgatttgtaagcagcaagttaagagcacgtgaagaatatgggcaggtctatagtggctctgaatatgcaaagggatcctcatcataaacctcatctgaagttttcctttcattttcttttgcattgtcacctaaaggtatctgagatgatataatactgtttgttctactctgattccatgctatttgcttaggaaaagagagggagttagttctcggctggtaagaatagactggtgaatacaatgtctcagtaactgaatcaatggtgggaggacaatttgtgtct

SEQ ID NO: 143554 - DNA, 602 bp, Homo Sapiens
  misc_feature (106)..(118): n is a, c, g, or t
  misc_feature (395)..(410): n is a, c, g, or t
catcctttccacactcaccgactgccattaccaaaacgccaagcacaaccgttttgcagcaagacgcattcgttttattaaaaccaaactcattatgtatttagtnnnnnnnnnnnnncacaatcaggtttttcaccaccaaatttttcgagaggtttcttgagaccattgccttttaaaaaactattttcgacatacaaaatatttatataaatattatttattagtgagttgttattcatcctttggatgcaaattgtaaattaggaaactattttattactgcttttttgtggttaaacactttattttaatataaatgttgagttattttctatcctctttggtgtgcggtagtttaggtctcagtaatgtttctggtatatatgattccnnnnnnnnnnnnnnnncaggtgcttttaggacacaacttttctggggaggcaatattgacactttggtttgtggaacgttggtcttatttatatttctgcattccatccagtttcctacattccagcagccctctgtcccccaatataatgaactgactaaaatcaagagagcaccccaaagttatttgtaaatagctgtgatggaaa

SEQ ID NO: 143555 - DNA, 393 bp, Homo Sapiens
catatagcgtgttcgattctggtaagtactttccagtcttacagccagcctgatgttgtcttctgggcggagtaaaatgaacattgcttggagatgctgttggagatcgcctgcatgcttgttccgtctgtggctgattcttggtgtggatgagccatttccccgtggtagaaaaagggcagcacctttgacagttagaaagctctcgctgatgctcctgggctgtgaccggcattcttcctccccactgtctgcctccgaggcgcaggggctggaggtggtgctgggggtaggtgaccgctggaccgtgaccaaagccatctaggcgctgctgggttgttccgggcagggcattcttgtcctgagtgtgggggacgggagggtgacggagcc

SEQ ID NO: 143556 - DNA, 565 bp, Homo Sapiens
  misc_feature (300)..(300): n is a, c, g, or t
tttttaccattttaaaaacatttacatgttatcttttaagacctgtaaggacatgactagtctatttagccagagggcccaaatcactcactgagacaaaacaaagaagagccaaagttccagagggacctgagagctgggttcaggtttcctgcactgtaactctccataggacagtgtcagtaggatgtgccactctgttaagagccaaataagtcacacaaattcagtattctggaaatgaagacttcacaggccaaggatgtttgggatttagccattgcaacaattcttcatctngtggtgactttttggaattggtcccggttagattggtaatggatctgctgtcatccttgtcagttctctttttcacttctcgagcaaggtgcagaacagcctccactatgttagaaccatctttggcacttgtttcacagaataatgccccatacgtcatggccagtttctctccaaagtgccctgggacacatttttgtccctctgtagcagcagtgtcacgaatgtcagccttgttttctaccagcataatgggaacagtctc

SEQ ID NO: 143557 - DNA, 443 bp, Homo Sapiens
ttttttttagcaacttaaaacaaccttcatttattagctcacagttcttctgcaggttctcagtccagacaggctcagaggagctccctgctcagggactcaccaggcaaaatcagggtgtcaccttggctgggctcttatctggaggttcagaagtagaatccacttccaagctagttcagatcactggcagaatccagttcctgggttgcatctgtggtccttggttccttgctggctgtcaagccaggggggcaccaatgttcttagaggttgcccacatttcttctcaagtggtccattttttccatcttcaagccagttgaatctctctgtcttccccttcctctgctaccagcctcctacaattattatgaagatccagtgagatgaggcaatgggggcgtcacttgctgggagagtgagtaaatacgactcaatcg

SEQ ID NO: 143558 - DNA, 497 bp, Homo Sapiens
tgttctgtttccttgctcttaggaaaagtactgacagctcataattggttgtatttcttaggatatttgcatttaaactagaagcaatgctttcttttcttggtataatttgtcttacatttttgagagtaatagctattcattaaattacatttgaaaatgcaggaagaaagaaaaaattgtctataattctactactcatataaaaccactattcacatatgtgtactttcctctattaacctttcaaagcatgcctcaattttaattgtattcacacaaatacaattttatgccatacattttacttattaatatgctattagcatcaccaatgtcaatataaactccttgtaaacatcaatttaatggttgcaaagtattacatcaactggatatgccatggcttatttaatcactgtatttattgttaaatatttgcattgtttacactgtttagtattgaaaaccacgcagcaatcaatatctttggatag

SEQ ID NO: 143559 - DNA, 591 bp, Homo Sapiens
tttttcagagccacaggaatatacagattctttatttctaaaaaggtacgttcatttctggtcagtgtaatgacatgccccacttttaattggcttcttttctcttcccagaaatggtatatccattttcaccttacacagtcacaagccttcttctctgctgggttgggtgaagacagtgggtgagaattcaatccagggcaacttgccaagcttatcacatgtgaaaagagctgctcagagagaataatcttgctcgcgttcacaaggcggggtgttaagtctcggagaacccagggcattttccatccagagcagcactgcttcagctatccattgatatcaccagtgacccagatttcttctgctcttcctcctttcatgatgagtgcattttctttcattctcatgcttgccatttcatggccataagatggctgctgaagctccaggcatcaccaccatattcaaggcagggaaaaatgaaggaaaagtggcagcaccagctacatctctcaggctgtcatggagaaaattgactgtgctgtagtttcttcttttatttcgtcattcaatctgcgagcgtttaca

SEQ ID NO: 143560 - DNA, 462 bp, Homo Sapiens
ttttgactttttttaagaagcatcctctgcttagctactttcccaaagctttttcctttctcattcctagtgacatatgtgctatgcatcatcctagctccagttacgcagatgtttaaatgagtttggccatgctgcttccccacaggcaggatcaaacaccagttgacccctcttaggagtatctaggagctgatctagaatggtttctccattcccaagatttcagggtactgcctgtggaagttgaggatatttacccaatagaatcaatgactttctttcagaaaggttatcttactatggatctcattaaacaagcatgtgtttgtagcctggtatacccaacgtggttgttttaaaatagaggataccagagcttatacagagaagacccttttcttgctcattagaaccaagggcaatttggagctttcctaaaaatcctcagagatggtgact

SEQ ID NO: 143561 - DNA, 430 bp, Homo Sapiens
ttttgaagcatcacatatttaatgtcaaaaaatttgaattcaagtacaaaaattaacacatgatttcaacattaaaaacccataacacttgttattaacaatacaaagaatatcaaaaacacaaagcataactataaaatgcttaaatacattaacaacaaaattataatttgtgtctaacaaataacaaaaatatctatagttattttcaaggaccacaatggtagactgctttttctttagtactgcacaaaatttgtatcttaatctttttgtctcatcatttctttttacataatggttagatgcttctggtcatataattgttctaatctccagtacagatagtgatccttggtaatcaaatctactataaccattgtcttcaagtgctttaatatttgtgaaatactatttagtaaaattatgc

SEQ ID NO: 143562 - DNA, 463 bp, Homo Sapiens
tttttttgcctggataaaccgactttaatatttatgattgccaagaggctgagagtccttttatgaggtccggtacctccaaacaagacgtgttcatgtagtcttcaaactggcctggagggggcagctccagccagtcggaggcgcccaggaggaaggcctggctccagcaggagggcccacagtccagtctctgttgtcggctaaagctggtcttgcgccgtcagcctctaccctggcctccccaggctctgggatggctcagaggttgccgtcattgggtttcagcaaaaataaatattgtccaggtgtccctgcctcccattgcgtcccctgtgctgctggagtgacatgctccttggagaagttagtaactctgcaggtagggtgggtggtgacaacgcccactacacgcggaagttgtacattggaggctggcgaagttgggagcagaggcatatcc

SEQ ID NO: 143563 - DNA, 211 bp, Homo Sapiens
atttattaacacattttatttggttaaaaggttattgtttggttaaaggctactaggtaaaaagaagcttaaataaacaggaaggtaagttatatgatgaccaaaatgactcaaaaagtttaatgttacaaaatagctattttatgcacatatacctattaataaacattaagaatggacaaatcaacactccatgaaaggccaaagaaac

SEQ ID NO: 143564 - DNA, 304 bp, Homo Sapiens
ttttgcacgtaaaaatgattttataaatatcaaaggtttttcatgtttcctacctaattgggttctccccataatcttgtaatttgaagtggggcagaagtgtttaacccctttggcagatgcagaaaacggaggcacagagagggcgtgacttgtctgaggtcacacgtgaatcagtcatggagatgggaccagaacccaggcttcccagctccaagtccagggctttttctgcatctgatgttttcaggggtgagaccagggaccatcagggcacaaagaggggctctgggtgggcagggca

SEQ ID NO: 143565 - DNA, 435 bp, Homo Sapiens
taacaggtttattgagaaataatgaacacaccatgcaattcattcatttaaagtatacaattcattaactttagtattttcagagttatgccgtcatcattacaattaattttagaacattttcatcaccctaaaaacaaaccccacatcatttagccatcttcactagttttcccttcctccctcagccctagggaaccacccagcttctttgtatagatttgcctataagcctctgaaataaaaagcaagtggtctgctgggactggcttatttcacttagcataatttttcatgctggatctgtgctgtagcaggtatggatgccgggtttttgctccttagttcagctacatctgggttcttctctcgtgaccaggaaaaattaagcatgcagacacattgaggagggcagaatttattatgtgaaaggac

SEQ ID NO: 143566 - DNA, 733 bp, Homo Sapiens
  misc_feature (483)..(558): n is a, c, g, or t
tttttttagagacaaaggaatttattattcatagcacagcaagtagcatgagcatcatgtttatattagttctccttgcctcctcccaagtccaatgcagaggactcaggtggatacttgcataggccatgggttgcttcacaacagaggaacacttatagaacccacagcttggggaacttgccattttacaacaagctgaagcaagcaagttctttatctgagtgaagggtagtacctcatccctcaatatttcttgctgcaagcacagtcctctttatccactttggcaggtgaaatttctccctctggttttcttcacagatgactttttaagcaacagcactatagagcaggccagcaagttcagttatctgctttgtggattagttgttgaatactttattgaaagttggtttccctctgttatttaggacccagctgtttttctcccattattctttgccccagtcaacagcatcnnnnnnnnnnnnnnnnnnnnnnnnnnnnnnnnnnnnnnnnnnnnnnnnnnnnnnnnnnnnnnnnnnnnnnnnnnnntcctaagatggatgatttagcttgcgatctgttcaagatggccacagaaacacttccggtatctttccgcactaggcccgccccaatttgcgtgtttttaccgtgcagagggagggatttagagttagcctttgattggtcagcttgactggcgacctttcccctctgcgacagt

SEQ ID NO: 143567 - DNA, 1061 bp, Homo Sapiens
aaaaaggggctaagcggccctcccggggttttggggggccaaaaggcttcttcattccccgggtttctttccgcctggaacgggcctgggaggcgcctttgggcaattttccccgcccattcttgccctaggtgggcccgattaaggtccggaagacctcccggtaagcggggatgttcttttcgaccagccagggcccaggggaagttccctcttttaggtcctgcccgaccagcggggcgatgccagcttttgcagaagttgtcgcccacactccaggatgacaggttccttcagatactcccaggcacacagtagcagctcggcctccacctgtaagttctccaaaagccgcagctgtagaggctgcagaggccccagcctctaacagacttgtctctgccataatttaactctgctttctcttgttagaaagagaagcttccttcaactctagctcagcatacttctcctgatccaggctcattccacttatatcttagaaccaatagttccagacactgtatcctcgtttgacatacgtttctaacagacaagaaaggaatcggaagcggaagcccgcgccgaggctcgtgtcagtggaagctggggtgtcggcgggcggccgcggccgggtctagcggtgcctgcggaagaaggaggaggagggctggcgatgagaagcagcagggggaatcaagggcaagaagggacccagaggggcaggtggctgagatgctggcgtccaggtgacccgaggaatcctctggagatacaggcccgcgcatgcgcgtgctcgagcgctgaagcccattgcccgcagggcgctggactggcgccccggccggcgaggctgtctagtccaggctccaggccccggctctggccaggcgccgccgcctcccggtgcagctgaaagtcgacgaagagggcggggcgggggcggcttgtggacttccacacttttcctctcttccctcgtgcggaattcgccacccaggcctcgctacttagtacttattttgtggatagagggggagaccgcggaacgggaactagac

SEQ ID NO: 143568 - DNA, 342 bp, Homo Sapiens
agtgaggggtgctggaggactggcagccaggccacgaggggaacgggacctggaaatccccaagcctgggtatgagaaggcagccgagtgtgcggcggcagggcaaggttggcctgggccgcccagaggtcttcagacccaggggcgaagctggccacgacccagccccgcggtgaagccgcgcctagccttggtgctccctgggggaagtgcagggccacggctggcccggttccccagtgtcctcccccagcccttcgctccccaactcgagagccaaatctgtgagggcatgggctggagcccctggctgccttcctcttgcccccatcccttctggcc

SEQ ID NO: 143569 - DNA, 525 bp, Homo Sapiens
tatactatgcttacacattcatatcttcatttatgtgggtcttcttgtttaaaaacacaaaggcatatctatacacattttcctgtgctttgctttctttcacttaatttatctcagagctggttccacattagtacataaactgcagctttgctctttttaacggtggcaggccattcctctgaaagatggcctgatttatttcaccagttcctggttttgcggctcaggatgggaaaaaggaagtctgagtgaatcgcgttgaggttactaggaattgccatgctgcccacctcccgaagtgttaggaggtaacatctcatcgtctcatcgcactccagtggagtgtcgcgaagttgcaactcggccccaaggcggcccgcacttccacccgcacacaaaggcaggtcgcagccccgcacgcggggacagggccagcaaggggcggggaccctcggggccgccgcctccgcagccccgcgtgtgggaccctggggcgggccgccatcttgtggtgcggccgca

SEQ ID NO: 143570 - DNA, 400 bp, Homo Sapiens
ttttggattttaaaagtgattttattaaatatcaaggagatacataacattttggtaaatatgtaaagtgtaagtaataattaaagatttttagaacttcaccaaatgtcaccactgtgttggtgggtaaaatgctacacttgtttttctaattagaacaccctatgcagtgacctgagagtccaagggcttcatgttttcagagcgggtcacttcaccttttcagccatgacagaagcaaatctagccgaggataccctttcttttcatgccaagtgtgctttctgcataataaggtaaaaggtctgctagactgatgttcaggtggtggcaacatactactataggacaagatcctggattgggagaatatggaatctgggtttggttttcttcttca

SEQ ID NO: 143571 - DNA, 483 bp, Homo Sapiens
ttttggattttcatcagtcctttactatcattaacggattcctgcttcgaggtggccatgtggaattgcatgatccttggttctcttacttgaatcagctttttagggttcccccttggctccagagcctcaggctcttgcccattatcagtggatacatttgtttcttcagtcaagcctccgactaggctaactgcttcctgctgcgcagagggaagtccctgtttgcttttctgaagccagtggtttgctgcgcaggtcctcagaagttctgtgtttttcccttcttcctagcagccggagaagaaagtggaagatgatgctttgagtgtttccactcctgaaactcagtctctcgactgttctttctcatccagacctggatggcattgagttgttcatcttgcagtttactgtccctctcttttgagaaagcccctggtagcctttccactggtgatttctttcattgaccagagctag

SEQ ID NO: 143572 - DNA, 872 bp, Homo Sapiens
  misc_feature (94)..(111): n is a, c, g, or t
  misc_feature (601)..(601): n is a, c, g, or t
ggcaggactcacaatcctcctgaacagcctagaaaactgggcccagatcagtaaaattttacaaggataaatgcaaaaccttacacttaagttnnnnnnnnnnnnnnnnnnccaatagcctaaatacaaaattgaggataccaggtttatgactcagaggtttcagtcaataccatgacagagaaggttaaataaaagcacaatattgagctacatttacagaagcaaaattgagcagactggaagagacaagagtttcactgtattctgaaatgattagtatctggagcaccatggataattgagacaccacaatttaagagggaattgtaaaatggtgattgtaaaatggtgatgcctagagaaggccaaccaaattggtgaaggttccagcaacaatgaaggagttggaaatatttaatctggaaaagaaaatattaagaatatatatagttgccatttgcaagtggccaaaagactaatatagaagggtaaacaattgttcagcgagaagagctgagatcaacagatagaagctccaggaagtagatttcagttccgcctaagaaatatggagtaaccggtgccatccaagtgtggnctcaggcatcaagctgcctctttccattatcctctctccattgatatatttggtggttggacgaccaccattgacagtagttgagctacagggaggtacaagaactggaagtgaagagggaatggtcagcaattggaaggctaggaaaagaaaagttttgatgcccacaaatgtctgcttgcagccgaaaggaagtactgtgatatgaatttcaagtactttgacatctgtcattacttctccattatacattaaactgcttctaattatg

SEQ ID NO: 143573 - DNA, 755 bp, Homo Sapiens
  misc_feature (33)..(33): n is a, c, g, or t
  misc_feature (115)..(115): n is a, c, g, or t
  misc_feature (154)..(154): n is a, c, g, or t
ctgggacctatcccctcacatctaatgaatganttataaaatgtatatgtctatgaagcttcggggtagtgcctgtaatcagaaaacaacttagaacccttttgtttgtttccanttgagtcattactgcctgccactaagaaacgtgcttgantctaataagtatgtgtgtaccgtaaagaatatatcttatctggagctcagcctcaatcatgtcttaacaaaatgacaggtctcagaaagggggagctcaatagctcaaaagtgacaagtccttttcacagcaccgttctcagaacacctctgagtaacgtgtttgccagtagctattctcactgatgcactgatggccctgaagaagcggatccagtcacataggaaaggaggctgtgttagtgaaagcacatggaaggtgttgctttagaaaggtagtcaggaaaaacattcaggaatagatttatacaccattattgttttatttttaaattttcattcactcttctgtttggatacttttgctaattaacgtcctatgttaatttccaccaagctataagtccatagtcagtaaaacattccccttgggctgtcatgagctaaaagcagtgtcatctccgcatgttggagcagccaagaaatagtttggtactaccgacatcgtctaatccatgtcacatcctcatacaatttaattgctcaaccatgcatttaaaactcctcaagaaaggattggtactgcaactgtaggtaaactg

SEQ ID NO: 143574 - DNA, 394 bp, Homo Sapiens
ctcatctcgcaacacccctctttgttctctatggcctagacacactggctttcagttcattacatgtcttgcctcagaccctcacacactgtcctctctgcctgcaacactcttcctttcactttccacctagctgatcctaaatgttccttcctcagggaggtcttttctgatttcttggtgggtcaagactttctgataaatcagttagcaccatgcattttccagagtttttattacaattgtaaaattatggctgtaataggctggctgcgctgctagattgtaagctcacgagggcagagatcttgttcacatcttgctcactgctatattctcattgctgagcacacagttgcagctcaataagttttgaatgaactccaatgttaaa

SEQ ID NO: 143575 - DNA, 311 bp, Homo Sapiens
ccgttttagacattttaattcactgtaacagtaaacagcatggtccctgacctcaagttgcccagggttcagtgggagaggctactcagcaaacaagcagccacggcaggtatggcgtctgcagggaggcagctcaggggctgtgggagcacgtcggaggtgcagcttgaactagtctggggaaacgaagaaggcatcctgggggaacatctgaggcttgaaggataagaagtaagaggataaagtgttcattcagcagatctttacagagccccgtctctgtgccaggcactgttctaagcactggggaa

SEQ ID NO: 143576 - DNA, 487 bp, Homo Sapiens
aaaaacatggagtttgtctttattctactttttaaaatgtgaaatgaagcaggagttgaagaaactaaggctcagaaaggtaaagagtctgttggtcagtgacagagaccagatttgaacccatgtacttcttaggacttgctctgctcacgatgctgccttgctctgccagcaagatatgagggagtggtgctcggcgagggagctagaaggtgcagaaatcacagctgctgcacagaaagatccatgcttcaacttttgtccttgtttaggctgcaggtgctctctgcaaatcccaggaggaacaagcagctaatagggtggctaggttggcctggcatcttgtcagatttgttgattttggtttaaggttattgccaaactcagagtagagcctgggtgcagcaggatctctgcagtgggcttgaatgcctgggcccaaacaaagtgcatgagtgtctaaaaatagtatattaggctgggtggg

SEQ ID NO: 143577 - DNA, 462 bp, Homo Sapiens
tagcaagtagccagcaaggagaagacccagaagtcccacacctgtggggccaggatggctgcttggttgctaaacccagacagggtccttccagtgcatctgcccctgtcaggctctgtctcgagactggggatcttccaggctggcttcattcgcggatccactgcgcaaaccttgatgaacctgaaaaaagcagggtggggtggggtgaggaaagggtgggcctcgctagaccctgctcgcacccagcgccacgcaccgctctctgggcgggttcgagtgcgcgcgccgggcggggcgggacccgggggctgcggtgtttcgagaagcacgtgctacttcgcgcgcagcgcccccggagactgtgggcttcctcgctgcctggtctacggcagggcgggcgcgggggcgtgtttcaaagggtagggcacacagtgagacgccgggaggcgggatggatcc

SEQ ID NO: 143578 - DNA, 803 bp, Homo Sapiens
  misc_feature (698)..(730): n is a, c, g, or t
tttacagtaaaatgttttaatgtaggaagcactaaagtctttgttccaacaaaattaactcagagaacaaattattttacatatgtatacagatcaatcaacaaaagtacacattataacaattgctaaacactgtccataaagaaaacatttcaaatgagaagcgccatcgcggttttctccttctgggccacccagtggaatgagggccctcgccaggggctcttcccagacgtctcttcacaccaaccggcttccttctgatggccccattttcctttaaaaccagttctcatcaaatagggtgttttatgcaccctggcaaatgatcattttgacaaggattaaaactgtaagctaaacagatgacacaaatgacaattgggaataatttttagtggggacagaggctaaatactaccccctccccttttctacttctaaccaatatcttgagcattcagtgggacaatacagtcttgctgggtctcttgaaatcctctagcaagaagccagccaggagaagacccagaagtcccacacctgtggggccaggatggctgcttggttgctaaacccagacagggtccttccagtgcatctgcccctgtcaggctctgtctcgagactggggatcttccaggctggcttcattcgcggatccactgcgcaaaccttgatgaacctgaaaaaagcannnnnnnnnnnnnnnnnnnnnnnnnnnnnnnnnctagaccctgctcgcacccagcgccacgcaccgctctctgggcgggttcgagtgcgcgcgccgggcgggcccc

SEQ ID NO: 143579 - DNA, 174 bp, Homo Sapiens
attggaaacggcttttcttggccaacagaacacttgctagcggttgaatcttagagaaaaaagcccgggaggggtggggagaatttcgaagatgtatttcatctcaagcttgctctttctcttcctttggttattaaggtcactaaataaaggaagtgccttggaaaacccaaa

SEQ ID NO: 143580 - DNA, 546 bp, Homo Sapiens
tttttatttgattgcattttattgtttccttcagctcaatgtgtacctgatattggagggctctccctatgggttgagattgagacatgttataaatgatgtggtttttattatttctgtgggctcctgtgcagccaggtgacaatcctgaggctgcgtaagctggaggtcaggcccgagttgccctgttctgactagcagagcccagtgtccacaccgtggcacagccacttctgcctgcatcatagaatggctggggcagctgctgttgtgccgacttgagatgcctgttccatgaggagatcagtaggcattcagcacggctatcctggccttttcacacagtgggtctagtttaccatcgcctccgaactccaagtccttaatgttgcagtggaagatgacttcttcattcaccatgagttccaccacattccagtcttctatcttctctaggatgacctcatgtccatctatggccaacacagcttgcaggccctgcaggcggaaggtgtggtgctccaccggtaggcctgccgcgctgta

SEQ ID NO: 143581 - DNA, 557 bp, Homo Sapiens
ctggtggctgtgctaagaataaggagtcgtatatcatggtctacggggccacaggcttcatcaatcacaacgagtctctcatcacccagacccagttcatgaccgcggtacgggcagaggttcatcaggtaagtgacttcacacccaaggctagtggtcatgcattatctagactgcctgcatacctaggcctcggcacgcttgagggaggccctgagtgatgtggtgggcgacctcaaatgtcgtgtgctccgtggcccagctggctggtcgactgtctgctcagggtgcccgggtctacgcctacgtcttctgaactcggtggttccacgctctcctggcccctgtggatgggggtgcctcacggctactagatggagttcatctttgggatccccttggacccctcttgaagttacacggcataggagaaaatcttcgcccagcgagtgatgctatactgggccaactttgcccgcacaggggatcccaatgagccccgagaccccaaggccccacgatggcctccgtacacggcgggggctcatcagaacgtt

SEQ ID NO: 143582 - DNA, 1031 bp, Homo Sapiens
  misc_feature (137)..(137): n is a, c, g, or t
tctgtcaagaagatgatcagaccttggatcagatgaactcttagaaatgaaggcagaaaaatgtcattgagtaatatagtgactatgaacttctctcagacttactttactcatttttttaatttattattgaaatntgtacatatttgtggaataatgtaaaatgttgaataaaaatatgtacaagtgttgttttttaagttgcactgatattttacctcttattgcaaaatagcatttgtttaagggtgatagtcaaattatgtattggtggggctgggtaccaatgctgcaggtcaacagctatgctggtaggctcctgccagtgtggaaccactgactactggctctcattgacttccttactaagcatagcaaacagaggaagaatttgttatcagtaagaaaaagaagaactatatgtgaatcctcttctttacactgtaatttagttattgatgtataaagcaactgttatgaaataaagaaattgcaataactggcatataatgtccatcagtaaatcttggtggtggtggcaataataaacttctactgataggtagaatggtgtgcaagcttgtccaatcacggattgcaggccacatgcggcccaggacaactttgaatgtggcccaacacaaattcataaactttcatacatctcgtttttagctcatcagctatcattagcggtagtgtatttaaagtgtggcccaagacaattcttcttattccaatgtggcccagggaaatcaaaagattggatgcccctggtatagaaaactaatagtgacagtgttcatatttcatgctttcccaaatacaggtattttattttcacattctttttgccatgtttatataataataaagaaaaaccctgttgatttgttggagccattgttatctgacagaaaataattgtttatattttttgcactacactgtctaaaattagcaagctctcttctaatggaactgtaagaaagatgaaatatttttgttttattataaatttatttcacctt

SEQ ID NO: 143583 - DNA, 481 bp, Homo Sapiens
tttttgcaattttatcatttttattattataaccattattactgtcacaacaggaaaccacggagtcctggccaggcaccctaagcatcttacatgcgttacattacttaatggtttacaacaaaatattagtcagaaacgttcattaaagataaaacacagccaaagaatctgccgggaattaactgtgggctactcgcatggtactgtgaatagcacaccttctgcttttatgagctgaagggcaagtaagccttttccttaccatgcaaaaatgcggacacctggggcaggacaccaggctgctccccgacattaagacaatgaaacatgagggctgatgctctatagaagcaactgatgcagaggttggtgtacataacctgattacagtatccccttggtccggggccttggatcaaaagggttaaatggttcacaataatactgtaaatggtatttttttctaaaaatttactgt

SEQ ID NO: 143584 - DNA, 588 bp, Homo Sapiens
ttttccagccataacaacatttattagttctctggtaaacattttaacatttttgaagaaacagcaaagtgggcatgtatctttaatgtggagcactggggacatatctggagacctacaactctgaggaacagagacaagtgatttgggggatattctcgattaacaagccaaagaatcaggaaaatgggctggaagcgggtagccacacacctctttccctgtgtggggcctctaatatgtgactgatgccttccttttctgtgcctttgaaatctcatgcaagattggctataggtgaattgtgttacgaaaccatccaagttcttctagattttattgtgctatcgcaagtctctcttctcaattcaaaaagcagttatccagaggttctttcaccactctcttttcttgtgtttcacaggaagtgggacaacagcaagcttctccggttgcttgcactataaggatttctcatctattaatggtatgagctctttcatgtgctctacatgaactggcacgaataaaggctatgccacattgcttgcattgatacggatactctacagtgtgagtcctgtcatg

SEQ ID NO: 143585 - DNA, 612 bp, Homo Sapiens
  misc_feature (53)..(179): n is a, c, g, or t
acaatcaaggctcaagtaatctcacttaatttttatttggtttaagaaagtcnnnnnnnnnnnnnnnnnnnnnnnnnnnnnnnnnnnnnnnnnnnnnnnnnnnnnnnnnnnnnnnnnnnnnnnnnnnnnnnnnnnnnnnnnnnnnnnnnnnnnnnnnnnnnnnnnnnnnnnnnnnnnnnacagagtgaatgtgtggaagacaatttttccacagactgggaatgagggaataatttcaggatgattcaagtgcattacatatattgtgtactttatttctattattactacattgtaatatataatgaaatgattctacaactcactataatgtagactcagtgggatctctgagcttgttttcctgcagctagactgtccatctagggtgatgggagacagtgacagatcatcaggcattagattctcataaggagagtgaaacctagatccctcacatgcacataacagggttcatgttcctaggagaatctaatgctgctgctgatctgacaggacatggtgcttaggtggtcatgcaagtgatgggagggctagaaatacagaagaagtttcccctcattcacctgttgctcacctccggctctgtga

SEQ ID NO: 143586 - DNA, 511 bp, Homo Sapiens
tttttttggaaagctgagaaatgtttattcccagaagacagtggtgacacgatgtccagccacctgtcagccagtgatgcagggttggtggctctgaaatgttaggtctcccagcccggacacatatggctgtcttctggtgactgtttctctcaaactaaccacgcgggtccattagaagctgccatgctctcagaggagcccccgccacattctgccagcctcagctccagaggtgttgctgacctggggggatgctgcttcctgcctctgtggctttgcctgttctggatgtttcattccaatggagtcatacggcatgtggtcttttgttcaaatccagttttagggcagtcctggagcagcactcaccactcagtccgaggtggcttccctctgtgataaggtcccctcaggagtcctggctgcctagtccctcagcctcaccaagggcactttgctaaggcaggtgggtggagtggacggccaggttccatgtggcatggtcaca

SEQ ID NO: 143587 - DNA, 473 bp, Homo Sapiens
aaggaggaagagctcagggctcccaaaactttttatttagagggaagaatgctagggagatgggtatgcagagggttgaccaaattggaagaaaatatttattctgtagtttggtgttggaaaagggaattttccaatcagccacacctcagtgttgcggcaaaataattcttggctcccctggaaacgcatgggcaaggtagggcagagctgctgctgctgatactgccaccaccctgggcttcctgctgactctgggctactccctggggacaacagatttgcattgacgtccggggctgtccagaggccctcaagagccagttgtgagctgagcccagtatgggaaagatctaccttctggaagctactactacgtggtgcttggaaaggtgaggatgggggactgaccccaggaaattgctcgaaactccgcatctggtgggatttccagaaaagtcagtgggagacgg

SEQ ID NO: 143588 - DNA, 686 bp, Homo Sapiens
gactttatgtttctgttagatatgaaatctctttgatgccctgatttcttgttgccatgcatggctttgctctgcaatgttccaccagccctttgagaggcgtgtgtcccagtgcctccagttcacaagggagcctgggtcgacatgctctttcttactttcaaacccttcctcttgtggagtcccgcccagggcaggccagtctcgtgggcctgggcctgggcatggacatggcccagctctgagggcgggggcatcaggggcatgagtgggatcagcatggccattggcatcagtggcatcagctcctccgaggccccaggggggatgaagggcagctcattaggatccaagtgggcgtcactccagccctcggagctatcactgcaggtcctctggattggtggcttcattctcagatatggtgacaatctcagtggtgtcttctccagggttgctgtctaagtcccctgctcctcggctggtgcctctctcaagtgtgctggctgtgtgggcatctgctgcgccctcctgcttctgcctagagccagccgaaggggcacagccgagcccacacatcttagctctgccctggccagtccagaagaggctgagctcttggcggcaggcagccacagccaggctggtgagcagggtgctggacactagtagagcaagccaggttg

SEQ ID NO: 143589 - DNA, 421 bp, Homo Sapiens
tttgaatatttactagcttttattttcaaaaatataaactcactgtaggaattaagcacattcctcttgtggaccatttggattaaatcctttccgtgggcagagatcactttttatatttttcttgttcccccaataagccttccataataccaatcataaaatacacactcagatatttcatggaatatgtaacaaaccgaacacactggacatacttgagataaaataaaaatctaaactaaaagtgatatgtattaatttctttccttattttcatgtagcatcctgttaagatgcccttagaagctcttcccatgctttaattgcatgtttgaattcagcctatatttgttccatgaacgaaacaatatattgcaacttgtaaaatgaaaaaggtaaaataaaaataacgaaatat

SEQ ID NO: 143590 - DNA, 547 bp, Homo Sapiens
  misc_feature (219)..(249): n is a, c, g, or t
tgtaaaaggtcacacattgactcgtcaaagcccctctccagactaattcaattcagaatctcacagatggggccacagaatcagtattttttgacacaacctcaagtgagaatattgtgtagacaagattggaaaccactgatttagatatagaaacaaaggctaatcaactgtgagaattatggtcacagaatagaaagtaactattatgaacactgnnnnnnnnnnnnnnnnnnnnnnnnnnnnnnnagttagaggaaggagaggaagtaaaggaacaatcattttctcatgattattattatttcagagtaaattgtgagttatttcacaattcaaaaagaatggactgttttaaaaaattagtaatagatttcaaaatgtccattttgtaaatcgtttctgaatactttgtcaacagttactcatcattaatggcttatacttcactaaaattccatggaaaaccaactagtagcctgtagagtcacataggagagaacaagtgaattctttgggtggcgcaagcatagatgttaggactgac

SEQ ID NO: 143591 - DNA, 442 bp, Homo Sapiens
tttcatggtacaaaggcatttggtcttacttttattttgtattttctttgctttagaaaaaagctggggctcagaatataagatccagattagcagttaaacaaatggctctttaaagtattaccaacccatgaacaagtgatcttggagattcaaatgcagctcgggattacttagagctttttaacttattagctagggccaggtttcaggaggccactgaatctggcaaacatgagcatgtagagatgcttccatgggtcccaaagaagtcttgtatacttggagttgcagttaacttcagatccttaaaagcaggaagcatgatcatactctcgagattgattgatgcattttaaagttatacaggtgttccacagcaggtaagtagtttcaaaaccttctatgcagcattcagcgtattacaagttctttgcttgat

SEQ ID NO: 143592 - DNA, 354 bp, Homo Sapiens
gagagacaggatcttgttatgttgcccaggctggccttgaacacctgtgttcaagccatcctccctcctcaaccttccaagcagctagaactatgagcgtgtgccccggttcggagctttattattttgttttgtcacaactctcttatatagttaatatacctttgggagaagcatcacacacatacaaaatgttgccaaccttgacctgattggcatttctgagatgaagagacccacgagagccaatagattttcctctccccaacattcaagcaacttccttccaattgtttgctaattatgattgggaagttggggggtgtttctaaattagggacttccttaaaagag

SEQ ID NO: 143593 - DNA, 576 bp, Homo Sapiens
tgaaagaaaatgtaaacattttatttggcagttgtttctgtacacatgaataaataaatggaaaagtacatattaatatttctttttggagtaacagataccattaaacgcttatttacacatcttcactgcaaagaacagttacacaattaaattttgtcttataaaaggtaacttcccacatcactggactggacagttaaggatggagatactggtagtgcttggttctagcagtctcaatgtttgaaaggcattcatttgcaagtgtgataagaagagtcatcatgcattgagttcatccgggtcatgtactgtagaaaatttctgatggcagccacagaatttggtgtctcatgcgcttaagtcaactatgacatgtttgtaaatctgtgtatttcccttaaaactgtaatgttgtcataattccggaaggtcttttccacatggtcccattcaaggaaaatgcatttttgcattaatgggctgagcgatgactacatactcattattcaaataagaaaaagtgtctatggacgatgattgataaggcaggtcttgagactttgcaaattc

SEQ ID NO: 143594 - DNA, 505 bp, Homo Sapiens
ttttacgttttcagttagtgccatttttaattctaattatcttctgttaggtaaagtggaggatttctagctttgctgggccaatacattaaaaaacattccaagtctgtcctggttgtctatattcccattcaagtacactggcttaatccagttttggagacattcttgaccaggatctactttgaaagaacaggacagactacgtattcaaaacaagagcgccttcttaaagtgcaggctcagaagttgttcaatggccaggaccttcatttgtgctggcagctctggtcctgctgggcatggttaagggcgaggctcgcagcccgcacggcttggtccttcaggggtgctgcgtcaggctgacgctccggaacagttactgggacaggctgtgagcgactcaccaggacagttttatttctgtgctgagcttgctgcttcaatggaggttccaaatcaataagtgtagagaattaatgatgtcctgattttctgttggtgt

SEQ ID NO: 143595 - DNA, 472 bp, Homo Sapiens
  misc_feature (448)..(448): n is a, c, g, or t
tttttactagatattcagaaaaaagattttattcttctgctgaaatgtttgaaagtgaaattattttgtagagcattttccctttaaactgcaaagaagccccaaggtcattggtacttggaagtccagggagaaagagcgctgggttaatgatggagaaaagataggtgggcagactggggcgtagtcccttggtgtggacgccccagcgtgctcttatttcagtgctcaccctgttacgtgtgtctggggccactgactttctcctgcaagctgtggatctgaatttaactcaaatggggacatgggggcaggaaaagggacctgagagttctaaggggtggggatgggaaaactggtaaagaaggtggtttgtgggttttcagatgcacctagtaaagggaagtgctggggggaccagcctccctaaccaagctagctagaactnccttaactttcccacctctactca

SEQ ID NO: 143596 - DNA, 445 bp, Homo Sapiens
atcgatataaggtattattttaaaagctattagtattatattacatgccaagtatgttaatcatgttctagtttggggacagaggcgcatttactcagacatggcctacgatgtcctcttgaagcgcttttcttccacccaggctccttgtgctggaactgggcagatggtccatcttccttaaaccctagaggaagaaggaagcagtttgctttcctcagaggagacctggatgggacttctcaaattcactctaatgtgtgaggcccatttctctctctgtcttatttggctctcgcagcgatatgaaagtgaaagttcacatagtgaagttggaaaattcagtgcattgccataaaaatactgatttggtttcttctgcgctagatctggccctgtctgccaaagcttgttggccgtcattaggcagggcaagtgctctttg

SEQ ID NO: 143597 - DNA, 568 bp, Homo Sapiens
ctccataaggtgtgccaagttaaagaagaaagggctttattcagccaggagcttcagcaagactcatgtctccaaaaaccgagctccccgagtgagcaattcctgtccctttaagggctcacaactctaagggggtccgcatgagagggtcgtgatcgatggagcaaacagggggtacgtgactcggggctgcctgcaccggtaattagaatggaacaggacaggacagggattttcatggtacttttctatacaatgtctgtaatctatagataacataaccgattaggtcatgggtcaatctttaactaccaggcccaggatgtggggccaggctgtctgcttgtggatttcatttctgccttttagattttacttctttctttggaggcagaaattgggcataagacagtatgaggggttgtctcctcccttaaaatcacgaactggtggtatagtgaggagctattccttccaaaatcttttaaaaacattactggtcatggctgagaaaagtgtctctggagtcttaaagttagtgaaaataatttttcccaatataattatc

SEQ ID NO: 143598 - DNA, 463 bp, Homo Sapiens
attgtttactacccatattatcttaccttttgaatttgacctgccccttgagatattggaataaaatgagatactgcaacaggatgtgtcgacgaaagttactgtcactcagttgtaaatccatcagctactcaagaaacaagcaaacacatacgaaaacaacacattaaaatcaagtttttcctaaaggtacaaaatgtgctaatatagaaatggaagattccaattcaatttaaaagccatttgttgagagttcactgcatgtgaggcatttaccgcacaagccccaaagacagcccagtcaaggtttcacttagatttcttgactgttttatgccatgacacattcttgctggtggataacaatgatctatctatggtccagacatgaggataaaataaagcagaaatagaaaaaagtaagctgggcatggtggcacaaagcctattatagtcccagcta

SEQ ID NO: 143599 - DNA, 452 bp, Homo Sapiens
  misc_feature (393)..(393): n is a, c, g, or t
tttttttatttcttctcctttcttttaatcctagtcccagataaattgcaaaaaggagtcaagcaaaccttgtcattcttcgtcaccttttgtctggatgatccttttgaataggatcagccaacaagcaaattacaagtgttggtgattgggaacacacaccccagaaatccaagaattctagagccccagagccttccaattttggcatcttccaagactggcatcttagatattcaaactctcctgttctggatcgtccactggccctgggtgcacggcaaatcatacttctgcctcctcagtgcataggcatcaaaccagagggccaagccgtagtccagagagggcaccgtgaggtgccaggagcagtgggtttggggtgagtagtanctggggaagtacggggtgctgaggacgccctgggagtcgagcctgttgtccagcgtcag

SEQ ID NO: 143600 - DNA, 885 bp, Homo Sapiens
catgcgtgagtgcgtgtggtgggtggagccaggcgccggcgtcttccagttctcctccaagcacaaggaactcctggcgcgccgctggggccagcagaaggggaaccgcaagcgcatgacctaccagaagctggcgcgcgccctccgaaactacgccaagaccggcgagatccgcaaggtcaagcgcaagctcacctaccagttcgacagcgcgctgctgcctgcagtccgccgggcctgagcacacccgaggctcccacctgcggagccgctgggggacctcacgtcccagccaggatccccctggaagaaaaagggcgtccccacactctaggtgataggacttacgcatccccaccttttggggtaaggggagtgctgccctgccataatccccaagcccagcccgggcctgtctgggattccccacttgtgcctggggtccctctgggatttctttgtcatgtacagactccctgggatcctcatgttttgggtgacaggacctatggaccactatactcggggaggcagggtagcagttcttccagaatcccaagagcttctctgggattttcttgtgatatctgattccccagtgaggcctgggacgtttttaagatcgctgtgtgtctgtaaaccctgaatttcatttggggtgggggccctgctggcaaccctgagccctgtccaaggttccctcttgtcagatctgagatttcctagttatgtctgggggccctctgggagctgttatcatctcagatctcttcggccatctatggctgtgttgtcacatctgtcccctcatttttgagatcccccaattctctggaactattctgctgcccctttttatgtgtctggagttccccaatcacattt

SEQ ID NO: 143601 - DNA, 416 bp, Homo Sapiens
tttttttctgaaacaaagctgaatttatttgcctgcctgggaggaaagagccacatcactcaagcacaagtttggctggtagctccatgtagtacttgaaaggaccagatagacaacaaaggaaggaagtagaccaaatctgatgatattctgagttcaggtctctagttggcacccaaagctaaggagaaactcttctttgcaaccagtcgttgcactggttcgcttctttaaagtgcaggcaccatttccaattatgccccaggatgatctgatggacttggtgtcactcaggaaattcgatgtgttttcttgaagttggccaagtctttctttaacagcatcagtagcacattagtaataggttttgtcaagtaagattaaccagttacctgcctcttcactgatgtcttttg

SEQ ID NO: 143602 - DNA, 607 bp, Homo Sapiens
tttttatgcttttcaacaagtctcggttttcatagagcgggcttctttaatgtggggtacacccatatgggtgtttctggggcaacagtgtgtcacagaacaagccaattaagtacaggcgagttaatggccttgtccaggttaatagtgaagccaagcgcctgttgctgagtcttcaactcttcgttagctcaaatcccagttgtaactttccactagggctgtgagttgtgactttccttaatccaccagatagaagcagagcaacagcagaggctgtaaatactctcatggcatgattgtgaaggttacatgaggtcatgtgtgtgaaaggaccctctctctagtaggtgctctttatgctcactcctttcctaatgtaactgactttttccaggtttgggatgatcttctaaggtttctcaaatgattgtcatgactgatgaattcaacacaaagagagctgatgaggaaagccaggctttcttcactctcctgagaaaaaaattccctcttgggtaagacctgccatcaggctgagatcccatccttctttccagatccttcttccatggtggcagaggcttcttgttgctaatattggtct

SEQ ID NO: 143603 - DNA, 526 bp, Homo Sapiens
agtagtttaccataagggaatttcctttaagtcaaccatgatttctccttgatttctacaagagacaaagaaatgattttgcctcctggatatcagaaaaatccatgtgaaaatgtagtaaacctttaaaactcatgttttaaagaataataactctagtaataactcttcctgctattcagaataagtaggagaatgaaaactgcagcatatcagacagcaatttaacagcttgaaacatctacagatagttcctactaaaagaagtggcctgcagaagtttaataatttgacttttttctaatattttagtttgaaagaaaatttcttcccaagcaatgctaatagagttctattcttagaagcagggtgtcagctactgggaatatttttgtagagctgcattgtgaaaaaaagatggtcttacctgaatcttagggctttgttcttcggctcctaaaatcaggctttaagctacattgggaagatttagtagataggcaagtggttggcctaagacgggggc

SEQ ID NO: 143604 - DNA, 324 bp, Homo Sapiens
tttttttgtgtttgtataaaagatatttacttcaattatcacacctagggtgctagtgaataataatacatggtgtgagtctcatacagtgatattgcttctccgtattatatagggaccgttgtacagtgctgagaacaaacatcgtatggctaaccaaagacagagggacaacaccaaggggccgacgggtgcctcccccacccccacgccagccaggtcaactttgactcttaatgtagaaaaacaaatagcaagaaataaaatgttaccagagagatgtcacacagcaacacaccagaggcatctcaaagcgatttgtac

SEQ ID NO: 143605 - DNA, 526 bp, Homo Sapiens
  misc_feature (516)..(516): n is a, c, g, or t
tttaaactgtcttccaattgtttatgtttcctgtgaatacaatcaaaagcgtcaggcattctatcaatattatgttctctgttgattgcctctgcactgtgccagtttagattggttgttgtccaagactgctgtacagaatttactgttatttcccatcatcatgaatgagggaactttcctgaactttctctgcagttcagatcatctgcttcctggatctcaggtcttcttctttattggattatggtaattttttcttctttgagcatctcttccaatagcttctgtgaatggagcttccaggactggatgttgctctgagtgagtcggtgagtgagtgagtgagtggcgagggaatgtggaggtctaggatattactgtatactactgtagactgtataaacacagttaggctatactaaattaaaaaaatgttttcaataagttatacttagctcactgtaactctttttactttataaactttcatattttgtcttaactttctgactncttttgtaat

SEQ ID NO: 143606 - DNA, 694 bp, Homo Sapiens
  misc_feature (183)..(183): n is a, c, g, or t
  misc_feature (201)..(201): n is a, c, g, or t
  misc_feature (206)..(206): n is a, c, g, or t
  misc_feature (246)..(246): n is a, c, g, or t
aaccaagaacaatttaaccaggattttaaggtgaagaaggtgttttttaccactccagtaccagtagccaagtagcccagggagttctgtccagcagattggccttcagtgttcctgtgatcatcatgaaacaagaagaggcatgtcagtgtcagtgtgcatgccgggactctgcaaaggagngggcatccagcaggaganagggntgctcctcccaccccttccagagccgagcccccaggctcntgatgggcccagcctgcagctcccagcgcagactttctcttcagcccctgttcccgggtcatcatcctctaccttgccctcctcctgtgagcaaagccgacaagcagagactccttcagaccctcagacagaaacattaagtgccatggatgtgtcagagtttctatccctccagagcctggacacccccgtccaatctgattcccattgaagcactactgcagggggaggaggagatgggcctcaccagcagcttctccaagtgaagggcccatgtgtgctcacctctgggaaaagcgggtgagcaggaggcatgaggtacaatgcctgccatcatgggtcagaaatttgaaggatgaagaaatctactgtttgaaatcctcacctttcagacgtattttctttattcacatcccaggagcatccattttaaggaactattctttgg

SEQ ID NO: 143607 - DNA, 533 bp, Homo Sapiens
ttttgcccagaaaagggatgtatatactgtttgtactctacagagtaagatctcatcctgcatcttcaatgatgaggagcatgtattctcatggtccaggaccatggaagcctggagagcagaagatgctggagtgatgtcctctagttaattaaagataggtggggctactgggctctgaattccttggcctcatctctgttctccaggcattgtaggatctaagaaagggaagcagaacgggggtttttatgtacatttatctcattctgtccttattcagacacaaaaatccctgtaggaaggcacagtcccatcccaagaggagaaactaaggctcagagaggtgaaatgaccagcccaaggtcacccagctgacaggagtctggttgagtctctctgtctgcatagctcatgttctttgttgccacccatgaatattttcagatactttcaagacagctagcataaaaaagacagtgacttccttttattggtctagtcatatattcctcatccatattgttctcaaa

SEQ ID NO: 143608 - DNA, 869 bp, Homo Sapiens
  misc_feature (184)..(209): n is a, c, g, or t
tttttgccttggtaaagaatttatacaccatgtgttcacagcttcttgacaggtataattatcagtgttgtcttttactatgtgctgggattctgaagcacggtttcaaatttgtgactatcggatgtttgatcaagtagctttccctcaagggcctatgacatgtggttttgttgtgtttgtnnnnnnnnnnnnnnnnnnnnnnnnnnaattagcaattgctgctgctgccgacgcctggctgttcgtagcttttcaaagcgagcctccatttcttccagaacttttggggtgtatcgcaccaccagcttgacgctgtctttagcagccttgagtagttccacagctttctcatggtgttctccttccacactcactccgttcactgatagcagctggtctcctcttttgaggccttcgtgtctttcagccacccctccaggaattatgcgagagatataaatgggggaattttgctcctttcctcccatcacattaaaaccaaggccttcatcagtctttgcagttcaactactcgagggtgggagtggccttcactagctgcaaaagctgcaactgttgcctttgctgttgccctcgcacggaattcgggacagccattaacagttatcgtttcatgcatatattgatacacctctcgaatagctgtacaaaactcactctgaagcacttttttgagggattgtagcttgtgcactggtacttctccagattcctgtagtttttccagtaattcaattgctcttgcaacatctctgtccagggtgagcggctggaccactgtcaatgtcgccatgtctgccgtgggagccgaagtgacgctcggcttcagcatcagcaaccgctcg

SEQ ID NO: 143609 - DNA, 837 bp, Homo Sapiens
tcagatatccactctatttatttttacctaaggaaaaactccagctcccttcccactcccagctgccttgccacccctcccagccctctgcttgccctccacctggcctgctgggagtcagagcccagcaaaacctgtttagacacatggacaagaatcccagcgctacaaggcacacagtccgcttcttcgtcctcagggttgccagcgcttcctggaagtcctgaagctctcgcagtgcagtgagttcatgcaccttcttgccaagcctcagtctttgggatctggggaggccgcctggttttcctccctccttctgcacgtctgctggggtctcttcctctccaggccttgccgtccccctggcctctcttcccagctcacacatgaagatgcacttgcaaagggctctggtggtcctggccctgctgaactttgccacggtcagcctctctctgtccacttgcaccaccttggacttcggccacatcaagaagaagagggtggaagccattaggggacagatcttgagcaagctcaggctcaccagcccccctgagccaacggtgatgacccacgtcccctatcaggtcctggccctttacaacagcacccgggagctgctggaggagatgcatggggagagggaggaaggctgcacccaggaaaacaccgagtcggaatactatgccaaaggaatccataaattcgacatgatccagggggctggcggagcacaaacgaactggctgtctgcctaaaggaattacctccaagggttttccgcttcaatgtgtcctcagtggagaacaatagaaccaactattccgagcaaga

SEQ ID NO: 143610 - DNA, 224 bp, Homo Sapiens
ggttctttgcaacgtgagtggcattggctcagtgatttccatgagcatctctaccagaaaacattgcctcgatgaggtgtggtggaagcccggcagccccttctaatcggctaggcttgagaaagcgtgtacctctgcatttccgaaattaactcagcgtgatcggcaagattttcctcagcatctggtgtcaagacactcgtcactattaattcggaaagaaa

SEQ ID NO: 143611 - DNA, 449 bp, Homo Sapiens
  misc_feature (390)..(390): n is a, c, g, or t
  misc_feature (398)..(398): n is a, c, g, or t
tttttttctgagaaaatacgctttgtggcgagatttttaagacctaaccgggatccctgctccatgcaccccttcttctggaaagcatgaaggaggtgccattttcctgggtttcacaggtttcagtttcgtgtgcgtctggatgtgccccctcgacctcggtccagggtcatgttctgaccctgttccccacaatggcttcctcctcagcagccctggggaagctgctcctggctggtctccactcagcagatctttgtaggccacacagggccacttggctacaggagccatgtgtgtccttgcaggcggtgtccctgaccctcctgacccttgacctttgagaggctgcacttgtgaggactgcaagctctcctcatggtggtccanggtcccanggggacacgcaaacactgcctggctccaaggctcaaacacacttgcagcga

SEQ ID NO: 143612 - DNA, 454 bp, Homo Sapiens
gagatgggccctgaatgatttgttttttccttcccctggaacgttaggtttactgtgtttactccctgatgagaaaacgggaggcaaacaagcaggtggagtatgcccagcacccacccccgggtgtgcacagtgtggaaaacaggcatatttttaggtgaagtacagggagaacacacgggaatgctcagcccctgagcaacaggtttgtctctccaaaaagcgctcttcagaaaggccagggaaatgtctgtctccttcgttgaaagtggtgtcctgtcatccgttaccacgctattgagggcggagaaaaaccttctttgtttgctaagtgtcctcataacaaacatgacctacacagtgcagaataatcagactccggtaacagataccttgttacaggacagagatttttgaaccttaaagttgagaaataaataaattgcacaaaaaa

SEQ ID NO: 143613 - DNA, 593 bp, Homo Sapiens
gagaggacactctgaggctgcaccagctggtggagacggtggaactatagattccagaggagaaccagccacccagcaagcaggtgaagccactcttccgccacttccgccggatagactcctgtctgcagacccgggtggccttccggggctctgatgagatcttctgccgtgtatacatgcctgaccactcttatgtgaccatacgcagccgcctttcagcatctgtgcaggacattctgggctctgtgacggagaaacttcaatattcagaggagcccgcggggcgtgaggattccctcatcctggtagctgtgtcctcctctggagagaaggtccttctccagcccactgaggactgtgttttcaccgcactgggcatcaacagccacctgtttgcctgtactcgggacagctatgaggctctggtgcccctccccgaggagatccaggtctcccctggagacacagagatccaccgagtggagcctgaggacgttgccaaccacctaactgccttccactgggagctgttccgatgtgtgcataagctggagttcgtggactacgtgttccacggggagcgcggccgc

SEQ ID NO: 143614 - DNA, 493 bp, Homo Sapiens
ttttttaaagaattaaagttagttttattcagaagccttaccgaagactgtagatggaggtctacagcccgggagcagttccatcagaggctccaatgtggtgtttcagctcacagtttatggacgggtggtgaaggttcagtacgtgcaaaatcacgtcaaagtctgggtgccagagtatatctggttatagatgactaaaatgcatttagtaatgaattacagaggcatagtcactaaccctgtcaaacgttatcttctgtgtaggaaaagtcaaggctagggtcattcatcttttaaggagcatagtgactcaggcaagtggtgtgggagccatgtggtccatcctgttttgtcttcaaagcatcttcccaaagagctgcatggcctcacagattcagggactgtgtgaaattatcttgacaagcacaaatgagcagacatggcttctcgcacttgtgactgtctcacatgtgtattatgtaagtctctc

SEQ ID NO: 143615 - DNA, 474 bp, Homo Sapiens
ttttttaactttttaaaagtctttattgtagaattttgcaataaatgcaacatccataagatctgcctcggactccgccatgtgtgccacagcactgtcaaggcaacccctctcctctgcctcaggtcccttcctcagcacacacaagcccccagcttcctcctgggtacctggaaggcagcctgtgaccagaacccagccttaaagctgcggcccctgactagcttatgaactccgtcagcactttcagtcagcagcagcacatgtagtgacacctaggtccttgggaggtccctgaacctcggagcccaggcttctatgtaaggcagtaaaggacacccaactcaggtgtctgggggcctgggcacaagtctgcaatggtgagtgctgtgccatttatcctgtgatggtcccacagtactaattagacaaatggtgattagcacactgagtctagaccaaggcagccaaatg

SEQ ID NO: 143616 - DNA, 483 bp, Homo Sapiens
attattttcttagaaaaggcggcgagaatcctgagtggaagggatctgaactttcatgtcatgtacttcgagaagagggtagatgagactcaagaatgataatcagaccagtcctactcctcccaacccccaaaagatggcatttacacatcacggaaacctatgggtctaacaggttattctctctctctcagttcttgggaaaagggagacaagccctcggccagattcctttagggaagagttctctgtgccggtggctggagcttgcggtgcgtgctcagccaggaggccccagccaggcacctctagactccgatgtgccacagagggcaggggctcccgctgtcacttccattttagaccaaacagctcctgggtgcagcgactctttcaccctctcttcagggtggggagaaacagggtggactggagcccgcgcggccctcacgaactctccctgagcagccccagcttccgcag

SEQ ID NO: 143617 - DNA, 512 bp, Homo Sapiens
ttttgaagactcgtgcttataatttaagaaactgaaactacatttttgcattttagtaaaatctgagattgtacagtttttaatctcatttccacagacacccagcaggcagcctcttttctcttagaaaaatcaaacatgcaagccgtgaagtcaggaatagctgaaccccttggataagcacacgctttgggcttctttaaagcgagcctctcatcaagagcatttcctttgctggcatgaggggagggctgtgcctgccagggctagcacctgggagggacgctgacaggcagccggagctggaaccactgtcccacctgcacgtctggtggctctgagacccgagtgccaccacctgcagcttaaatgctcgtctcactagagccacttgtgggctggagaggaagaaagatccaaagggaaatccacaaatttccttactgaagactgtcctgagcttgtacctctaagctttaaaaagagacgaagacccctcaaatgtgtgaagg

SEQ ID NO: 143618 - DNA, 595 bp, Homo Sapiens
  misc_feature (585)..(585): n is a, c, g, or t
tctgttctaatgtatcattaagctccttaaaatactggagaacagcttccttatcgccttggatcattttctcagaatgagatttttgttctttcagcttttcaataagatgggtaagatctgtccagtgtgtgtcagtcaactgttcaagcagtttttgaggagtgtccttttctttcaaataggcactttgaaggtcatctataggatgaccatgatgttgacctatggtaaggcaatgaccacaaactaattttttatctaatagacagtaaacatttaatggttgcctgtaatgttcagggcaggtgacaatatctggatggtcttcttgctggtacttttcaataatagcccttagtgcaaaattaacaggtaaagattcaatgccagttggagcaatttcagtaatacttctgcaattagggcacttgagtggaattcgtaaaggtctccatatataaaagttaccagatgcctgaagaatgttttccaaacaatttctacaaaatgtatgagagcatggcagtacacgaggatcttcaaaaatactataacatatgggacaggttaactcttgctcanaattgtgcat

SEQ ID NO: 143619 - DNA, 537 bp, Homo Sapiens
  misc_feature (193)..(219): n is a, c, g, or t
aaagggccgccacggactgcccggcccgccgatcgtttttattatcgagattattattaaaagggggcggggaccccaggacgcgggggaggggctggatacgcaggtatttttattaaacagattattcctgaaataataatacgcgcaagatggctgaaggtggctgtgatgagagtgttggggttgggannnnnnnnnnnnnnnnnnnnnnnnnnngatctgaggataaagctctgaggcgacagcggctgcggagaccctgcccgaagcgccctcccctcccttgagaagccgcgggcagacagacggacctcggaccgagcaacgggtgcgggcccgccccggacgcgtcgcctgggcagcagccggggaccgcgggctctcgcctttctgccgacttcttccaattctcatcttcttttattttttggacaggaccggggtgggtggagcagaggtggagagaaatcgggacttggcattttctccctctctctctcctaatttgttgcaggccgccagccctccccttgg

SEQ ID NO: 143620 - DNA, 1343 bp, Homo Sapiens
  misc_feature (864)..(920): n is a, c, g, or t
gtactcttctcgaccgacattaatgctcgagttattttattgttgatctgaaaggatcggtctgaattatgtcatcagaaaacaaaaaatcccccgagttgtaaacgggagaaatgtgctggttaagttactcatcattatcttattattaacaaaataaagcactatctatgtttacagtcataaaaaaagaaacagcctggagagaagtgggggctttgaggatggagagaagacgggggcagacacagactccacatctggccctgtgggatttggggttcccgtactgatccaagggctatttagatcttcagagttaggtgacaatgggatttgatttccttagggaacaaactttgtgaaactgatcagaggctgagatccagtccctagtatagagtgggggaggggagggcaggcaggtgaggggcagggctgggtgggagaaggctgaagcccaggagtcttctcaacctcttccaagaatggggacccccccgacccgtggtgcctcatgagggaggaataaagaccagctgccatggacagcccctctccagggcctctgacgctggcaggaaggggagcaccatcaatcctcctgtgtcccaactccctcgtgggatcaggttgggaccaggggcgggggcaccaggacaaagccccttggaggccgaggccaacattccccatgctgatcagagctaaaaatggctccgtgggaaccgactggcagagccagggagggagtgaaggggagggcaggaggaggtcaggaaggctgatgagcccagggcagaccaggggcctacatagacccagagaatccagagggcacagggggcaaaggacagacaccannnnnnnnnnnnnnnnnnnnnnnnnnnnnnnnnnnnnnnnnnnnnnnnnnnnnnnnncacacaaggacacacagaacctgagacacccagactgacaaagaggtagcaatttggggacaaagagaagcacagaaagaggcccacagagaagcaggagtggcatcgagagacacacccacaggaactcagcaacagtgcctggcacgtagtgggcactcaataaatatcttgtgcagtgaatgaacagatgaaccacacacacgtgcacgcgcacacatacagcagccagaggcacaataggcttggcagagatgaaaacagcaagggacagccagacccttttgcacaaagtacaaagcgatcctggtgatagacgagcagtctgggggagtgtgggaggggtgttggtcccacagtggctggttccagccaggacaagaacggacgcgtgggtcgacgatatcccgggaattccggacc

SEQ ID NO: 143621 - DNA, 435 bp, Homo Sapiens
cttgttgaaagaaacgttagcaattccaaaactaaactaaacgaattttaagttttttctcccaaaagcataaaaatggagacgatcttaacaggaaattcttaaaaggtaaaaacaactcttccttgtactagtccttgggtagttaccatacaacaggttcttctttttgttagtttcgttgaaaagggatttttggtcccaagtctgttcctgcttagtatctgctccggcctcctcctctctccaagcggcctcctagacggcctccgcccctgggcaccctgcagcctgaccggctgtaagaatcacgctggggagggcagcccctttccatggacagagagagcccacgatctggtctgcccacccggtgtcggcccctcgagtagcggtcgctccggccataactgctgctgtaactgtcgcggccgc

SEQ ID NO: 143622 - DNA, 543 bp, Homo Sapiens
ttccgcgcctcaaaggcggagtgcggggctgtgggagaaaacgagagcctcgggctgtcgcccggcgacgggcggctgaggccttcgtattcttagaacttttagaatctgaagcaaacttatcttccccctgtctgaagaaggggagcaggtttctgagtactccggggcgcggtgcctccccctaaacgcgaatggaacttttgggaaatgcccctcccccagccccttgtttggggcaacttccttgtctcttctcccccaccggtgttggggagttccttgtctccactcccaaccacagagccacaagtacattatttatgcccaggcgagtccctatgcccaggctaggagagccgcacttcttcctacagctgacacgtttggtttttggaggggaaaggggagctgtagctgaatcagtaatggaaattgatgaacctgtgatgtgactcctgggagtagtttgcaatccccattggcccaaaaggagccatttacgtgctcagtggggtttagtaaaggataatattaattttt

SEQ ID NO: 143623 - DNA, 407 bp, Homo Sapiens
  misc_feature (148)..(148): n is a, c, g, or t
agacatcttgtgtgggacccacaattagcatgctgatgccccccacgtattccagctggaggatgtccgcagtccagctcctggtcatttgctgcgaggaagttccccttggtctgcatcatggaaaccttaactacctctctctcantcagccggaagttgtggttgtgtgtcatttccactgggaatttattcacccaggatcctttgaagtagatgcagttgagaatcatcatctgggtagcagggtctatattctccagagcatcttttatgaggcccttggtgagcttcatgatgtggttgttggtttttgatatgaaggcagggtctgagaagtcagctatctgggcctcagcaaagtaatactctcttactttagttcggacgcgtgggcggacgcgtgg

SEQ ID NO: 143624 - DNA, 462 bp, Homo Sapiens
tttcacagtaaatgtggctacatttatttatctctagtatgggagacatggcacacactgtcctccaggtcacagggaggcaacagcaggagggactgatggcattcatcatggatttgaaaggtcaggctttgagaaaattaagccctaacattagcccagggcacccctcatatgtcttgaggtggcttcttccctggacatcaagaatggtgctagttgtgtaccctccttgggagaggtaaggaattagtcacaccactcatttctgtgcttggtattcagatgaggggcctggtggagaaaggcttgagtgacagagtcaggtgtgcaaggatggggtcaccggagcgggaggtgcttaggacgcgctgctcaggtttgctgtgaagagtggggaggtgagaccctctaggtaacagcagacacactacagttacagtgacttctatgagcttacag

SEQ ID NO: 143625 - DNA, 414 bp, Homo Sapiens
tttttaattttaatgtagaaattggatgagcaaaagaaatggttagatgaagaagtagagaaagttctgaaccaacgccaagaattagaggagctggaagcagacttaaagaaacgggaggccatagtttctaagaaggaggctctgttacaggagaagagtcacctgaacttatggaacaagagttgtctgaaaagaatgtgcagctccagaccagtacagctgaagtaagtcagtattctttggaactggaggtgctgtatgatggatcacttgagtgatttcctcagtctttttcacataatcataaatattatctggtaaactttgttccttgagattttgtcagatgtagtgagttcacctggcacttatttggcaccataaaccacgcttgactagagactgagatat

SEQ ID NO: 143626 - DNA, 909 bp, Homo Sapiens
  misc_feature (11)..(11): n is a, c, g, or t
  misc_feature (33)..(33): n is a, c, g, or t
  misc_feature (172)..(172): n is a, c, g, or t
  misc_feature (387)..(387): n is a, c, g, or t
ttctccaggangcgaaggaccatctgcacaccngctcacacgtgctctaatggctcaggaggcctgacaccacctcacaggctgtgacatcagacacttccaatgccctgtgtcagccgcttggttaccctataacacccctgtgccgtctggcacattctggagcgttccncagatcctctgaaaggtccgggcacttcacgtttctgtccaccatcgtcacccattgatcgcccactctgaacccctggctctccagcctgtcccagtctcagcagggattcctccaggtgacagagggtggcaaggtgactgacacaaagtgactttcagggctgtggtcaggcccatgtggtggtgtgatgggtgtgtgcacatatgcctcanggtgtgcttttgggactgcatggatatgtgtgtgctcaaacgtgtatcacttttcacaaagaggttacacagactgagaaggacaagacctgtttccttgagactttcctaggtggaaaggaaagcaagtctgcagttccttgctaatttgagctacttagagtgtggtctccccaccaactccagttttgtgccctaagcctcatttctcatgttcagacctcacatcttttaagccgccctgtgtctttgaccccttctcatttgcctagtatctctgcccctgcctccctaattagctagggctggggtcagccactgccaatcctgccttactcaggaaggcaggaggaaagagactgcctctccagagcaaggcccagctgggcagagggtgaaaaagagaaatgtgagcatccgctcccccatcaccccgcccagcccctagccccactccctgcctcctgaaatggttcccaccccagaactaatttattttttattaaagatggtcatgacaaa

SEQ ID NO: 143627 - DNA, 127 bp, Homo Sapiens
gtgcaactcttctaaaaacattcataatgcagtcatgtttatttttttctgttaaaatgtttttgacagttttaagagcagtcttttggctctgaccatttcttgttctgtttccaatgaaatcaat

SEQ ID NO: 143628 - DNA, 1084 bp, Homo Sapiens
  misc_feature (967)..(1001): n is a, c, g, or t
ttttttgagtgataacgcatcatttatctcttctgattccgacttctgactcagattacacatggtccaatctagctaacatttgtggagttaatatcaggttatttaggggttgactggtcagtctgtggatgataaccagagccctttagctctctttctgtgacgtatgtggaaattaaactgttcactagcaactctgctctagtggctttttaggagtagaaggaccccttggccatgttccatcttcatttttctgttctatcactaatacctgtccttggtataaaccagcatcctgaatggtgctgtctggtttattcagtggttcaaatgtgttactcatgtatttgttccacaatctggtctccttttcatctggaatactgaagatttttcttatttccttttcaattgtatctattgtgtcagctttgctaaatcttcgagttacaacattattcatgtttccattttcacatagcttcaattctgtgagatatacttctactttgcagtgctttacaaacataccctgttcaaccacctttcgtgctattggctcttgaccttccatcaatgtgtaccagctgacaagtttattccaaccttcagttggcaacagtatgtaatccaattcatcaataaggtgttccttaagtgactgggcatcaccatctttgagaagtccagagttatcaatgggtccaggatacacattttgatctcccatctggtatttgtcccaactgtcaaagccaacatattttttccactgtttgaaccagcgactatcgactaggtaccaggtgtcccctttccggagcgaggttttgagcagcgtcgcgatgtcagaccgctgggtgtccagatccgccgctccgccttccgccatcttcttccactagcggtccccggccgtaatggccgaattcccgggcatatgtccggtaccgtcgactgnnnnnnnnnnnnnnnnnnnnnnnnnnnnnnnnnnncgccgcttcctcgctcactactcgctgcgctcgtcgttcggctgcaaagagtagcgccctatagtgagtcgatagacgtgcgc

SEQ ID NO: 143629 - DNA, 925 bp, Homo Sapiens
attaaaggtgacccttgggtattacagttgaatatacagttatttacctaagtggactaatgtcctttgcaggccgacgtatcttcaacagagggaaggctgcacgtctacaggatccgcgtccggcttctttcaggccaccctaaagcacaaggccacgtggtttctcataaggcccaggtttccctacctcctgtcgcgtccgttgaccaaggaactgatacctacgggtttctttctcttatgtgggagccctggacaatgccacctgtgtagtacagaaccgccaaccatcctgcagcctgcctcccggaagaccaagaatcagaataaaagggaacttggacgccgacaattctaggaaaggaaatgaacagagaagtaaagccggtgagatcgtgataaccgcggcaccgggacctgtcaaaacggcgtatataagactcgaaccagaaccactataacctatcattcgggaaggcctgaggtgggagcggcactacggaaggaaggaggacgaaagagaaccgcacgagtcagaaccgccgccgccgccgctccccggatacctttcagcatgccctggcaagccaaagaaccctgaccctgcatctagagtccaacctttgccccaacatttcagaagcggccaaaatcccgctgccccggcggccgccgccggacctgcccgcacctgtcactagcgaaagaaccagctcgcggctcccgcccacttctccactatcctcgggcaaccgcgggcatctcaacccctttctcttaccaggtgtcccctttccggagcgaggttttgagcagcgtcgcgaatgtcagaccgctgggtgtccagatccgccgctccgccttccgccatccccggccgtaatggccgaattcccgggcatatgtccggtaccgtcgactg

SEQ ID NO: 143630 - DNA, 338 bp, Homo Sapiens
tttaactgtagcaaattataatttaccgagatctatgaggatcttatttgtaaacatgaattggtcaccatcagttttccaatagcaagagacacaaatcctagaaaaacttatttcaatttccagccttcaggatttccaaattttcccgatacatttcagactagaagaaaaattaactatttcaaacccactttgacatacagaaaagccctggcatactgaaatttcagattgctggacccccatctcgagattttgattcatcacattctggatgtaacaataatttggatcaagattaaggagccatggccgggcgcagtggctcacactat

SEQ ID NO: 143631 - DNA, 415 bp, Homo Sapiens
aaaaattcttgccactttttgggcacataggtggtacacaaagcaaaggaccatgggaagaattggcaaagggaagtccacatagtgtcattaatatttttacaaaatcctatcagttatatggaaaagggtttgaagacaagttggacagaggaacatcaacatcacggcctttgaatgccaccgcaactcctctaagtggtgtttcatatgaagatgattttgtctcctctccagggactgggacttcgacagaaaaaaaatcaactcttgaacctcatagcactttaagccctcaggaggaccattctaacagaaagtctgcctatgatccttcctctgtggatgttacctcccagcattcatcaggagcccagtctgctgcatcgtctcgttcatctacttcttctaaagg

SEQ ID NO: 143632 - DNA, 446 bp, Homo Sapiens
ttttaaatcaatagataaacatgatttattactttgtctattaaagtagtttcaacacaattgaagtttagactgcactgggctgttcccatcacagtccaggattatgcacagaccagcccccaaccccagcaggggtgccctgccagaacctgtgctggatgcctaggagcacagagaccactgcccgttgttgggctgcgtgtgcacacttcatgccccgatccataatccctaagacaagaatggctgtcattgccctgggttcactttctattcaaagaggactcatttgggcacagccaatgtagtagttaaaatgcattttgagaaaaaataaatattctgtacaatgtatttacaaggatcaaatgttttgtaacccacccccaattagtttcccaattgggaaactataatttgataattaagaagcatattattgg

SEQ ID NO: 143633 - DNA, 571 bp, Homo Sapiens
gaatataatgttttttgtattaaaacaagaattgttattttacagtttaagaaactttacatatatacaaaatttacacattgggaatggtaatcaagcaaataggtttttcagtctcatagatctattttccttcgatcaaagacttaaattctttcacattgtggtcacttgcaacagacatagcatgatccaaagctcgaacacttgcaaggagttttactatctgttttatgttttcccttgcatttcttttttccacatcagaacacccgatactatttctataaattgtatccgctaagtgtacaaggtatcggcaaaagttttctaactgagaaatagtcctttctcctttcagattcatgaaccattgtttggggaaacaattgattacattttgggcttttttgatgctgtcatctccatattctgaattctgaaaagccatgagaatatatcgatttaataaaccatctattgataactcttgcagagttttatttgagaaaatgccataccactgaagaaaattgcctaacagcttaactgaagaccaaaactgtcgttg

SEQ ID NO: 143634 - DNA, 582 bp, Homo Sapiens
aatacataaaatgtcattgcagatcagcatttatagatgaacagttgctctcagttttaatgatagggaacactaactttgaaccccaattaaatgaactgttatctccctccaaaataattatattcttagtggtaaacttataaaagattatatctaattattagtattagcatatttaacatttcttcaataaaatttttttgtggaaatttgctttctctcattatgtaagtacgtatattacatcttcaattttgtcacagcacctaaaagatttactacttgactctttacagaataagtttgttggcctcaggtgtaggccgccctaactggggcggaaggatagagaaaagtggattcaagagatattcagcaatagaatggatacaacttggtcattaattaaaagtgatgggtgagagagaacaagttcaggatgcttcttaggtttctgtcttaagcatcttgggtgaattaagacctttatgttgtcctggcaaaaactaggatgatgattttaattagctacattgatttatcagtagtaatgaagaattgtatctcttgtctttaaaa

SEQ ID NO: 143635 - DNA, 478 bp, Homo Sapiens
tctgattcttcttcattgtgaaggagcccgcgccaccggggacccgtttgtgcaccgtctagaagacccttatccaggatcccgacttctggggccctccccacctcccggctccctagtaaaatattaggattcctagtaaagccacatcgctaaaggtgtgctcacgaccagccgaaggagatagttggccagcgcttccctaataaatccccagcaaaaagggtcaccgtgagaaaatcccgtcgtgtgaaaccagtccggggaagaagaccatttaatacccgcagggcccctttctccctccacggctgccgtggtaggtggctccacgctggccgaatggagacagcgccggcatttctacgcgcatcaagagcaatcatcatcatctgaacttagggatgcactggttccacaaaacatcttatttttgtgctgtgcccacatttagtataaatgatttttcatcagtaaa

SEQ ID NO: 143636 - DNA, 636 bp, Homo Sapiens
  misc_feature (417)..(417): n is a, c, g, or t
  misc_feature (546)..(546): n is a, c, g, or t
  misc_feature (602)..(602): n is a, c, g, or t
ggcagctattttacatgcttttttaaaatcaatgttcaattataatcagattacaaaaggaatcacattgccacatctccttctggctgcgcactgtaagccaggcgtccttggttctcagtaacccctgttctgctgacaggcacggagctgggcctctagtaccatctgatcaagggagctgttgggaggcgctctctcctctctcctggaggcctgagggagcttctggaactcctggaagtttgggtctttcccttgggaaatgtgctgcaccctctgctcctttttcttaatggcctccttgatgccctcaatgtgacacttttcctccttctcggctttcagtttcaggatgtggtggtttttctccctcaggtggttgagctcccggaggtgctgcaccttgtccctagnggtcttgtgcacgtgactcctggcctgtcggatcttctcatccgccagctccaccagaattcttttgcgcatcttcctctgttcctctgactcccctgcgcgccacctggcctgctgcaactgctcttnctccttctgggccttctccctcagctcgcgttgccgctccttcctcaggccctggngtatctcctgggaccgctggaaactttgttccag

SEQ ID NO: 143637 - DNA, 638 bp, Homo Sapiens
agcaaagctgctgcactgatactgaccgagtgagcattcgtctatgtcatgacattgatatttgcctccaatatacatgagatcgaagcatttatgacacttgcagatgtagctcccaaaagtgttgacacattgcttacatctagggcaggaggctcttcctgtagcacattcatcaacatctacacaggtcctcccatcaggagccagctgcaggccaggggatgggcactggcaccgtatttgtcctttaacaacatcacagccatactgacagtttgccatggagcaggtcagggcacttgagcaggaaccatccggcatgagcatatatccgttgagacagtagcacttgtagctgccgtaagtgttcatgcacctgtgcttacagggccggggcttcaggccacactcatttagatcttgattacaggtttttccagcataaccaggatgacacttgcacttgtttggcccgatacattcaccatgtttgcatcgtggttggcacacaggctgacactgtccccaagactggcgagcccagccccagcagcagtcaatcctcccaccataacgacataggccaatcgatgacactatttgcctgggccacctcccgtcgaactcggcggccc

SEQ ID NO: 143638 - DNA, 460 bp, Homo Sapiens
  misc_feature (182)..(194): n is a, c, g, or t
tttcatagtaatacctagttttatttgtctatttgagtattgtccttgaatttaaaatttttttcagccccaactgatacacacacatatacatacataacacatgtgtgtgtgtgtagcttacagagtgtttataggaaactgattttgtatactttggctactttgttgtaagttctagnnnnnnnnnnnnnattattaaactagtgcacgacatcaatgctatatgattggtgtttcgttgacctagaaataatgcatgccatcttcttttcacagctgtgtgccaaccacgatgcaaacatggtgaatgtatcgggccaaacaagtgcaagtgtcatcctggttatgctggaaaaacctgcataatctttttaaataagtgatgctcttattatctcagtttgctccttaaaaaactccacttgatttttcttccccagcataagtttgcaggtag

SEQ ID NO: 143639 - DNA, 914 bp, Homo Sapiens
ttttctgtgaaaggtgctattcatttattgtgatccctgctttgtggatgaggagactgagactgagagagtgaataactcatccggggtcatgcttacagtcagcattagagccaggattggaattaagatgccccttcattcaacttcattcaacttgctctcttctttacagtgctggtttaatttgacagcagtctagggccagtccaggagctactgcaaaggttgcacactgtcaccagcacactcttcaatgaccagttgcaattcgacctttttgatcagaagaaatgcaccaacctgatgctgcacttgctcttccagttgttcctgttatattatttatttcctctctttttgaccagctggagttataatatgctttgagtcgctaaaggggctgatctctcattaattccttagtgttcaagccctcaccgctatcttccgttaaagtaaaattcctatcaagtcttggtttcaaacacgttcgtgaagccttcgtcctctctcagtacctggcacataccggtattatggtcatttcagcccgttgtgttgtcatctttttctgcttttcttttgtctacccactaggagcagagcctgatgaggtaaaggattatgtatcttatcattactatatccttagtatttagcacaatgcctagtggaggataggggctcgctatgtatttgctaaatgagtaagtcaataatcttggtctcctttcatttatgcaggcataagatatttttcctttagaagaagattcagaaaatctggataaattttgaaaaaattatctgcttagatctttaaaacataggtaaaaccaagtaaaatttcttattgacattttgttctgtgcacagagagtaatatagtggttaaatagacttgagctttg

SEQ ID NO: 143640 - DNA, 424 bp, Homo Sapiens
tttaactggcaatgctctttattagaatatgctcgaaggtcattttaaggatcaagaaaccagaaggaagaagatgtatatctcatcaccttagtttattagactaggttgagaagcaagtgaaaacgaaattgtatttgatttatgtagactgtgtcttcaggcttgggaaattttctattattgtaacatagtcttgaagagtcagtgcaagtgttgctggctttggactaggtggctttgtaatttttttacatgcttccagttccttgatattgaggcaacagtatctcccattttcacatagtgcctcaggcacttcatttactctgcagattttcctgcaatgtctttgtacatagttattccagcacttcttaagttgttcggttactgtgggtttctggaacagcagaattgcaat

SEQ ID NO: 143641 - DNA, 499 bp, Homo Sapiens
tttaaagtatctagtatttagttatatgtttgcctggtgtagggaaggagtaccaaaagagaatctccattccccttcttcccaagttgtcctcacagatcccccagttagagagatcatttgggttaacttgtctctttggggatgcatggttgttaagcagtcattcacaccttatgatgatatattttaatgctaaatcaacataaatttacttcttccccagaaaatgggaaatttttatgagggaacctcagatccttgagagggaggcattcttggtaaggtgggagattctgacagggcaggttgtagggaagaagttcttgggttcagggaagaggaggaaggtgttaaactgttacttttcaattttgcctaggatcttgaatgctcttgctgaccgtgcctgacttggggtttcagaatgccttcagaagtctctaaagtagcctacacgttttctagttcagactattccagcagtttctgtcaatgt

SEQ ID NO: 143642 - DNA, 402 bp, Homo Sapiens
tttttctgttaagatactttattttataatcaaaatacgcaatacaaacaaatggacataacaaagattcatataaataactggttataaactttatgaggaaaaatacccgtcagcatggtggctgggctcccaatgcacagggtggagaccaaccaggcggctctgcctttaagcagcaggagcccagaggctgaagggctggctgggtggggctgctctgaatggaaggggtaagtcactccataaataaaacacaaacttgtaaaaacacttaagaaagagcctcattcaggcccaggcatgaggtccaagatgctgccaacagcccaaagcttagcaaaaatcttgtagtggctgactggcccacacgtggcccctgcctggcctggctccaaatct

SEQ ID NO: 143643 - DNA, 661 bp, Homo Sapiens
cccaaaaaggaataatgtcccattttccctggggaggccccctgaaaatttaagaaggaggccccctgggaaccccggtgggcagtttccctccgcctttggaggtcccaatccaggctggggttttgttatgagcccccttccccgtagcaaccaccactccctcatgtttgatggcatgttggtattggccgttgatgtcaggcattctccagctaggccaattatatccaatccagtggagagctggttgaaaaatcgaggatgacctgtgcgaaccccatacttcaaggtgtctctgcagtcaaccaggatctgctccagggactctgggtggtcagagagctccaagttgaagccctccatgccttccagcaactggtgtgggtgatgaaagtccagcaccttggtggagcgatcaaatgtcttgcggacatagttgatgagtatgtccaccacttccaggaggaattgcacggtttgctccttaccgttcttagcctgaagcagatctttagcatacagattagagaagtcagtctctgtgcgccggaagcgggcatcccggtcgctgttttcacaggaaagcaggttcttggaggattgcctctccttgaaggcactcacaaggcgactcttctcttccaggctgttggtcccc

SEQ ID NO: 143644 - DNA, 722 bp, Homo Sapiens
gcggccgccgcgagtgtgaggaggcagggcctggtggggcctgggtctgggccttgaccaaggaggcagagaaaggtggcccaaggagggccctggggtgagtctgagcctggtggcagcgctgacccagcaaccaggggcctgtgcagcgggatgtcctgagtggggtctggccaggacctcgtggagtgcgtcagcaatgcttcactctcagacgcttggcggaggccacaggcggcctgacgtgcggaaaccacggcccgatgttctcaaagccctgctcgccgcaggtggttctggagcagccgggcggaggaagggctggtcggatgtttgcctgtcaagctcaaagcgacagattccactttccactcgtccactcctgagtgatcagggacacgaccgcagcctcgaggcctcaccgccagccagctcccgggccccacaagctcagatgaaacctggccacggagccaccaatcatggtctgtgccaggctccacggctgggcaggtggtcagatcatggagcgcacctgtgtcaagcttgagttaaaccactgctgctgtggtcagaccggcatgagggtgggagtggccacaagcccacatgtgtgacacatgctacaagtgctgctgatgtcggacaacaatgtagttgatgagtcgacggacatcgataagcagttccatatagccttctatacggtgcgagcttacctt

SEQ ID NO: 143645 - DNA, 932 bp, Homo Sapiens
caatagtcacttccatctttataatttaccattttcttgagctgtttgtatatttctctaaccaaaaagacaaaaagtagtagtattcaaatttataatgactggttactggtactgatttgagagtttcttgtcaagcggatgagtgtttaaggcccaccaccttttttcatattcttctctcttaaaaaccacattttcaaaggtctgcaaacgttttccacagtcaacaacttgagaggcatggaagtttcttgcttatcaggggccaagggggaattttaaaatcttttgggtaaatgaatgtttaacatcccctgaaagctgctggagagtggggaacctaggaccgtcacaaaacagccagcctctgcattgcctctgccgaccagggctgcagagggcagccacccagggctcagccaccggcaggagtggaggaagcacagctccaaaggtcacagaattgcagtcctggagctgggtccctgccaactcccggagagtgagcgaggggccactgggctgtgaatgcactgtctctggcagtggatgatttcctcgttcttctacgatagagactctaatgcctctcaggcccctgatggtctacaggccgggtgacgtaatcccaatgagggtaagaaaattattcctgcttttctccaggttataactggtgattatgtaggcttgtctgctttaatcttcttttctcaaagtctagtagaacacctgcttaacaacttcctgcccacccatcactcagacaaaaatgcagcgttccaagaacaatggagagccacctccgcagccagacctagggttggatcgcacgaagagctggaatttggggaaccacttaagactggatacatttggaaggcccagtcacacaagataaaataaatatttagctaagctttcaaaaa

SEQ ID NO: 143646 - DNA, 326 bp, Homo Sapiens
ccctggagagtgaacacgtagtttccagcctgggttgggatcgggtacttctttgagggatcttaagccaccatgacaaagggagggtgtggctgttgtcaatgaactcaccaggccaaattcagcccaaagatatgttgtatctagctcgtaccctgttataatttttaaaaagtaggtgtccacattttaaagttgtggattttttaaaatgtttaaatcccacatttaaaatggttaaatcccacatttaaacattgccaaccacggttcttagcaacatctggatatttgaaagctcccaggtagccgagtgtggtggctca

SEQ ID NO: 143647 - DNA, 738 bp, Homo Sapiens
ttttttttgcattgtttacaaaaatttattcatacaaattttacacactttatataacagttatcaaagtcctagttatagatatcatgtgtgtaataatacttggttaaggtgtttttataatcagttgcacacaaaataagagcttcaagactaacatctacctaaattatcactatatcataaatctgcttcagtttagtaaggctcttggcatttctaaaaagtatacaaaagattaaactgggtgatcactgtaaaatgcttgcaactagccacgggaacactaaattagacttcataaataaaaggttaactagagccctatttcaccactaacagctgatacaaatacagaaaactctgcccattatccaagaaacaaataattaagactaaaatgcaagctgatgtgttgcagcattgtagggccactaaatagccatctgtgattcgtggcaatttaaaaggcgaagaaaggcactaaagctgcaaactgcatcccgtgtcacattgcctgaggagactgcggaattaaaggaagattgatcctatacacaggactcaggcatagaccgaatgcctctgttttcactatttgcaatgtgatctcctggcagcatccatcccgcctgggaatgcaaatccaattctgttttctttgatttatgacttcatactgatcaaatccgtaaaggaaaaggaaaggtcctttaaactttacaagctaacgtttaa

SEQ ID NO: 143648 - DNA, 450 bp, Homo Sapiens
cactgccattatagtttattgtgtggtcatgtttacattgtgacatccagccccaaggatggctgggagttgctcaggcatccaggaaaagtggggaatgctgccatctggtgacagcatgtagatttgggcagtgaacagggattgccatgccccagtcttcgcacctcgccccctcaccccctaactcacagcacaaaccctgcaaacccaaagagaatattaatacttgaagcaagaagggtgcatgccagtccttctccgacatggccagggggtaccaggccttgtgcgcctggcctcctagccctagccagggcgagagggcctttcccttgagctactgagctgctttgtgatgctgaaggatactgccggcagcaggcagaggagggagggggcctagggctctgacccatctggaggaaaaccagatcggactaaaaaagg

SEQ ID NO: 143649 - DNA, 341 bp, Homo Sapiens
tttttatgacattttgtttatttttggctacatccagaaaagaatttgataaggcttaaactattaaaacatgtgcaacaggctattaaaggaaacaaaataactagaagccagttaggaggactagttcagcttttgaatggagctattcaacagtttcagaaattttttttacgctactaatgggccagtgggcatagcatctttttaagcttccttccagtttgtggtactaaaaccattgcagatgcataaaggaagatgcttatcatcctgtctgagttgtaagatgggacacaactccttatcatagtacattccttaaataagtacaagaatta

SEQ ID NO: 143650 - DNA, 559 bp, Homo Sapiens
tttgattctttctgtaaacctttattaaatccctatatgccaggtgagtaagtttcaggctgtaactctagaaaggtgttggttaatgggagagtcaagacccccaagcaggcaactagtcagggcggtcagggcagtgggcgcgctgaggagggccgtgtcagggcccacttcccaagcctggggagcctgttgcaaaaccttcaaggatgtgcctgagggaagcacgtgacaaggaggggagagagcattctgggcaaaggggatgatgacatgagcagatgcagggttgtgacaagtggcatggagtgtcgagaggctaacagggagctgagagctcggttagggagggcgtggctcctccaggtaaggagggaggactgtgttggagagagctggagcccaggtttgcatttgaaaagcaccccagtggtgctgtccatggtagagccgagagaagcaggcatggagaagggaactgggctaggatcctgccactgcagaggtctgggtcagtgttagatggagggattgagccagaggaaaaatagtagacctg

SEQ ID NO: 143651 - DNA, 764 bp, Homo Sapiens
gctgaggctttcacggcctctgctgccgccgccgccgccctcgtttgttccgttagatcgcgcagccccgaccgctgcacccggatcctagcaagccgggcgaggctgcccgggagccctcgatggccttcaggttcacccaagcccgcttcttgctttccccggcgcttcccctcttttcctggttaacagcttatgggcggggagctcggcaaaactcagactaaaaacagaaaaagagaaaagaaaggacaaattcgatacacccgcgtcggtcctccagagtttgtgaaggggtgtaaacatgtcggagtctggggagatgagtgaatttggctacatcatggaattgatagctaaaggcaaggtaagtgatgaggcgcggggcgccgcggcctgggcccccgactccggcactacctggcccgccactgtgggcgtccgtgtccattccagcgcctgggaagggcgggaggctggaatccaggagccgcgctcgcagcccgggcgtcccagcagctgcggaatgcaaagtagccgccttttctttattgcgtggcatctctgaaataagccaagaggggactttcggacgcttttggggccagctgggcagcaataggggctctcggacgccgaagggcgagagcccagcgtcggaagatggagaggagggcggggcgttggccaagggggcgctgccccctcgtgccgaattcgccacccaggcctcgctaccttaaaccgttatgagtactgccgtt

SEQ ID NO: 143652 - DNA, 497 bp, Homo Sapiens
caggctgtgtcaggctgcgcaccagtggccccctgaccctagcccagctgatacgtgctgctctgtcccccagccacggggcagggaaccagctggcagccagcctggctgtgcccagcagcggtctgggccctgaggacacctgaggttgagagagtggcccccatctgtggccacactgctgactgcacacacagtgtggcgtgagggacatacagccctctccctggtgccctcaggcggcagggggaacgggctgtttctgctgtcccctccagacccggcgaggcccccctccgagactgcagcctccccccagccctcctgcagctcctctccgtcccctcctgtgctggtccccctggctatgccctgtggggtggtctagtggcctagctccaactctgtccaggcaggaaggccctgcagcagtgacctcacaggagtgggcccagaagctgggcacaggaaggcccctggaaagcactgagaggaca

SEQ ID NO: 143653 - DNA, 426 bp, Homo Sapiens
agctcaggaaagtgagcattttgtgataaaaatgaatatatcatatctaatggaaaagattggatgaatgttctcaaatgttacaaagctgtttaaagaaaaaggtatatataagtaatcggaacacttagaagactgatagatgtcacacagtggtattatagaaggataatacagagccaagatcaaattaaaagccaataaatggaacagaagggaggcagtgtttagctttgtataaacttttaggtttgctctgtaatctgctaaaccaaaaacatttttttgtgatatgttattatgtatgtggcacttgaggcactgtatgtaaagtaaggaatgctttacttttctccttggttttatctttgtttaaactagctttaaagtattaaacaataattgaaatgaaaagcttacctattt

SEQ ID NO: 143654 - DNA, 549 bp, Homo Sapiens
  misc_feature (507)..(507): n is a, c, g, or t
tttcagactggaaaggatttattcacaaactcatgtgggtgaacaaaggagtccaacagtaagggagacattttcagctgtgaggccaactagggctgtgtggagaggacttgccccctgaacctgagatcacagtgaccttggtctccaaggtcctgtgagaagcacggctggcccaagtcagagccactcaacagcatcttattcatccagagtcactgaggttcccatcaattacattttctgaaaatgaaacttgaattgccaaaacactattttaacctttgaaaataaatcttcctaaaaggtggcccatagtccctaatgacttaaaacctctccttttcccactgaagtggtcatcattatccctatggaatgggacaataatgtgattgtgtttccatgtgctgtttaattacaaccttccttacagccttcactttcctgttatctacaagtctctctctaaaaaccaccttccaccagccacccttccaggctgtntgttttgcagagcgttgggaaatcagacagcactcctgttag

SEQ ID NO: 143655 - DNA, 455 bp, Homo Sapiens
ttttatattttaaaaagcattgtttattgacttacatggatcgttttgtggcaggcagcactgagatttaacctctggtctctaaagctgaggccaatacccatcacctgcatcctgtgcctgattcaaatattcatgtgaaagactgcatctgcttcgatcttgtctatatctccagatatcaacacagcacttggaatgtgataggagttccacagcatcttcagctgcattcatccacttttgcctttctttcttctctcagccctgcagattctggtggtcatgccagggttagttgctagaagttcttggttaccaaaaagtccagagaataattgtcaatccactctcatacaacaagaattgtagagtctagaagtttccaagattagttaatttagcagcttaataatatgaagggccctggtgcttttggtcttccttctctgact

SEQ ID NO: 143656 - DNA, 654 bp, Homo Sapiens
  misc_feature (613)..(613): n is a, c, g, or t
ttttaaagagaaagaggttatttatcacactaggctctgagcagcagaacctcaagaagctaaggagccatagagggcaggtgaaggatgttccttgaggtttttttcataactcagttctcaagctcagtctcatctgacctccacaggaactttgccttgggaggaaccccgccccccaccccataccttccacagctcctgacactctcaaaggagtggatcagatcctggccaacagccagcagcatccagtcctggcagtgccaactgtgggtcagctgacttcatttcttctcctctcactggtctgcaggcttggtctgcgtcagagggaagatggtgggcagggtgcggagatacagccctgaagactctgctctccctgactggccacgggagctgacacagtattaccaaggtccctcaggctccatctgtcagttccagaaattcagtcaccttggagaaagccttctggcagcagaactggtttggggaccccgggtgcattcttcagccttgcctcagtgagtgctcaggacacgtctgctgaattgaaagagaccttcaatggactgaacaacaacctgctttctggcaggcaatctanaaaatagcctgagaccggggtgtatctcccagcctccatgc

SEQ ID NO: 143657 - DNA, 330 bp, Homo Sapiens
agagttgatcttgccggatctgccggaccacgcacgtgtggtgtggcctcctttgtataggtagctcccaacaaaaccccgtagaagactgaagtgccgctgatcttaggctcttccgtgaacaagcatgtcctgaagttgggttcgacagtgaggaatgtgctggacgtttcaaggtgtctgcagcagtgccgggtgaccttgctggggatactgatgcaggcggccctccctccaccgctgcaccctgatctgtatgaaactcacatcctgtctccccagcactcagcaccataaagctcccatcgccttagggtctcccctgctacc

SEQ ID NO: 143658 - DNA, 590 bp, Homo Sapiens
tttttacatccttaggtttatttattttattgtttgtttcactgtttgaatgtttatcttgcgagagtctacagaattgagagaaaatatctgcaggctaattttacataacatgaggcaaagattaagcactaaatataaaaaataaaacttttagcttgcttattaaactaggaagaattttcctgaaacacagcagttaaattggtctacaatgcattaataaatggagaacacggatctcgcctattaaatattttaaacattgtggacgctaccaaaaagctcattggtatataaaaattttcaagtcacagtcctctaagcagactaaatacaagttagtttttaacctgaattcagaagtgcaaaatctgtaaaaataaaaatatttccatttttctcagcaatctatggattaaccttacaaatccttaaagtcttttcagtaacatgaaccatgatctcttgacaagttccttgcttaagtggcaagtaacttttgaagctggacttctcaatctgtagagagaagcaagctgcattcacagcattgctcccttttgaaaattatcttctgaagagaagaa

SEQ ID NO: 143659 - DNA, 699 bp, Homo Sapiens
  misc_feature (599)..(599): n is a, c, g, or t
  misc_feature (611)..(611): n is a, c, g, or t
  misc_feature (645)..(645): n is a, c, g, or t
  misc_feature (683)..(683): n is a, c, g, or t
gcggccgccggcgggactggtctgaagagacgcggggaccaagtggcaacgacttggacatctgagctgtcactgccgaaaacaggccgcaagagagataatcaatatgcatttccaagccttttggctatgtttgggtcttctgttcatctcaattaatgcagaatttatggatgatgatgttgagacggaagactttgaagaaaattcagaagaaattgatgttaatgaaagtgaactttcctcagagattaaatataagacacctcaacctataggagaagtatattttgcagaaacttttgatagtggaaggttggctggatgggtcttatcaaaagcaaagaaagatgacatggatgaggaaatttcaatatacgatggaagatgggaaattgaagagttgaaagaaaaccaggtacctggtgacagaggactggtattaaaatctagagcaaagcatcatgcaatatctgctgtattagcagaaccattcatttttgctgataaacccttgatagttcaatattaagtaaattttcaagatggtattgattgtggaggtgcatacattaaactcctagcagacactgatgatntgattctggaanacttttatgataaaacatcctatatcattatgtntggaccagataaatgtggagaagatataaacttcattntatcttcagacataaa

SEQ ID NO: 143660 - DNA, 318 bp, Homo Sapiens
tttattttacaagatgtgaagtctcaaagcttctactggcaaaatctgtaagtgtatagtgtagcctaacctgcttaaatgaaaagtataagactaagattaaaattgccccgagacacaggtaaacaaaaagggaagcatgtggggccccagagaggatccctgaagaccgtaatgtagaatgcagccttccctagtaggtggtatgaggggggcactggattgatgcaggtcaattctaataaagaactcaggctgatgaagccctattgaaacagcaaatgagaaggaagggaaagaggacattgacagctctgt

SEQ ID NO: 143661 - DNA, 542 bp, Homo Sapiens
tttttgctttaacaacagaaatttattttctcacaattttggagcttagaagttcaaggccagggtgtcagcagagttagtctcttctgaggtctctttccctggcttgcggatggcgtcctctccctgggtcttcacatggtcttacctccgtgcctgtctgtgtcctaatctcctcttcttattaggacaacaggcatactggattagggtccatcctaatctcattttatcctaattaccctttaaatccccaatctccaaatgcagtcacattctgagaggctgcgggttaggacttcaatatatgattttgtgggaggcagcccctaacatttgggtgtgtgactccggctcattaatttagtgatccaaaaagctgctatttttgagtggtgcccataacaagggaaggctctgcaacaggtccaggctgctgtgcaagctgctttccccttctggccatatgacccagcagactccacggtgctcgatgtgtcagaggcagatggagatgctgtttggagcctttggcaggcccc

SEQ ID NO: 143662 - DNA, 759 bp, Homo Sapiens
tttaatgctggataaggctttgttttttaaaggtagtggaagttttaagggtgccccggggtaatttctgtagtcagggttccctccgggttagggtctacacggccatggcgggctgcacggtgcacgctttatcactgagacctgactcctaagttactgttaacaagagtccctggggccagtcagcttacacacaggcctaatatagcagaaagaatgatgcaggccgttaaaacagcctttggaaagaggttttcaatttttcaatcacaaagcaaatcaagcttcctaattagctacaacacggctggaaagctcagctcctactaggctgcaagcccttgctgtctgctttcttgcatgaccgtctctgttacaggaaaggtttggctgctttctaatctcactcatgttcaaagaactcgtggcaggcagtagtaaccatggcaacaaaggccatgaattcctggaagtcacattcgccgtctccatcattgtccagtgtttccatgactttgtccacaacctcctgctctttgatttcctctaagaaatgggaaagctcattgttgatgagctccttgagttcggatttcttcagcttgtgcttgtctccctcccttccagaatattggtggaaaacgtcgatgagggccaccatggccttctccagctcagacatcctcttccttgtctcaccccttcctggtctccttgctgcaggcgtcgtctctgctgcgggtcctgggcggccgc

SEQ ID NO: 143663 - DNA, 385 bp, Homo Sapiens
aggcctcctgatggagaattttccagttactctgggattgggtttgctaagcatcccctctggcccctgatctggggcatccctggggtccccctgagaccaaacctgggagaaggagggactctgggaacatgcaaagtgggggagcagagaccccgccccaccccgctgctctacaggatggtggctccagctgcatctgggctccgagggtccttaacagcgatgatgaagttgttggtccttcggctgccatggacccaggataagacatctactttctccacgtggtgacccctggcttccaggaactcaatctcttcctctgtgaactcactgtccacctgcaggaggttggactgcaggtccgggtgtaggcggccgc

SEQ ID NO: 143664 - DNA, 479 bp, Homo Sapiens
gacacattcatgctagagggatggttataggttgctataataactgacatccctcccattcaccccaccccactcctgagacaccccaggtggtgcccgagattataggacttcaagagaaaggattccctgacctttctcttgccacttttgtggataagatgaaattgtgctctattgtacggaaatggctgatttgggattttctggttctcctcctctcaggagcgcagctcagctgggctggaactgccctcctggaactcccccagcctacaacctaggaggtgcagggactgaggctcaggccaaatcgcaactcagacccagtgaacccaaggcctgaagagaatttggattcatttaccttgttttgtggggactggagagacaagtaaactctcagagtaactgtcccctctgactaccatttctaaggttgccccggaggcccagctagccccagacttcggccccat

SEQ ID NO: 143665 - DNA, 484 bp, Homo Sapiens
cataatattcatgcagatataagcagtggtttatttctaaggttgcttaacgaatacaagtcagcaatttaagttctcaaatagaaaagaaaatgtgcttgaaaccttttaaggcaatggtattttgtactaacaaaaacatttcatattggttctctgaaatagccctcaagtagtcatttctagttcaaagaggataggccaaaaaaattaggtattctattaattattaatacaatctgttgctacaaagcaatatacgcagccactcatgacattcaagaaaccatacatcatgttagaaatttcttttagatgactctgaataagaactttaaccagaaggaatctgaacacacggaggaagaccaaggtgcacatttaactgctttcaaagataaacctagggctgacaacaggacttttttggtatttacatacctgcaattaggaaactgtgaggttttaccactaccggatactg

SEQ ID NO: 143666 - DNA, 533 bp, Homo Sapiens
  misc_feature (499)..(499): n is a, c, g, or t
  misc_feature (508)..(508): n is a, c, g, or t
tttgtcctttgcattactatggcatttattggacttgattgtactctgaattctctcataattggccattctcatctggtaattgtaactgaatcagacagtccctccctcaacaagctcagtctgcctgctcagagccatggtagcacatgtggctgaggccaccctgctcccagctcaatcctctgagccatctccacacctttgccagaatgattgttacaacggatctcatcagtcattcaatagctccagtcacacttgcatcaggggtgaataggtgtcccatctgcaggctgtttgcttcttctggtattcacactgcgacaataggagatggggcttggccaagccaaggtagcccatcaatggcacgatggaaagcccagttgagaggaaacagcttaaagaagagcaggctttgggtgctgtctccatctctccccagtttctcgtgggaggaggaagcagatgagttctggtggccagagagaactangaccaacangggcaacatcattacagatgtctct

SEQ ID NO: 143667 - DNA, 557 bp, Homo Sapiens
cgcatacatttctccacgcttaagttttctcccgacgcctcgccgcggctggtaacttctctggttgagatctctccccacgcgcctccccgcagccaaagtggtcgctcccaggctggcgacgtcggcttcagctcagagttagtaggaactggacgctgttgggtctacgcagcggcctccacttcctcctccaggaggcctgcgtcagagcaaggagcctgagggctgcagggcaatgcggtcaggtccgctgcggcctcccccgggcccaggggcgcttgcggggcccgtggctgcaaccgcggcgacggctcgttggagtctccgcacggcttccttgatgaggtttcccgagagcacgagctgctggaggagccgatgcgggtcgtcgtcgccggcgcgtgccccggcttgggtccatcggcgctgctgcaagcggcgggaggtgaccgcgtccctgagccatcctcgccggcacggccccggcagcgcgctggggcctgcggcgacctccgccacgcagtagggcgcagcgcgtccgcgcacgcggccgc

SEQ ID NO: 143668 - DNA, 559 bp, Homo Sapiens
tttaataataatgaaaaagtttttaatattgtgaaaattaccaaaatgtgacatgagcgagacaggaaacaggcacatgatgttgaaaaaatggcaccaatagacttgctggttacagaggtgccacaaatcttcaacttgtaaaaaattcagtatttgcaaagcacaataaattgaagcacaataaaaggaggtatgccagtagttcttggccaggtgctaggccaggtcctaagacctgtggtaagaaaaagagattgtccatgacatgccctcctggaagagatgaatattaaaggaataatgaggaataaatacatagtcatgtgccacagaatgggtgtttcggccaacaatgaaccacatatacaaaggtggtcccataaaaataaaatgaagctgaaaaatttctattgatagcaacatcctagctgttgtaacatcatagtacagtgcattaccttttctatgtttgtttagatacacaatatacttaccactgtgttataattgcctacagtattcagtacagtgacatgtcgtacaagtttgaagccta

SEQ ID NO: 143669 - DNA, 141 bp, Homo Sapiens
gtaatttttttaatctcatcagctatcattagtgttagtgtattttatatatggcccaaggcaattcttcttccaatacggcccagggaagccaaaagattggacaccctgatctagatactctgcagcagattaagaagc

SEQ ID NO: 143670 - DNA, 207 bp, Homo Sapiens
agttaaaattttatgccatttttctcctcttctgaaggttttattttctactcacttttaaaaatagttttcaattagtgaatattccaccctaatgactatcagcagttgaagaaaatatctgtgctaagttctaattacttcttgtataatcaattcctggaaatattcatggtcctcaatcttagagtgttaaagaaccagcat

SEQ ID NO: 143671 - DNA, 1089 bp, Homo Sapiens
ttttttttgccctgtgcacccactctttattgccgctgggccaggcaccaggtcatgcctgggccaaggaggggagatcctgacaaggggatgccaccttgtggccagcaagtggggcccagctgagctctgaggcctgtggccggctggtcaaccttgaggtgcggtccagggcacagagccctcggggagagctggggcacaggccgggtggtgcacacagcccccatgcacagctctagccttgtgagtcactggctgtgggctcctggcagaactcatccatgaactcgaggaagtggccgaacttgggctggctctcactcagcgctgggcaggccatggggagcggggtagtcccgaacactgtgcgcagagagccactcaccagctgccggtaacgtgcctggaactccttcaacagcctcttggcctccaggtactgcttgtggttcaccagccgccgttctgtccactggtgcaggacagcacctagtggagcctctgtaatgttccggggatcccgcaagcgaatgaagatgtcatccagaagttgggctctagtcttctttgggggtggaatcgggattctctgggcccgtttctctttgtgaacatagggtttctgaagagtgtccagcttgggcttggaggagtggcacaggagtgggtgcttcagcatttgttgcagggcttgtgcattcttctggattccctttggctcaatgaaggctggatcaggcttggctgtcagcagttcttcatagccgtggtacttgctgggaaggaaggcagttgggagtttcctccgagtccctttcacctctctgggtgccgttggtggtttcttttggtctttctcctttaactctaaatcatccttatggatgacggaggaaggcagttcactcacctgggtcaggaagatggactctgtgctcttggagtcctcatctgatgggcgctctgggctgaggcggacagttgtgtcactcaggtgggacagggtctcttcactatgcacagtggagttggagcagatgggaggcagtggcacgaaggtccggcaagacggggaatggccttcca

SEQ ID NO: 143672 - DNA, 706 bp, Homo Sapiens
ttttttttgcaaaccaacactgttttattgtcaacacaaccagcccactctgccctgagaaggctatggacaatgggtgtctggggtctgtgggagagagaggtcagcaccctgagaactgctggggctaccacaggggctgggtgggtcagaggtatggtctggggggccaaccgcggaggagctgggcctaggctccccctggctcatctgcagcaggccagtgagagcgatcagctccggcccgctgagccaggcagtggaggggccccgggagggtgatgggcgggggagcaccctggcagacatgatggggggcggcggcagcagtttcagggagcccatcatctgctggggggccttggacaggtacaggggaacacgctgcccccggggcagcagagggtccgagaggaagacatcttcacagcacaccaccgggaaccctgcatctgggggcgcctgctgtccattccagtgccctgtggcaggggccacgggcctgagacccctgcccgaggctgcttcatacagcggccagaatgaggggtgacacagcgtccggcctgagaacgaggctcctgagctacagttggccctcacaccggccgaggtccctctttggcttcatactttggggtcccaggcgcttagggagtcatcctcgaggggccacctcccaggccccctggggggactgggattc

SEQ ID NO: 143673 - DNA, 498 bp, Homo Sapiens
caccaagataaaggtgattctgaaatttaaccacagtgctaaagaggatgttgctctgacttcaaatggaatcaaatgccgtactattaatgatcttttagcctttggataagaatccccagcgtttccagggtggaaaatagtctacttctaatgttggggagacacacctatagttgattttaaaatgtaatctttctcccagggagatgaaaaatccaatttcagcctcatggattaggacagcagattctggcaactccccgttctcaaaaaccatgcctggctagcaaagcagcatccccgtaggaattataactctcctagggaaaactggttatgtagagaagacacaatgattcattaagataactgaagcaaataaaaagcagttcaataactacaacaaatctttagtgggtggataaaccacattgatgtggtctggggaagtctcagaacacagcacactctttaagggaatcttgcgaatagctc

SEQ ID NO: 143674 - DNA, 867 bp, Homo Sapiens
ggccgtccccgaaggccattgattggaggagactggacacagcgccggaagttttccgttgagtcacatgattggctgggagaaacagaagctccgcccgaccgtggcgcagattggtgcctaggcccggtcggtcccccagtctcgtgattggcggggcacagcagacgcccctgggctgcagcatgattggtcgcgggttgctggtcctgggtcccgggccggagccccggtgcccgatagatgggccggaagggtcgcggcgatggcccggctcagttgccccggtagacttcgatcttgctggcctttggcagcatgtcgatgatgtgggcctcgaagtccgcgtcgtgcacgccagtcttccggaactcgccccgcgtaccggttgttctcccagtagtggtgccagttgccccgggtgtcggccccgaacccgtacacgttcacctcatcacacacatgcagggcaaagaaaagcaccagcatccccgtggaagggtaccgcccgtgatgctctgtccacctgtcgtggatatacttgaagaaaggctgggttgtagatctggacccttttctttatccactctaaggaaggacttcacttggggcgtaggtgaatcggatctgcctcgtgacaaaggcgctggcgatccaccggaaggtccaggaccttgaagggcaccagctcgaagctgacgtttggcggggcaggttcttggaactctcagggtacatgaaatgggtgggtgggtcggctgccaacatcctgctcaaagccacggtatgggcctgattcatcctcatgatgaagttgtgcccgtccacgtctgccatagcaagagccgcaggttgcccaagatccca

SEQ ID NO: 143675 - DNA, 491 bp, Homo Sapiens
  misc_feature (374)..(374): n is a, c, g, or t
tttacagatcgttctttcatttttacaattctacatacttggatacaagatgcacgtgtgtatccagataaaaccactcggtttgctgaaggcaaggcggccagacggggctccctcggagcgctcaggctctggccggcacttaaaggaaaaggaccttcgtgacagaccgggaaataccaggagccaaagccccctggtcaggggtgaccacctcatttcaggactgaggatgaaggctccccaggcccagagggagccggtggaaaagctctcgtcctaggaaatcctgtctgcagcactccccgtgcccccaggggggtaaggtatctcctccccattggggtctctcattcttctaggggcctgtgggngcgcctcccaccgcctggctgtcctggccaccatctgggctcggagggagaggtccacggggccaggccccatgggacagctaaacctatctgggtggatgaggtctagggagctca

SEQ ID NO: 143676 - DNA, 1273 bp, Homo Sapiens
aaaaagggccttggttgcctttccgggcacggaaaaggggttttctccccccgttgtggatgcggatgtcccgcttgaagttcccccgtgtgcgtgaactcctttccccccggtcctggcacttgtggatgacggagccgtaggccttggactccgtgcggtcgccgtaggtgcctgagcgcaggcccggggcctcggagccgagctcctgccccgagtctgtgcccgctgactcctcattctcgttctcctcgggggcctctccgttctccagctgggaaccctcctccttgacctcagctggccctgcgccctcctcctcttgctcctcttgctccttttgctcctcttcccctttccgggcgggctccacctccatttcttgctccgagctctcggacaaagcggcctcagcttctgcggcagccatgccactcgtggggtctggcttgagctccacaggcggcggctcccggggcgcatcggctttctctgtctgctctgcaccgctggccgcactctgggcctgaccgccgcgctcctccttgaggtccctgctggggcctatgggtgtgctgcgtcctgcctgctccagcctgctcagcgtgctggtggccaccttctcctctttggctctcttgtcccctccttctgtggccaaggcctccgcatttcccccagggctggtagccggctcagcaagtgacttgagggcatggcaggccgtgatgatgtcctgcatttggaggaaagtggccacggccagcacatcatccacgttctcagggctcaggctcagcttggccgtgtacataaactccagcacctgccccaggcctgccgcgttactgatgtccaggtgcaccacgtccttctggtccacgaagagcatcttgaagtactcgctgcaggccgccagcactgctttatgagccttaaagtgaacaccgtccaccacaaaggtgcagtcacagagaagccccagctgccgctgctggttcagctgttccaagacatgctggctgtgctggggaaagtccatggctcagatttccagacagcccaggctactcttttctgacagtttgcctgtgtaaactccagcttggctcccctcgtccggctcattacctgccatgtcccggaccccaccgcagagggaggtgcatcacggccgcgagaaggccggggacggcactccagagcagacaaagggcgccgccatgttagcctcgtgccgattaacacccagcctcgtacctagcactaagtt

SEQ ID NO: 143677 - DNA, 575 bp, Homo Sapiens
tttccttgaaacattttattgacagaattaatgaaggcccaagactttggggccttggtttgtggggggagggtgtttaaggccgggggttcaggccgggggatttggggccgggtgggtggacgagtggacctgtcaggtcccaggggccgggtgtcagaagctagtcctcgccaggggccacttgagagatggtggtcgtgttgaaaagggtgctcagtagcctgtcgttgtgaaccaccatgtccagcagcaggggagtgatgttccgctctccgctgttctgggcctcgttgcccgccagctccaggaccttggccgtcaggtactcaataaccgcagcgaggtagaccggcgccgtgcgactcaggcgctgagcgtagtggccctcccgtagactgcgctccacctggctcactgaaaacgaaagctccgctcggacggtgcgagagcaggtccgcccccggccgccagcacctggagaccctcggcgtcttcttctcttggcatgcttggcgttagtgtgctatatctgtttgtccactaggaaggaacacttcctattatttgtcttt

SEQ ID NO: 143678 - DNA, 771 bp, Homo Sapiens
cccccctttccacctgggagtaaagacaaggatttcccatagatcactgggatcaccaagaatcagggctgtgcctgaagctagttccccaagcacccagagggctgtgtgccacaggaagccctcataggatcgtgcagcaggtggatcatgcaggccctcggaaactgctgcccatggcttttaggagaggaaccatgactgctctagcagaagccaaaatggaatatttggttcctgggtctcagagctggctgggaacatgaacacatgtacaggaggttcagggggcttcctgtgtaagaaacaggccatagatcatttcacaccaggcacatacttcagactcacagcatttggccctctcagaggaagtgaggggttttgtattgtctctgggttctgagtcaaccctccttcgagaagactcacacaagtctgtcaaggtgctccttccgtctcttcctgtgtcctcaggaggcttggggagcagctgtcctacctggaaacctcatggctagaacttcagaggcacaggaccctgcagatgaggcatcaggaagcctctccatctccctctaacatcagaaatctcatcacatttgagctgtatgacttgccaaaagtatatacacttccttcccttcacctggaataaagcaggacttccataggaaatcccttgatttttcctgctataaattcatgcaaaaacgtgggataggtcattttatcctcgtgccgaaatcgccacccaggcctcgctaccta

SEQ ID NO: 143679 - DNA, 935 bp, Homo Sapiens
  misc_feature (193)..(204): n is a, c, g, or t
  misc_feature (321)..(339): n is a, c, g, or t
tttacttagtttcaatattaaggtttattttttcttccagattgaaagtaacaatttaaataattatcaggatatagaaacaaatatccattcagataaaacattactgcttaaaagtggctaagaaatattttgcatgtaataaatatatttcatgtttaggttaacaggcaccatcttgagagcagtttgnnnnnnnnnnnnatttaaaatattgcatctctggtggcaaacctgaaaacaatcaagcatcttattaccctagttttcatacctaccccataccccatcactttttatcctttaacatccatccagcannnnnnnnnnnnnnnnnnngttgttggcaaatacacttacttatatcccaaacacaaaacactgacaatactccttggtaaacaaggaaatcccagaacagtccaagcctacacagctttgctcccgaagtgtggcacaggctaaacgacaggcgagaaagaaacaatcgatggcccttattgatgcagtcagaattctcctgagagtccataactgtttgagaatttgctgatgttatcctgacagaagtttcagcagattttgcaaacaagtatcagagaataagtctttgattgataatttttctatttatttctgccaaggcgactgaaaacacgaaagccttttcatcagacaggttagcatagatgtcaatttccttttcctgtttctctgtagaaggtggtgatttctctgagtgttttgcatttaaaagttttctgctaataaatatgtaaccacaaggacatgatttacatgcaacaggaacctgttggtcgcactcggggcatgatttggtggccatcttcactttcttggctcgagttgcagacatgctcctctcccttagcggcggcagcagcgacggctcgggctcctcccctcacacttcg

SEQ ID NO: 143680 - DNA, 1168 bp, Homo Sapiens
  misc_feature (83)..(95): n is a, c, g, or t
  misc_feature (120)..(120): n is a, c, g, or t
  misc_feature (310)..(310): n is a, c, g, or t
  misc_feature (335)..(335): n is a, c, g, or t
  misc_feature (349)..(412): n is a, c, g, or t
  misc_feature (428)..(436): n is a, c, g, or t
atctcctttgttgagcaccagaccccgatcccccaacgcctggttgttgtgctgcgagggcgttctctcttcgctagcgcttnnnnnnnnnnnnncgaacgtaatcacgccccccgttanaccctttgatatgcgcccgccccgatacgccgcgcccagaaacacactgggcctccggacccgacaaaggagcccgcccccccgctgggggtcgaacaccccccaaaaggggggagaagagtcttccgccccgacgaggacacgccgaggactcccccacagcacgccgcctttaggcccccccgaaggntgcccttatttccgacctctcccanccgcggaaaaaaannnnnnnnnnnnnnnnnnnnnnnnnnnnnnnnnnnnnnnnnnnnnnnnnnnnnnnnnnnnnnnnggggcgcgtgaagggnnnnnnnnnggcgagaaagcccccgcaaatttgtcccccggaaaatgggggggccccccccgtttcttaacggttaagcaagacggccccaaggtttccaagggaggaattgggtccgccccctggaaaggaagggttccccaagcaaaccgtgggtcttttgcgggaaatttttggcttggattgcttatccccctgacccaggaaagttttccaggcccagatttttggcccaaaacaaggtatccgggaacaattaaatcctgcggacgggataatttctctgtttatttcggccgaaggccgactgaaaccacgaaagcctttttcatcggacaggttagcatagatgtcaatttccttttcccctgtttctctctttcttcctcatggttttttggcagatgccacttttaggtcttcctcttcctcgtctggatatgatctgaatggctgttacttcgagacctctttctgttttctaaatctttatttactgtagaatttatcttctctctcctaactctctctgttcgcctcctcttggcctcatgcttgttttctgtagaaggtggtgatttctctgagtgttttgcatttaaaagttttctgctaataaatatgtaaccacaaggacatgatttacatgcaacaggaacctgttggtcgcactcggggcatgatttggtggccatcttcactttcttggctcgagttgcagacatgctcctctcccttccc

SEQ ID NO: 143681 - DNA, 459 bp, Homo Sapiens
tttttttatcatatatatactatatttagttttacaactttatgaagtaaactttttacaactttataaacaactttatgaagtaatagtacttccccttacagatgatactttctcttcaattatctgctgttctatttttttgatgttgtttgtaactcactaaaccaacttcatcactcactaatgtgttgtaacccacagtttgtaaacacaagagtgtctgcaagtgagataccaattctatctacacagaggtgaagggatattttagcaaataataagatggacctggcactaatgaatgagctagtggaggcctgtaactatagcaggatctgtggcctattcagttggcaaaactgaagggagttcaaaatgcttcctctctcctatagagtcagcactaatggacctgtctaatgtccatctgttgttctgtctgctcagcattaccct

SEQ ID NO: 143682 - DNA, 487 bp, Homo Sapiens
  misc_feature (361)..(361): n is a, c, g, or t
tttaaacagcaccagacattattttatttatggaactcaaatcaaatcaccaagaggcaaagacctaagtaggaggaagttcagtagataattgactaatcagagctgtcttctcatccaatttgattctaggattaaagaaaatctgtgttgtgcaacccatttataatctaaacacatacatgactttctctccctgaaacaccaatgctcccagcttaactgatactgaaaactctgcctatattggaggggaaaagagctgaagtccagtggatgtagctagtggaggagtgcaggagacataaatggagagatagcaaagacagaacaaaagttacttggaggaacaagaggtctncctggagaaggtgtccaagtggcttcttaggacactccacttatgggtcttctgggtgggccttttggatactaatagctaccatttattgagccattgccatatgccagatgttgtggtaagcat

SEQ ID NO: 143683 - DNA, 523 bp, Homo Sapiens
gcggccgccttagcgcccggtgcttgggtcggcgccgggagcgaggagcgagctacttcaaagccaccaggcctggagcggggacagaggcggcgactaggggaaggtgaagccgtcgctgcaggaggaggagcaggaggaggtgacgcaggagaaacgcaccgcccggagcccgtctgagctcagcgagagccccagcctgaggggagaaggggaagagggccgtcgccggccaaggaggaggaggaggcgggcgcggcgaggagcgagttccggcgccggtgtgcagccttttggttgagacgcccgcagccccgagcccggccgccgcagcctttcgatacactttgttgccggtcacccccgggcctgggatgcacccagggtaggtctcgtcccgggaccgagccccaccgtcgcctggtgcctcccgccttcgtgtgccctggttgtgagaagacgtctgtgtcgtgcggttatgcaatggtctctgcaagatggtttattcttgaattggaccttt

SEQ ID NO: 143684 - DNA, 511 bp, Homo Sapiens
ggacaacttggccacacatagctccaccagacaatgagtattgttaataatacacctatgaatttcaaacttccagccactcactgcttcatctgtaagaattttagtgaatgatattgttagcccatcacggaaaaatcgctgacatgcttcacttttaacatcaaggccctttatactaagatcaatagcagcttctaaaagcacttctaattcccctttcggcaaaactggaaccacccatcgaggcctgttgatcatgtcatccaacttggccaagtcagtatgtggaaatgcaggttcctcatcttcaagctgtggtggggcatcaccttgaccttgctcatctggggctctcgctgagctcagacgggctccgggcggtgcgtttctcctgcgtcacctcctcctgctcctcctcctgcagcgacggcttcaccttcccctagtcgccgcctctgtccccgctccaggcctggtggctttgaagtagctcgctcctcgctcccgg

SEQ ID NO: 143685 - DNA, 786 bp, Homo Sapiens
  misc_feature (501)..(546): n is a, c, g, or t
tgttgtagaactgtaagatagccagtaacgttgctaatatgatggttgtcaggaagtttaattaaggcttttgaaaactgaacacttggttgagacttggcatcagctaattttccagtaattaaaacagtgtcttcaaatagccatatatttgcttggctttgcgggaacagtgaaagtgtaactgatgaatatattggcattcttctggttttccaaggcagaggggtcaacacgtagccatctttgtaagcaataatagttaaactaagtcctaatttgtagggtacttttatcagcactgctccattgcttttagttactgtggaatttgtcttcgtgtagtttacaaacacttctacaactgcttggctcaggtactgacgactgatgatgtcattcacctggactttcaacataaatacagacactggaaccgtcaaggtggaggttgccccaggcacctctgtcctctcctcctcagcctcctccagctgcttnnnnnnnnnnnnnnnnnnnnnnnnnnnnnnnnnnnnnnnnnnnnnnatgaggctgaggtcggagcggctgagttccgctctggcggccgcggggaccagccgcgctttcagcagcaccacggccaggccgagaagcagggtgcaggggacacgccggcagagcctcgccatggcctagagccagagggccgcggcggcatattgcggggctccgggcggcggcgggcgccagggctgcgggctcctggcagcgcccgctcgctcgctccccctcgcgcaatctccc

SEQ ID NO: 143686 - DNA, 410 bp, Homo Sapiens
tttaatctggactcaaatattttattagatatatgttttgaaactgtgttctcccattggtgggttgccttttcactttcttgactatgttctctgaagcacaaatgtgtttttgttgaaatccagtttattcatcttttttgttgttgttgcttgtgctttcatcagcaaatggtttccacggctgtcagagcaagaccaataactagtcacctttcttttaaaccggttttccagtaagcattcaaaaacatatgattgaggatatgaatgtagaaaatgcattgctgtcatcattatctggcattaggtagataagaagcagaagtccattcttcttgattcatactctgactcctagatatataatttttgcttctgagagtagagcttgccttgtctgtcatagg

SEQ ID NO: 143687 - DNA, 492 bp, Homo Sapiens
ttttggattttattgttttaattgcaaattgacaatttataattgtataattttatggggaacaaggtgatgttactatttatgcatataatgtggaataattaaatcaaactagtcaacatatccagcacctcaatacttaatatattttgtggtgaaaacattagaagcttcatggatttttaaatgagccttgttcacagttgcataatgtgtgagcagttcggagttgaatgaaatactcctctttggagagctaggttgtttctgttcatttcctgaggtcacgtgtgctcctggaggctttgaagtttgttctgcatcactttcactgccctgtgttaggtccactcagatgctgtgtaaaggtgactgtgttttactcttctctgtatagtaagaaaagggtgggctcctcttactgtgtttagctccaaggggtggattaccaaactcaatcccagaagacaggacttccttctgtgccgttaa

SEQ ID NO: 143688 - DNA, 504 bp, Homo Sapiens
tttcagttcagttggtgcttttattctaaagccagcaggttggtgtgtagttgcctccctggtctgaatcagtgcccctttcagcccctgccctgctccctgtcccttgctcccaccccaatctggacagaggactgccctcctcaaagtcaccaacctgctctcagggctgatccttggaaaggagttgtttaaggaaacaccctaattgccttctaatatgtcaatatcagattagattgaaccaccaccatttgcattttaatggaaaagctgtgggaattgggggcttcagtggttaactggtaaagtgtggtaagagggggcctcagaggcatgacaattctggcagaaggtcacaggtcacaggccacaagccacaggctgactgggaccagagtcttcagggggctgattggcctccctgggctccctacacctgccttggggtgactgtctgctgccctctgggaagagccaatcttgagtctgtggtctgaaact

SEQ ID NO: 143689 - DNA, 559 bp, Homo Sapiens
tttggagacgccaccatttttattttaggttgcatattctagataaaagactagaaagaagatgtgggatatagtgttaggaatcagttggaagaaacaatgagattattagcaaagatgttagtgtggatccagcaagtaccattaattgaaaaattataaatatttgtcattatgctaagactcctcatatttaggtagagaaaaggataatgatctttcttaaaagttgtttatataacaaaaatacaattttcaggatatataattctggtgggaagtattgtttttttccaattcaattaaatctgaaaattattttctttttaataaaaatagaaaagaagaaactcagaaattaaaacctgtaccttatatttaaattatctaaatttctcacattcaaaactgttattaagcagttttgtgggggtttagttagatactgccacggcattttgtgccctggacaaagtagccgcataagtagttggtgactggaagagcataggaggaagatataaactgtatttcctgagaatttgctacattgtggagg

SEQ ID NO: 143690 - DNA, 411 bp, Homo Sapiens
gtgattgattgattaatttattatttttaaaaacttggaaattcataaactaggataatcacattctccttccccatctctgggtagtgccatcattttaataagcaatgctcaaataacagaatggaacctttatcatggggatggcccttgtacaacaggagtacaaagggcttacaaagtgagtagactggctcaaactaacaatcacctttgctttgttttagcactttgcttacaagtgaatgggcttctagggctaagttattagttttcaattccttgtaatttgataccaaaacatatcaaaaataataagctaaaacaatattcaaacccatattttattggctttattacacacttcaatatttacaaagttaaagttaaatgaaaagtctctattgtatt

SEQ ID NO: 143691 - DNA, 961 bp, Homo Sapiens
ccattttttggtagacggctgagagtagtatatgatggagttggtctgctgctgctgagaagccctatctttacttttatttatacttggcaatttagttggtgacagctgatagtttgggattttcatcttagccaaggtatttgattccatactattattattagagcttgttttgcaggactcctttacaagtgggtgcgtcttgtgaaagccattctgaatttttgttccattttggagactttgatttcttttggcctttcactcaaatcccatgtatctgcttgctctgattctgtgtcagctacgtatgttgtagtgttcactggggcgcttggcattagtttttcatcaactgacacgccttgtgaaaggcttggtcctggagttgttgtctttaatcctgtactgggatggccctgaggatcacagtaattctttgtagtcatgaaaatcaccgccaatccaatttctgcttcaggaataggtctaagaccttgcctttggagcatatccattattgactgaatccatttcttctgacagtcaggaattaaggtctgtgagtttgttattcctgtatcaacaacacacgttcccggagccaaaaagaaattatgttcttcttcattctcttctgttatcaacctagcttccccacctccaaagacaactgcggaactcaatttcttatgctgtttggcattcaaaaatataaatgttttccctttgaagatttgttttctttcctgccgtcctgacagatcaacatttttacttccaatagatggttcatcaagaggtgggtaaaaactttcaatttgtggaggctgcttcttggactcaactgctttcaggaattcagtaaaatattctggctttacaattggacgtccacaaatgagtgccccggccgtaatggccgaattcccgggcatatgtccggtaccgtcgactg

SEQ ID NO: 143692 - DNA, 411 bp, Homo Sapiens
gaaactataacatgattttattggttcttctaagtgccaagtttacaaaccacataatcctcaggtatggaattatctggacatttatggcacaatcagggctcttggactccattcattatctctaccctcttccaagtatttggtttcttcattgttctggcctctgtcctagtggtgtaatggacacatcagttcctgtttccacatctgtgcataccctgcatacacatcactgtaaacgtgcctgagtccagcttctccttttgcagagagatttgatagcccctggatgtggatgcagggcttcacacctgatgcctgggatgatcatccataacgcacaatgtggaaaatgcccttccaggaaaccaggctgctgtgtgtgaacgcagagaagcttcaaaacag

SEQ ID NO: 143693 - DNA, 358 bp, Homo Sapiens
tttctaaattctcatgactttattttgattgggttgttcctgacggagtgggtggaaggttatggatgtttgtatcgagaccttttttatcttccggagacacgatgctaccgttgcataacacaaacagcaccgataaaatgtagtaataggaaagagtgccagggaatcaagactttaaggcagcatcccactgggaaagcagctcttcaaacacgtccttcaagcgcgagtggcagactccttgctgggagggctgagtgcactttgctacttgaccttgccactgtctctcccgggacttcagtttcctcacttttcgctccatcgccccgcagcggtgaggtcacgcgggccc

SEQ ID NO: 143694 - DNA, 543 bp, Homo Sapiens
tttcactgtttgtagaatacttgtaattgtttacacaatccttgtaatttcttccagtgatgagggatgatgttccccagcggattttggagggagaggctgaaccaagcgactgtgaggtgtctcagacattcgtgcagcaaacgtggtaccaaaggactcacacaaggtcttctgtgcacacaggcacctgctcagtcctgttccagggtcaggttctgaaagagccagaacaacccagggaacaggggccgccagtcctgcagggagtctcctacatcatgacctcattacgtgcctgtccccgaagctgtattactttgctcccgattcccagattctggcctatgttttcttcatcaggtttatcttgatgcctgtcatgcagtattccttgaaagtcagcatccctcaaattcttgtcattcccaggagaaatggactgtgtttcaacaacctcaggcaccttctattacgtggagggaaggagaaagcccggctcattcacacactgctgtgtcctgtttttgtctgggctgtgcg

SEQ ID NO: 143695 - DNA, 504 bp, Homo Sapiens
agcaaggaagagatggggaggataccttaaagtagataaagtatatgtggaaaggaagtgataaaacagagaccctaagttgaagaaggtgttgtttcagataggggtcaaggaaataagaaatagtatgtttgtagcattggatttttagtatcaatcctgttgagttacatttagatataggtagatattcgaataagcacgtagcacattctgcttgtcctcacatccagatcatttctaggactaattctccaagaagcagtcatacgtacacttgaatcttcagtttcttcagcacttgaatgtaaagctgtattgtcatatatcaagtactgagtgaagtgcctaaaactgtgctagttgacactactttataagctgtttgtgttgctggtggttttatatttagattccaactagattgttattctggcatcttgggaagtaaatgttcttctgaattttgtatttgtttatatttatttattttaaacccctagt

SEQ ID NO: 143696 - DNA, 624 bp, Homo Sapiens
tttgtgttttcatttttaatttttgaactgttagaaccaaccacagtatcagcctcacagtagcatgtaatccatatttattaaactgtactaaatccaactaacacaatgaggcaaataactagataggaggagggggagacactaaagaagtgggaggtcccaagacaaagggtggtagcacaccattcatcaagaaaggcaatacagcagcaacagtaagcaactttgggaaaaggatagtaaaagttcaatatttgacaaggtgagcaatctgtaggatataaaagtagatttccagtagacatttggaaataaggacctagagtggagagaaaagtccaaatatgtggataattttaaaactctctaagatcagaagacattttgaaaatatcatgaaaaaaacctctaagaaaaaagcatgcacatagtttctttcatagaccttttgaaacccatccatggtttcctcaaggttatttatttctgatataggcgtaaaatgaaatcctgaagacagataacatcaatgaattgacagagaagaacaaagacctggaagccactcttcacatctgtacttgtatacagatcttatttccttccacttgtaatttctca

SEQ ID NO: 143697 - DNA, 811 bp, Homo Sapiens
  misc_feature (759)..(759): n is a, c, g, or t
  misc_feature (764)..(764): n is a, c, g, or t
ttttttacaggtgggaacaagttttcttagaaactgttatgaaggaggagccctccacccccacccccacatcttttactatctgacatgttatcagatcagaggccttcagcctcagcaacatctggggattagagggaccccacacagctggggcctcagaccaagctgatccatgcctgtggggtggaggggaaatcctcctgggaaaaatatgtgcaaggccctacaggcccaggaaaggctgaccaaggcaaggtgagtcatggtgttctaagctgaatcttttgcccatctcacagaagcaggcaggaagcaccaccattgatcagctttatatggcacccactgtatacaacagacagacaaagacagacagacagagcacacaccacttctaagctcaacactgctcaccaactagaagcacctcggttaagcacatgtgagacactcttgcataggaaagatgtagtttttaaaggaatgaagaagtattttggcaaaacatctacttccctcccaggtctggggtaaagagggacctctaattctgaagcttctacatattgaaaaatttccccttctcaatggcagtatatacagtagcaaaccttccaagtctgttgtcacagccctctacagatatcctgaatctactttacaggtgggcaaacttagactaagagacagaaggtagcctggagcaaggggacactgggactggttcaaggggaagggaaacaggaggtgtctcanctcanccaaaggcagggcctctgtctacctggattggcaagggaaaggctca

SEQ ID NO: 143698 - DNA, 530 bp, Homo Sapiens
  misc_feature (489)..(489): n is a, c, g, or t
ttttgaagtttcagaaatcaaactttattgtaatctcgtttcatcaacttgtaattctaacactattaataaatggtagggcaggtggtggcatggagagcctggggcacaacggctgtctttaaaagctttgtttgctttaccctttggagccacctcctggtcccctcacccactgcccgcctgttaagggcctgtcccgggcagcacattaggggcaaacagcctggatgcccagctgtggacccgcatccatgcctggaggaggaggttgcctctgggagcaggcgtagctgctggaactcttcttcccagccttcttttaatgctctccggcacctccgtgatttcaggcagctcctcgttggtctggtccttggctggagctccctccagctccagtgctctctcttgaggggcctcttcccatgctggctctggctccaccggctggtgctggcagtgctcttacttctgcacatggaccangagcacgtgtctgtgcctcaatgagctcctgaatctcctgg

SEQ ID NO: 143699 - DNA, 506 bp, Homo Sapiens
  misc_feature (402)..(402): n is a, c, g, or t
  misc_feature (450)..(450): n is a, c, g, or t
tttttttgaagtttcagaaatcaaactttatttatatttcatttcataaacttgtaattctaacactattaataaatgctagggcaggtggtggcatggagagcctggagcacaacagctgtctttaaaagctttccttgctgtaccctttggagccacctcctggtcccctcaacccctgcccacctgttaagagcccgttcggggcagcacattagggggcaaacagcctggatgcccagttgcagacacacttccatgcctggaggagaagattgcgtctgagagcaggaggagctgctggaactcttcttcccagccttgttttaatgctcttgagcatcaccttcacagagatataccccaccagcattagcacaataaacaggccctgcagcacangctggttggttctaccgaatgagagaagcctctctccgccgaggtccnaagaatcccagtctgaatgccctgctcttcgccttccatgtttgccaccatgccca

SEQ ID NO: 143700 - DNA, 201 bp, Homo Sapiens
acgaaatatccttatgcaatggattcgaaataaagaaaatctggtccttcatcagaactaggaaagcactgatttaaacatttggtcagacattttaaattggtaggtgttttcatttatattatcttgtttgcttatttaactattaagtgaagatgtaattatttttattcccccttaaatagtttttactgtcttttc

SEQ ID NO: 143701 - DNA, 521 bp, Homo Sapiens
tttattttttaacacctacagaactgtttatttgtttggatactggatgattcaagctcattaagtcctgggggaaaatgaaaaattatgtaggctttgaagtttcttttgccttctaggtgtgtgcttacagaatagagcatttcatcaaaccatgttattgattggctttgttgctatccgcttcaatttccactcttctttcctttgcctcccctttcagataaacaagctggaggcacgcctgaggcaggcagggtgtacagatgttagaggggttccaaggaaggccgaggagcgctggatgaaagaagactgcactcactgcatttgtgaggtttgtgctgcgagttttccagtccaactccccatttcacttctagccagccagttgaagcatatgacaaatatgctctatctttgcggcaggtgaacaaggcagcaggcagttttccctgtagcttgtcatcacatctgacgattcttctaccagctcaagtgtgctttacaaagttgcctta

SEQ ID NO: 143702 - DNA, 555 bp, Homo Sapiens
ttttttcaggttgatgtagcagtttatttgacaaaagcttcagggtaaagaggtcaaggaaatagcagaaaggttaccagctagagccagtgggtgtcccaagaaggaagtaggcagcactcttcttagaccagatggtcatccttcagcccacagtagtgatcggccaatagaatctaggggtttagcattgatttaaggggctcttcgttgtctaagcagatgtttccacagtaggtccagcagcatgtatgatttggacgtacacaagtcattattttagtacaccttttctcacagtacttatatggaggctgtacccagcactgctcagtttctcttatcatatctagaaagggatctttgttccagaagcttcccagcacaggcagaagcatcacaactccagagatgaacatgacgagtagaagaatccagggcttcatggtgctctctgtgtgtatttgggttaagttctggcagaaggcaagtcttttcccaatactctgaaggtgtctgcattgagtgtctgtagtaactggctgacagctcttt

SEQ ID NO: 143703 - DNA, 359 bp, Homo Sapiens
tttagtctgaaaaatctgaaattaaaaatgctccaaaatccaaaacttttttagcactgacatggcacaaaagtgggaaattccacacttgtcctcatgtgacaggtcacagttaaaacacaggtgtagaacacacagttgattcagaatgcctcctcagccccagaggacccacatcctggtctttcaactgcttctgatgtttcttctcacagagatgcaaaccttcctccttctcaaggaaaatgctgcaggagagattttgggagccctttagttcacttgtttaactgttgtaggccacagcccccattccagagggtcctgttccatacccagaaggaatgaatgctgcagac

SEQ ID NO: 143704 - DNA, 523 bp, Homo Sapiens
tttgaattccagaacttctttattgtacataaaaatctgaatttcttaatatggaaaccaaaggtctgcaaaatgtactctcctagctcaggatcattatttattcctcttatttttggaatctattcttcttttattcaaggaccaactcaaaggtcagcttttagttaactcttatatccccatacacatatcctaaaggcagagttaactgctatatccaagctacttcttggcatatccttgtcagcctaaataacagagagggagactctctgaaagaaaatgatgtttattcaggagtaggcattgcaataagaatacaagtgccacagtaaactatgtgcatatacagggaggtcaaggaagacaacggtttttaaagcaaaaatgattgttttgagagaattatccttggctacaaggatcaataacaaggatgttgccagttggacattggacagggagttgctgggcaaatgtcctcatagaagtattttttgtgtgtgtcaggttgtgatgg

SEQ ID NO: 143705 - DNA, 537 bp, Homo Sapiens
tttataacttttgcagttttattgaatatttgtggggtcaaagggcaggggttggtcacatccattcatttattgagtacccactatgttttaattactattctaattgcaatagatatggtagtgaacaagacatacataatccctgtctttctggagcttccaatacggcgggggagaccgatgacaatttccaaggagggtgtggccacctgccagcttccttttctccaaccatttcccctctccttctctagagcggctctgtcatgtagctctctgaagcctgtgatctgatatatgactctgtagccccaccacattgctttgtttttcacaaaccttggaattctgacagaatgtcagaattttgttacacaagccaaatatctccattttgttacacaagcttctccagttccatggagccagactgacaagaactgacaggtcactgggccatcctgctgccaactggcaatgtttaggaggctatgtgggatgatggaatcaacagagaaatttgggatcagagga

SEQ ID NO: 143706 - DNA, 506 bp, Homo Sapiens
tttgttgctttacacttttaatctctgttggtacatcagatgccacggaccaagcaatttaagttctggagcccgaaggcagttccaaaccaaagcaaggattaaaacctaactcaacccagcaaggtccttatccaagctctctagaagagaccattctgtttctagaaatgacgggacactgtgttcaaattgcttctgtcaagatacttaaaaataagtaagtgttcctcattggttacaaagctggggctaatgctcatctcaaaacgactccaactctctgagtccagccatttcaaaggacatcctttagtctctggaaatggagagtgcgattcagaaatgagctccaggggccctctttacaatcaccaaggacttctctccactcgtgagggtccggcttcctccagtgcatccttctcttcaggctggaggaagttttctatggcagagttcatcatgcccttccatcttcccgtcactgattatttagaagacag

SEQ ID NO: 143707 - DNA, 384 bp, Homo Sapiens
agtatattacaatgatgcgctgttatttatgggttaaaatatgcttaattgcttccttccttgtagcatttattttaatattctttgcagttgcattttctggcaaaaatgttccctttcaagatatttaagatagaaaataatacctaatatattttatgtcctcattataataattttgttagctacttctctttaatattacagtcctatttaaaaattctagcattaatttgtagataacacatatcttctatttgcataacatagtttttttgttggtgctattaattcaaaggaaaatgttctgtaggattaaaagatgttttaatgtttttataaaataattgtttgaaattaaaaaatgatttatgttactaaaaa

SEQ ID NO: 143708 - DNA, 320 bp, Homo Sapiens
tttacaaaagaaaaaatactgtttattccacacaactacatcaagcgcttcttccccattctcctctccccttgctgcccctccagccctcaggaagctttgtctgtgttgggaacagtgagaacctcagtgccagagcctggtccaagaggcaggaaggaaatctgggcatgggaaggtaattggatttccaagaacacaaaaatgtcagagtctcgcgttccaaactcgtgtgttccttagtccatttggctgagttctttccctggacttcacctggataaaatgccgtggtaatgcagggtcaaaggccctagctg

SEQ ID NO: 143709 - DNA, 946 bp, Homo Sapiens
  misc_feature (12)..(12): n is a, c, g, or t
  misc_feature (29)..(29): n is a, c, g, or t
  misc_feature (624)..(624): n is a, c, g, or t
cacctgcatggnatgcccacccgcacggnatgcccacctgcacagttatccatctgaacagccctctggtgcctccttttgcttgcacatgttcaaatcctcccagtcctacagtcgattgttcctagttggggtcattctgggcatgttattctaaaacttgttttttcccgtctccacatcaaaggagaaaggtctagcttgcttctttgctatagagcagggcctgagtgaggtcaggaccacagagcagaccctatgagtgttggtcaggacacagagcaggaccccttcagggtctggaagagggttccccaagctcctgttcaacctgagtgagaggctcaggctgcccccaacacactgcacagaaaaatgggccattgattcagagccacccacgctaacagcagttcagctgcagccctccggcaggcaggtcctgggaacactaggaacctgagaccctgtcccttcctgatagcggggtgtggtgacatgaggagagactgggtacctccattctgctcatgaaagtcacagagttgtccggggaccccaggcccctagcgataccagccccccacacaatgcctttctgggatacacccccccaacacggcnctgcccaaggcatcaggagctgtgtagaggagtcagctgggggtggcagagccccagggaacaatcatgggtcgctggcagatgagccatgcgcccacacagcacaggccctcacccctgcagctgggggagccctccttgggagcgggcccaggatccgggcaaaatgacacagaccggatccgggagcagactgagcaaaagtggcaaaagtattttccaggttaagggaatattttcaccaattgagagaccagctgtccctccagacccaagggttccacatccctggaggcaaccaagccagatgccaaatttttgg

SEQ ID NO: 143710 - DNA, 438 bp, Homo Sapiens
gaattttcccttctacttttccctatcacacatacattttaacatataattttacatcctgctctcattatatcttaagaatttccccatgattctatataatctttgtaatgaacattttaaatgatcaaattagttttcatttagaagctatgcttttcccttcttgttagacatttaggttgcgtcaaactttttgttattttaaaacaaatctgggcaggggaagctttgtgcttataacttctttcttttgtattcttactttggataagtttccaaaagagctattaacaaggtaaaatacttacatgacccttgatatacgaggccattcctttttaaaatattaatataagcagcagaagtaatagcaatgtaatgttttggttgtttttaaaactgttcaagcccaaccaaagcttcaatgcaatcagt

SEQ ID NO: 143711 - DNA, 286 bp, Homo Sapiens
cagagagaactatgtgagctgccacgaccccaacaacaatgcccctttgaggtggccagacgtccagtatcagatcttgggcggccggacagcaaaccagatcattttcggccacaatggcttttatgtcttctacatttcgatcgtggatccgtactacagctactgtcaactggagaccatctttagcatctacgtgtatggagcattccccgtgcagctggtctctgctggagtcgtcatcctactgatcatctccagcatcctggggtccgtttggctggcc

SEQ ID NO: 143712 - DNA, 357 bp, Homo Sapiens
actgattttaatcatgctggagaccttaactcccatcctgatacatcctgaagtaacactgttttaaactttcttagtgctggagtaaaaggtcaagtccaacacctgccttaaatttaaatcatgtgatttatagtttttaagttggcataattcaacttatggtataactgggtccctcaacagtaacctgggctaaaataggtcttatgtggttcaactcccacccccgccttccccatattttcaaccactctgattatcttccctgcacaactaacatccagtaataattcttcacttttaaaattttacttctactttaaatcaatcattaaaggaatccacaaagcaaaa

SEQ ID NO: 143713 - DNA, 353 bp, Homo Sapiens
  misc_feature (173)..(173): n is a, c, g, or t
tttaaaatacacataaaaaacctacagtttttattattagattccatcaatcctaccagaaaggggatcccggactccatggctcatggttcacagggacccaagcaagcatacggtcaacagctcaagcagcagcactgggtgggatctgggaggtgcctgagtgggatccntggggcacctgggcgggcccagacatgcctgagtgagattcagccagggttctctgaatccagtctgtgtagcttagcacctgggtgtagacaccaggccggaaagcggggcacagcgaatccccagctcacaatgccggcctggatccacgtatcattgatggggcagacagcggcccc

SEQ ID NO: 143714 - DNA, 456 bp, Homo Sapiens
tttcttcttccagctgagccctgaagcagtcagtttctaatcttaatttctgctgttcaatttgttcaagtaattccaattgcttttgcttctgctcttctatttccattatctaggtaacaaaatactgtttctgccttgctgacattctaatcctggctgcttcttcttgaggatgaagtagaactgaactctgagctacagttgtgataggcagagtctcatttatttcttgttcttttccagagtttgtaccacacgaaagtggtttatcttcactagcaagtggtccagactcaattgttagtgtatcactttcaacaacttgttcctgcccagaggataacgttctctctttgctggcaattgttcctgactcaaccgttggtgctttactctcaatttcactaacagtcgtaatcatttcactttcatcctcagacatagatttaattg

SEQ ID NO: 143715 - DNA, 603 bp, Homo Sapiens
  misc_feature (168)..(186): n is a, c, g, or t
acttgtgggggaggaattcccaaggcccctatgtcaatggacccagggatctcccttgggaaaccaggttattgggccatgtttccctttaccttatgggggcccgcgccgccaaaacgaaatggtttagaaagccttttcgaagggccgaaggcgggccggacatgnnnnnnnnnnnnnnnnnnnccgttctttttaaaaattcatattgactttattgactgctgaagttcagtctcattcatcttccagccttctctgatactgtctttctgaggcttttctacggtagacatcatagaaggtctcctggcccacgcgcactttaatcatgatccactccatcgttcctcccaggacaaaaaagaagggcaggaaccggtagatgccaaatcgctgcttcccgggcacccgctgcagaatccgtctcacctgggccctggtgaacatgctcgaccgaggtcgtggagagggatatgacggaactaagcactggatcgcccggacgcagccgagaccgccccgcccgttctcgccgtgtaccgcgacctgggagactagcgagcgccgtcctccgccactgtctggtaggcgcacgagtcc

SEQ ID NO: 143716 - DNA, 333 bp, Homo Sapiens
tttcccctaaagaggagccagatatctgaattttaaagtaaaatccccccctattttcaaatgtgggaaacgaatcacattgaaacaatagtgaacaactacacagaagaagacatacctgtggtccttggaacagaagagcacaaactagaaaaagaccagaagtctgctaactatccctcccttgggcctctttggtttataccttcaagccaccccactgctcagggaacatgactggtggagaagatctagtgatggaggatgattctgacagtcttcagtaaatactggaggctttagtgaaacagttacttttaagatttcactgtt

SEQ ID NO: 143717 - DNA, 443 bp, Homo Sapiens
gttgattcaataaatgtttattgggttccagtatttacagggcattgtcctaaatgttggggccacagtgtgaatgaaatgagttccctgtcatggcacctacgtgagaggcagaataaataaacatcacacaccgttacagacatggaacatgctttcagcttggtggaagattccataacgtaaaataaagctgggtaaggaaatagagagtgggaagctttggggtgtgttgtaaacaatctgggtggcttcctctatctctgtgcctgttcaggttcttgctggtgggctgtgggccctgacatttcagaggtcatctagtctcacaataaaggcactttgttagattggtgctggagactgaaaatatttaactggtttgtgtttctttcacctagaagaattcccaaatcaagcttggccaacagcaattgaatcag

SEQ ID NO: 143718 - DNA, 896 bp, Homo Sapiens
  misc_feature (786)..(820): n is a, c, g, or t
  misc_feature (883)..(883): n is a, c, g, or t
atccggcaccgaccttttggcggattccaggctctgattatatccgcggcccgtgaatgacaaaccggttctctgtccatacagtccaattagaagcattagaagtcatattgaatgctgaatagaagactctgagataggaccaggtaataaatgcaaggttttccaccataaccagtacatagacaaatcatcggtaagaagctagctttcgaaaacctccctaaaagtacacggcacggagaagtggggtactgggatgtcctggctgctttctgctttgggaactatccaagtggcacatcaccatgtccagcttaggtgtcttgtgaaaccttacttcctccacataaaaaggaaggaacggtttccaaagctaatgtttccaggctctgcctcgtgacactcaagtggcctcagatatgagcactggcacagagtgatgctggagaggtcacttagagagaagctgccgggccaagcacacgacaatcttggccctaagtgctcacccattcctcatgtgaccctgacattccggggaactgggaaacctgttccttaaaggcaacaacagtcctttctttcctctcacaacaaaggagcatgttctccgtgaatgcacttttcatttacggctctcaaaagaatatgccttctcaaggaatttttaatgcacttttcttgaatgtcagctcccagcaacacaagcatgggtgttgttagggcattccccccggccgtaatggccgaattcccgggcatatgtccggtaccgtcgactgnnnnnnnnnnnnnnnnnnnnnnnnnnnnnnnnnnncgccgcttcctcgctcaatgactcgctgcgctcgtcgttcgcttactacgaggcgcccatatnaggtatatatttt

SEQ ID NO: 143719 - DNA, 824 bp, Homo Sapiens
  misc_feature (758)..(758): n is a, c, g, or t
  misc_feature (788)..(788): n is a, c, g, or t
tttagatgtttccaatacctcagtttattcaaaggcgaattggaaagtcctttactggatattgtagagctgattgatgtaagcattcactgggactagtgaggagctaggcttgttgatatgtaagttttctttatgaactgaaaggctttctgtcactgaaattattttctaacaaaggagttattcacattatgtttctgtctcagaaaattgagtcccctacacaatttattccctgaaattgttttgaactgacccatccagataatcctgcacctggtagacatgggacattcaggggaagaatgaacttgggacacaaaattagatatgagatactaagttgcacatgctcattctttttatacctattacctccagtgtattggagaataattaaatatttcagaagggtggatgtaactataagttttaggatgagagcttggtgtcattcagttgagttaaatagaatgtggtccgatgtcagccatctttggcacttatgcacaaaatttccacaaatatagtttgattgttgataaaaatccctgaattctccaacgctgtacatcttctggtatgcagtgagcctagccttcctcatagctaagcaacccagcacttgttatccttgtataaaacccatgattttcttgtcagttagcatgtttttgccttctcttactcttgggcaacgcagttgacttccttgaacgtcatgtctaccttgtgccaagtgaggtacttacaanaatctgatggaagcaaggatgatattccanaatccaaacgtgggtggaatgttcttctccttgatg

SEQ ID NO: 143720 - DNA, 633 bp, Homo Sapiens
tttttgcgtcaaagatactgaatattttattttcacttttaatatcaggcaactttggtgtaaaatacattgctaccactctcagtggtcgcattgctcttgtaaactgcattcctaaaagtcaacttaatttttttatttccatattttgccatcaatttcttgcagtcttcccagttttcttgtagccatgtttcccatttgtttttttcaagaactcctttccttgggagcaaggcacactctacctgtctgaaaagttgctcttcttcagagattccttctcttactcttgggcaacgcagttgacttccttgaacgtcatgtctaccttgtgccaagtgaggtacttacaagaatctgatggaagcaaggatgatattccagaatccaaacgtgggtggaatgttcttctccttgatggagctgacccagtgtgggtctcacttggatcagagtagtatgatgaattagatggacaaatctcttgactacttgtgttttgacctgaggagctttcagacatgtcttgcaggtgcaaaaagtcctcttgccttcataaagctatttttctgaagacatttttcatcattttccctggaggggatatgagagctgtccactaagaatctg

SEQ ID NO: 143721 - DNA, 449 bp, Homo Sapiens
  misc_feature (41)..(42): n is a, c, g, or t
  misc_feature (124)..(124): n is a, c, g, or t
atttgaacattttccattcaggggtttgggggattcctttnnaccaagttgaaaattttaacaagaaattcttagaagactaatttcgaagttgaaacccttctgggattgctagagaaccccnttttacagggagctgctatttgcttcagcaggcagaatgcgtaggtggagtgagctttggtggcaatgagaggggccaacagaggctcctcaggagtgaattagatgaaggaaattgagcatccacaaaaaggaaagagtattctcctgtttgccaaacttaaaaatgctggatggaatcttgaagctaccagaagattgcttatcaccagaaaccaatattttttcaaaaatatgccttgtgtcctaatgcagtctgtatagaaagaaagcaatcatcattgttgctaaaagctaataaacacaggacatgcatgattaaaaaa

SEQ ID NO: 143722 - DNA, 633 bp, Homo Sapiens
  misc_feature (248)..(262): n is a, c, g, or t
ctttttataaaaaatttatttctctgtaaatacaaattccaacatcaacaaacaatagtccagtggaaaaatactagccattaacattgaaaacttttttcttaatttaataaatagaactttggcattcaaaattctagctgtaaaccctattaaaaaacagaacaacaagaagaaaacccctttacaaaaaaagaggcaagaatgatagatcagaaggcataagccaaccagtggcttcacattcnnnnnnnnnnnnnnnaaacaataactgtatttcaattaagtcatgaacactgtatttacacatgaggtattctgggtggttcaaaaactgaacccagcttacaaaaccaccagtcatagtgactgattatacactgtgctgtgctttttaatgtaaccacctagcaccttactacttcttgtcatcacaacaatgcgatgttaagttttatgtttatgtatttaactatttatacatatatgtacatatacatacacaccaatgaatacaatctaaaggagtttccagctcactacacagggaaggctgggctccaaagacatctatctgataattccctcatgtttactaaggtatccactagtaacaaaaacggctcttgcttt

SEQ ID NO: 143723 - DNA, 288 bp, Homo Sapiens
ttttttttggaaaagatagaaagctttactgaaatacacttaaagacataagtaaatggagacatactatttttatgaataggaagactcataaaaatatctgttttttcaaaatctacaaattccatgtaagtccaatgaaaatactaacaggctttttcctggaacctgatggttgaataaacaatttatatggaagagtaaaggaacaagaaaagttaaagtgatttttgatggataagaagagcaggaagaattgacatacaaatggtgcaggcttattaaaaa

SEQ ID NO: 143724 - DNA, 428 bp, Homo Sapiens
gtccagataattccttgtaaataaggtttttaataaattacaaatatgtaataggtttttatccatcttcttcctaactactcaatgcattgttgcatagcaacagtttttttctgcttcttctttgttggaagtctgagagtctgaaatctgcattggcttggttgagcttgggaatttttctggtaccaggggtgcaaatatccattgtagaagtcagtagctgttagtgatttcttgagcatcactgatcgaacaccaatccaaccatccttgcaataaaccaatagtatttgtgactgtttgtggtatattactgatcctggaataagagcctgtcccgttaattttggatcagcaaggactgaaatgagcatgttggcacccagtcttgacaacactgcttccaattcctttgcagtgctctt

SEQ ID NO: 143725 - DNA, 755 bp, Homo Sapiens
tcttccctagaagggcacagatgactggaaggcagatgtacatttctgaaaacacaaatgtcagaaccttccacccagggttggcccagcctgccatgtgaaggcaacacgagtgctatcacagatgcggcatcaggagtgtcagggtgagatcaggcatgcacatgaggtggaggaagacgagatttagagatgtccagcctttcgctggatttgagaattaacagcagactctctgtcttgccttagctctgaaggatacagcatcctttggtcactgtcagaggaagctcagttaccatcctcaaggatggtagaaaggctttccaaatccccctgggctaatccaggcagaggctggattctatcccgtccacctggaataatgcttccatcccccaccctcatcatttgaaatttccaagaccaagataacgcatcctttcccagagacaaaggctttttgagatcatcatccatagagttctcagttagaaacaaaatgagacttgaaaggcaagttttaggattcagggttgaaccactgtcagcctggaggggacagttataaatagagggaggcgagtctcattccttcttggtgtgctctaggactcggtaggggaccccagaggcacttctggagccgtgctcttcttgcatgactggcagggtggcaggagcgtagatctcagaaatgattgtcattggtttcccctcgtgccgaattcaacacccggcctcgtactgctcta

SEQ ID NO: 143726 - DNA, 371 bp, Homo Sapiens
tttccagtttttcttttcaaattcttgtttttatttttaagcctgacttgctgacacacagcttagtgatcaggcaatgattggttacaggttgtgtttgcatctcttgagcctactaggcttccaacctctgcccatgggtctgtgcagggttagggagcaaaagttcaagcagttttcaggtctatcccacttttcctttcggatcagccctgtcacatttccttcatacgttcatgcagattcccagccaaccagggacaaatgggtaccatgggatctctctagttttacctgcatgtgtgcagaggcttctaagtcagccagaaatgtgtggacagcccttcagacccctctgtaactgtctcatt

SEQ ID NO: 143727 - DNA, 467 bp, Homo Sapiens
  misc_feature (247)..(247): n is a, c, g, or t
  misc_feature (389)..(389): n is a, c, g, or t
tttttcgtagatagaagtgcattttatttccctagattgcatttatttaattcatataacatgagaaactcctccagtagcgtcaactagggttgataagaataatcgataaagcaaaataaaaacaccttctccaagattttgtaactgcaagcgaacgcatggtggcgctgttgactaagaaggcgaattaaaccacaggcattgtgcatgctcggtgacgcacggatccagtgtggtaaaccangcggttgagagcccaggcagatttttgagccagcaagtctgagcctctggaaaggcttattcactaggccgtctacaaaggttgtggggcaaaagactgtttccaagcgctgtctgaggttcagcttggcgacattccctgnaagagcgtgacggaaagtgcaatggaggcgggaggagagcgatttcttagacaaaggcaagtcttgcttctctttgtt

SEQ ID NO: 143728 - DNA, 342 bp, Homo Sapiens
gagctgccttggtgctgtaaaggtaagaaaatggaggctcccagagatttgacaacctgcccgcagcaatgaccaaatcagacttggtgctaagtctgcacctccccaaagtcagtgtgtttgtatgctctgctgccactgccccccgctggccctgcacatgatgtgaaccatcaggcagacctggagttctgtctcctgggtgggctgcttgccaacaccagggtggctggcccctgcctgtgtcaggtcctgcagtgttgactctcttcgtgtgatgttgggcaggtggagctggttgtgctgagcctgaggaaacatccaatgtgccaaactttaaaa

SEQ ID NO: 143729 - DNA, 480 bp, Homo Sapiens
acataatggaaagagccatctctacgtacagcagaatatttcctgtaataattcttgatgctgtccagacttggaatattgaatgcatcatgatttcctttgatatccagccacttggttttttccatgactcttgtcttcttcagaataccctggtaggtttgccattctacctcatgctgcctggatcccaactgttcctttgttttggcatctgtcaggtctcctgttgctaggacgagagctggttgaatgatgtcaatagtttcagaacagaatttctctaagtctaccgctctgcctggatctcgaaacctgctcaggtgaatgtcggatatctgcaggccccagaagatgttgctgtctccgggccctggcgcagggtgcggcctcctggggggcgcggggcgcggcagcggcgagggctggcccgccaggccgtagtgctccaagagcatggccaccagcgctgcggccgca

SEQ ID NO: 143730 - DNA, 470 bp, Homo Sapiens
ttttattttggtggtagctttattgaaatataattcacaccataaaaatcaactgtttaagtacaattcaatacttttttagtatatccacaaagtcatgcagccatccccatagtaaattttagaacatttttatcacctccaaaagaaatctcataccgttatggtgaccctccatcctcctatccctccagcccaaggcaaccactaacctactttctgtccctatagatttacctatttcagacattttatataaatataattataccatatgtggtgtttttgtaactgacatctttaccttagtgtaatgctttcaaagttcatgcatgttgtagtattgtgtcaacatttcattcctttttattgctgaataataattcttgtatggatatacaacatttgttcatccacttagttgatggacatttatgttgtttccagcatttggctattatagataatgc

SEQ ID NO: 143731 - DNA, 514 bp, Homo Sapiens
cagaaaggattaaaacgttgtatgtaccaagaaggcagaatgaagaaggatcacgttcacaaatgctgtatgtttaacaaaatacgtttagatggtaatatccaatagtcttatcaagtgctacaatctttttaaacagggaatggccaaatccagtgctattgaaacagcctgaagaatgcaatcttaatttgcctgtatgggacccaagggttagtgtattattttttcccctaccaattcacactgtgcaataacaagtaaaaatcatctgcataaactccagggagacttccagccttttacttatgaatggtcatgtccgtattacactttcttttagataacctcaactataattgtcctcaactataattgatgtgagaagcataattatgtaccctgtaaaccacatttaattgtacatagtttttaatacagattttactaacattttaatttattctatatagaactaccttgtaagtcaaagttgtgtgggcatttgtgcttt

SEQ ID NO: 143732 - DNA, 519 bp, Homo Sapiens
ctacactactgtagtatgcacagtaaacctgattgtttgagccttttgctcaggagcatgcccactgtggatatagttaacaggctggagaaactgccctagacatagcaaagagactaaaagctacccagtgtgaagatctgctttcccaggctaaatctggaaagttcaatccacacgtccacgtagaatatgagtggaatcttggacagtaggagatagatgagagcgatagatgatttgggatgacaatccctagccctatcaagaaagagcgctcaccctagacctcaagagcttttgccactctttccagcatcttccccccaggacaaggtggcactgccaggattcagcactccaagggacaaacagcggctctcctatggagccttcaccaaccagatcttcgtttccacaagcacagactcgcccacatcaccaaccacggaggctccccctctgcctcctaggaacgccgggaaaggtccaactggcccacctatcactccccataga

SEQ ID NO: 143733 - DNA, 938 bp, Homo Sapiens
tcatttaaccttactaaatcttattttttgcctttccttttgcctcatctttctgcttgcttagtattagaaagatgccaccggaatcccaagattatttgaccctacatctcctgtcccacagtaacctttcctgatacctctgagacaaatccagggcagtcccaggccttgctgcacaggctattcctagagccagggacgtaaggttagcttcaccaaagtctgaggcacagagcaggatcactgaagaatgggtaaaagaatggctcccctgaagaaagcaaagtctgggaataccacatatatattcgctatcctaggcaaagctgtcaaacttgcagagcgtccaaacatcactttccagctccataaatattttgctgcaatcaatgtaggaacccataaaacacgagctgtctgcagagtactgttcaaagcatcatgttccaaactctgatttcatattttagagaagcaatccaaacacaatggaagtcagatagtgaggtcattagtgagatgccattttagcagagagctacttcaatcaagtatagcttgctctaagttccagattccatctgtattacactacagagatgcaaagctcagaaagaatgttccctgatttaactacctatcaagctaagacttgtcctgcgtggaggaaggcagttcaggatgaaagggtcctgctaccagagcgaacatttccttctcacttgaactggtgataatccggtgggtttctgatccaggatccacacacctgcttccggagtgtgctccaggcttcctggtaagaggacgcagcctccttgtactcctggtaggtatccagcttctgcaccctgagggagtgtggccacttgtcccttgcattctcccggccgtaatggccgaattcccgggcatatgtccggtaccgtcgactg

SEQ ID NO: 143734 - DNA, 388 bp, Homo Sapiens
tttttcactgtaaatttttttatatgacaaaatggactttattttgcagtattagacttctatgattaacatcccaggaaagtgtaataaataattcaagtgatgacataggaaactagtcattgaagcaaaaatctttgcagatcttcctttcagacatacccaggaattttcttcttgcaagatatctgatttaccatatataggttaagaatgtctaagctgacagcagaatttttgacaggagataaaactcccagtgatttcatttttgattttaacctgtgtttttcaaaatattccttttgctttcttctttcctgcttgatcagaaccctggaccgggaccccccgacccaattcatcttcccaaatcttttgacactga

SEQ ID NO: 143735 - DNA, 482 bp, Homo Sapiens
tcccctccccgcacaccaactgaacacagctctgagaagcaaagtgtgtggacccaaaactgccaagcctgagtctgtcccgtgcttctgctgctccatcctttgagttctgcattgccatcctgacgtcggccacaggaggcctgctttcttccagctgttgttctcaagttccctgcccctccacatcgcccgccagtggtgttgggttttcgttctgcttccaacctgagtaaagtgtgtgtgctgagttcatcccatgttctcccatggtcatggcttcccggccccatggggacccctctcccatcccagcagtgactggtgacagtgtgcaggtgcagtgctagctcttcgttccctctaaagggtgtgcactctttttattcctactcttgcaaaaacagatacgattatgatttcccatggaaattgaaaagtctatttaaataatttaactattaaacactttcactggtaaa

SEQ ID NO: 143736 - DNA, 392 bp, Homo Sapiens
aatttataaagaagagacatttatttctcagttcctggagggctgggaagtcccagaatcaagggtccagcatttggccagggcttctctctgctgcccagatggcacttgctgtgtcctctggaggagagggacctgtgtcctcacatagcagaagagcaggaaggaatgaacccactactgaaagcccattttgaaagggaactaattcattcatgagggcagagcccttgtgcctgaagatctcttcagaggctccacctcccaacactgctgcttggggaataaagttcccaccgtatgaattttgggaaacacattcataacatagcacatatattattttcattcgaccctaaacctggttttatttgtatctttttcctctgccc

SEQ ID NO: 143737 - DNA, 305 bp, Homo Sapiens
  misc_feature (13)..(13): n is a, c, g, or t
caggtgatggganaatttcagactttgatttgggccttggaaaacaggttcagtttcagtagatggaggtaaaaggaggcaaagagcgaccttaacgtaaatccaaggctgaaggaaggaggctctaaggggtgtgtgggtgattaggagtaaagtatcttgtctgaaatgaagagtttctatacagcatgcttatttggagtcatgcctaacaagattactttgggtctaattttggaagcttggtactccagggagcttggacatgaatttaaagacaatgggaactcacatttaagtttctg

SEQ ID NO: 143738 - DNA, 454 bp, Homo Sapiens
ttggtgtcctggtgtcatttattcattcattgaacaagtatttacaaaacagctgctttatgctaggcattgtttctgggcactgggaacacattggtgaacacagatagaaatggtcactgaccttgtggaactttccatccaatgaaactaggatcattattcaaatgactggacaaatacataggaaataactgtgttaagtgctctgaaggaatgatatatagtaccatggaagtgtgtaactgggggacttgactgagtctaaggagttgagaatgagtttgcaaaggacacagagaaagacaggtcagagcaataggaggagaactggcagtgacatcagagaatcaaaggaggaggtggtcgactgccgagatatggggagctatgagacacctatttgccttgactcctcacccgctagttgtgagtacaggtatggaaaggctct

SEQ ID NO: 143739 - DNA, 618 bp, Homo Sapiens
aaagatacgatatttcagctaattcaggagcacgtaaggatgaaacttaggataacctaaaatcacacaacctagagagaagcgcatttttgtcttcccccattttctaggcaaaaatgaaagtactttgtcctcttgaaaaacaattctctaatgaatatcctatgttacatagaggcctgtgtaatgcatttgtgtggccacatggtgtcaatttcatgaatatacaataatattattaattccctgctgaggacattaactggtttccaaggctgcttgttgtttttgctactacaaataatgcattgatgataaatacttttacatacatggttgtatgtttatctgaactattttcaccaatatattcacctagtgtgtatggaagtgtccatttttgtcatacccctggtaaccctgtgatattatttttaaacattttgctaatggatctctgttcttgtttgaatgtatttaatttccagcagaatgagccccattccttattttgattggccatttatcatgtacatatggtgaaatgcctattcgtgacttagccaatgttgtttctttttcttactgattactacagtacatttttatatgaaagca

SEQ ID NO: 143740 - DNA, 376 bp, Homo Sapiens
cattggaaacagactttttatttaacagaaacttacacacacttggtacaaaccctacattatgcaaacctttatcacagttctacacaggttgtcacttgtgggagttggttggaaagcagattattatgataattattagcattttgacaagggacattttctaccagaaaacgtcagagaaaagggctacaaaatgatacagacactctcggtgatcccctccaccaacaggactggctttgaacaggaaacctgaaaggactggcaggaagtcggtgcccacctgccctgccctttcagaggccaaagagattctcaggctcagaaccatttcagtaacactgtgactcaaggacctctgctgaccagaata

SEQ ID NO: 143741 - DNA, 467 bp, Homo Sapiens
acatgctaaatcttagactttatttcaaaataaagtagtaaattatgttctaacaaaagaccaatgacatttataagggagaataaaataagcaacaaatttaaagcgaaactaggttactttatgctgtctgcatttgtatagtggattttggtgctaagatgcaagtctgaaccagtgtaattctgtgctttgctgtgtttacaactttccttaaaaaatcaattcctaaaatgaacgtattttcaaaagtcaaattggtgaacttgcactttaaaaaagctttttaaaggcacatttttatgaatcttcctttccataatctggtaaaaatcatttttcattgtagaggcaaaactctttttttggacatatccaacccatatttgaaaaagcaagtgagctcctttaaacctatttgcaaaaatcttaaggaattctgattgtttctagaagctaaagattac

SEQ ID NO: 143742 - DNA, 215 bp, Homo Sapiens
tttcgaacgctcgtgactttattgcagaaaagccccgcagtgctggagcgcagcctaggctggggttgcccctgctggcgtccgcgggacccagtctggcttttgtagcggggcagggcggggtccacgcagggcgcaaaggcggggacgcggccagcacggggggtgcccagcacgggggccttacttgatgacagtcgcttaccagtcctgaa

SEQ ID NO: 143743 - DNA, 430 bp, Homo Sapiens
ttttttttctcagtaaaacaattactttaaaagctgactaataaaaagggtaagtgaaagaactcttccatccttgacccttcctcacttcctccctccgactctaccagtctggatgcactaaagcagaataacctaaaagccatgaaaaagtgctggtatttttcaggatctcttcaagacaccttccgtcttggtaacctgaattctctctctgatcaaggcagctgatggactttcaatgtatttggagatgccggttcaaaaacgtcatcatcatcttctgctccttcttctatcggtttcatcttggcagaggctcgctggtgtggggatgacacatgaagagaggacatgctggaggtaccccgaagaaactggtgcaagccgtcgtcactgtcactggagctggctatactgttcctcattt

SEQ ID NO: 143744 - DNA, 694 bp, Homo Sapiens
cgggtgcctgaatctgggctccacccgctccttcaccttggcaatggagcgtacgtagggcgtgatctgcttggtgatggtggtcaggtaggcattctcctgcctcagctggagaaggtcatggagctgggcttcataaatctcctgctcattagccactcgctgataggcttcctcccaaatctcctggaaagcgaaccgtcatgccctctaaagaaggcgtgctccaaggcgatgtgcacgtccagttgcagggacttgtgcaggacgtctcccatgatctccgccttgatgagcgagtggtgcttggtgaggtctcggtgcagctcctgtacctggtcctttaggctctgcatctctgcctgcaggtgccggtaggagtcctcatagtggcggcagtgctctgcgaagggcgtgttctcgccctccgccagcagcaccttggtgctgatggaccggtgcagcgtgggcttttggacgggtgaccccgacatctttcctactggggaggggcagtggggccccgtcagcgccttggggcctaagccccctgccagcgtgttagcaccacttgcagcagctgccacccgacgtggccccagcagcagcagtggctccagacagcgcgcgaattcagctcggtggtcactggcaatcttgctgctctgaataggccttaggtggtgcggccgca

SEQ ID NO: 143745 - DNA, 544 bp, Homo Sapiens
gtaagatcactcagagttctatttagttaatgttacagcaatgttcgtgagcaacttggctttctttgtgaaagaatcaaggttgtatttgacagggcctctgttaatgcattttaggagatgtaaagacatattgattatctttcatcatgctaaaagaaaagaagtagtgtcgtaaaggcaatcagaaaaagtcagtatgttccacattaactcatgtaccgatttattcataggctcaggtatttttaaagacagagaagttctaagaaaataataaacattgacaatgatgagaaaacttattgcttaaacagtaatcagtagtgttaatgtgcacaaaaagtgctttgaatagtgaactattctaaaggaggagtaagaggtattatactacagatgacacggttgtggtatggtatgtggtgtcttattatttaacacggccagtataaaattatataacatcattaagataatgttcttcaggatttcaacatacatatgtctccagctttgtaaggtttttccataagtgtagtgc

SEQ ID NO: 143746 - DNA, 349 bp, Homo Sapiens
ggaggctccctctcctcatggtctttcgggtcctggtgattttctgggaggagcagggcaccagcttccttactccccctggctggatgtccctgagctaagtcccaggcgacttccatcgcaggatgcagctctttccctcagccagccccgctttgtagggcagaagctcctcccaggctgagggctgagcttcctaggcaggtggccctgacccagcttgctggtgggtttcacactgatagcagcaaacccagaagaccagagatggctttgacaccaggcacccagcttttgaggcagggcacccctgagagacagtcccccttgtcttcaccccatcccagat

SEQ ID NO: 143747 - DNA, 454 bp, Homo Sapiens
  misc_feature (75)..(109): n is a, c, g, or t
gtctgatgattatatttttctaggtcactaattttgtgccctatgaaaactttatgtaccccatagtcaagtacnnnnnnnnnnnnnnnnnnnnnnnnnnnnnnnnnnnagccaaatagttatagtttttatgtttaggtctgtgattcattttgagttaaattttatggtttaaggtagaggtttgaggttcatgtttttttcctccattttagttgttctgtagcagcatttattgcaaagatattctttctcaatggaattatactggcaatattgaaaatctgttatctggactctattctgttccattgatctatatgcattttctttgtatcattaccaccttgtcttgactactttagctttgtagtaattctcaaaatcaggtagtgagtccttcagctttgttctttttcaaaattgttttggcttatatctttcttatataaat

SEQ ID NO: 143748 - DNA, 487 bp, Homo Sapiens
gatcctcttcgaagctgtggtatttgagaatgactgctcctcccaccgcttttctgagggtgttagcaggagtgcaacagagccttacttcaaggcccccagcgggctggctggaaccctgcttcagctcctccaagcacgtgcggccaagttctgggagccacgtcgatgtgggttgatgggtcccctgagacgccctctctgctcagaacacagccagtaagccatgggcagatcacaacaaacagcaccctgccttctgctccgcctccctccatctaccacactgccaagttcctaagaagcttaggggagaaggaactgctgtggtgcttagaatgcagtgtcttgcctgaaagtattttctcagtctttgagaaaacagtggaactgactcatctggtcagagctttacagaaatgtgattgcagatctcttgcaatttcattctgctttagtgtcagaattcatccgacaacgtgccaaa

SEQ ID NO: 143749 - DNA, 463 bp, Homo Sapiens
  misc_feature (451)..(451): n is a, c, g, or t
ttttttttgacaagttagtatcagtttattttggggcaaaaaaacttgaaagccatgcaagtttcgtcacaacgcacgttttccatgagctttttgaagacaccttatctttgacgctgcccgagttccagagggagctggccctgccccttcctgttagattgccacggtgctggggcgagggacagagcaggtcagcagccccagggtgacctcccccagagtgcggcagacggcctgctgcgccgtgtgcggcctgggcctgggccggttgtccagctctgagctccagtgtcctctgtagcccggagacagtagcgcttgtcaggcccctgtgcagacgtggcgaggtagtgcaggacaagcagagagcctggctccggggtcagcagccaggagagtcccagttgctccagtcccagagcctccccagaggaggggctggcattgngtggggagcagg

SEQ ID NO: 143750 - DNA, 550 bp, Homo Sapiens
gaaatggcagaaggcctaaatccaaatttcttatttttttaatttaccatagaagttttgtgattaaattcttacttctgccagtggaggtttatgcctgaaaggtcatggggtcctgtctgtaaatagacctaaagagaagtgcagtatttattctttgtaggcataatgtgtttgtcactgacaagcattcatgttcatcccactagtcttttattgcagtcttttattgtcattttcagccttatgttggagagctttgctttctcatcatgttcacattgtcttaagttttgtgagcttctgagaaagagcttggtaaaggtttaaaggggactttgttccaccagggagcattttatttgggcgtctcacccttttctaatgaaagctgttgtaagccacctctgacttggaaattctgaaagtatgaatattttttatatcttaattgtaaaatgccagttctccattatttagatgaatagtagaacactgcaccctttgtgcagtgtttttgtttctctactgcattcctacccccaccaaa

SEQ ID NO: 143751 - DNA, 343 bp, Homo Sapiens
ccctatgaaattttaaatatatgcaaatatatatatcattagattcctgtggtggataataatttcttcagattctaaaacaggtgtctagtgactgcttaattgtttccaagttgcatcaaagatgaattggtaaataatggaaatgagtagtgatatgaaaatggttatgtaactacatattacttgtttctggtaatcaagtcttattttttaaaagcctattgtttttcagaattgagatatttaaaacttgttataacttcttcctaaaaatagaagagaagaggaggtactgtgtgttacaaaaatttttttaaataaagaattcagtgtcactaaa

SEQ ID NO: 143752 - DNA, 353 bp, Homo Sapiens
  misc_feature (80)..(96): n is a, c, g, or t
gcaactcattctttttcaaaccaaaaattattagacccaaagctaaacagcaccttgtctaaacacataaaacaaacttnnnnnnnnnnnnnnnnncctcttcctggcattttccctcattatctaatatccaagtgacctgcatatttctgattgctctctttctcccctcccatttttccctcttaagccttgccactgagagatgatacatcagtttttcagaaaattagcagcagcagcagcatgtccactttattgtaagttgctttagttttgtttgagttttaagataaagcctatttccggggaatattttctttcctgtgttgttttacattaattaagaaaaa

SEQ ID NO: 143753 - DNA, 671 bp, Homo Sapiens
cagtcgacggtaccggacatatgcccgggaattcggccattacggccggggaggcggcggctccaggacctggcggcgccgatcggggctgcgaggccccatggcgccgcccccagccccgctcctggcgccgaggcccggggagacccggcctggttgcaggaagcccgggactgtgagcttcgcggacgtggccgtgtacttctccccggaggagtggggctgtctgcggcccgcgcagagggctctgtaccgggacgtgatgcaggagacctacggccacctgggcgcgctcggattcccaggccccaaaccagccctcatctcttggatggaacaggagagtgaggcttggagccccgccgcccaggatcctgagaagggggaaagactgggaggagctcggagaggagatgtcccaaacaggaaggaagaggaaccggaggaagtcccaagagccaaagggcctagaaaggctcctgtgaaggagagtcctgaagtgctggtggaacgcaaccctgacccagctattagcgtggccccggcacgggcacagccacccaaaaatgctgcctgggacccgaccacaggagcacagcccccggcacccatacccagcatggatgctcaggccggccagcggcgccacgtgtgcacggactgcggccgca

SEQ ID NO: 143754 - DNA, 413 bp, Homo Sapiens
  misc_feature (398)..(398): n is a, c, g, or t
ttttctgtcttgaggcgggaagcttgtatagtttttattgtttttgctgtgtgttttccagccaggttgtttgtagatgtctgaggtttttcttccatcaggctatctttagacccatttcttctctgatgaactgtagcatccccagaaccctgagcatccgaagaatgggtcaccggaagtggtggtacaagatctgtttttgaattcacttccgagagaactgatcgctccccatctgaacactgggacctgcgatactggcggtaacttcgtggcgaatgagaatgcctgatgcggattgggtcaccttgtgtctctattttagtgtatggaatctcttttaaattgttcttcggacaatccgatggatccacaagttcttttggaatgtgctntctaactcttctttt

SEQ ID NO: 143755 - DNA, 462 bp, Homo Sapiens
  misc_feature (230)..(230): n is a, c, g, or t
  misc_feature (232)..(234): n is a, c, g, or t
  misc_feature (236)..(238): n is a, c, g, or t
  misc_feature (241)..(241): n is a, c, g, or t
  misc_feature (243)..(243): n is a, c, g, or t
  misc_feature (245)..(246): n is a, c, g, or t
  misc_feature (248)..(248): n is a, c, g, or t
  misc_feature (255)..(255): n is a, c, g, or t
  misc_feature (257)..(257): n is a, c, g, or t
  misc_feature (261)..(262): n is a, c, g, or t
  misc_feature (264)..(264): n is a, c, g, or t
  misc_feature (268)..(270): n is a, c, g, or t
tttgactatggttttctctggtgagaaggatttactggggagaggctgcgttccagaagaaatgagtgtttttaaagctccaagccaaggcagggccttgactctgtccctccccacccctggccctggattcagagaaatgaccctccctcccactgtgagtccccttccatctgccagaaatacccccagtgactgccggggagggtgcgggtgggggtgggggtttntnnntnnnacntncnnanatccctnangctnnancccnnngtgaggctggagcccggggtgaggtccggagcccagggtgaggtctgggcagatgtgaatttagtcactccaactgactggaccagcataaggcgctcggtgcccgctcagccaggactgccaggaggggcccgctcaagcttctgccaagtcccatccagaaccttcccaggtgggcagctaatttgctgg

SEQ ID NO: 143756 - DNA, 943 bp, Homo Sapiens
  misc_feature (773)..(833): n is a, c, g, or t
ctagaatgacgacttctgatctagacaatctgtgcctgctacgagatcttgaatgcctagatgaatacgggcttctgcttcgggattttccagaccgtctgagcacagggctgtagggactgcgagagcggcgccagctgctgctgctgtagggactaggggacacgtcgccgccccgctcgtaggagctgtggcggctgtagctgggggagcggcggcgactgtaggggctcggggagcgcggcagccgccgagaataggggctgctgccacctcctgccgggctgggggacttgcggctcctcaggctctgagaggccctgtgggacaccgggctgtcgtcccggcctcccagtgggctgagggaccgccgccgcctgtaggccttaggctcggtcttgtcctcccggtaggccttgggcggttccttgtaggccgaaggcggctccttggacgacttagtccggctgcggtgggccttcgagtcccggtccttgcggctgctactgctgctggatgtggccgaagcgcttttccggcggccgccgctgctgctgctgctgccgctcttggcgacctcggcccgttcctcgccgctgtggctgtggcggctgcgggacttggaggcctcgctgccaccgcgctgcccatcccgccgccggtgctcgcggtggcgctccttgctgcggccactgctgctgcggcggtcccggcggggcctgcgctccgacccctccccgcgccgctgggtgccggaggaggaggccggactnnnnnnnnnnnnnnnnnnnnnnnnnnnnnnnnnnnnnnnnnnnnnnnnnnnnnnnnnnnnnagcagcagcccctgctcggactgggagctcacatcctcgtattccgccagcggggtcacacccccgctcgtcgggagaaccacccgcctcgtactagggctgtcagccga

SEQ ID NO: 143757 - DNA, 471 bp, Homo Sapiens
tttaattaatttgaggtaggacacaaaatatacaatagaattttttgtgaagcactgctgaaggctttttactccaagaaggatcatacattattctttgttgacaatgccagggtgattcagaaggacaagtaaaatgttagccaaggcaatgcacaggagcgcagaccagccgcactccagcccctcttctctcagtttccttaggatcctctattacccgctcccctccattcctaggcccagcctgtcattcctctctatggagttactgccagattgccttgcctcactgtaactggaacatcaattttccccatgaatctgtgagccctgcaaagtcagagactgtgccttgctaacaccctagtcctcaaaagcacacaacagagtacttgacacccaggaggctctcaggaggcattgctgttgagtatagaaagctagagttaggtaagacattgtggaata

SEQ ID NO: 143758 - DNA, 685 bp, Homo Sapiens
taattgtgaccaattttattttagaactgcatttttgggtgttttatggtaatgtagattttattcaatatttatttttgcatattttttaaaaaattcccaaagcgatgcttttatacacatcttcccaatagtagtcaagtttggagatgatttatactgtagcctcaaggatgcaagaacaatgaagtaaaatcacaattctgggtaggtttttacagatatctgctaccaagacgagcaaaaagctcagggttttcagtccttttaaatagtttttcatctaacgcaagagaaataaactttggaaaagttcaattttgaacccctcctgtggcttttacataaaaaagctttatgcatttatgttgtaggactcaggcagttcatattagttgctgttttaggcactgctgtaagtactaaactacaacagactcaagaaatccactttttcaaatatgattattaaatggctctcaaaataacgttatggaagttacactgtcagaaggatggtgacttgacatgtgatgcactaaacatgcaggttttaaattctgccttgtcctaaacatcatataatcaaccaaagtgtagatttgataatggacctcaacaaggctcacatttgagaaatgaaataacagagatgaatagacttataggttcatcatatcaaaga

SEQ ID NO: 143759 - DNA, 465 bp, Homo Sapiens
ttagcaattttcatattttttattatgattaaagtttcagaaacaagtttgagttcttacagtgtacagcaatatgtaagactattttacaaaatgtgctcatggaaagtaaagaatactaacacattgggtctgtccaattgtctagaaccttaaagctaacttgagttttagcactttattatgaaaaaaggagcaaattattagaaaacattgacataattggcttattaaaaacaaaactaaactttccagaaagagcatgcatgcagtttcaatctcttgtaatcaaagagaggcaccttaggcctgcaaatgacaaaaagtttcaattttaatcagtataaagaatggatcaggcatgtttaaaagatgtcatcatcagaatggaaacaaatcatcctctgacactcagttaaccagagaaatcaattaatcttcatagccttaataatccaataatgc

SEQ ID NO: 143760 - DNA, 616 bp, Homo Sapiens
  misc_feature (68)..(68): n is a, c, g, or t
  misc_feature (78)..(78): n is a, c, g, or t
atctgccctcacccattttcctgccttacaggtgaagacagggaagccccacagcaaaaaggagaggnccagactgtnagttcccagcccggggctccatctaccggcttgacgctggaactgggaagcacagctggggttcagagggcgatgggctccctaggcggcccttcccctgtgactggccttccctctgacacatgcggctttacccacctttgtctgtccctgatgtctactgcactccacacagagccatatagggtcagctgccattgccggaggatgccgacctggaatgactcatcccctagggcagcaaggggcagctcgtgagccacgcccctctgtcagccatgccagacagcagaggccctgcccgccctgccacccaaaggggctcaggccacatggtctgctccaggagctgcctcattgtgtcccactgaccccaggttttgcagaagggcctcactgggtgcccttagggatggaaagggttgaaaggctgtactccaaagcagagtcttgcttttttctcccgtattttgggggttcagctgggattagaaaaaaatgtctttccaccaaattaaagaaagctttgaaaaccaaa

SEQ ID NO: 143761 - DNA, 969 bp, Homo Sapiens
  misc_feature (24)..(24): n is a, c, g, or t
  misc_feature (81)..(81): n is a, c, g, or t
ttcggttcccttcccttccttggnccttttccggctcccgatgggggcccagtgggccggggttccaattccttacaaaantttgattggaagcccacattccctttgggtcaaaatatactttccagcattgttagtaaacggtccagaagaacggtgaaacagctacccagccaccagggtcttgagggtgttgggggtgatggtgtaaccatcttcctccaggaattttcagcccccggtgggcagggcagggcgaagtcatcgtgcaggtatttcccactcatggcactctctaacagcctttgtctgtccctgatgtctactgcactccacacagagccatatagggtcagctgccattgccggaggatgccgacctggaatgactcatccccgacatccctgatgaccagcctgtaggtccctcgggctctctccccccagcatcgcacagtggagaaggtccagtcattgaagccgttgggatccgagtccatgctgcggggggcgccgatgagggacatcatgccactggggcagaacagcttcagctccaagctgccgcgccgtgggtgagtgatggagactgtcactgccacatgctccagggtcttcagccctgacatctccaggtccatccattccacaggacctccagggaacggggggactgcggaatcgccttgttttcttttaacacgggactgacgtaggatgctaagtaagggacagatgtccagatcttggctgcattcacgagcctccaggcgttgaggaggccgaaaccgtgctggtggctatggctgaagcctgcctcgttggtgacccactctgcacggcgatcctcataccgggtggctgtgaagacaatgatgtgctggacgtcacgccacgtgaggcagggccgcacctgcagcattaaggctatcatgccagctgccagaggcgctgcagctgaggtccctg

SEQ ID NO: 143762 - DNA, 583 bp, Homo Sapiens
cttgttctaagaatatacccaccatgaataaaggcacatgtctaaaaaggacattcagaaaaaaaacgtgtgtaaaaggggagaagttgagaaaagaaactggtgccacaggatgtgtctttatactattctgtgaaattctatcaaaatcaaagttttaaataaccactgaagtgtaaaacatagacagagtgcagtatgagtttattagtttcctactcaaaacaccctgtattctcaggaaaacaaaggggcttgaatggctgtgtgtgacatgcttcctggatgcccaaagagatgacactatgtgcactcagcaggctgcagggccacctgccgcccaaacagctcaaccaagactgataacacagagtggagggcgggcatctgataacacagagtggagggcataccttttgtttcacaaatgcagagcaagtgagagagaggcaaccgacccgcatcccacaggtcgcctccccaccaccaggtgcatgagcagagctgggggcaagcatggtacggggaactgaatgccctcctagaactgccggccacttggatggtgccctctggccagcca

SEQ ID NO: 143763 - DNA, 384 bp, Homo Sapiens
tttcaattgacttgatatgatttattatttttactatttataagaatggaaataagttctccttagtttttttcttggagaaagtctgacatgtgaggcacagatgagttattaaaggcagatgactttccagccttgtcttaaatgttccattctttaccttagaaattatttaaatttgtgtcttccaaatactgtagtaatattgatgctccaaagagatgtcccacggagattctgctcttgtgtgtccaccctggagggagctgaggcagtttcttatgacagtttcagaagcgagtagtcgtgcagtacttaatctaaaaaactgcattaatcacagccaggaggtccacactagtaccatgaggcctgggaagcagc

SEQ ID NO: 143764 - DNA, 445 bp, Homo Sapiens
  misc_feature (51)..(88): n is a, c, g, or t
tttttgtaaggtttaaaaatccacatattttattgttagcattcaaaacannnnnnnnnnnnnnnnnnnnnnnnnnnnnnnnnnnnnnataaagttgaaatagtctgggaatcattaagtgccaaatgctttcatcaggcccataaacaatggaagattccatagaaaatgcagttacttcttgggaagtttcaacaaaacacattttcactcatttaaagctcaggaaaataaatcttgaggtcctttatgaaaggtacactttagaccctaacgaagctgacacagtactggatttcacagaaaaggattacaaaagctgtgttacaggctcagtaaattctggaggttgttggaagagttgacatgcatctcagtatttgagcaattcctttttgtctcactatctttgacctcagagccatggttcagtgactcattcaga

SEQ ID NO: 143765 - DNA, 375 bp, Homo Sapiens
gacccgagctgaggtcattttcttctgaggaagtcattcttaaggactgttctgtccccaaccccagctggaacaaggacctaagactgctctttgaccagtttatgaagaaatgtgaagatggctcctggaaacgtttgccttcatataaacgtacacctactgaatggattcaagacttcaaaacccattttcttggtagaaacagccactttcccattaatatatctgagcatcaaatataaagctaagaacagattgaagtactagttactacctgaaaaaaagaaagaatataatgcaggattatggttctatagtcaccaattttatagaccagaaatcacaataaattttgcagattggagagcaaaa

SEQ ID NO: 143766 - DNA, 2763 bp, Homo Sapiens
  misc_feature (515)..(543): n is a, c, g, or t
  misc_feature (1117)..(1176): n is a, c, g, or t
  misc_feature (2325)..(2353): n is a, c, g, or t
ttcggtggggaaaaagaagacgagttttattagttggtgtttagaaccccaaatatggcccgggggggaggaggttttcaccccacccactattgagagttttacaaagcggggggcgcccaaacagtgggggaaaaatttttctttttgcgcgccccgcgttttctacccccacgggggcggaaatattttattatgctccaaaaggggtcaccaaagggggttgtggttgccaccgttggggagtattccaagggtttcattacaaatgcccatttttggggagaggggttctcccatttttgcgggcagaaaagagttctataaggagatttttccaccacggttttttgtaaaaaagacagggccaagggggcccgggggtgtaaaaatttgaattttcaaggcctcgcgcggtgacgccccccgtttggaagagattcccagtgagagggccctgcggagaactccccatttggggattggtttcagaaacgccttcgggtgtccccccnnnnnnnnnnnnnnnnnnnnnnnnnnnnnaattccaaagcccttaggctaattgccccaggtttttcctttgggaacaaacttaaggcccatgtttcggttttcccttagggggcccgcggcggccaaaaggaatgggtttaagaagaaattttctggagggccgaggtgggcccggcaattatttattattaacagttttttaattgctagggtaggggttagttcttatctcgtattgattttattgggggagtgtcgtagtggttttttctcagtatttggaggatttgtttccgttttatttttcgtcaatatttttcactgcatttttcacatcaacagagttgggtttagggttccccaggagagcaagggagatggatgggtccctcccaggggtgcgaggaagagggctacgtccagcatgtggggagtgagggacaagggcacagggcacacactcatacactgggcactggagaaggcagtcttttgagcacagacaccaaagagttaaacagtcaccacctggtacagtgttacaaaatggggagagtgaccacagggttggggcactggacgcagcatgacgaaggtgaannnnnnnnnnnnnnnnnnnnnnnnnnnnnnnnnnnnnnnnnnnnnnnnnnnnnnnnnnnnacaaacatctaaaaactacaacacgtcacagctacagtggggtgaggggagggcaccaaagaaagcagccacacagagtagggtgggatggggcagcctaacctacagaggctattgtgtggaagggtaaaatggggaaactgaggcttctagtccctgcattaggggtccctcactcactgcccaacctctccccactcagaggagctgccaggagggcccctgcttcctgcctctgccccagctctttgtgctttttgatctgctggtttgaccagatgcctggtttctttccctcccctgctcccctccctgtgaggggacaggtagggagcatgggagggcagctgtgctattcccgcctgtgctgtagtgggtggagcctctcactccagaggaggcctctgcttcttgaggagggaaggagatgggccttgtcggatgccctcagatctccctagactgtgggactcttatcccaggctggcctagggctcctccatcccaggctcaacacagaaaccagattaggggaggaactgtgggaggcagggttgtgtgtgcatccgctgaaattacccttggcttatatttgaggacagtatagtgataccccccgccccatggcacatgcacacacatatgtaagtatacatacacattcacacacagtcctgcggagctgcctcagaacttaatctattaataaataagaatcagaaagctaatttcataaaattcaggcttcatatttgcagcccaaattgagaggaaagtggagcccagaggctgaggtttcttgcttctcccccagcatccaacaggagatgtgagagggcacccgaggcccactcttcagactctaagaagttcttttggtccatggtctacaccagagccccagcccctagcataattgcatacctgtggtttcaccagggcctaggcagagggaatgatggggaaggcaggaagcctattctggaacccctggaacagggaagcaagggcccctctctaacagggggagaaggatggggctcagccttctcttgtgcaaagtcaagggcagtgggaaatggggagtacagcttcatctcaaaactgggatgaaggagccttccctgtagtccctgcccacggggtttnnnnnnnnnnnnnnnnnnnnnnnnnnnnngctaagacaccaaacacggggagtggggagtgagggctctggaggtcaggatggcagggcagggaggggaaggaaggagttgttggtctcacagtgtgcctgccaatcccaaagccctagagaccccttcactgcagcacctgcccccgggtctcaggcagcttcagggccagagagctgccaagggcaagggcagctgaggcaaagaggatgggtgcagccttggtgattcccacgaaggatgtgaagatgctgatccccagcacagctgccagcttacacagggcattcaggaagccaaaagctgtggtcctcttgtctgacggggtagagttcaacagtcaacacgtccagcgcattccaggatgcatgccctcgtgccgattcacacccagcctcgtacctagccg

SEQ ID NO: 143767 - DNA, 1095 bp, Homo Sapiens
aatataggctaggtacgaggctgggtggcgaattcggcacgaggttctctcctgttttggtcccgaatatcggcgcatcactctgatgatgatgggtgtgtggttcaccatgtcattcagctactatggcctgaccgtctggtttcctgacatgatccgccatctccaggcagtggactacgcatcccgcaccaaagtgttccccggggagcgcgtagagcatgtaacttttaacttcacgttggagaatcagatccaccgaggcgggcagtacttcaatgacaagttcattgggctgcggctcaagtcagtgtcctttgaggattccctgtttgaagagtgttattttgaggatgtcacatccagcaacacgtttttccgcaactgcacattcatcaacactgtgttctataacactgacctgttcgagtacaagtttgtgaacagccgtctgataaacagtacattcctgcacaacaaggagggctgcccgctagacgtgacagggacgggcgaaggtgcctacatggtatactttgtgagcttcctggggacactggcagtgcttcctgggaatatcgtgtctgccctgctcatggacaagatcggcaggctcagaatgcttgctggctccagcgtgatgtcctgtgtctcctgcttcttcctgtcttttgggaacagttgagtcggccatgatcgctctgctctgcctttttggcgggggtcagcattgcatcctggaatgcgctggacggtgttgacttgtttgaactctacccctcagacaagaggaccacagcttttggcttcctgaatgccctgtgtaagctggcagctgtgctggggatcagcatcttcacatccttcgtgggaatcaccaaggctgcacccatcctctttgcctcagctgcccttgcccttggcagctctctggccctgaagctgcctgagacccgggggcaggtgctgcagtgaaggggtctctagggctttgggattggcaggcacactgtgagaccaacaactcctttccttcccctccctgccctgccatcctgacctccagagcctcatccccactcccgtgttggtgct

SEQ ID NO: 143768 - DNA, 500 bp, Homo Sapiens
  misc_feature (125)..(125): n is a, c, g, or t
tcaatttgttcagaactgcattcttctggcggagaagccctgagagcttcctgcagctgtcccggacccactgccggctctgcatggcagccacccctcgcccgcggtgcagtttgatcacacgntgcgccacctcctcgtgctccacagcctgcaccgcccagggaaggacgggaaacagcacccagaagaagcttcttcccaacaccttcatgatccaggtccggagggcagggcacagcaatccacgggtctctgccccactgagcttgcatgtcagacacacattttcagcgggacgcagggatccgcgcccgcccgtccggcccgagcatcaccgttccgcggcctgggccgggctctgaggcgccaggacccgaggggcggagggggacgctgtctcccgcctcggagcgcagcgccggagggcttccttgcatcccttcccaggcgggaccagggaggccgggaggccgggagtccgggagggagcggccgca

SEQ ID NO: 143769 - DNA, 478 bp, Homo Sapiens
ggttcctaataattattttaatgttgttaaatggacatgaattgaaacagaacttatttatattcacttaacgtttgcatataaggtcaaattgcttaaatactattacaagaaaaatattttatgactctgaagccatctgatttctgcatatttctataacaataaaacaatttgaatcaccttagaattcactgtaataggatttggccatgtagcacatataatcagattgagaccagttaatttcggaattcctttttctaactgaaatcctacttaattcaacagatattctcaatagaaaaacagaaacctcttaagaatgaatgcaagtaaaatatacatcttatcataaaaacaatcagtacattctaaccaaaaatatatatcaaaccacagtgaaaaaagtaaaaacctagtattagataaaattttactttcttaaccaaaaaattcattgcacatatttaccatt

SEQ ID NO: 143770 - DNA, 704 bp, Homo Sapiens
gaacttcaggaaaagaacattgaaatattaatgaaacttgtcttgatataacaacaaggaatttttgggttaagttcaatttcctttgataactaaaaaattactaaaaaagattaaatagggagtgcattgtaacaatctgtacatttatagtaaactgtgttaatatcatgacacttaccatacatattaaaataaaaattgagatagttcagatatttatagtagttaatttttaaattctagaataatcaaatgtttaaaaaaatcaaattttctaattctaaacctcctgaattattatgtcaaatttacaaaccactctaaactttatcaacaacttacttggtttgtagaatatattaaatgtatcaattgatcttaccatcttttccatctatggattttgacacttcaatatcgaaattttcctgcatctgctggcccctaaaacaattgagatgttcttgctcaattaaattactttcttcctcttctagaggcttgcaagtgccgtcaataaaccactgtccacgcattacttgtattttatcagcctggttccagtacacacggtagcactctccttgtgtcacatccacctcgtagaggccgccccgcacgcacacatgctcgatgttcacaagcttcaccatctacggctcgtgctccgtctaactctggcagaagccgtcagcgcggtc

SEQ ID NO: 143771 - DNA, 458 bp, Homo Sapiens
tctttctctccttttttaagtggctataaaggatatgacaagttatacttcaaacaaaaggataagcaaaaccaatgattcaataataagagcctttttacatcatttcagtacaaattgtatgttctaattatttaaattaaaaaggaagaatgcttttcttatcattgaacctcccttccccttccttcaaaataacaaacaattaaattattactacaattaaacaattaaaatgacaaccagtagtcagggaaattaatgaacatgaagtaactgaactgccatggaaagtaactgccaaaaatacgcactcttcaaaaatcacctctggaggacatgagttactgtaacagtaagtaacatctttggaatcctcttttaaaactgcttcttaatctacttttggaatccttcttttagaagtgccaacataatttaatagggaagaataatct

SEQ ID NO: 143772 - DNA, 463 bp, Homo Sapiens
tttactgtgaaattctaaaatcatatttattcaccaattcacagaaagtgtcataacgaccaccaacatgaatcagtttgtaggcatttacaagccacagctgaaaataaaaatctgtctgtgttgaataggcatttaacaaattacttgaaaactgcaagaatcataattattataaatttaaagtttgtgattcaaacatgggtaagatcacagtcatggggagaagcccaacagattcctgtgatgatccttattttcttcctatatctttatatacatagagactctcagcgcccctcactctgtgtcagtctgaattggatatgacagctcagttaggcctgagagaggattctatgaaaaggagtggggaggggaaaggacattttctctgaccctctgtggctgggcaaccttgttgactgagaagacagtgcgctcttctgaaattagattcaat

SEQ ID NO: 143773 - DNA, 840 bp, Homo Sapiens
gcgcagctgctccctggcgccctctcaaggagcccctgaggattcgcgcctcccggaagggagaaaagcccgcccgaggcgcggtgctgacggtggctgggctgccgggtgcgctgtggaaccgcctcctgctagagcagcgggctggcgacggtcctcgccggggcgggaagcggctcaggctgccctcgctggcctgcggcggcgcggctggaagcgcgggccactcgtgcgtgggtcactcaggactgcgcctcgcgcgactgtgtgtgcaggaaacaagcaggaaataccctaaaagagaatgaagcgccatgttgagggtcgcggacgtcgcgagtgctgtgggaatgtgggctgaggtggagagttatggtagcccgtgttacaggctcaggggtctgaaagaagcctaatcgtggaggcggcatctgaggagggtcttgaaggctgggcaggcatttgcccgacagagatggaggaagctagtcctgtctgatggaggaaacagggcggaggcgtggagggacccgtgcagcgctggtgtgaggagcagcgagcaggccaggcctgtaaagcagagtgagggaaccaggatagagaaggcaagtcggggtcctgtggtcgctgaagaatttgaatgaaatcagtaaacaggtgagagggatccatcgcaagagcatgggatgaaaggaggagtagtccacggtgattcctctgcagcggtgggtgttattaatcgcgtatgtgacaccaaaaccaccccactcaagctgtggctctttccctaaagtagaaaaccgagaccagttgggttccaagcatccacgaagatcttat

SEQ ID NO: 143774 - DNA, 490 bp, Homo Sapiens
ttttctggaaatgtcagtgtttattaaacatttaaggacatttggaggtttgagaagaaatatacagaatgtagaaaaatcctaagaatcccctgtggctgcagtgcagcctcttcctaaaacccgctcccccatttcccatttgtttttcctgctttttgtttggttgtttaaaaaccatttcttaaggctcatttgccccctcccccactccctgacctatgaggatccattctctctttttgtctctctcctcaagacctggagtcccagaacagtgctccaaagtggtcagggggaaccaatgctatactgaagtgtgaggatcaggggcccctctacttgggctggctcttcattaaggacttaaggggggcgtgaattgcaaaagccacatgacgtcattggtcctcagtcatgggtgtaagggcagaggatgagcacaggtaaacaaacaaagaatggattaaaatataaaaaatataaccta

SEQ ID NO: 143775 - DNA, 448 bp, Homo Sapiens
ttttattatctgtagaattttaattttattttattgtgataaatggctctttatgcaatggaaatgttgccagagtccctgttcttggacacctcttaaaccaaatgccatttaaatgaccacagactaaatacaaagtaggtaaatgcttacagggaaaggggaaagtggatcaaggtagaaaaaagacaatttgttttaaacactcttaatacaacttgttctctctccccttaaacatgtttaaaacaacgtaaagcacagatgattgtctgaaagaaaaagaaatcatttgcacagcccctgttttccagcttggtgccctttgatgggtggtgagtggtagcgatgtggcccagtgagacggcacagtcgctcttcctgcaggtcagaatcttcctaggctgttgctcttccaaggtactctgagtcctgcgatggtggcctg

SEQ ID NO: 143776 - DNA, 576 bp, Homo Sapiens
  misc_feature (49)..(49): n is a, c, g, or t
  misc_feature (74)..(74): n is a, c, g, or t
  misc_feature (88)..(88): n is a, c, g, or t
atgaagtattccgaatcactgatggaatattttagcaaaatgctccaanagtcgcacagatacccttcccaggngtagcaatggaagnacctccatcccccagtgtctctcacaacgtctccccccatcaacgcaatggggaactgtaccaatggcccagtcaccattccccagcgcattcaccacatggctgccagccacgtcaacatcactagcaatgtgttacggggctatgaacactgggatatggccgacaaactgacaagagaaaacaaagaattctttggtgatctggacacgctgatggggcctctgacccagcacagcagcatgaccaatcttgtccgctacgttcgccaaggactgtgttggctgcgcatcgatgcccacttgttgtagtgggtgttctcagatctctagcatcacgacccatcactctacctctaccagcgcactgatggtcactggtggaactccactcactggggaacgttctctttggttatgtttgtttttatgcttcttttgttatctgtaaaaaacagaagtcattgtaagttgacactacaacttaaa

SEQ ID NO: 143777 - DNA, 473 bp, Homo Sapiens
  misc_feature (324)..(332): n is a, c, g, or t
  misc_feature (427)..(427): n is a, c, g, or t
tttcactttttatgtcatctttttatttctcaggaaatagaaatacattggaggaaaaggcaaaaagaactaaaatatattcaacaaaaagaaaatttctttttcactctgacctgctagtttccctcctcagaggctactactattactttgttagacgcatcatgtctcaaaaggagttcagttcaacaacaaatactaattgagtgtgcagtttgtaccaggcatggtgttaggtgttggagcatcaaaggtcattaagaaccagccctgtgtaatagtggagacaggcacaaaacagatcatttcaatataacataaacnnnnnnnnngtaagtatgcaaagaatccatctcagacctctctttttgagtttcagaatcattcatccaattgccatgtatctggacattgtcatgtgtatgtntcacaggcatgttgagctagacatgtttaaaactgaatcaccagtt

SEQ ID NO: 143778 - DNA, 491 bp, Homo Sapiens
agagttggatacttgccttcatcactcttccttaagcacttctaaggtgtacaatccttttaggaaaagctgtttcacctaactccaagattacgacatcatgatccttccaactgtcctcacctacacgagtctcatccttgtccaattcatcctacctcctcaaaatcccagcaatagcttccctttctttgcataggtgaggatgaacagttgtaatccaaaaggtttcccaaaaagttattttttaaaaagacatagaaacagaagatccatatgaaaaagagatccaatctgggaggatggacactgtgtcttctaaatcttgtgaccaaaggcaactgttcaccgagcgtcagcatctgaagaaagtgctaactgtggatgtgtcttctccagagattaataccggcggggaggggaggagcagccggcgtctccgccagcgccgtcgctcgagctcaagcgcctgctccttccactgcggccgc

SEQ ID NO: 143779 - DNA, 495 bp, Homo Sapiens
  misc_feature (353)..(376): n is a, c, g, or t
gcggccgcagtggaaggagcaggcgcttgagctcgagcgacggcgctggcggagacgccggctgctcctcccctccccgccgcttttcctaaaaggattgtacaccttagaagtgcttaaggaagagtgatgaagctctgaatcgtgtcctgcagcagattcgagtgccacccaagatgaagagagggacaagcttgcatagtaggcggggcaagccagaggccccaaagggaagtccccaaatcaacaggaagtctggtcaggagatgacagctgttatgcagtcaggccgacccaggtcttcatccacaactgatgcacctaccggctctgctatgatggaaatagcttgnnnnnnnnnnnnnnnnnnnnnnnnatgtctaccaggagaggagggaactgcggagcggatcgaacggttggaagtaagcagccttgcccaaacatccagtgcagtggcctccagtaccgatggcagcatccacacagactctg

SEQ ID NO: 143780 - DNA, 596 bp, Homo Sapiens
ttttttaatttatacagaaaaaggtttatttggctcacagttctgatggctgggcatcaagattgggcatctgcacctggtaagggcctggggcagcttccactcaatggctgaaggcagaaagtgggctggagtgtgcagagatgacacagatgaagtgagagcgggtaggtgccaggctctttaacaaccagctctggggggactaagagaactcactcactgtccccacctcgggggacaatataataaatatattaaatatatcaggatgatttacatgcactgccctgatatatttaatagcacaggaatatacacaagagagtgacagatttgaatggtcccaaatgcagctgcaatgctagcccacccttttatgggaaaactgattctgacagttttccagactgtgcacacatttaaaattccacacccttgcttcagccagcttcctcctggaaggcaaagccagccaggtgagtgtttatgaaggcccaactgacccatcagcccagaagccaggccctcccagtgccaatggtcgcaagctgggggcaagtgcttggggagtgggccagttggcatccgaaaca

SEQ ID NO: 143781 - DNA, 607 bp, Homo Sapiens
ttttgaaagtggatcaaaacactttaataaaatggcagcggctttgtgggatgtctgtggcagacaaaatcaagagccaggagcccgggatgcggagatgggcctcggtctccacatcctggcgggtgctggggccggggctagtacttgagcagccagcgtggcctgtgggtgctcagcgatgtgaagtaggaccaccaccagggcttactcccgtcggccgagggctgcctgcgcgcccggagcgggtcgggctccgtggcctcccccaaagagctggcacctcccagcgggtcgtggggcccagtcctccgcagcccatgaataaagttcttgggtcccatccccagaggttgcagaatgaagtccacacggccagccctcttcatccgggcggggatgatgactttcttgatgactttggcgtaccaggggcttgggcaatgacaatgtggatacctgggggcagcagtctccagtagtcaccatctggggctgtggtgatgtcgtggcgaatgcctttgactgatatccgtgcgtttttgactggcttgccgaatttatctgtcaccacacctttgatgcctcggtgcaccgtctccctcgt

SEQ ID NO: 143782 - DNA, 538 bp, Homo Sapiens
tttggtgggtatctggattccttttaatcttcagtggtttatttaagaaagaacattggaaactaattccacagggaaaatgctgttgctgaagaaggcgttgggacacagattgctgacaacaggatttggttttgagaactgaatttgaaagaccaaaatgagttatgttttcttccctgaaggcagatgggtacttgtgaagaacttccttcagtaagaaagttaggatccctgccacgttctccacctcctcacagtttcctcccttctggagctctccacgggaagcaggcacgagtcaccagaagagggaggctcttggtggggcactcttggtggtccgaggactcaatcagggtcctagagggtgagcccatcttaaccagagatggcagaacttgacccaagaaggccttgtggtcatcggggctgtacgcagcacacccctggcacattctgtgcctctcttcttttgactctatttgttgccagcaaacagcgacgtcaggactttggggaaggttgtgtccttcag

SEQ ID NO: 143783 - DNA, 696 bp, Homo Sapiens
ttttttcttccaagttcaacctttttatttgcaagacaaatgagctgaaggctgaatgttaccaagggtgaggcattgtgctggggtttgaggacgacagcatggagagcgatgtacctggcattctcccgctggcatgggtgggatggctcactgagcctcagctctcggtccctggcattcttcggctggccttgtgggggcgactggctgagcctcagctcttgtcctgtcacgtgggtcccaggagccccactgccaccctggcctgtcagtatccaatatgcactgtgtgcttggaggcgaactgtccagcgggtctggtttcacaactgcaaagggcgtggctctctccctgcagtggggtgatgcagaggctgctgcactctgcactttagaaaaatgccgcctagaacaggaggtgctggtgagccgccgttgcccggctcagggctgcgagagggtgggcttcaggcttcccggggggtgtaattctgcctttcctgctgggagccctgaagaggtccctggtcacatggtgacagaggccttctagcaaagtgcaaggagtgtgtttaatttttaaaaattcatgtctctgggggcacctcctgtccccttcctgccctcaccccacaccctgtacagacaggcggggcggcccctcccgctccctcatggctcggcttacgttat

SEQ ID NO: 143784 - DNA, 307 bp, Homo Sapiens
ttttttactttagcacgtcagtacttgaggatttattctgtgttgcggcttctggcctgcgagttcagaataacatgatgtggatttggaaccaaaatgaacacagcaacagacagtctatcacgataatgggaaggagctggagtctgcagctgccatcggcatcaaagatctagcttttattgagctctctatatcccgacagatccttgtcgtatggaagtgatttgcgtaggctgagaacagtggggtgaaaagaaccagggcatttctaaaaaccagtgagagcaatttacaagcctgagcc

SEQ ID NO: 143785 - DNA, 451 bp, Homo Sapiens
  misc_feature (392)..(409): n is a, c, g, or t
catggccagatgatcaaaaaagggaaaaaattaatcactaaggttggagaatatgtttatttaaacctagtgtctcccttaaattttataactagatttttgaccctcactcatctggctttccttgctatagacatgctttgcatacccagcttctagccacatcttccctaagaaaatttcacctggaatcagttccaaaagaaaattttaagagatagagtatggatctgcatgttgtcagctacctaaagcagcaaaaattcctagatgagaataaaatcagggaaccttgcagtttaaggcacaccttaaatattaaatttttaatccttcaatgcatccagccaaaacaagaaattgcaaatagctaccatccatcaatgcaaggnnnnnnnnnnnnnnnnnncataataagattggttttaattaaagcacttataaagatgga

SEQ ID NO: 143786 - DNA, 436 bp, Homo Sapiens
tttccattttgaaaaagttttatttttaattcaaagagattaaaataaggagcaaaactgatatgaatttcaaatactctttctctgccaatgatcaaaacaattagagatgaaatgaaaacaaaatcttaggtaattaacagactggatagtcaagtttaaaatcagtaagggttaactgtcaatatactttgatatcagaaagcttatatcaaggtttgttagaagggagattaaacagttgttgatacattacacagaaagaaaagagtaaaaggaggtatggagagaaagttctgagtcctttgggtcctccccaaatcttctatcactaaacaaaagtcactagttgcaagtgtgacaggataataacattagcccctgggctcactgcagaaaggaagtcagccttcgatttcaataattcagggtcctg

SEQ ID NO: 143787 - DNA, 320 bp, Homo Sapiens
tttaagagcaggaagtaactggaagctttttgctgaactgttccgcccgggagtggggaggggcatgacacccgccgcctaggctcacagtcgggggagcgggcgcgccagtccctcagcctaattgccgcacgactgtaacaggacagaatgaggcttgcaattatagtcgcaaagtagatagggaactgaggggttactggccctttgcagaaagggagagatacacaaatacatcaccggagtcactggatttagtgatacctcagccccttccaggtttggagccaataaatccctttttacttaagcccatttga

SEQ ID NO: 143788 - DNA, 1183 bp, Homo Sapiens
cgagtaaacacacccagtcacactcatacaagccatgaaataataaaacacagtcaaggttctctccatgtcaaaccaccagcatccccacctgaatgccccggaagtctgacggttaacctgtgcaggccctggtcaggcctgtggtccccaagggctgccggcagcaaaggcaccacggaagctgcaggggacaggggaggccgctgcttcttgcatttttgtctgaaaggtccctgtggagtcgacgagggaattctcactgaagcagctataaaagaaagcggagggcacggcgcctccctgaagcaccagcagctgttctgtagatggttgttgggccacacgcaaaggacttggttcctgtccccagcttagtggtccgtcagaggaaaggtctcttcctgcctggctggccacagcatggccgcctcttccatgacgggcacctgtgtaggccagcctctctctcctgccgcccctgctgggacggcagcccggacgtcacctgcacagccacaggtgcgggtgctggctcagcctctactgtgagctcatcctccccgggctcctccagaatatccctgaacaggagctccacagtcatctggtaggtggacctctgaggtcccagcaaggggctgcagtggctgcgggggtcccacttgtgaaggaagttctccagaatcagtgaccagcaaacaggttgagccagtatgaccagactgacaccagccaccacaatacgaaatagatcttggaccacgggcctgagtagcgccgatatgcatccagaaacacctgcagttgttcgcaccacatcagtttcccaagaagtgagccagggaaagcgcacagtcatcgaaaattgatccgaccagatactccagtagtacgaaaacgcccacaagggacccgaacccgttggcgagggccaagcagctttgtccccgaaagaaccccaaggaacgcgtctaaaaacgctggtcccaaagaaagggacgacggtaggagaacagcgccgagggaccggcaaacgcagcggtcagacaaagggccaggacaggatgtcacaagggcacatgaccagcgggaagacaacgcgaagggaccagaacgtacgacgcccggtcatgcaaggaggggcacgaacgaaggacgacgagacaggaggggggaaaca

SEQ ID NO: 143789 - DNA, 456 bp, Homo Sapiens
ttttagttgatgctgagcttttaatatgcagattttaagaacaacgattgacagagtaatgtttggactgagatgagtcaagaataagctcaatgatgcctccatctgaatccatttctccatccaatatttatgccttggattgtggaggtgaattgaaaaatacagggccaatcataagaggatgtatgcacctcaggccacatctaaaggtaccacagcacttcctaagatctctgcagtcataatcatttatacaaggaatgccagaacaataggtggaaatcttagattgttgcttagaggcctgtttgcccagatggggtctaaatttcttttgacttgagtcttgactgtggctctcttgctttgtgtcaaaagattctataaattcaggacacgtaccccgcttgccctcaacttgcctttgcgcatcctggtcttcccaatcaccat

SEQ ID NO: 143790 - DNA, 611 bp, Homo Sapiens
cagctccagaagctctgttgtcagtggctaaggccagagaagtgtccaaagagcagatcctggagttgctggtcctagatcagttccggactgtcttctccaggagatgcagatgtgggtcagacagcagcatccggagagtgtagaggaggtagtggccctggtggaagacttgcagaaagaacctggaagacagaggctggagcctcgggcgaggccgtccggccgcacccctcctgctcagctgcggtcgccatggccaatgacagctgcgggcccggcgagccgagctcgagcgagcgagaccggcagtactgcgagctgtgcgggaagatggagaacctgctgcgctgcagccgcagctccttctgctgcaaggagcgccagcgccaggactggaagaagcacaagctcgtgtgccagggcagcgagggcgccctcggccacggagggggccctcaccaggactccggccccgcgccgcccgctgcagcgccgccgtccagggaccgggccctggaggccaggaaggcagcgaggcgccgggacagcgcctccggggacgcagccaaggcaaaggccaagtccgcggccgaccccgcggcggccgc

SEQ ID NO: 143791 - DNA, 466 bp, Homo Sapiens
gaagtacaaaagagtaacattttatttatttaaaaatcagaagcaaatatggcaaaatagtatgtgaagggtacaagggcatttatattattatttttctgcatatttgaaatatttttaattaaaaagaattttaatgggcacatatggtataacaatcaaataataacattaattacttgcaccacaaaaatgtgtcaaataacaacatattatttaagccacagacacttatgtacatacattggagcatgtgataaaagagtcaaaaataaattttaaaatttgcaatttactttggggttttaaattaataattttgctaatctcatgcaattttaaaatgtccttaagctaaaattttaagggctgtaatccttttagttagagttgtcaacgctgtacagatgtggtattctgaattacagtcttatcttgtaaagctttttctttagtatataaacag

SEQ ID NO: 143792 - DNA, 433 bp, Homo Sapiens
tgataatatggctctatcagaacattttggtttatgattgcaatagattcctaattgatttctttacctccaataagtttttactagacttttaaaaaagaagcaggtttaggttcacagaaaaattgagcagaaagtacagaattcccaagtactcctttccccaactgtcaacatcccccaccagagtggtccatttgttaccatcaatgaacctaggttgacacatcattatcacccaaagtccagggactgattttagcattcattcttagtgttgtacattctatgggtttggacaaatatgtccaacatgacagtatcatacagaatagtttcactgtcctaaaactcctccctctgcccacaacccctggcaaccactgacctttctattgtttccgcagttttgccttttccagaatatcatata

SEQ ID NO: 143793 - DNA, 531 bp, Homo Sapiens
acaaccataaggtacacaaatacatcctccagttcagtctgagctaggagagaatcagaatggatacaaaaagaaaaggtaagttcattttctaaattctgaaaagcatattgtatttgatttacttttaagagcatgctaatgtatttccattttgaattactatatctcccttctttagagtatctgtctgatatatcattatctaaataccagctatactgtctaggcaaataattttaaataccctgatataaatgtctatgttcatgattttaaagagaaaaaatgttatatatcaacaggagcagactttactattttataggacttgtcatattttttctctagtctctcaaaaagctaactttatgacagcccaaacctaatttaaagattcctatgtgcaataagccaaaacctcaaatctgacatgatgggataatgtttgggtcttttctataagggaacagcagtttcacattcagtaatcttccatgaatatttccccccatcataaaatatgagaat

SEQ ID NO: 143794 - DNA, 516 bp, Homo Sapiens
  misc_feature (46)..(70): n is a, c, g, or t
ggggcgggaccttcccctggggacaaggaaaaggcaacctggccannnnnnnnnnnnnnnnnnnnnnnnntacggaccacccaacgaggcaaaggttttgggtacagaccccccggttatttgacagcctacctgcctggcagatatgggtcttcccactgcaaattggaagccccctcaccgtgctccctccctcagagtgaccctagggtccagggggaactgttgcccacctatacccaatacctgccccgtggttttcccactccatacaaccctccccttggtggtgcccccatgcccctaacccacctttaaccctcatggacgcagacctcacgggaggggcctcatcctccttttttaatccagcagcatcccctaccccagggtgtcaaccctttttcctgttggactacagttcagaggcagcctgcagtcctcccatgatagccagggagagccgcccaacatacaattatatttttggtagtattaaacagttttgtatgattc

SEQ ID NO: 143795 - DNA, 1276 bp, Homo Sapiens
cagcctcgcaacacattttattagcgtggggcaggggctcccgcgggggtggaggggcggccgcggcgctgtgtggggaccgggcgtccgcttcctgggagccccggcctcctccgcagggctgggcgcctggttatggcagggcctcaccagggcgaagggaaggctccgcgcgccccgcacgcggggaccccccagcgcagatcccggatccgcgcggcccacgggcctcagcccaccggcttgaccttcgcgatgaagagcgcggcggccctctccagaaactcctcgcgggtcatgggcgcgctgggccgccgccccccgacggcgcggtccagcgccagcgccaggctgtcgggccccaagcgcgagccggcctccaggaagcgcgcgggcgcggcggcgtcgctggcctgcagcgcgccctccagggtgtccagcacggcctggcccacgcggcggtcggccacggcggcggccgagtcctccagcagctggaagagcgcgccggcgcgcgccacgaactccagcagcacgaagcaggtgagtgtgcccgcgcggaagacgctcagcggcaccgcctcgtggtcacggcactgcaccttgcgcagcagcggcgccaccacctcctcgggggcttggccgtcccggcagatgcgcctgagcagctcgctgtaggtgcgcccgtccagccccctgcctcttcctgcgcccgccggcgctcaggcactcgtaggccacgctcacgttgttgttgaagccggccctgccctccagggccggaagttcgtcttggttatagccctggtgcccagaacactgccctgcgcaccgtcggtgctcagtcaatgtcttgagtccacgctcaggtttttgtttagggcggctctctgggagtggtgggccaggcgaaggtgccatagcgcgcggcccaggcgctgctagctgcagcaggagctggcccgggggctccccggcgccgccgctttacaggcgagcgcaggcccatgttctcgaagtagtgagccaggaacggcgatcggctcctcgggccgcgcctccagcaccttcagcagggccgcacgtagcaatttccgtcacgccgacctgccgcaggaagtcctcctcgctctcggccgcccccgccgcccgggataccgactggcggccgctgtccgtgaaaccggccgacggtggtaccgcttgccgccgcttctccactgccgcccctcgtgccgaattaaccaccaggcctcgtacctagcccgtattgttt

SEQ ID NO: 143796 - DNA, 553 bp, Homo Sapiens
acaagatagcactaaaacatttatttattgcctctcccattccaagcattataaataataaagcatttgttatagattaaactttacataattttcttccaaaggcctcttctaacattcagtaaagacctgatcacttctgaggagaaacacataatgtacgactacaaaggagaggctatttggggaaaggtatcgatctgtgcaggattacttggcaagtgttttaggctcgcaaaaaatctgagaaacggcgcacctcttcattctttcttttccacttgttgtgtaaggcctccaaacccaatacccgtggggccaaaatttttggcatagcaaactttgcaataaagttccccatctttgtcagtgacatttgtggactccagactcttcccacagatggcacagcggaaacaggtcttgtgccaaggcttgccacctcccataaccttctcagcagcatagactgacttgccacatcgagggcacttctcggactctccaaacttcgcagtgaatttgggagggttgctggtggtacagagagtgg

SEQ ID NO: 143797 - DNA, 518 bp, Homo Sapiens
ttttttaattaggtccattttaataaagggtataggagtttacaactcaaaacaattcataaaacctatcagatacatacgataaatcacaccgagagtgcaataacataaatccaatggtctgcaaataagaggtattgcaaaaattgttaagattgactttcatgtttccccccctcctttctcttgttcacagcccgagattatgtgtacattgttttctgaggcctgatgacctcaatactccttctggctggagagacctcctcattcagtccattccaaatagtcagcagagggagttcacctcttctccacggaatgagcgtggtccttgtcctttattatttggtttctatctcctaacaaatgacattaaatgttccctcattcaaaacatcttgtgggccttgtggtgttctggtcactgctaccctctcaatgccacacatgagccctcagggtgagccctacagagtttcatccttgtggataagaagatgtgtacttgggaacaa

SEQ ID NO: 143798 - DNA, 520 bp, Homo Sapiens
tttgagatacttgaattgatttaaaatttattcaccccagtgttcactcccaccttagccccattccatgcgcccttacccttactcatcgcagtatcaaaataactcccaaatgggattgctgtgcttgaacacctcccatcatgcctcttaccttctgcatgcatttagttagttcctgaagcatacagccccctcacctgcaagccccgcctcagcgcacacccttgccaggttggaggaagtcctggtacccggagcagtttgctttgtttttgcagtgtcagtgatctcacaagcacttggttggccacacagtcctatcgataacttccagcagataacccaagtgggtgactggggggtggaagccaggtctcggttcctgtgtgtgacccaaggccccccagcacagggcccaccctctcatctggctcagccaggtcttgcagaatgggctctgctgagatctaaccagacacatttgctgtctgttaggtgagctcattcctggaaccta

SEQ ID NO: 143799 - DNA, 374 bp, Homo Sapiens
tttgttgcagaaatcatttctgaaatacttactgggtgggaattaaacagtcattcagtctctgtgggaatattttttaaaaacagcactaagcaccagtgaaaatgctttgaccaaaccatggtctccagatcttctttgctagcctgtggacaccaaccccaaagcaggctccattcataatcaaacactagtgttctggggatttcccccatgcattagtgtaaaagtggggaggcgttgttttgactcattgttccgttgtctctaacagcctatagcttctctctgctcctgagtgggctccggaaaataaatacttacaaacaagtgcccactcggagacaacacatttacagtcgctttcagaaccc

SEQ ID NO: 143800 - DNA, 477 bp, Homo Sapiens
  misc_feature (355)..(416): n is a, c, g, or t
ttttacattaaaacttttatttttattgagaaaatcttaaatataaaatacacataaaacatgataagtaatactttactaacctgacaaccgtcactatgcctagttgtgaaaacctaaatgatatccattatatttagaaacaaaacacacatacatgttctgccctttagtactcaatggttctagaacttgtggctgttactacaagatattgaacacaagtaggaatacaatttccataagaaataacaactagaaaactcaagaaaattaactgtaaccacttaacattagtaagaattcagtagagtgtgtggatactaaaagtaatcaataagaaaatataatgagnnnnnnnnnnnnnnnnnnnnnnnnnnnnnnnnnnnnnnnnnnnnnnnnnnnnnnnnnnnnnnaactaaaacatctagaaacataaaggcaattttagtaagtccttaaatgaatcctgcaaag

SEQ ID NO: 143801 - DNA, 456 bp, Homo Sapiens
tttttgttataaagtctttactacaactttgattttattagtggttggttactgactctgccaagagtacagaatgaagggcagagagtaaggactggaaaactggcaggaaacacactgacagccgtcatccctggaggaaactgctcaataaaacggctccatatttacttctctggtcacggttcatactccacgattttaacaaaggagtcgaggaagctagatactgtaagtggaacggtgtgtctctggaggtaagcaggcttgctgatttcttgttttataattcttttttaattacaatgtaactactaagagcttcagttcccactggagtggtgcacacatctcattactactaaaaccacaggaatgttccagggaaacagactatcatcactgagcgaggtggaatccagccaaaaccccaggctaacatccagatgcctgcat

SEQ ID NO: 143802 - DNA, 618 bp, Homo Sapiens
cacaccctaccttataacatcatctgaaatccattacacagggctctctcctccccctaggaccgaggactccctaggaaacgatgccaagagtctagctcactgttctattctcagagccactggcaggcacttaatacatatttgaatgaatgtgtctccttcgactttaaaaatgcccccaccgggaagtgcgtgggggatgtgggaaggccggaaaccatttctgcagctgccagtccccttccaggccctgtcatgggatggagcagggcatcactgtgcggcgccttggcctgtggatcccctccccacgtttcttgcccggtgcaggccggaaggcaggcaggtacaagcaaggagtcggctctacgcgcagagccccaggggagcggcccgtgctgggcatggcagtcccagcagtgcatttgtctagctgccgccgcgggtccggggccacttcctctctgctccttgctgatgtcacggtggatgaagacaacggggcacccacgtcaccgctgttctccccctgaacacggagcagttattctagaactgttttccccccggccgtaatggccgaattcccgggcatatgtccggtaccgtcgactg

SEQ ID NO: 143803 - DNA, 734 bp, Homo Sapiens
tttttatcaaaaaaaatttctgtttatttgggtgagttaccaaaatgaggcattcttctttgcttaagaagtggggcccatgacacagggggagactctactttgttagatcgctgctcaaattctggaccacaaacttgggcattggtggtcgttttctattcctagtggatacccccagtggattcactcattagaggttgtctgaatgcgtattatttcccaggagcatgtcaattaccccactctcttaccaacaatgcttttatatatggccggaagtgtccatttttatcttcaataaattttaatatttactaagcttgtatcttcactcgttaggaaagagcaggcttttgttgattaattgcgcattccttcttcttatatattgcctcagtgcatgttgcccattttcctaccattttctttattttttaagttggactgcagttgctctttgtgaactgtcagatgcgttgagagaatgggcttctccggagtgtattttatcttttgaatttgtttctggtgttttgctgaaccaaaggttttcatttgaacgcgttcaaatccttcagacttctccttcacagcctccgggtatctcatcttccttggaaaggtctttatatcactctgggattatgatattcttatacttttcagtattaacattggctgaaccgcaaccgatgacaggaaatcggatgcttctgacccagtgagcagaa

SEQ ID NO: 143804 - DNA, 630 bp, Homo Sapiens
  misc_feature (413)..(421): n is a, c, g, or t
cttttctgacagatcagtatcaaattttatttcctttcttcaaatacttcatagccttgttcttcaaaaggcgcttcttgagaaagtggctatgaaaacccacaattcttattgtaattcagtaagttacaaggcaaatacaacacccacaaaccacaatggaaagctcacatgaagcctcagtcataaatttaatcaattctaggttgaatgctaagaaaagttttaattgtgcaaatgtggtacataacatttcaaatgtaagtggaaggatcatcagtagtgttatcaaaatgcataatacagaaactttttaagaaaggataaaaaattacactcaggacccataactcttcctcattataagcatatgtagtgattcattcatgcaggtttttatatgtagataggannnnnnnnnccttttcaagaattccattgtagccatgagatgaaaaatgtattatggtaatggtatagctttcttctattttgcttttagtgttaggtttgctaaaagcttatttaaaattcccaactgacataatgtgttttcaataaggaggacgctgccgtgtccaatacccttcccctgtcattgttcggtaccatatctcctggcttccttct

SEQ ID NO: 143805 - DNA, 466 bp, Homo Sapiens
acttgtaaaacaattttaatgtttactcaaaataaatgagatgtcatcattagcccttatctctcacacttgaaaaatggagacagttgttcagaatagaaggggaacagctattagaggtttagctcagtttccaagagaatttcagttagggcgggtaaaacccctggatacctttcccccggtccaccttccccaatattaatttccacatacctctttatttcataaaaatataaatatttattagaaatagtatgtttaagattagtttttctttctaaataacatgatttcttgctttaaaggaagattccctaatagtgccacctatttcataaactgtcctgcagttttgtgctttttaaaaattctaatttactttgatttaaagaataaatatctcatacccatggtgaactattttatcaccccaaaatacaaatgatccgtattttacaatgaa

SEQ ID NO: 143806 - DNA, 492 bp, Homo Sapiens
ctccggaagaccaccttctgtatgtctctgagttagagaagcagtagcatttgcttttgatagaaaggactgcagtttgctttgagggaaactgtggaaggcaccttcaggccccctctgacttgttgttcttggcacatgttcttattttaactgcagagaatcactctgggctggactgttttgtataactgtacagtgtttaatagaggtgcataatcagctgttgttactggtaaaatatgaaggttaaaatgcagtggtaagtgtttggaactttgtgtaaacgggatttagttgtgagcatcctcccgatgcttcaagctgcatgcattaacagacagtttaattaagcatttataacggaatcaggcacaccttttccacgagactcgagtgtgctggcatttctcaccctttcatctttagccctctgagtactttgaagcacttttgcattaatttggttaaaaaataaaataaaatagtatt

SEQ ID NO: 143807 - DNA, 405 bp, Homo Sapiens
gcgacatgttaatttcgttgtttgtgtttgggttttttactttaatggcaaacaaggctctgctgtcccacgcgcttactttgccacatggcacagtatctgtgtcacagacgcactcttcacaaggacaggtccaggcctgtgtcagtcactgcttcatcccagcacctagcacagggcctgactcatggtgagctggccccgagggtggggacagatccccgaggcgaggcgtcgatggctgcggtctgaggtctctagcggggggccgatgaagctgcttctgcgaagttgggaacccgcgcaccagttttagcagccgcggaaggaagtgctcttgccggggcgaagcagcagagttcggaagacacgcgaccagggcaccaaacagaccggaagcctgag

SEQ ID NO: 143808 - DNA, 478 bp, Homo Sapiens
ttttttttatttctgataatttaatgaaggtttatgaaattttcttagtcttcccatgcctttgtattttgatttttagaatgaatgtacttcaagcttagcacgtcccttatacactgtaggagtatgatagatctatgttgacctgaatgaaggtatgagcagaggggaattatccacgcaagtatggtattatttactttcctcttattattgagctggtgattccagtatttccacggaatagtagatcaacaggcacatttcggatttgactaatcagagctgcagatgtggtctgacagttcctctcatccactcagttctgctctcttggttgctttctcgattcctattcccagatatatttctccctggagactgttttcttctggactagtctcttaatcttcccaacccatatttggagagatgtttcgtgctcacccgtgaccatgagaaagtgttgcactttctg

SEQ ID NO: 143809 - DNA, 403 bp, Homo Sapiens
  misc_feature (298)..(354): n is a, c, g, or t
tttatttgtttccattgtttgttttattaagcacatattttatatacaaaacagacaactatataatgacttatgttcatcttagaggaggtgtgatcttaggtaacaaaaatggaaaaagatctagcatgattcaaaaagacaaccaaccttcactgacagaaaagcacagacaataaagacatgcaattgactagcgttttcaaacctgctgtccaaaaaaacaaatctcctgaggagcttgacaaaagcccagactcctgcaccccactcctagaaagaaccatcatgaaggaannnnnnnnnnnnnnnnnnnnnnnnnnnnnnnnnnnnnnnnnnnnnnnnnnnnnnnnncattccacagggtgctgtgatgagctcactgtggaagaagccttcagga

SEQ ID NO: 143810 - DNA, 424 bp, Homo Sapiens
  misc_feature (400)..(400): n is a, c, g, or t
  misc_feature (409)..(409): n is a, c, g, or t
ttttcatatgtcaaagagatgatttttattggtgattttattggttcttttaatactactttattattaataggatcattgttaggactcattgagataacatgtctgaaaaatcccaaggcctgagggaaggtctttgttggagcagttcctgtcttggttattggttccctgtttgcagcctgtggtgttacctgagcactggcagtcctactgtttcagctgcagcaggaagaattgaggggagattcaaggctgccaagggaaatggtagaatccactttcccagagatggggagggggtacagttctgttttccagggaagcagggggaggagcctaagcaccttctgatctgtgagcctccaggattggcccctgcccctcactaactcacctncttcttgtncctgcaggccggcca

SEQ ID NO: 143811 - DNA, 1225 bp, Homo Sapiens
ccgagaaacgagtaaagagaaaagggtgcgttttcgtcgcgtttgatatattgctccccactgtcctgggcaatgcaatgtgcccgccgctatttgacccagatgttgtgcaacgcgcgtttgtcctcccagttcaatttgcagttgacgaactgcagacctcgtcgtccatccctttttggctgtgttgaactccgatctggccccactagatcatgtggcccaggggacaaccatgcaggccaaagtgaactggggaagacaacacgtctacacaacgcatacaggtatacaaaagccacagagtttaattctctttttacatggccacaggctctcttcagtcaggggaacttcagctggtgcctctctcttgcagctatgaggcgacagtgtggtgacatgcctcatacagactgtcccagtaagccaggacaagtcaccattaaaatcttgcatgaacagccctgggcacgtgggaatgttaagaaagagccaccgcctccttagtcagcttaaccacagctccaaacgcagtttgtcccagctggcaaacgcctcaaacaccaatcatgcgtcgtgctcctattctgggtttttataaaacacttttatatagagatatagatagcacagtaaatgtgcttctgatgcactctaacatagaggacaggaatacacactgtggggcgccgccccagccatctccacagtggagaaagtgcgagggttaaatacacgtggcggggtggcagacggcaggaagttacagagcgccacgctccacgtccttccacgcgactgactcatccaacactcagaactcgccttctttatccccttggtgggtaggagcagtaacaaaacaatgtcagtcattttctaagggtggaggatgtcaaactgtctggtaccgagagagcaattcttatccagaaatcatctagaaataattgttgaaggtcagcctgacccatggccccaggctaagggctgctctgtaaagggcgggactggctctgggggtctagggctgatgcagtatctctcagacacttgcacattcacacacccacacgccccaggggaaagtgcacttccaatgctgatacaaaaatagattggcacactctttgacacaatgagggtatcttttaaaagttttcccccaacttctgccctcgtgccgaattcggcgcgccgtcgacttcatactctctccccc

SEQ ID NO: 143812 - DNA, 489 bp, Homo Sapiens
ttgcggcagagcacctcacacgcgcagatacacgcctggctttaggggaagtcgcggcactgggtctgcagagtccgctgagcacgcaccttcgttgtgaaactaaggaaaccctggagtgtccttgggcttgggtgggatggaacatgcccgtgacagacaggcccacctgccaatcagaagggcgctctccttagctgggatggggccgcaggagtggaaatggctgttgggaggtggcagagatgggagatggggtggccacgggggagccgccggccacagaagaggaaacggaggtgcagggagcggagtctgcgaaggacgcgtggatggccaagagatgtgcctcggaaaggtccgagggacttcctctgaccaacccccgacggccattcccagccatccgttttcctgcagccgcggatgcaacctgtggaagaggcgggaggaggcccgggagtccgccccgctgcgcctttcctaggg

SEQ ID NO: 143813 - DNA, 471 bp, Homo Sapiens
tttaattttaggataacaattctatttttcatgagaatctcctgtctgaacactgcatgcatggccctagtgaactgactgagactaggggaacagtcccagcaacgatcacattgctctgctgacacggctgcggcggggacctgcccggagtctggcacccaggggtgctcagcacacacctgagcaaactcacactctgagccggatcctggcgacccgggctctggaaactgacgtgtggacactgttgctcccgagcagaacagccttctgcccagcccacctagggcaaatgtaacacctctaacaggctggacacagacggtttctcctgctctttcatttcaattcagaaaggatggacactttcagaatgagcagatactcggtgatacagccttgatggtgtggataacacacacaaaatcattagtttttggtactacaattttttaaaagtcaaaccag

SEQ ID NO: 143814 - DNA, 507 bp, Homo Sapiens
ttttttgatggaagaggatgggtgtttattgggattaacacttgtgaaaagatggtggagagggcagtcaactgctatgtggcccaagaatgcctcagccaccaggtggtgctcccatcagccagaattgcccatcatggtgtccactgtgcttttgtagccccctggcagatgggagcttccccagaagggacgggacctcaggcaaggcagctctctgaagttgctgatagctggaggccacctgctgccgcactcgctacagccagggcagcaagccctgcctggaaagaggatgtgggtggtgcatctccgcctgccataaagctgcctaggtgcctgacccaggctgcaggacagctgaaggcagagatcggggggagctggtgaagccacgggcctggctgcttcccacacctgccagatgagccaggggttagtgactgtgtcttccctggatctggtcctaaggccatgtcctctcaaggcctggtcgctcttcctgga

SEQ ID NO: 143815 - DNA, 976 bp, Homo Sapiens
tgaagaagatactaatttattcaacaaatacttggtgacagctgttatgtgttagcccttggtgatctagcaatgaacaaaacaggcactgtccctcccttcatggaattaggcattatagaggtaatttcaaaattagagagtggtgcatactgtgtaggagtggaacagggaataccctgtatgcagagtacacagtggaagggacctcaccacagtgctgctcactattgggaaaacgagggtagaagacattgagaagcgcacacagcttccctggttctctacagacagcctctcgccttctcaagtgtattcttggctgactcatgaaatgcatgggtgtactggtgctgctggagccattaagactaccctcgtcctctcccaagctctctaggtcttggaaactcaagatattttgcatatacacgaatatagtttgacagcttcaaagacttttgagttcgtttagtctgagcctttattttacagctgggcctggtaatgactatcctagcagcacacaggtagcagcacacaggactagaatccaggttgggtgaaatgagcgctagcacaccagtcagataatagcatgagccataaattgtgctgggcacatggtgcttaagtgccaggttcagccagctaaggcgtgagcagctgcgagaggggtaggcatggaagacaggaaactggacatcagaatgttctaatagaaagtgacatgttttggcattgaaatgccattatgtacctttagacacccaggcttttccaaagaaaaacagggatgcacaaattcgtgaagctgacaactaaatgtatatagatgctgagaaaggtccacattgaaaaatgacaactttgaatgttcatagtctaatagaatgccaatcttctttggtggaactgttattcttatatctggagttgtgctggtgggcagaaattcatacttatgcgcttgtga

SEQ ID NO: 143816 - DNA, 1319 bp, Homo Sapiens
  misc_feature (58)..(145): n is a, c, g, or t
ggtgtaattatcgaattcaaagggaggttttgcgattataagtattgattatggcaannnnnnnnnnnnnnnnnnnnnnnnnnnnnnnnnnnnnnnnnnnnnnnnnnnnnnnnnnnnnnnnnnnnnnnnnnnnnnnnnnnnnnnnagtggtaagaggcaagcgagaattggggaaccctcggcgtagaggaggcgacggcgggaatggggtttaaggataatattattcgggcagggggggtgatataaaaataggtggggggttatggcggggaatgagaaacatgttgtagagggggggaagtgtgtagccggtattgtgaattagaggtgggataaagggatctcgtgtaggggaaaatgcaatgagtgggtatcgggtggccgcccgctatgggggaaaaagaatatatacccgtgcccgaggagttctgaaagtgcgggaagtgattttctggggttgtctcagggcgggtcgggcgaggggctcgcagtggtggaggaacgaggggtaggcagcaagttcaccccgtagaaagtttttgtcgcgttggccaggagattttgggaacaccccatgttatttcgacaaaaacgcccggaacggccggagcccggcaactggtggggacaaggaaagaagggcgggaagaagacgcaagaggtttgaaagggagagaggtgggccatgcacctgcgtagtgcgtgctcgttgcataggtacttgagtaaggtagtgagcgggcctcaggcgtggcagcacgcgacattgaaaagtgaagtggtcagggagcagtcatatctatgcaggagtctcacgcgccaagagggcgacatacatgatagacatgtatcacatatgcatgcctggcaaagagggctgggcccagaagtcctgaaggcagggaaaaggtcaggtcagaaggtacatcaggaaacggcctgaaagcgaatgaccaatgaagtcaagaactcccataaccctggtaattaaaaatcaagggggagcgctggatacatggaaggaagggggagccccccttctgcctctcccagggccactgagtgtgtggcacaggattaggaagaggctggggtggggcaaggaccacaggcagagaacgcagccaggcctggagaaagtctaaccgtgggaaaaagggaacgaggagggggaagggaggggatgtaagtttcttggatctaagtttctagatgcatgggatgtttcgcacagtctctgatccagtgagcatgccgagaataccgagccggacggacagaaggggatagaaaggaagggagaagaagaggagggg

SEQ ID NO: 143817 - DNA, 466 bp, Homo Sapiens
ttttttttaacattatagactatgttatttattttgcaaatagaggaataattgagagtacgttatttataacaaaaaggggtatatttggctcacagtttggcagactgtataagaagtgtgtgtcaacaactgcttctggtgaagatctcaggaaacttacaatcatggtgaaaaataaagagtaactggatgtattatatggtaagagacagagcaagtgtgaggtgaaggagccaggttcttttaaggaacctactctcatttgaatcaatagagcataaactttttggttaccaagaaaatgtaccagccattcatgagaaatttgcccctgtgacccaaacatgtcccaccaggtcctacatccaacattaaggatttatactgcagcatgaggtttggagaacatggatatccaaaccatattatagaccaactaggcttcacagatgcatacaaaact

SEQ ID NO: 143818 - DNA, 1695 bp, Homo Sapiens
  misc_feature (164)..(218): n is a, c, g, or t
  misc_feature (222)..(225): n is a, c, g, or t
  misc_feature (228)..(235): n is a, c, g, or t
gtgggggggaaatccccaagccccttttttcctgggccccgggttttctccttgggaaacccagttttagggccattttccccttttccttattggggccccccgccccaaaaagaaatggttttgaaaaattttttggagggccgagggcggccccacaaggnnnnnnnnnnnnnnnnnnnnnnnnnnnnnnnnnnnnnnnnnnnnnnnnnnnnnnnattnnnnttnnnnnnnngatgattatcaacagaaactttatttctcatcggttcaggaacaatcggagggtagatggaaagaggaagggagggaaagagggagggaggaagaatcctgcgaaaaggaagggccagactgagggagaagaaaaacatgttcggggcaaaagggtaattctcaagtggggaatgccaaatgaaggggtgcttacatgggggcacaaaattccaaatcagccacagtggggtgaggtgagtatgagacgcaggtgggttgaatgaaggaaagttagtaccacttagggctacaggaccctggggttcttctgtcagaggattggggttcaggtttcaggctttagggtgtaacatgggggggcccagtaggggctatgctggttgcatggggaggccccaggcccctccccaagggcccctccttttgggggaatctcactgacgaggcagagtcgttcactgtagtctggctgcagactctcagccagtcccttagacacaccactccaggccgaaaagttcccgtggtattcagtaacaagatcctctaggttcttcagggtgggaattcggggcatcgtccgttccagccagaaatacacacagagaaggctgataatcaatcccatggagccaacagagataaccacggcttccaatgcaaacaggaaaggattctcttttgaagtattgctcccccagtggattgggtggctccattcactccaatgctgagcactttccacagagtgggttaaagcggctccgaacacgaaacgtgtagcgtttctgcccatccacactaggcaaggagaacttatgtctataatccactgattgttcagtccagctgtggtcccagtcagtccggtactgcaccaagtgctccaaacagtggttcaagaatctgttgttccagttcagttctagctgggattcactcagtttgtgaagtgttaggttctctggagcccaggggatcaccagattctgcagttttagcatctgtgtggcctgtctcctgggttcccgtgggtcctggagctgaacaacaaatgtttggtagaggtggatctcctttttttgcaactgacagccagaagtgatttcttcagagaatagatagtggctgcacttctggactttatcattatccgagttcttgtaccaataatgcagagtgaggttggtaggctggggctcagagctgctgttccaagtgcaattcatgtactcgacattgaacacaaaacactgaacctctgggaggggcagagtggaaacactgagggagtcagtgggcatagtggtcaggaagaaatcagctgtggtgtcttcattcccattgggcgtcagaattgtcgtgttcagccccactcccagcaggggcagctgcaggaataagagggatgtgaatggtaatgatggcttcaacatggcgcttgctcttcattcctgg

SEQ ID NO: 143819 - DNA, 979 bp, Homo Sapiens
  misc_feature (243)..(243): n is a, c, g, or t
  misc_feature (518)..(674): n is a, c, g, or t
ctgcaccaagtggctcccaaacagtggttcaaggaatctgtgttcccagttccagttctagctggggattcactcagtttgtgaagtgttaggttctttggagccccaggggatcaccagaattctgcagttttagcatctgtgtggcctgtctcctgggttccccgtgggtcctgaagctgaacaacaaatgtttggtagaggtggatctcctttttttgcaactgacagccagaagtgatntcttcagagaatagatagtggctgcacttctggactttatcattatccgagttcttgtaccaataatgcagagtgaggttggtaggctggggctcagagctgctgttccaagtgcaattcatgtactcgacattgaacacaaaacactgaacctctgggaggggcagagtggaaacactgagggagtcagtgggcatagtggtcaggaagaaatctagattggggagaaaatgaaggcagggagggaaagagaaatgatggtcagaaggaggagnnnnnnnnnnnnnnnnnnnnnnnnnnnnnnnnnnnnnnnnnnnnnnnnnnnnnnnnnnnnnnnnnnnnnnnnnnnnnnnnnnnnnnnnnnnnnnnnnnnnnnnnnnnnnnnnnnnnnnnnnnnnnnnnnnnnnnnnnnnnnnnnnnnnnnnnnnnnntagcgtgaggcagggaaccctcccccttgcccttcccactccacttttcaattctgcccacatgattgtaatggccagtggcaggcaccagatctctgtacggccccttcccacagccacccttctcaccagccccctccagtcccagatttcccaccagctgtggtgtcttcattcccattgggcgtcagaattgtcgtgttcagccccactcccagcaggggcagctgcaggaataagagggatgtgaatggtaatgatggcttcaacatggcgcttgctcttcattccctatcccgggaatt

SEQ ID NO: 143820 - DNA, 613 bp, Homo Sapiens
tttcgttatgtgatatccctctacaggatgagttttaatggatgctggtgctaacatcgtatgaaattgaggtaggaggcgggactctgacaccagaccagattgaggactagctaatcatcatactttacataaggaatccgtaggattggagagttgattgtttcaaataaggctggtttccttatttggttatttccttagaataataactccaaatctgattatttccttagaatacattcttatgagtagaactgcagctcaaactaaatttggtgctgtccagtggtatggcgatggacttcagaacatcctccactcttgccctcaccccacaagaaccctttactcgggatccattctcacgcagtcttcctccccgaccgccccgcgcgtccgctcggcgggatgacaaagaccgcctcgggttgggtggtgagcagtaccggcctcctccagcagggggcgctgtgggatccgccgctgtccgggacgaaccagcaagccgctctcggtccacacacgctctgtctgcctgccccgagtcccccgggaggccgcggggttttggggagtgtttctaggagacggcgctcaccggctgcacctg

SEQ ID NO: 143821 - DNA, 467 bp, Homo Sapiens
gggtacgaggtaaatcctcattggaagaagacaccttcattctaggcctcagatagtttctgttaaacaattttacaaggacaagtagccatagggaaaagataagcctgaaagtaagtaagtcatgataagtaagcagaaactagaactgcaaggctatgttattactagtcacagattataaaactatgcctgctattttttgaggaaataaaaggtaagcttgaaaatttctataggaatggacttagcaatagtgacaggtaattcagaactgtccttccactgatgacaataaaactagataaaatatgaaataaaactgaactgcaaacagagtagtgaataattactgggccaagatccagaaatttggcattttgggactaggtaccgttgatgatcaaaaagaagtggacatgagtttgattagtacttttgagactgtttgcaggactggtgagaaa

SEQ ID NO: 143822 - DNA, 485 bp, Homo Sapiens
tttttacaattgacagcaaattattttagatcctaatgtcatttcagtgttaaaaatgagctgggagacagctcctgtgacatttggtatgaaagctttagattgcaattttcatgtagaagtagcttcatatcacatctcgtgagtttcgtatcgcacagcagaggaccatgctgaatatcatgccaaagatcgtcagacctgcaattccaataccgacaattccaatgagctggagcttaacactgattatggtctcaatttcatcgatgcaattcttgtgtcctagaagctcctttgggcatgtaggttggacctgttcggagctttcttttccacagcactgaaatgttgagtggaaggtgatgagtgtcccattgccttttcccctgtctttaaggtaatcattgtaagcctcttcatacatggtctgaacatgtcggatagcctgaagaaatacaaggaaaaatgaaggacttctgggt

SEQ ID NO: 143823 - DNA, 672 bp, Homo Sapiens
gcggccgcattaatgcgacggggcaaggaaacataactgtcccgcacgcagtgccacaggctcagtccagggaggcctcaggcttccagcatgtggccacggcgagggagggcaccagcttcaaaataagcggcaccagcctcgctccctctccctatcactctttcacatgaaagtgtgtaaaaagcaaatcagcaaataaactctaaaatagattatttattccaaaaatcctctagttttctttttacagtgagtgtacattttgtctcctactcctgcacaatcgcttaagtccctttgggaaaaaaggtcagagctgcagggtgagtctttctcagtcctgctgctggctggtgctgggaggtcagatgtcgatgcccttgacaagggacgtctccagcgtgatgttgaactcctgcaatgtctgcagcacacgaatcaaggaattgaccagtgtatggtctttgatcagtgccacatcctcatacatgtgtgcagtgatggggcagtcagccagcagggcaatccagtggtgtaggaggtgatctcatccttgccgatgttccggggagtattgttgattgcagtgacaaatcggcagaagttccgggctcttgtatgccagttttcctcagggactacttcattcttctctaatgtctcataata

SEQ ID NO: 143824 - DNA, 1133 bp, Homo Sapiens
tttagtatttcacttgaattgtttattaggcatttagccacatgacaaaagacaatttgaagaccacagatataatttcaagttgcgtgaacattgattgccctggaaaatatatcagtgaggctttcctaccacttctgatgactgcaagaacatgaaaatctataatgttttaatcaacaaaaatcacagctaatgaataaaagctatggccatgaagattaactttttaattagcaaataatatttctttgttgatgagatactaagcagacaaaatcacaaccctctggataactttggagaaagacatgggaagccacagacagctgagttccatgaaggcaggatgatatttatttgcttcttattccagttttcagatatatctctcttcaatttttgattcctgcagctggcttcactcctactccctctctgctcgcagcacgtcggccgccagctctttgatgtgttcccaggcccgctgcacatgggcagattccaccgtgcgagaacagatggcaaagcgcaggacaaacttgtccctgaggtgacatggaaccaagtggatttttttggcactgtttattctttgcagaagagcttcattcactttgttggaaccctttagccgaaagcagacaagccccagaatgacttccacacagatttcaaagcggggatcctggcgcaccagtgactcaaactcatgggacagctggacatgcttgcggatataagcctgcagtcctttgactccatacatcctaaatacaaaccacattttcaaagagcgaaatcttctgcccagtggtatctgccaatgccggtagtcagtgataagccctgaatcctgatggctgtgcttcaggtaagtggggtccagtctaaaggctcccgttaagtctgttctctttttcacccacatggcagaacagtcaaaattcaccaatagccatttgtggggattaaagttgaatgaatctgcaaactccactccattcagaaggtgccggaactcagggcagatgaatgcactgcctgcgtaggctgcatcaacgtgcagccatatgtattccttgttgcagatcctcgtgccgaattaacaccggcctgactaggcaatagtt

SEQ ID NO: 143825 - DNA, 444 bp, Homo Sapiens
aagatgaagtacaatgctttttattacacacccaattgttaatgagaggaaatgcaatcagcaactcctttccacactctacatggaatcaaggagactgctgagtccagaaaagatgcagccattgatggagcccaggaaacttctccccaccccctctgcctgccccctaccaccaatcctcctcttgggtgtggggaagaaagagagagaagagttgcaaatatgatgagagtatcatgtctgagaaagccacagggtcacttgcagcaaaggcctggggctgaaatcttcactgaacagcatttaactcttccaagtgttgcattttctggctgatctggctcatgcgagaggaggacactctcttcatacactttcttctcaggtgaagcagacagagaaaaaaggttgaaggggcgtaggggagtagatgggaagagg

SEQ ID NO: 143826 - DNA, 453 bp, Homo Sapiens
cactacatggttacaaaattggaataacatttggggacaactgggttaactacaaagaagaggattttaagaggagatgtgttgtattgactcattttgtattatttttggcttacagttcccatagctgttagagtctggtttgtttttgtttttactctcaaaatcatagtaaagatctctcagtctcctggctaaagattgaaggaaggcaaatctatttctaattatacatatatcagtaaggatgatctcaacataatagtaatgtgtatcttttggtatccagttttatttttggccttctaagaaagtgtctcataacacagaacattgccatttgctcttgtaggcctcaaatatgaaagctattagtcatagagcttaggaaaaaaagaattgatatcctggtccttttattttgtaaccttataaatgctgtagatattatca

SEQ ID NO: 143827 - DNA, 434 bp, Homo Sapiens
  misc_feature (304)..(304): n is a, c, g, or t
tttgcagtcttcctcactgatgttactacgcatcatgaggaatttttttattcaacagatacaaagacctctgcttgctgggactctgcaccataaggacacattgagtaagtcttctttggtgctttgagtggagggcagtggagaggggaatgtcaacagggtgcatgggccccaggaggccagcaaggcagggatggcttggaccagggcagtcagactctagggctgaaggctgctggggccaccttgtagatgtgtcacctactaccagggaaagtggccactgtacagggctgctcancagggggtatgggacatcactcctcgagaaagcacggtggggtggatatgtcatagcagtgtgcggttcctgcctaaattgtcctctgtgagttcagctgtgaagagaggacgagagttattggaaggac

SEQ ID NO: 143828 - DNA, 451 bp, Homo Sapiens
  misc_feature (340)..(340): n is a, c, g, or t
  misc_feature (352)..(352): n is a, c, g, or t
tttttactttttctttcggtagatctttattgtgaaggcttgagttgatctaatcaggagttaaactgtgtttaggtgtttttgttgctatggttatccacaggcttcaaattcttctagtattaccttaagtttagtgtgtgggatggtttgctaaaggagattttctcaatgtttgcaccactcttacctttaggccttcccttcattcctgtacctcagagaggggtctttctccatgtttttatccttcttttagcagtagattgctgttcttattgactcagcatttgatattttggtggtggtagaagggatggcattttctgttgtgattcanctttaatcttangtaggcactgtgtctctgagacttaagggtggggtctattaagtgatgttgccctatcctcagctgtaggacacctccatggtctggaaccaggatgca

SEQ ID NO: 143829 - DNA, 565 bp, Homo Sapiens
  misc_feature (119)..(119): n is a, c, g, or t
  misc_feature (241)..(241): n is a, c, g, or t
  misc_feature (258)..(258): n is a, c, g, or t
tttagcagcaaaacaattttaattgtcagtgaaaagcaaacatgtttgtcagactctcctgtggagtcatttcaaatggtaactcttctcttgtaccaggaagcagctgtaggtggggntaatgggatctgtctcctggtgcagaggggcagcttatggcggcagcagcttcaacaagcccgtcccacggccagccctaactgggccaagtgcaagctcctgatgagctgctgggcctggncagcgttccccacttcnctagtgccttgctcccctgggaattccacagccaatcaaccacagcagccgtgtcctccttgccagaaataacatcattcgtacgtcctgcccgtcacatctgcttggcctcatgcttgctggcaagtcatggccctgacccagctcttctccctggtggccctcaactgccttcagcctcagctccagctggggaggagggtgaagagcagcttgagtcagactgaggaatgcaagagaggtgctggccgtccttgtcactgttccccggaaaatgcctccatcagtgccttcacagcgtgcctcg

SEQ ID NO: 143830 - DNA, 485 bp, Homo Sapiens
gaaatgaaggcttactacttgcatatttggagcctgggctgggaaggctcacacatttggtcctcttctctctctctgtggttcttccacatggtctttccagtgttgtggcttcagggtaggtggttttcttccatggcagctcagggctccaaaggcacatgttctgagaaagaactaggtggcagctgtatcaccccttattaccctgtctcagagttcacacagcatccttctgctgcatttaatcacaaaggtccactcatgttccaaaggaagagacacagattccacctcttgttgagagtagtattaaagaattggtggacacattttcaaaccaccataatctgctctcaggccacatattatttacatccttcccacatgcaaaatatactcaccccctcccaagaccttctgaaattctcatttattaagacattgggctcaggctcaaggtccaggactttatcagtgaaatc

SEQ ID NO: 143831 - DNA, 710 bp, Homo Sapiens
ttcagcaaagaggggctttgaaatagcagccccaggagaagagaaccagggaatgaaccagatgatgagaaggactcattaagaagcagctgagagagatggaactggaactggcacaaaccaacttgcagttggtggaggccaagtgtaaaattcaggaacttgaacatcagagaggagcccttatgaatgaaatccaagctgcgaaaaactcttggtttagcaaaaccctgaactctatcaaaacggccacgggcacccagccattgcagccagcaccggtcacccagccacccaaggagagcacatagttccagccttacccaagcacaagagcacaatgttcaaaccaatggaaatctgggaggattcttcctggtgtccctttgaaggaaagtcaaggaggccagaaaacaagccagaatttttcagtagctctcactctttcttgtatgacacttttcaaagggatgctatttaaactgacctgttctatgttgaatacctattttccagcttctggaaggccatgttcagatccatcatagtattacacattattttgtttgcctgatgtttagttggaaataagtaattcagaactaaatgcttttttatttagaattattcataattatttttatcttacataaaaatggagacatctgttattccaaggttgaagtgataagaagatctttgtcacagga

SEQ ID NO: 143832 - DNA, 549 bp, Homo Sapiens
tatttttgtagttttgggcaaaacattcactgttctgtttcagcatatttccttggaacatcttcatctctttccattttgcggacactccccttcttctattctcctttactcaaaacatatggtttagacccacatcatggctttcttgtgggaagcctggatgggactaggaaaacacatgtttccaacatggtgcatatctgtttgtgcagatatcagacaagatttaatcttgtctaacttatgcgtattgttttggtgtttgcctgtggttattctgggcacagcaatggtggacattattgaaaatgaactttattggcagatgaaagataatagaacatgaagatttatgaactaccataagctctgcatctctgggtcttcatttccaaagcagcacttggaaaaccaagcccagttcaggcaaagagttcctttcttctcaccagcacttgaaatggtccagaatatacctgatgctcacaccaccttcctcatccacttctgaaatgaaaaggtcattccccaatggttgctatatct

SEQ ID NO: 143833 - DNA, 905 bp, Homo Sapiens
  misc_feature (142)..(153): n is a, c, g, or t
  misc_feature (271)..(271): n is a, c, g, or t
  misc_feature (411)..(432): n is a, c, g, or t
  misc_feature (496)..(508): n is a, c, g, or t
tgctggaattcccccgcgggcgggattttaagggtgttccttcccagcgcccggttgtgggagagggcgtttccccgttcgcggcgagaaaagggtttaaaagggatattcccaccccgttctttccaatgaagtgggccannnnnnnnnnnnttaaatttgaatttggaggctcgcctgggacttccgtgtggtagaatccccgttaaggccctccggaacctccctttgggatttgtttaagaccgcttggtttcccgcccggggcttnttttttgggggggatcccaacccttagtcctggcccgggttttcttgggaaccagtaaggcccagttccctttccttatgggcccccggccccaacgaaaggttttgaaaactttttgagggccgaggcggcccaccagnnnnnnnnnnnnnnnnnnnnnngcgtttttcgccaaacgtaactatttattcatttttttcttataaacattgagtttcttctttnnnnnnnnnnnnncacctagaatttaaatatttcccatcccatcacatacaagtctgtatacattatttacatcttttgaataaaacatattacagattttctgacatcagtatccctttttaaacaaaaatgaagcaattaaactttgatcagtaacaactacaatttgcataatccggcacagtttgtaatatagcgcctatgttggatttcataacttagatgatttttccccttctagttacttgattataagagagaaactgtctccatgagagtagttccctgtctttatgcactcttctcaatacttgcacagtgtaaatgccgcccttattcttccattacttggcactgacaatattcctctgcttttgtcttcagaaatgatttctatttgaactttaag

SEQ ID NO: 143834 - DNA, 520 bp, Homo Sapiens
tctggtaacatcgtatgggctgggttacagcacatgccgactgctaagccagtcactgtggaaaaccatgtgattgctgtgatgagcttagaatgatcattcctccttcaggagctggggtgggttgagggaacgataaagatcctgataaccttgcatttctccagcgagaaagaagaaattccgtggatagggagccagccaggtttcctgcagagattcacgggaagcttttgagcaggggagtcagaagatgagcggtgagtattaggactttccagtcacggcgtgacgcagggtttggccagttcttcctgtaaaggggcaggtggtaaacgcttgtaggcccggtggtctctgtcatgtctggtgaagcctgctgtagcagtgtggcagcagtcagagatgacacgtaagcaaatggtcctgactggcctctggttaagcgtcgattccagaagcatttgacagacttaataacctttcaaaccgcacagggtttgtttcccaggtcctgttt

SEQ ID NO: 143835 - DNA, 492 bp, Homo Sapiens
  misc_feature (82)..(90): n is a, c, g, or t
  misc_feature (440)..(440): n is a, c, g, or t
tttgcgtctccaggcgaagcacccggcaattttatttctttagctttgtgcttttctgtattttccaggttttctacgcttnnnnnnnnncacacacagacattgctgtgacaatcagagaaagacacgtttgcacaagaaagaaaaacacagctgagagacaaagaacaagtagaaaaatctttgcaatacatataaaagacaaatggttagtatttgtggtattttgagctcatacacatcaaaaattaaaagcagaatgcctcgatgtcacaacgggcgaaggacacaaacaggctgcaggacacgagggccaacctaacctaacgcccggctccatctcacccgagccaggaaatgcacacacaaacaaggaggtacaacttgcaccctccgacaggctgacatgagaagggatggctcctgcgccacccacttcnaggggtcgttgatggtttgctggtgggagagcaaaaggggacacatgtctga

SEQ ID NO: 143836 - DNA, 458 bp, Homo Sapiens
  misc_feature (436)..(436): n is a, c, g, or t
ccgctcccattcccgcttcttctctctttccaacagtccgctaacgaaccaggtactgtagctgggtgtgtcgaaatcatttttcccctgctcccaagtttctcggtatatacggtacaaaactgcacaaaacccggcgctaaggagcgcaggaggagctgacacttcacacatttgtcaagattactgtcaggccccacctcggcgattgccacattcccgataggcatcgcagttgtaaaatacacaagttccctccccggctccggacccgaaagcgtctgcaggcgctgtctataactttgcttttcgatggttcagtcattattagcattatgattggtttttacaaaacgcactggaatcttaagagtcttttccttgctctgctgccttcaaaagacatggaaccccaggactgctccgagggccctgngaatgtgccggctgcagtctca

SEQ ID NO: 143837 - DNA, 459 bp, Homo Sapiens
tttgtgattcaatattcaagagtctttattgaagacttgagatgggacttccaactcagaggatgtgggaatcccagctcaaatgatacaggataaactgggatgggctaggatggacaggctgtggatatgggagtcatgggtcaaagtcttatcccagatggctccaggtacagtgggcttcctgggctggaagctgggtcctccccacttcattctgctcaaagcttcttgaaggagctggtttgacttcaacttgctagagcctagcctcatctttcagtcaactgggaaggcttatcagagggaatccagcccaaccagatgaagtacattcttctttttggtatctcttctgggggccgccattcatggtctctccctccttccttctctctccatcctctcttcctaattccattaacaggaagattcaacagtatttctggtcagccagga

SEQ ID NO: 143838 - DNA, 597 bp, Homo Sapiens
tttgtgattcattattcaagagtctttattgaagacttgagatgggacttccaactcagaggatgtgggaatcccagctcaaatgatacaggataaactgggatgggctaggatggacaggctgtggatatgggagtcatgggtcaaagtcttatcccagatggctccaggtacagtgggcttcctgggctggaagctgggtcctccccacttcattctgctcaaagcttcttgaaggagctggtttgacttcaacttgctagagcctagcctcatctttcagtcaactgggaaggcttatcagagggaatccagcccaaccagatgaagtacattcttctttttggtctcccaacttagccatgccaagccaagagccaaagagctggtgctatagccatatagatcttggttagacatggagaaggacttcccaagacaggaataagcaagatcatggaatttctcctgatcatgctgatgagccatcacatcggggacttgagaggtcctgagtggcaggacgcagaggcaccgatctgtacacctggtggagattccacaatggcttgtgctgccttgaagacgaggagatga

SEQ ID NO: 143839 - DNA, 462 bp, Homo Sapiens
tttaatggtaatcataatggcaaatatttattgaatatactttatgtatcaggcaataagatacaaacttcatttgcattatcccatgtgatcttcaccaccattttacgagatagatattattatactcatttttttcttcaaggtagaaatcagtggttaaactttcccaaagtcacagagcaattttgatgcagacaagatttgaaactaagaactctaacttcagaaatctggttgttaattttttaagttatgattccatgcaattgctgctgcatcgggtggtgacagctgttgtgaagtgctcatcgttatgacagcaataacaataactcactgcaagctctgcctcccaggttcaagccattctcctgcctcagcctcgtcacccaaccactagacttcagaatctcccagaaggttcttttttcttccacaaatacattttctttcaaccaa

SEQ ID NO: 143840 - DNA, 353 bp, Homo Sapiens
cacctttcaataattttactgatgtctgagaaattatattcatgatacatgaaaacatttgttcccttaagtcaagctgagccaaatggaaaaacgcaatttctacaaaacatattttaagaaaacggccagtcctccagagggcgctcacgtgctgttgctttcattgtggttcaggttcaagagcaaaccaaagagcccagtaagaaccctcttctcgggaagaaacgggccctgctgctgtctgagcctttgctccttcgaaccgtgcagcagatcccaggagttggaaaagttaaagctccccttctcctccagaagtttccaagcatccagcaactgagcctcgtgcc

SEQ ID NO: 143841 - DNA, 972 bp, Homo Sapiens
cccccagggtcgcctcactcgtattccattaaggttccattggcgttgttgacttcggcctcatatcccgtttcgcctcccaaatctgagatagagcgtgaccagggccaccggcccatttcttggttttaaactgaaacaagatcctggtgtttgtgttctcgggaggaaggatcccgtggccctgaggccagccctcaccttggcttgcgtgaaagaagggcatgggatctggctgtgccactgcttgtccggaccacctgctccagttccccaatggaagcattactcagttgctggatgcttggaaacttctggaggagaaggggagctttaacttttccaactcctgggatctgctgcacggttcgaaggagcgaaggctcagacagcagcagggcccgtttcttcccgagaagagggttcttactgggttctttggtttgctcttgaaccaactggatgacgaggcaggatgcttccatctggctggccactggaagcagcaccattccaaggtccagcacagtaaacttctgtagggctgggaagtattgttcactcatccgggttttttcaacgactacaattcctttaagattattggaatttctaacccgaacaagcctctttctgtagccatttcctgccaccaaatcagcttcggtgacataaagaatgcagcatctgttcgacagataaaagtctggtgtcaagccatcctcgaaaatgagcttaattttcccttgcatctcctgcgccagctgtgacccgcgccatttctcattggccacaatatgccccaaaggcacgtgcacggggcccgtatcatcaggggggttcttttccatggatggtctccaccgtagcttctcagtccagtccaaggcccgaatacagccggcaggaaccccacacgtcccagtgtagagcctcgtgccggattaaacaccaggctcgtactacctaatt

SEQ ID NO: 143842 - DNA, 738 bp, Homo Sapiens
tgcggccgcgccacccccggccccgcgccagcagcccctcgccgcgcgtccagcgttcccggccagcagcctccccatacgcaggtcctgctgggccgccccgtcgcgccccccactctgaactcaagtcaccgtggagctccgccgccccgaaactttcaccgcgagcgggaaatatgggatgtataaaatcaaaagggaaagacagcttgagtgacgatggagtagatttgaagactcaaccagtacgtaatactgaaagaactatttatgtgagagatccaacgtccaataaacagcaaaggccagttccagaatctcagcttttacctggacagaggtttcaaactaaagatccagaggaacaaggagacattgtggtagccttgtacccctatgatggcatccacccggacgacttgtctttcaagaaaggagagaagatgaaagtcctggaggagcatggagaatggtggaaagcaaagtcccttttaacaaaaaaagaaggcttcatccccagcaactatgtggccaaactcaacaccttagaaacagaagagtggtttttcaaggatataaccaggaaggacgcagaaaggcagcttttggcaccaggaaatagcgctggagctgtgcttattagagagagtgaaacattagaaggaagcttctctctgtctgtcagagactttgaccctgtgcatagtgatgttattgatcactacaagaattagaagt

SEQ ID NO: 143843 - DNA, 437 bp, Homo Sapiens
tgtttgcctcaagctctctttccaattttgccttaatggtaccagagtcagcactttgaccagttttagcatgaagctgcagctgaatagagtgcagctgtaaaagctgatcatgtacttctttctccaaaacaactttctctgcttgggtttctgtcagttcagatttcagatccaccaactgtgcctccagcttgtggttgatttgagacacagactgggctttgtggcaaagctgtgcaaagcaggagctcaggctggtcatcttctgtcgcccctcataagtgatgtccgcttggtctggatcgatctctcccaggagcagatccacatccacaaaagctttgtcgaactccttctccagcacctccagccaccggaacatggataccccgccaggggcccccacggagcaggaggcgccccctgggccccct

SEQ ID NO: 143844 - DNA, 509 bp, Homo Sapiens
aaaaatttgtaaagtttattcacaatgcagttgttgaaaggaataaaacagttggcaatggcatctcgcttctgaatttgatttataaaaacattagggagctctttttttgtattttgctatttcactggggaatgatgaagagagagtctttttttatacttataaatttcagactttgatgtcatttatcacagtatcgtctggaattcttaaaatgttgtgtcaggggtgatctgcgtatttctggagttgacatttgatagaagttgggtagccgaatatcatagtgatatctttttcctatatataccctgtcattcaaggcatagagtttatctgcaatgtcactgccaattagcactgaaaaaaggcgggagatgtagcgatgctgagcaaagagcagatataatttctttctcctccaagacacatatcgacaatcagtttctgcagtgagggttacctgaaaaatgccttcctctgtgggtctcagtgaatcccactca

SEQ ID NO: 143845 - DNA, 499 bp, Homo Sapiens
ttttttgtctttttaaatgttttattatggaaaacttcaaaaatacacaaaagtaggaaaaacagtctaatgaactcccacgtaacaagcttcaacaatttagatgcagcactttaactactactggtttgtcatctttaataacatgacagcttatattttcaaaaggcatagtttttatcattcccagtgtaacggggactgtaggtggaggttagaagcataagcaaatttaactctggaaaaatgactcaaggcatcctcttgaagcagtgctcagattgtaggactcagcatacactggaggaaagcggtcctcatttctgtgggttggtatgtagcatggatgactttatatgatcattccaagtgaagtctgtggctcaggaaactacaaattttggtaaattgtatgctaaactattaactcaggaaggggacaacaaggaattatgtgtgaatctggcatcccaaggtcatccaaggacattattgatta

SEQ ID NO: 143846 - DNA, 196 bp, Homo Sapiens
ttttaagaaatatcaactttatttttcaatctaagctccatcacgttcaagacacttttgtaagcaatgacaccgacatttcgtccatccctaaagaagtgaggatcctgggaatttaaccacatcaatgcagccttttttacactattaactgaagaaaaatggatgccctttacagattttttaaattaggggg

SEQ ID NO: 143847 - DNA, 454 bp, Homo Sapiens
ataagctaccaggcctggtggcagctggctttagatatactctttggagtttgtttagtcatttaataactccattaagtgagtactacaatagccattttacagtgaggaaactgaggctcacacaagtcaatcaagttacttggatacagtaacacagttgaatgaatgcaggaaccagaattcaaatccagatcagagtctagctccacactcactaaagctggactgttccttctatacaaagcttcataaagatgctccctgccacccacctctcctattgcatttgctctagactccaaatgtccattctggcccccaagaaatcagtcctgaaagggcccttcctacctcaggtgccctgttatgtaaacacacaggacagcaggcaacccactaatttctaaactgtacagcatactaactggtttggactccagctaccaaactc

SEQ ID NO: 143848 - DNA, 726 bp, Homo Sapiens
acaggacctcgggagtaagtcaactagcaggtcatgcatgcaagtaactactggtcattaaatataggacaaatcaagttttatttgacaataatattaaattccactcattagttcctggacatctgttgatcacataataagacaacctgcccatacagcaaaaacatattgaagatacatggcccgccactcttctggagcttagagcaagagcagacattaagacaggggagagacggccaggcaaggtagaagctggctctgtccacgtctctcaagtcatgagtactctgggctggaatttcacgtaaggccttttgggcataatgaattaggaggcggggaagagggactttgtgcaggatacagttcatgcttccgtggctactttctccacatcagtccagatcctcgtcttgacttctgccctatctctctagcccatgtttgcttccagcttctcaaaccacttcaagctggttgctttgaatttcagactctcgtgtcctatcctaggctgaccatttcccatgcaccagtcccatttcccctgagtcgggcactaagctctgtgaggccagtcactccatcctctgttctgggatcttgcccaggtgccagaagagtgccagtgaacttgcggatatggaagattgtacacgcagagtgagatgggagtgggagggccaatctgatacagaagggggtgaagggtaggggccc

SEQ ID NO: 143849 - DNA, 481 bp, Homo Sapiens
  misc_feature (256)..(305): n is a, c, g, or t
  misc_feature (326)..(389): n is a, c, g, or t
  misc_feature (469)..(469): n is a, c, g, or t
tttttaggcatcaaccatttattgactgcactgcatatctttgacctaaaaaagatttggtctagcagaggaggcagatcagtgaatcactgacaatggtgttctgagtattgggatagagggagaacaaggttactacaggaacataagtgggggtgggggaacgggggcacttacatcaaccataatattgggatggtttcccagtggagacctggagccctgagctaatgatttcaaagtaagtaacagttgnnnnnnnnnnnnnnnnnnnnnnnnnnnnnnnnnnnnnnnnnnnnnnnnnntcagtcatttataccaggcannnnnnnnnnnnnnnnnnnnnnnnnnnnnnnnnnnnnnnnnnnnnnnnnnnnnnnnnnnnnnnnatacagagcttttccctcatcacagaaagtcctaatagacagcccttgtctagacaaaacagtgggagaaagcattccangcaaaaagaaca

SEQ ID NO: 143850 - DNA, 351 bp, Homo Sapiens
  misc_feature (112)..(140): n is a, c, g, or t
tttggcattttgatgaagatgacagttttgccatctgactgatcaatttttttattccatcatacctctacaactgtcttcttttttgcccatgtagtgatcagtataaagnnnnnnnnnnnnnnnnnnnnnnnnnnnnnctttacttcattatatggtttctctactgcagaactcatttgaggctcatgacagttactcttcttacactaaatccaatccaggtgcagtcaaaattcctgggggataattccacaggtccagctccttgggtacagcatctgttgatccagagacctgtgaactaaaaggacgaagcatgtgcccttcttctctcccagccgtctcaac

SEQ ID NO: 143851 - DNA, 531 bp, Homo Sapiens
tttttttaaatataaaaataagccttttaatgaaagagtgtgtaaatagccctgggtacatccacaaaacaacgaaaaagcatgatggcggggctgcgtctgggtgggcctccataggccatgagtgcccaagctcataggaagtttgatacaaaattttttgacttgtaaataatgcaattgatctccctctcaaccaggaacattcgaaaggaggctgtagtacgtagtaaggatttgggggctcttttgaagtgatgtggattctcctggctctcgtgcagaggatggtggatttactagaatgaaaggacagacaaacctccccccacccacagaggacaccgggctgctatttgaacaggtaagtccccaaacccatctgtaggagattcacatttgctgcaacatgaagggttcaaaaccaaaactgggaccttcttttttccagcttgcatcttctaatgattcttggtatggctaaaatgtccagattcccctgcaatacatcttgggcaaggctgggctgag

SEQ ID NO: 143852 - DNA, 403 bp, Homo Sapiens
catctccgggttcttgtcctggccctcgtagacgatggcctgtttggtcattgaatctatgaggcgaacatacagatcttgctctgttctgactccgttgctgtacaataactggagtttatagtggatgccgttgttggttttctcgttgtttggctctttctctttctccacaaagtccacaaaagcggtcctttcaatctccaccggctgcccctgcctatcgtagagcgccagcacgaagtggaagaaattggatttccggaggttggaaggcggctgtgttggcgtccaccacgcccgccgtgtgcatccacgagcgcaccgggttcatggcgctgcccagcggctcctccttcatggtcgtccccccgcgcggaatattctcctgaatcccaaacat

SEQ ID NO: 143853 - DNA, 433 bp, Homo Sapiens
cagactccacccccaccccagatttccttgttgcaagctgggatgtggggatgcggcgccgaagccaaggcaggccgcgctgccgacgtctcaccctcggggttacttttactgcacagggcggcggtcggaggctgctctcgctgccgcactggcccgggaggcccctctctagccccgcagggccacgaaccgcgggccgatctcagccgcctcctccctggctcgaccaccgagccgcattcctccgccgccactgttttgtgcggcgttttcttcgggctagggctgtcatcatgtttccttcgccgactcattgcctatggcccgcctccaccagccgcttcttctttcacattttgcaaagggatgagtagggcaacagcactacaaaccgcaccccgcaccaacggcagccgccattttggtcggt

SEQ ID NO: 143854 - DNA, 1130 bp, Homo Sapiens
gaatttccaacaaagtctttactcattagacccaaagtaacataatggggttccccgctgcactgtaaaccccatcttttcaagctgttcaataataaaaggctttaggaaataacagtgaatgacgtttataggccaaagccctggaccagtttccagggaaaatgtctaggagaaaacaagaagttgaattttgacttaacaacttaaaaatagaatcccaaacaggtagcagcagaaaaaagtcaaatgccagcaatcactgttaactgatgtcctgaggtgggttacccacagaccctcaatgtggactaaccgtggcccatttccgtctgggcgtaggtgccaattatctggagtcctttggatgaaagcagccatttctctttctgagcagtggtgccctgattcaacaaggtaggaataaacatggagtaattgaggcccacaggttccacaaaattgaccaaatgtagttttttaaaccacataatttcatcagggtcagcgatgccaaactccctcatcttcttcaccatgatggcacttttcctgacagccacctcataacgctggctgcgagtgaggaagttcaagtcctcatgctggaagtctggtctgttcaggatcatgttctctgaaagggggttaaagggcattaaaaggcagacagacactcgggcctccgttccaccctccctgaatcacaataggcttcagagtcgcggacacacctggggaatggcgatatccccccaccagggacacaggctgttcctcgaagtgggggtcccggctcccctaacgctgggccagagggcctaggccccacagcgcccctgactccgcatcgagggagtctccagcttttctcgggaaaggagggaggtctcgcccgccgccctcaccgatctctcggcggcgccgggttttctcggggctgccgtccaggatgtgtgtaagcagctccgggttgaagctggcggaatcccgctccctgcgcaggtccgggttcatggcgacgaccagctggcagcgaagtaagcaccgaccgaggtggcagtgacaatctaaatcccccccggccgtaatggccgaattcccgggcatatgtccggtaccgtcgactg

SEQ ID NO: 143855 - DNA, 729 bp, Homo Sapiens
taggtacgataaggcatgtgatccatagcatttcgcccttagtgatgaactgggcaagaactaatgcatgatttgaagtcttgccaacttcaaacatccgataaatgctgaaaaattcacttacgcccaccaggccaccatgttaatggaggtcacagtaggactgttgagaaatgaactcctgggtttcagggtcatacgtggctgtggtttccaagcctcgaaggtgagttccatgacccatctctgtctgggcataagtgccaatgattctccaagttccaggcgggcatgaagaagcgctcctgctgctccgcagttgcctggtgaagcaaggtgggcaggaacatgcccaagtgaagatccagaggctcaggccgccctcggtgcacaaaatttttaaaccacataatttcatcagggtcagcgatgccaaactccctcatcttcttcaccatgatggcacttttcctgacagccacctcataacgctggctgcgagtgaggaagttcaagtcctcatgctggaagtctgggtcgttcaggatcatgttctcgatctctcggcggcgccgggttttctcggggctgccgtccaggatgtgtgtaagcagctccgggttgaagctggcggaatcccgctccctgcgcaggtccgggttcatggcgacgaccagctggcagcgaagtaagcaccgaccgaggtggcagtgacaatctaaatccccc

SEQ ID NO: 143856 - DNA, 337 bp, Homo Sapiens
ccagccagatctcatacaggattttattatagagttgatatatttagtgtataaaatagagctgaattattttatgacccattaataataaaggtgccaagatagtaacagcaacaacagccaccctaacttatgttatctagggtacacctataatctgaatgctggctgtacacaacaatcacctggataccttaaaaaaaagccccagttccacaccaagccagtatcaaatgaatcgaaatctctggggatggggcttatctcccaaggctccccgaggtgattctgatgaacagtgagaaccaagaaccactgatccagaccttttaatccc

SEQ ID NO: 143857 - DNA, 524 bp, Homo Sapiens
  misc_feature (413)..(432): n is a, c, g, or t
tttttaacttcattaaaacatgctcatggtgaaaatttattttacatatttaaaatagtacatttaaactgattagttacattacaggtacaacgatgagcactgtgacgccatcatattgcacatcctgacttcatccatatgggtttctttaaatagtgcaaaatactttatacaggaatgtgttcggaagggtcttgcaaccaaaataaggaaaagaagtatcttacaaattactatgaacatatattcaagtgacggggtgaagggaaatttttaaaaagttacaatctgtacagaggaattgccacagacaaccaaaaagttccctccctcctgggagaagcagcgggcctctgaccttcacaggtctggcatttgtgccaaggtaattttttggtgtcaatcaaaannnnnnnnnnnnnnnnnnnncagttacttaatacaatataaatagaagtccagtccagtgagtcctgtggtgggtcaaatgtggcaacagaaggcacaccttttgtcaccta

SEQ ID NO: 143858 - DNA, 1517 bp, Homo Sapiens
tttttatggtttagcaaaattgttataatttcttttaaataacccacagacacccatgacacttccaaatttacagagcaaaaaagtgatttgcagctggttcctccagggaattggccccgaaggctggctcagttcacctccaggacctcagtctccgggaggccgaacttggtcttgtgcttgtcgaagagcttcaccagggcctccatgtacatggtgtggtacaggtcgatgtcttgctgggttgggtgctccagcttggggatggtgatgggctctcccacaacagtggtgatgggcttggagtagggcaccagcccccaggtgtcggaggagaagaggcctcgaccatggaagatgcatggggcgaaaccaatgtatttctggaacttcttctggacccatcggccccaggagccctcctcgaagatcacctgcttgtacacttcattctctccaaaggagtagatgggaaccaggtcagctccatgacgcagggccagtttcacaaagcccttgcggttccgcagggtgactgcattcttgccaggcatggagctcagagactcagccgcacccccgaccacgatgatgatagcattgccacttccattctttgaaagcaaatagtctatggtgtccccggctgacaggggcagatccctccagacattcagggtactccctcaaccaacaggcattcggaagttgcctgccagtgtagccaggtaaggccgtatgcctgggaacttcttgctcacttctgtggcctctgtgctgaagttgcagaaaggcacccaggcccatgataccatgggggtggtatccaaagatatagttcctggtggtcagcaggttgtgtgtcttcaccagctggatgggaaagtagtctcgaaagtagcgccacacagcccagtttcggacccactgtgacctcctgccacctttcttgggtgtgttccagtcaaacaccagccaagtgaagtagagcacagcgatgagccagcaatcagtgcagaatatgtacatgaggatggcactgcaggccactcccagtacaaggaaggacaggacccactggagcactgagatgacctgtagctgcttttccaccttggacctattgagccaggtgacagagaagaggtcctggagggcggagaggatgctggatccagtgccccatctcccagacccctcgcgcgacagcgcaggtcctccgtgagagcgctggctccggtcagcctcggcctgacgctcgccgcgcaggaccccggagtaggcggctatgagggtcttcatggctgaagcccgcccagtcacggccccgcgggaagccgcttcaccccgcgcccctggcccatgccccggcccccggggccagggcttcgcgcagagcacaggggtcccgggacggcgtcgaggctgggcggctaggacacctggagctgcggccggcggccagtggtggcgcgagagaaacagcctagatcccgggaattccggaccggtcc

SEQ ID NO: 143859 - DNA, 466 bp, Homo Sapiens
tttttacagtggaatttcattttatttcagaactctaaagcaaataaaaaggtacaatcatttgaaggtaaaatatttcatgaacaccagctatcagagaggtagtttggtgttacactaaggaagataaaaaagaaaagatatgggctattgatgacatgatggagcaaccaaccacaacagccctgaatgggctaccttcgggctttatcaagaaagatgaaacaaatgaacaaaaactctgggggtgtttacgccatggtttttcttgcttctgttcctagcagattaaggtaatctctaaggttttaccatatagaagggtattaactgccatgtaggggatggaagatggactttttctaaaatcaacaaagtctttaaaactaccttagccactggtacctgaagccacaaagccttacacatggatttccacttcactacttgaggttccctgtactcc

SEQ ID NO: 143860 - DNA, 448 bp, Homo Sapiens
gtttattcccctttccaaatggcgactttcccctcctccctgcccgacccactcagcacgtatctgtcctcagccgagcacagcgtcctcacggtgtccatgtgcgccaccagctccttctccacggtcttcctctcggcgtcaatcacgtagattttccccttgggtgttccctgccccagccctcggctgcccacccagacctgcttcttcacccggatcatgcagttgatctcagagcagtcctcgaggggcaccctctgcgggggctggtccaggtccttcaggctccagatgtaaacctcgctgcgtcctgcacaggccgcccacagctgctcctcctcaggaaggagctggaaggccaggaaggaggtactggtgtctttgaagttctcctcaatcttcaattcttgatggagggatccattcattttcatgaccatgatgc

SEQ ID NO: 143861 - DNA, 661 bp, Homo Sapiens
  misc_feature (39)..(39): n is a, c, g, or t
gtgtttttttctttgaaacaaatgagcaaaataatcagntaccagtctctccatagaaaaagtagtttacacacaatagaaagtaccaactatagtgttttaacccatggtagatcataagaatgatagactctataacctatagtgataatttcatggaagcatttcacttggatggccagaacaagaagcatcagcatgaaggatcccatatagatgatcaggaaaaccaacgagatcatagttagagtgagaattccacgtatccaccagtttttccaccttgaagataaaccagatagagcttttttgagaatctcaggggttctatctgaggatggtggaatttccggaatatcagaatctgttctggaatccaaatctccatatctgtcatcaatatctgtttctttgtcgctggtgctctcggtttcgtggtcgccgccggccgcctttcccttgcggtgtggcggcgacaccgcttccctggggccggggcagcttccccggtgcctcagctccaacatcttccgctcccgcgctgccgtggcggcctcctcaagcaccccgaaacctgagctgcaagcagggttctgcaggcggggcgccccgccacctcgcagccgcgccctggagtcccgcggagccgcagccactaacg

SEQ ID NO: 143862 - DNA, 612 bp, Homo Sapiens
gattccgatgtcgaatcacagcagttacctttgcaatgttgccgaatcacagcagctctgttggagaaacgcttggtttccggatccagagccacagaaagaaatgtaggtgtgaagtattaggctgctgtcagggagaggatggcagatggaggcatcaagcacaaggaaaatgcacaacctgtgccctgttatacacacgttcatgtgcacccaagaacctatgactttcttccagttccttctaccaggtccccatcctgctgccagctctcaacatagcaggccataggacccagagaagaatcccagcgttgctcaaagtctaaccatcataaagacactgcctgtcttctaggaatgaccaggcacccagctcccactggactccaattttttttcctgccttatttagaattctttggcgggaagggtatgatgggttcccagagacaagaagcccaaccttctggcctgggctgtgctgatagtgctgagggagataggaatttgctgctaagatttttctttggggtggagtttcctctgtgaggggcttgcagctatccttcctgtgtatacaaatacagtattttccatggttctgcctgc

SEQ ID NO: 143863 - DNA, 830 bp, Homo Sapiens
  misc_feature (79)..(79): n is a, c, g, or t
  misc_feature (653)..(653): n is a, c, g, or t
  misc_feature (710)..(710): n is a, c, g, or t
  misc_feature (721)..(721): n is a, c, g, or t
tttgccaggacaaaactccatttcatttccctgcccccctcccaactcccccactgccttccacacacccctgaggggngcagaaaagcaagtgtcaatattattctccacctgagttcccttttgcatcaactaattaccagcccaattgccaataaattactagtataaaaagttgtgtgtgtacacaggcagatgtagatagatgtatgtatatatagtcatggagtccagccttttttccttgccctctttcttgtgggcagctccagacaaaaagcttctgtcccctgaagagtttatcgggtcatgggtgccacgtagttggcagggaagaggcccagcttgttgtgcaggcggccggtccaccaggatgggttggagctatccaggacctccaccacctccccgctgtggaaccccagctcgtcatcctccagggcctcaaagtcatacagcgcccgggcccaccgcactcgccctgccgcctggagctgcactgggtctgtgtgtctccgatgcatgagggccgcattcatttcactgcccaagccggtgccacaatgcccatcatttatgtcaaggctgcctcctcggcgttcctggtggaaatggtggtgctgcaaatatcgctgctgtgggggctgctgcanctgctggggcgctggggcatattgcggaggctgtggctggtgctggtgctgctgccngggaagggtcnggggggatccgacagcttcccgttcatcgaagggtcgatttcttctccacagccccactgaggtgggggcctccctgggacctccgtccaggctgtggccccgtggccc

SEQ ID NO: 143864 - DNA, 506 bp, Homo Sapiens
tttttttaaagagagcactaagttttatttctttgtttttcacagagcaggttaggaaatgctgtacaggttaggaagacctgtattaaagcaatcatttatatcccatagttaactggaaaataattttatacttactttttaaaaagtacttctttttatttattctacatcacttgttaaaaactacaaattgcattttcaaaaactccttcctgatcctatcataatcttttaatatttttaagggtgtcaattaaagattggacatcatcttacataaaatcagggcctaattttcatttcggaaccactacagcctgactttaaagaaaatggctactaaactgaacttttggttctatgcaaaattaaatctaagtaagactcaagttgctaagagcaactttactataacttttactatggctctggctctactgccctctgctggatgatccaccgaactacatcacacaaatcattcttgagagatcttcactgta

SEQ ID NO: 143865 - DNA, 1067 bp, Homo Sapiens
  misc_feature (328)..(344): n is a, c, g, or t
  misc_feature (687)..(687): n is a, c, g, or t
ggagggcaagtttgggcacgagtttctggagttcgaatttcggccggacggacgcatgaagagtaccaagcaagaggggagaggtaaagttccacaggagggagtcaggaagatcttcttagaggacggcactcttgagatgagtctcgaaatgagagacttggcctttgagagaaaaaaacagacttccagagcagtatgagcagaggatgaggtgaaactgctacccaagtagtgtgcaacagtgtgttttctgacagcgctatccttagagaatgttacattgatcttgcctacctgcaacaagaaagttcatttggatatatannnnnnnnnnnnnnnnngaatgcacgttttgtgctggacaacaagcaaatacaaaattttaaggaaagcttagatatgccaacaacagcaattacaaaaatgatgtgatgatcagaaaagaggcttatgtgcacaagagtgtaatggaagaactgaagagaattattgatgacagtgaaattacaaaagaagatgatgctttgtggcctccccctgatagggttggcccgacagaataaatgatgtttctcaggcttctgaagaactctgaaggcctaattttcctctgtaaaaagaaagtttggtttctggattggggtctttttcactcttggagaaattcctttcacaacccctggnaaggaagaaacctttaattttccttttgtatatcccctgaggattgtacttttgtatccccttcctttgaatagaagaaaatgtggagaaatctaacacatgctgacactctgtaggagtaacttaagtcttctgcttacagaagcattattttagacaaagcaaaggagcttgaacattgtaattggagatgagcacatatcttttagcacatcaaaaataggttctcttattgatgtaaatcagtcaaaggatccttgaaggaccttcgagtatttcactatccggtacaagacttgaaaactgttagttaacagtcttatcgcgattcacacttcaagaataaaccaattacatcgcatgtctcagcgcgaagatat
